United States Patent Application Publication US 2008/0066199 A1 - sequence listing, part 2

SEQ ID NO: 6331 - DNA, 488 bp, Glycine max
  Clone ID: jC-gmfl02220079b05a1
gctgagcagacggaggagaactcgactgaagctgcctctgcgacgccgtttcgattcagcctcagacatttccgttgcagtcatggtgcaagaaaatggcaagaggaagaaaccaaacattctggtgactggcacaccggggacaggaaagacaactgcgtgcactgctctagctgaagccacccagctctgccacatcaatgtcggagaattagtcaaagaaaagaacttgcatgatggatgggatgatgagcttgattgttaccttcttaatgaagacttggtttgtgatgaacttgaggatgttatggaagaggggggaaacattgtggactaccatggctgcgatttctttcctgagcgttggtttgattgcgtggttgtacttcaaactgataacaccattttgtatgaccgtttgagtaggacggggtacaaagattcaaagctttcgaacaatattgaatgagaaatcttccaagttctgc

SEQ ID NO: 6332 - DNA, 494 bp, Glycine max
  Clone ID: jC-gmfl02220079b05d1
cccttaactatttgaaactcattatcacaacttggtaaaagttacctttcaattgtcaaatttaaaacccatcacataaaatgccacaaatacatgccacaccaaaaatttgcaagagaattcaaccacactgcagatctgcttcaggtagcagttcatcgtgatactttcaccatactcaagcagaaaggtatatacaaagtactcatttttttgttaagaatgtgagggtaaagaccaatttctgacccaatctgtaagagttgccacatttctactaacgtcttctatattatcactcttcattgcaatcactttctcctccgagtaactttctttagcctcctcaagcagaacttggaagatttcacattcaatattgttcgaaagctttgaatctttgtaccccctcctactcaaacggtcatccaaatggtgttatcagtttgaagtacaaccacgcaatcaaaccaacgctcaggaaagaaatcaca

SEQ ID NO: 6333 - DNA, 522 bp, Glycine max
  unsure (1)..(522): unsure at all n locations
  Clone ID: jC-gmfl02220079b06a1
catgcttccaaccttgactgaacttcgacgcgctttggacatgcaatcagcacttgaatccctcgtagaagaagggaattactggaaggcatttcaagtcctatctgagtattagcaactctcggatcgtacgtcagagctttcagcaatacaagaaatgagtcgaggcgtaggaggtctggctgggaagaactttacagaagctggatgctctcttattgggagtatgccaagaatctcaaggaagacggctatataacagtaatagatgcatatgcattaataggggatactgccggtcttgctgaaaagatacagatgcttcttcatgcaagacgttatatcagaaacacactctgtcttaaaggctattgagcatgaggatgangagggactttcacaaaatatggggctcacttacagggatttatgcctacgaatacctgatttaaagttcaggcaatgcttatttcgaacattggctggcctatttgaccttacgtgtgcattccatgaaattat

SEQ ID NO: 6334 - DNA, 502 bp, Glycine max
  Clone ID: jC-gmfl02220079b06d1
agcgatcagtaacctgaattacgtgaggaaaaatattatgtgaaggtaaaattatagtacaataacagcttattttcaaaggactatctacaagacaccaacgcacacagatttggaaaatactccataattaatagaggatcaaacgccaagcaatatacactacctttacacggagccctgccaaaaaagtcaaaggcgaaaaggagcagaagattctatatgcctgacttgatacacaacaaatgacagttactcattcaattttttccagtatgtccaacctggttttcctcttccaacctttcatagtggcaacaaggttgaccagtccaacaatctggcttttactgtattccgggtgtgctcgtgcccagtgcacatattctgtctcgggaaggtagtaagccttgatgaaagtttcaaccatttgtagcttgggcttcacattcagcgccacaaaatgctgtaacccattgatcaaaacctgcagatctaatga

SEQ ID NO: 6335 - DNA, 514 bp, Glycine max
  Clone ID: jC-gmfl02220079b07a1
ctcgagccgattcggctcgagattcaaactgcgagaccaagaaaaatacaaaacttgatcgcaccacgaagcctcaaaactctctccccatcccacatctccatgcatattagatcgatgaaggtgaagtacctaacataaaagagccttggtaacagaaaaaacacatcatgagctcctgaaccaccttcatcgaccaggatcataagtttaaaacatggagatgcagcggatgagggagttgctgttactgtggtcatcatttgaaagcgagggaatgtcccttgtgggtggaaatcacactgccgccaggttttgcactcgctaaaacaatattccacaacccccttttctctctcttttctctctaattatctcttcttttgtattcctctctctttcttcttctacatatatataacaactctctttaaaatttcaacacttgggtcgtcatcatcgtcatcttctttgcgtctctttctcttttgaataccctacacttggctttgag

SEQ ID NO: 6336 - DNA, 556 bp, Glycine max
  Clone ID: jC-gmfl02220079b07d1
gcaaccagttcaatgaaaacaaaataagggggataaaatacaacagatgaatattcgtagcttcaacatctacgtgtcatagaatataaatgatcacaccataatctgaactttgaccataattcacccctcattgaacagtgaacacattcctcaactgttacaccatggtggtcattattttcacaatcaacaaatttcataaacatccacaaagcagtcacatgaaaaatatgattaaacttttaaaacacgccacaaaagaaaagaaaagaaatcaaagggacaatagagaaaattaaaactccttggctttttgctcctcaggggccacctccactcttgaatctctctaacactcttcaccctcaactccatgtcttcttcatctacaccactctctctgtgaaacacaaattcttaaaacaccctcttacatgtttctaccaaaataatcaatcaatcaatgcaaggttttaaaaaatggttcaccttcacgatttcgatcgccacacccaaggtttttaggtcaccacaatcatatcaattgaaatcg

SEQ ID NO: 6337 - DNA, 473 bp, Glycine max
  unsure (1)..(473): unsure at all n locations
  Clone ID: jC-gmfl02220079b08a1
caaaaatagtgtgccacaaacaaaaacaaaaacaatatgaagttcactataatcacaatatttttttctttatttctagtcgactttggttttgcacaacaaggggatcttgacatatcaagatttggaggaaaaccgaattcagatataagccaggctttcttaagtgcctggactcaagcatgtgcatcaacatctgctgtcaaaattgtgattccagctggcacatatcaaatgggtgcagttgatgtaaaaggtccttgcaaggctcctattgaggttcaagttgatggaacaattcaagcacctacaaacgtagttaaccttaagggggcagaccaatggttaaaggttcaacatgttaactctttcaccctgtcagggaaaggagtttttgatggtcaaggtccaactgcttggaaacaaaatgattgtacaacaaacaagaactgcaagatgctntgcatgaattt

SEQ ID NO: 6338 - DNA, 456 bp, Glycine max
  unsure (1)..(456): unsure at all n locations
  Clone ID: jC-gmfl02220079b08d1
aaataaagaagacgtcctttgttattgaatagttgcgttgaagtatttatttacaagggaatacaattactagctagacatctcctcttttaatggggatggcttgctaactcaagaaaggaaaaaaccataagaacattgttaaaaaaatgggcattattgtagttgctcattctaggctgcacaagtaggagcttttcctgttattacgggcttgacgttagcacatttagctgttgttgcagctccattgaatgtggagatcaacatcagtcatctctacacccttcacatggtgcaacactactacaaataaaaatcactccttctttagttcctgaagtgcccttaatggtttttgaaggaaaccttgcttatcttgatttttgacggattctttttggagcactgngttccatgggacatactcttggtctatgatcacaggttcgaaac

SEQ ID NO: 6339 - DNA, 562 bp, Glycine max
  unsure (1)..(562): unsure at all n locations
  Clone ID: jC-gmfl02220079b10a1
ctgcctcatgagtgtctccatcngactacatgatgcagcatanagtaagaccatgtccgaaggtttggtttataataacattgtgtggttttatattatttgttagaatttttttttcaatttgttgtattttttttttttattggggtctcttttttctcggggtaccccttgtctccgtcgtcttcgtcgatcctctacctctccttcaaccaggaccaggcctgcttcgccgacgtcgccgacaacggcttccgcatctacaactgcgaccccttccgcgagctcttccggcgcgagttcgacggcggcggtatcggccacgtggagatgctcttccgctgcaacatcctcgccctcgtcggcggcggtcctaaccctcagtacccgcccaacacggtcatgatctgggacgaccaccagggccgctgcatcggcgagctctcattccgcgccgccgtgcgcggtgttcgcctccgccgcgaccgcatcatcgtcgtcgctgaacagaagatcttggtctacaacttcgcggacctcaagctcgagccgcatactgaga

SEQ ID NO: 6340 - DNA, 458 bp, Glycine max
  Clone ID: jC-gmfl02220079b10d1
agcaaagctctcaatatttattattaaaaaaattagaaaactatataattacaaatattacaatggaagaagcaacgaggtcgaccctgagttagtaataataataaaatgaggtcagtgttacttcagtatacatatctgcataacctaactaagctgaaatgtcaagcgctcaggatttcttcacatcgcgtctcacaaggctgtttctggttctggctttaaaaagttatgatattccagctgagtcatctcccctccatgtactggatcaaattggcatctatagaagctgcataaaacaaatcaacagcaattcacaacatcatataacacaagcgtccaccttttgggatgcaaaaaggccctctaaacaacaagtataccaaaaaaaatcaagtcatagatatatggtaagatatttgtcaaaagagccatgaaaccaatgcacacacatg

SEQ ID NO: 6341 - DNA, 595 bp, Glycine max
  unsure (1)..(595): unsure at all n locations
  Clone ID: jC-gmfl02220079b11a1
tgatatcgcccaagagcatgcagcatangagactggaggtcgcataaagnanaccaagtnnnnggnttgnggngggaggccggggagggggnnggngngggggggganggtttgggggttggggtgtttttatggattggaggggggacccattcacagggggatacagaaacttcaattcccaaacttcttcctccactggccaatcactggacgccacggggcaggcaaagatccgttgggtgcaaaagaattacatgatttacaattattgcactgatatcagacgtttccctcaaggccttcctccagaatgctccattgcatgagaatatttaattcaatgttgcatatcattataaaatgatcctcatgaacgtgacacacatgtgttgcctattacgttaatttactttcttgtgtaaattaatgcaactaaaactgttattattgttggtttgtgctttgttgagcactactccattgtttgtggcgaaagataattatagcgtgcaaaattatattcatggcagtgtatatgtgctgaaattgtaaagtattttcattaataaaattggtggagttttattattcg

SEQ ID NO: 6342 - DNA, 438 bp, Glycine max
  Clone ID: jC-gmfl02220079b11d1
cgaataataaaactccaacaattttattaatgaaaatactttacaatttcagcacatatacactgccatgaatataattttgcacgctataattatctttcgccacaaacaatggagtagtgctcaacaaagcacaaaccaacaataataacagttttagttgcattaatttacacaagaaagtaaattaacgtaataggcaacacatgtgtgtcacgttcatgaggatcattttataatgatatgcaacattgaattaaatattctcatgcaatggagcattctggaggaaggccttgagggaaacgtctgatatcagtgcaataattgtaaatcatgtaattcttttgcacccaacggatctttgcctgccccgtggcgtccagtgattggccagtggaggaagaaagtttgggaattgaagtttctgtatgaggc

SEQ ID NO: 6343 - DNA, 582 bp, Glycine max
  Clone ID: jC-gmfl02220079b12a1
caaaatgactcaagcccagattcaaccagttaaacttggaacccaaggctttgaggtttgaaaattgggattcggatgtatgggccttactggagcgtacaatgaccctctccaagaacaggatggcatatctgttatcaagtatgcgttcagtaagggaatcacattttttgatactgcggatgtttatggagccaatgctaatgaacttttggctggaaaggctttgaagcagctgcccagagaaaagattcagatagccacaaaatttggtattgcttcacgaggttttcctgatatgaagatcaagggttcgcctgaatatgtgcgatcatgctgtgaagctagcttgaagcgtcttgatgttgaatacattgatctctattatcagcacagagtggacacatctgtacctatagaggaaacagtgggtgaacttaagaaattggtcgaagagggtaaagtcaaatatattggattatctgaagccagcccagatacaataaggagagcacacgcaattcatcccatcacagctgtgcaaatagagtggtctctgtggactcgtgactttgaagaaga

SEQ ID NO: 6344 - DNA, 382 bp, Glycine max
  Clone ID: jC-gmfl02220079b12d1
ttttttttttttttttttttttttttttttttttttttttttttttttttttttttgtttttttttttttttttttttttttttttttttttttttttttttttttttggggcccccccaaaaaaaaaggagggccttaaaaaggggcaaaaaaaaagggggggaaaaaaaaaaaaaaaacgggaaaaaaaaaaaaattaaacccccaaaaatttagggggggccaaaaaaaaaagggggccccattggggatttaaaaaagcccccggaaaaaagccttgggcaccctgggacccccaaaaaaaagaaaaccgggggaaaccccaaaaaaaagggggggggggggccccaagggggaaaatttggaaactggggggggggg

SEQ ID NO: 6345 - DNA, 526 bp, Glycine max
  Clone ID: jC-gmfl02220079c01a1
atccctctaatcactctagctgttgcaaatttctactatttttcaatggcttctgcagatgttgagttccgttgctttgctggtgggcttgcttgggtcaccggcaacgatgccctcgagaaagccttttcaatctacggcgacatcgttgaatcgaaggtccgtttgatgcaggcaccgctactgatctcacacgattcggattcagattttttctcgatcctcttctgatctgtgatctctgatctatttgcgttacttgatctatgatatgatacttgcgttactatatgattcttttattactcacgccaataggtacgttcatcttcttcctttcaccaaaggcgaagatcgatcggtttctattcggctctgtcgttagttttcgtgttatgtcttttgctttggatctgatgcatcgcgtttttgtgtgcaggttatcaacgaccgtgagactggaaggtccagaggattcggatttgtgaccttcgtctcagagcagtcaatgaaagatgcgatcgca

SEQ ID NO: 6346 - DNA, 397 bp, Glycine max
  Clone ID: jC-gmfl02220079c01d1
tttgttctttttttttttttttttttttttttttttctttttttttttttcttggtatttgtttttttattttctttttttctttttcattttttttaaaggggccccaaaaaaactcccccccccacaccaaccacccccaagaaacccaccaaaaacccaaggaccaaaccaaaacccaaagaaacccaaaaaaaaccccccccccatccccaaaaaaaaacccccccccacacaccccaaaaaaaaggggaaccccccacaaaccccgaaaatacggggacccctccacaatgcccagagatcccaccggccccccccccacaccccccaagaaagaagagaaacccccccaaccccacgccccccccgccgtatccaccgccccactccccac

SEQ ID NO: 6347 - DNA, 574 bp, Glycine max
  unsure (1)..(574): unsure at all n locations
  Clone ID: jC-gmfl02220079c02a1
cttccttcctatctctcactaatctaatggaatccgcagcactgtcgcgcataggcctggcgggcctggcggtgatgggccaaaacctagccctaaacatcgcagaaaaggggttcccgatctccgtgtacaaccgcacggcctccaaagtggaccagaccgtagatcgtgcccgcaacgagggctccctccctctcacgggccaatacacccctcgcgacttcgttctctccctccagcgccccagatccgtcatcatcctcgtcaaggccggctccccagtcgaccacaccatcgccgccctctgcgaccacctggaccccggcgactgcatcatcgacggcggcaacgagtggtacgagaacaccgagcgccgcatgaacctcgtcgccgacaaaggcctactctacctcggcatgggcgtctccggcggcgaagacggcgcacgccacggtccctccctcatgcccggtgggtcccaccatgcctactgcaacgtgcaggacatnctccacaaaatcgacgnccaggtcgaggacgggccctgcgttacctacatcggcgagggaggctc

SEQ ID NO: 6348 - DNA, 361 bp, Glycine max
  Clone ID: jC-gmfl02220079c02d1
ggaaaccaaaagaaatgcctttggtttataaaaaataaaaacaggtttaggaagaaaaaaaaagcgggtattttccaaccaaaaaacctcaaagaaacaaaaaatttcaaactaaaagccggacctgaatgcacgaccttttaacaaaccaccaaaacccaaaatcaaacaattggggggcccaaattcaggcccaatattggcaggggagttcaccccctcgggttgaaaaaccccaggggggacaaaccttttataagaaagggccccaaaaaaggccctttgagcctggaaaaaggtttcccgaaagtttgccccccgaaagggattaaaaaaaccaaaaaagggccaaatttcgggg

SEQ ID NO: 6349 - DNA, 310 bp, Glycine max
  Clone ID: jC-gmfl02220079c03a1
gtaacattacgctagatggaaagggcggatgaccatccttgtatgtaactcgcggatgggatgaaaagtgtcgaagtcaaagctttgcttgagcgccaaaatttgtaatataaggatttatgtattcttgataagctggggttaaagaacatgtcaaaatggagtaactgaagcaacccctaaaagattcacttctcgttttcctttttaaggaacatttgtgggttacagcaaaatatgtagataaacgtgtctgacatcattacatttttcgaatttgattcgtgtattctaatgtttccatcctttg

SEQ ID NO: 6350 - DNA, 310 bp, Glycine max
  Clone ID: jC-gmfl02220079c03d1
caaaggatggaaactttagaatacacgaatcaaattcgaaaaatgtaatgatgtcagacacgtttatctacatattttgctgtaacccacaaatgttccttaaaaaggaaaacgagaagtgaatcttttaggggttgcttcagttactccattttgacatgttctttaaccccagcttatcaagaatacataaatccttatattacaaattttggcgctcaagcaaagctttgacttcgacacttttcatcccatccgcgagttacatacaaggatggtcatccgccctttccatctagcgtaatgttac

SEQ ID NO: 6351 - DNA, 545 bp, Glycine max
  Clone ID: jC-gmfl02220079c04a1
tgttgaacaagggtttctctgtctgcttcttcactttctctcgtttcaatcgaaaccaaaacaaaaacatgggcagaaaattcttcgtcggtggcaactggaaatgcaatgggaccactgaggaggtaaagaagattgttactactttgaatgaggctaaagtccctggagaagatgtcgcagaagttgttgtgagccctccttttgtgttccttcctgttgcaaaaagtttgctgcgccctgatttccatgtttcggcacaaaactgttgggttcgcaaaggtggcgcttataccggtgaggttagtgctgaaatgcttgttaatttgggaattccttgggttattattggtcactctgaacggaggctgcttttaaatgaatcaaacgagtttgtgggagataaagctgcctatgcactttaacaaggtctaaaagttattgcatgcattggggagactctcgacagcgtgaagctggtacacaacggctggtgtttctgagcaaacataagcaattgcagctaaaatatcaaattgggacaa

SEQ ID NO: 6352 - DNA, 473 bp, Glycine max
  Clone ID: jC-gmfl02220079c04d1
aagtacagtcaactaggcgttcaacattatttacccaccaaatgttatggtagttacactatttttgcattcagaaatttaatcaaaatccaattgatcgcctatggatgagatctcaaaggaaagcgtgtttattcagtactaaacagagttcaaaacattggccacaaagcacagatccaaaactcaaaaacagcaatttccgaagcagcttgaaaggcagcattatatcagttcctaactacgaatttcaattcttcttcacagtggcagcatttatgatgttcacgaactccggcttcagggaggcaccaccaaccaaaaatccatcaacatcgggctgtgcggccaattctttgcagtttcctccatttacagaaccttcatagataattcttacagatgcagcaacttcggcactcacattgtcatgaacccatttgctcaaatcagcatggacctcttgagcctga

SEQ ID NO: 6353 - DNA, 559 bp, Glycine max
  unsure (1)..(559): unsure at all n locations
  Clone ID: jC-gmfl02220079c05a1
ggaggcgattaggaagagtaggattcttatatttggaggaactggttacatagggaagtatatggtgaaggcaagcgtcacgttaggccatccaacttttgtctacactcgccctcttgatgcacaaactccttcctctaaggcacagctttgcaaggagttcaactctatgggggtcacacttgtccatggagaacttgagcatgaccagattctggcagtgattaaacaagtagacattgcgatatgttctcttccataccctcaagtgatggagcaactcaaaattatagatgctatcaaagttgctggtaatataaagagattccttccatcagattttggggtggaagaagatagagtaaaccctcttcctccgttccaagctttcctcgataagaaaagaaaaattagaagggaaattgaagcagctgggatcccttatacctttgtctctgcaaactgttttggtgcttactntgtcaattatntgcttcgtccttacgaaattactgtctatggcaactgtgatacataagctgtgctaaactatgaagaa

SEQ ID NO: 6354 - DNA, 493 bp, Glycine max
  Clone ID: jC-gmfl02220079c05d1
atcccaaacatttatgccttttcatgttattcaacggtaatcgggaggatcacctactttattacaatttataaccaacaagtgcagggtaaaatgtcttcactcaaaaagcagcagaggcaggggctggaggatcaacaagaaatatatcaagaagttcatcaatggatgtgtagttataatcaggatatagctgtgaagcttcaaggtcatcttctcctatctcgaacctcacgaggtcccctctaacaaatacactatgaaggatagaaacgggaatattgtgtgagggggtaagggtctgtgataaggttgacaatctcttcctcagcaacaaaatccttgcgaaaattttgaccacttttttactcccacaatgctatcaactcattttgtgatatgatattcttcgagggtcggtagataacaacacgattgtatgttcttgggatcattcgctactttaatagtgtacatggcgatatcttctcat

SEQ ID NO: 6355 - DNA, 380 bp, Glycine max
  unsure (1)..(380): unsure at all n locations
  Clone ID: jC-gmfl02220079c06a1
atgagaacaactaatatgatatcaaatcaccctcatcttgagagagagagagagtgaagtggatgatggagagagtggacgagacagaggtggttggtgcgagtgtgctgcacggtggcatgatcattactatggtcgtggagcctcgagtgtatagggtcgggggcatcgctggtgaacatgatggattcatagcaatgcgtcaatgtgctgatatccttgcagtgcagtatgctgtctcctactggattgatgatctgctcgggcatatgttactgacaggatttattgtcacctagcgttcatagctcccagcanacggccagaagcatagctgaccacgtggattcaatgtcctggatgcttgagcgcatgttgtc

SEQ ID NO: 6356 - DNA, 521 bp, Glycine max
  Clone ID: jC-gmfl02220079c06d1
gaagataaaaaaagataattgaaaagctaaataatattcaaagatccaatggccagatcatgattgcaccgtcatacgcttagcatcaaacagttgacgcctcttggaaacaagttcaatggatacaagcgcttatcatagacaatatactgataaacaacagttaaattatgttcattctggttggtaattttatgcctgccctcttcagaagttcaactgaagcctgttttgccttcaaaataacttcttcctcgtccacatatataatcttcttgttcttcattatccataatccattgcacatgacggaaaccacattttctgatcgcatacaatacactaagctagaaatgcagtcatgaacaggaaccatagaccaagacgaaggatccactacaacaatgtcagcctttttcccaacctcaagagaacctagttcatcatcccataatactgactttgcaccattgacagtaaccatcctaagaatagtttcagcaggcaatgcaagtggatct

SEQ ID NO: 6357 - DNA, 482 bp, Glycine max
  Clone ID: jC-gmfl02220079c07a1
ggttgggacccgaatacgaagtcgacgctgacacagatccctctgctggggacgaaggctggtccacgagacggggcggcatggacgcagaggctgaaggaagagtcaaggctctgatagcgtacactccaatgatcatgtacaacgacatcgattggctccgcatattctgcggcaatccggaaggcactcgctggaccggtaaatgctggcacgtctacaacctgctcaagtactaattggacctacaattcgatgtacccgtcacttaccgcttgactgacccataacttgaactacgtgaatgggatggcataacccaaaagatgtatacgggtagaaagatctgcttgactgtgcacttcaaggctctctgggccaaaaattgccccagatttgggagtgcacatgcactttgcctaggccttgcacacgggcttgcatcagaggttgccatactagtggattctggcatgatcaag

SEQ ID NO: 6358 - DNA, 443 bp, Glycine max
  Clone ID: jC-gmfl02220079c07d1
agatcaaaatcgttattagccatgttgcatgtatattaatttgccagaatatgtcaatatctgcggatacacaaggaagatcctgtaaacttgtggtcagacagctcatttatttcctttgaccaatcaggcaacaaaattctacttttacagtttcagtgagacatatgataactaagattcagttgatgtggttgcggtatcatctttgtgcttgatcataccagaatccacgaggatgggaacctctgctgcaagccacggtgcaaggcctaggcaaagtgcatgtgcaattccaaatctggggcaatttttggcccagagaggcttgaagtgcacagtcaagcaagatctttccacccctatacatcttttggggttttgccatccaattgaggggagttcgagttcggggccgtggaaggttaagtgacggggacatc

SEQ ID NO: 6359 - DNA, 455 bp, Glycine max
  Clone ID: jC-gmfl02220079c08a1
agcagttctgttcattggagcgcccctgcgtcgcgaacgaatgaacgaagaacacagaacgacgcatatccaagactgaaagtttctagattcgtcacctgcgagtaagtttcttcaatccatacttcttagttcttattctcaaatttcttcctcaatcaaactccttaccgtttgaaaatcccctgttttattttcttttaaaaatagggtttaacagtgtctcataactttcattccttaatttgaacctgtttgagctcaaatacctctgattttgctaacgccagattcaatatgccccacaaattcatggcattcttgtatatcgtattttaatccatttcagataatttgcgtgcctctgggttctttcgggacttatgaggtggagacatattttgtgataaccctatacccaatttggagcaatggtctgaaaaggtttgggattg

SEQ ID NO: 6360 - DNA, 548 bp, Glycine max
  unsure (1)..(548): unsure at all n locations
  Clone ID: jC-gmfl02220079c08d1
gataatggaaaaactcaaaattcgattaaaatatacaaaatacaaattggcccaaaagtaaatagtctaatcgctgtttagcaatttgaatgatgcatgagacatatatggttgcagaaacatcctgaacagtaaccaaacctaatccaagaaagtaaagattggaagccttactagccttggctaccaaagctatcacgggtatcatgctgccacgccccataactctgaccatcatgcccaagctccccagaatagtagttctgtttcccatatgacatgtgggatggagtggaggtgngcggtgggaaggggcatgggctggtggtgccaatatacctttgccctcccttggatccacaaccataccaccctgtgcttgttcaaaaggcacaccacccattcctgaattccatggctggggattatttcctggaaaatttgggccatttgggacaccttgcgggaaacccactaatgaactctggtccccacctatatcagaacctgagtcctgcctaggcatatcatagggagcaccgtaaaat

SEQ ID NO: 6361 - DNA, 474 bp, Glycine max
  Clone ID: jC-gmfl02220079c09a1
agcagctattatactctctagagtaattgcggaatctgctagaatcttctaataatggcgaacgacgttgagcaggtcacagagcatggtgaatactccgcgaaggactaccatgaccctcctacggcaccgctgatcgacccagatgagctcacaaagtggcccttgtacagagccgccatagctgagttcatagcaacactcctttttctttacatcaccgcgttgaccattattggctacaagagacagagtgacaccaaaatccccggtgacaccgaatgtgacggcgtaggcattttgggcatcgcttgggccttcggtggcatgatcttcatccttgcttactgcactgccggaatctctgggggacacatcaaccctgcggtgacattcgggttgttccttggacgcatggtgtctttggtgacggcgttggtgtacatgatagctcagtgtgccggtgcaatctgc

SEQ ID NO: 6362 - DNA, 416 bp, Glycine max
  Clone ID: jC-gmfl02220079c09d1
gtccatatgttaatttttttaattggctaaagaccccccccattgaaagaaaaaggcacccatggttgcaaaaacattgggaaaaaaaaccaaaccaaaaccaagggggtaaaaattgcccccctaactaaaaacggttaccaaagcaaaaacaggaaccacgcggatacggcttataccccaaaccatcgggcaaaagctaaacccaaaagaaggggtccttgcaataagacatgaccgaaacacgtggatgtggcggggggaaacacaaccaaatgaggagaaattaagcctgggaaaaacttggattcacatccataaaaaaaagggcttgccaaaagggacccaaaactttgatgggaaaacccgctaaaaataattgacgggaaaatgcggcccccgggggtcacaaaaag

SEQ ID NO: 6363 - DNA, 599 bp, Glycine max
  unsure (1)..(599): unsure at all n locations
  Clone ID: jC-gmfl02220079c10a1
cgcctctgaagcagattgacatagatgcagcattaggaaaaccattcngagttggggagaagtacggggagggggaagaaaggtgttgttttatttttttgataattacttacaaagatcgatttgaggggtggtgagatggattgcgaacaagatccttcaccttcattgatgagtgtgttgaaggtgtactgagattgactaaatcagacttccgggagccagtgaatattggaagtgatgaaatggtcagtatgaatgagatggcagagattgttcttagctttgaggataagaatataccaatataccatattcctggcccagaaggtgttcggtgccgtaattcagacaatacattaatcaaagagaaacttggctgggctccaactatgaagttgaaggatgggctgagaattacatactttaggatcaaagagcagcttgagaaagagaaggcagaaggtgttgatttatcaggctatggatcatccaaagtggttcagactcaagccccagttcaacttggctcgctacgtgctgcagatggcaaagaatcaagctgctagtgcaagggatgttcggcagttgcagcagat

SEQ ID NO: 6364 - DNA, 496 bp, Glycine max
  Clone ID: jC-gmfl02220079c10d1
caccttaagcagcagttattattattacctcaaacaaaacaagaacataacaccatccgttacaaatacatgaacaagttccaaaactaacttcaatagctaatctgtaaccatagatctctacaaaatagcaacataaaagcctgcccttcacttggaaatgcattgttcactcttattctttgccatctgctgcaactgccgaacatcccttgcactagcagctttattctttgccatctgcagcacgtagcgagccaagttgaactggggcttgagtctgaaccactttggatgatccatagcctgataaatcaacaccttctgccttctctttctcaagctgctctttgatccaaaagtatgtaattctcagcccatccttcaacttcatagttggagcccagccaagtttctctttgattaatgtattgtctgaattacggccccgaacaccttctgggccaggaatatggtatattggtatattcttatc

SEQ ID NO: 6365 - DNA, 644 bp, Glycine max
  unsure (1)..(644): unsure at all n locations
  Clone ID: jC-gmfl02220079c11a1
tgtncaagatgctggtangacatagaaaccacattaggaaaaccaaancnnanattaanaaaaanantcgagaacgagagaatnaacattgacgacgatgtgctcgacgaagctttcaatttcttctaccaggacgcatccacgaagctgaacatcgaaggcacccaaaggtcccaggatctgaaaaagggtgttgattgcgttcggctgaatgttcaatctgttttggacaaacaacttgctgcttgggagagttacatcctccgtcactgttttgctcttccccaaggttttcgtatgccaaacaccaacttccaggatgaatcaaatgagaatgccctagatccaggtgctccttttgatccagatatagatgcccagttagattcattgagagaaaaactaattgaggtggggaaggagtctgaaatgcttaatcaagaaatgcaagcattagaaagaaagtctgctgtcaatgtggctggacatatcaatgaagctgtacaattatatgagcaaaattctatgcatgaggtgtttcacgagattgtgacgaccgactcagaacttggagcaaagatggcaaagctaaactctagcatgattgtagagacttgaccaacataaactannaggatttacag

SEQ ID NO: 6366 - DNA, 333 bp, Glycine max
  Clone ID: jC-gmfl02220079c11d1
aaccactgaatatttttagtatacactataaatcacacacattcagtttcgtaattaaatttggagggaattctaagattcatgaaattgcccacaattttttcagctataggggcaaattccaacgaattagcacaagaaaagactagagtgtacaacaagggttgaaacaggcaaagtccagtccaactagattggtgaaaaagacaagttcacatacttttcataacacttacaaattcttcaacatcggctaacttcatgtttgacaggcctttagcaggatttatagcagatagatccatttctgtgctggaaatccttttagttttt

SEQ ID NO: 6367 - DNA, 610 bp, Glycine max
  Clone ID: jC-gmfl02220079c12a1
gtaactttttgattcctagattctctaaaattcgaaattctaatttcgttaggggaaagagattgtttgtgtgtgagtgagtatggctggaaaaggcgagggtcctgctatcggaatcgatttgggaacgacgtactcttgcgtcggcgtgtggcaacacgatcgtgttgaaatcatagccaacgatcagggtaacagaactaccccatcctacgtggctttcaccgacacagaacggttgatcggcgatgcggcgaagaaccaggtcgctatgaacccaaccaacaccgtttttgatgctaagcgtttgattggaaggcgtttttccgatgcatcagtacaaggtgacatgaaattgtggccgttcaaggtgattcctggccctgctgagaaacctatgattgtggtgaactacaagggggaggagaaacagtttttcgcggaagagatatcctccatggttcttatgaagatgaaggagattgcggatgcgtatctaggttccaccataaagaatgcggctgtcactgtgccttgttacttcaacgactcacaacgtctagccacccaaggacgctggtgtcaattctgggctcaacgtgatgcgaat

SEQ ID NO: 6368 - DNA, 533 bp, Glycine max
  Clone ID: jC-gmfl02220079c12d1
aaaaattaaaaacatatttttatcttatttttaaccatagaggtgcactcacccaaagcactattttgttctgtgtttttaaagtgatatagtatattctacttaaacacggaaccaaaaagtcttacaaaattctatagcttatgcatacattgtactttcacagtacaggtaacacaggaatgggcatcatttcatgtcacccaccaaacttcacaatttttccccaattcccatatcaccctgacaccctcaattttgactacatgacagtgcaggcatttgggttctcatcgctgaacatctggggagggtaggaatggaaatacgcagggtgtgcaggatatgcatacacctccatgccataccttggtgggttatagaagtattcattaatcttaacctctggaacaaccttgttggtgtcttcagtagttgctggtgtttgatgcttcctctactgtggcttcttcttacttcttctctgtggtttcttctccttcacaccactcttcttctcttcctctttcttc

SEQ ID NO: 6369 - DNA, 455 bp, Glycine max
  Clone ID: jC-gmfl02220079d01a1
ggcttgagcggcgcaacgggctgagcctatgcttgagctatagagaggtctgacggtgcggctgatatgtcgagacctcaccatggtatcgtgagctgcaagtgtgccactctcgggatacacaacttgcgatgccgtatgacccgagatgtgcgttacgggtcccaactgctcgctaacctgcacgccactgatggcggggcgcgagtgagaccggagaacggtctgcgcgaggaggatccttgcgtaatgcgtgggctgcagcttacctggcgtcatcaacttaccctgtgaatggatagagctcaagggcgccacctatacccagccgtggtggtccggaccaagccctcatgtgtcagtcggcgcgacagtggctgtaataccctgggcgcgtgccctgacggtgccgtacgctgtgctgatcttggcggcatgtcgtatatattgaaatg

SEQ ID NO: 6370 - DNA, 336 bp, Glycine max
  Clone ID: jC-gmfl02220079d01d1
gaatataatttaatttaattttaaatacaatgatatataatattagatattatatgatgatacaatataaatacgtgcggagctcttgaccacggaggacattacggctggctgagcctgactacgcgtgctctgcgtatgcagacagaagcgattactgttcacgagaggccacggcgactgcatatgaactgctaactgaaccgaaagtcgcatacacattggtcgtgaagtggagcccagaggacattgcggtgtacacacgcatggcgcttgcagacgggacacctcacttcctctagaccgactaacccaagtgcaagtgccagctacatg

SEQ ID NO: 6371 - DNA, 487 bp, Glycine max
  Clone ID: jC-gmfl02220079d02a1
agagaacaaagcacttagtgctattcaataattacgaaaaaccaacagcgagtgttgtttttgtttggtccaggctggaccagggaatgaatagagatgagaggctttcggttgaagagaactgagttaagcggcgaatccattcgcagaatcggcggcagaaattgccaccggtagcacgtctaagacgggtgaaccaaacacaatattgcatccaccacttctcttttcaatccccaactcaaatctgtgaagaaaatctcaatttctaaattgcaattcttagcactactgctagtagtagtaaaaaaaaacaattagaaagtagtagagcgctggtttttctttttttcggttgttttactttgaagatgggtgagaagagcaacgttggcggcgacgcgattaacacgacactgcttcacgggaagtacgagctgggccggctgttatgccacggaaccttcgcgaaggtgtaccacgcgcg

SEQ ID NO: 6372 - DNA, 486 bp, Glycine max
  unsure (1)..(486): unsure at all n locations
  Clone ID: jC-gmfl02220079d02d1
gttactgacccatgagccacaccaatgaattggcaaacatattgacaatcacgccgacatagcaacaacatcacccacgagcacaacaacacgcagcacatgtacctgaatcatcatcgagaacaactcctcgatggccatttcggtgcattactgcattcgccttttcaacaattcccctttctgggtaaaagacgacacaccccaaagggcaaaacatagcatagaagcaagcaaataactaaaatatttcagtcctgaaacaagaattaacaaaaacaactacaaaggaacgacaattggcatgggagtcttggttgtgcttcaagcgagtgtaggattctctgcaggagaagtcctccacacgatatctttaagagctggacgaagcttcttgctacaaaactggttatacctcaaggtgtcaccgctggccttcttaacctncaccgccaaaaacgacgggcgtacggcggacaagttcgc

SEQ ID NO: 6373 - DNA, 522 bp, Glycine max
  Clone ID: jC-gmfl02220079d03a1
ggtgtgacatcctctcctgagctgaaagaagaactaatctcacttgcaatttaggccaggatcacatcatgcaggaagcttgttatgcttagtgttgcacagtagtttattttaggtccttaacaggtcttcatcatccagcgacttggttcctttttaccggagtgtgcagtcatttaactctcatttttgcaggttccttcaacaggaaatctgttctttttggcatccattgccaccttttaaatggctgcatatctgagaacatagctaccgggttctggagttaggaatctttgttactggtgttggcacctgatgtttttagctcggctttgcatcggttttgccaccatgtgtgtcttagttttctaagtttttacagctacctgtaccactgtatcagtctttgtttaccaaatgtgtcatgtggttgaactatgttcttcacatgatgtctgggtatcagctttactcgaagggcaggttagaagtttcagtgtcatgtgcttgtattagggt

SEQ ID NO: 6374 - DNA, 535 bp, Glycine max
  Clone ID: jC-gmfl02220079d03d1
ggaatgagactgaaaattttatttatttcattacatttcataacatacagaacaaagggcaggtatgaacatcattagacaatataggaggagcagttgccaagttcaaaaaaatgaagccttaaaaaactaggacttggtaaaaataacaacccttcccaaagggacaaaaaggttgtggttatggcagacctatatagcttgctgccacagccaagcccctaaaaacaagacttcataaacaccgaccttgacaactgcaaccaccctaataacagcacatgacactgaaacttctaacctgcccttcgagtaaaactgatacccaaacatcatgtgaagaacatagttcaaccacatgacacatttggtaaacaaagactgatacagtggtacaggtagctgtaaaaacttagaaaactaagacacacatggtggcaaaaccgatgcaaagccgagctaaaaacatcaggtgccaacaccagtaacaaagattcctaacttcagaacccggtagctatgttctcagatatgc

SEQ ID NO: 6375 - DNA, 576 bp, Glycine max
  Clone ID: jC-gmfl02220079d04a1
gcagtttgaggacaagccagattattcgtatttaaagagacttttccgagacctatttattcgagaagggtaccagtttgattacatttttgactggactatgttaaagtatccacagatcagtggcagctccagagggaggcatgtcactggcaaggcagctatgcatgcaggtccacatgtacaaaaagcagaaaagatctcagttgggaaagaaattcgagagaaattttctggtgcagttgaagtgttctcctggaggaaccctgcaaatgctagtcctcgtggtgatcacaccaaacatagaagttttgaggatgcaccagtgcaaaaggatttgcactatgcgcaacacaattccactcgatatggcagcagttcaagaagagccatgatctcatcgaacaggccaatatcctcaggtgaccatactggcaggcaaaccataactgggagccgtccatctggtgctcacagagttcaaccagtgtatgacacccaacaagcaacttatacgcatggtggctctataagaggccgtgatgatcctctgcggaactttgagctcctcatatc

SEQ ID NO: 6376 - DNA, 461 bp, Glycine max
  Clone ID: jC-gmfl02220079d04d1
agcttgtaaataaattccattcttaagggcagttttaatatgtaacatgcaggcagcgttggacctcattgttaagaaacaagaacatggtgttgtatcatggagcgtactacaacttaggtctcatctagtacagtaattaaatattaaaagaatttcagttgaattctcttcggcacgttttaagaacacgctacagtggctgagaaacctggtgaaacaacaattctgggggcagaaaaaagtccacctttgtccaaaactgatatcaggagatcatgccattatgacctcaactcttgggtttctttccataatgcttgagactattcttgaataaagggtgatcttgcatctagggagtgtcataattcagaatattacaacaaaaagacacaacctttacttaattacttcctgatattgaggagctcaaagttccgcagaggatcatcacgggc

SEQ ID NO: 6377 - DNA, 558 bp, Glycine max
  Clone ID: jC-gmfl02220079d05a1
ggactaaaaataatccttgtcttattggagaacctggtgttgggaagacagcaattgctgaaggtctcgctcagcggattgcaaatggtgatgtacctgaaaccatagagggaaaaaaggtcataaccctcgacatgggtctgctcgttgctggaactaaataccgtggtgagtttgaggagaggttgaagaaactgatggaagagatcaaacacagtgacgagataatacttttcatcgatgaagtgcacactttgattggagcaggagcagcagaaggggcaattgatgctgctaacatactaaagccagctcttgcaagaggtgaactacagtgtattggagccacaacattagacgagtacaggaagcacattgaaaaagatcctgctttggagagacgattccagccagttaaagtgccagagccaactgtagatgaaaccatacaaatactgaaaggacttatagagcggtatgaaattcaccacaagctccgctatactgatgatgctctcgtagctgctgcacagctggtctaccagtatatcagtgatc

SEQ ID NO: 6378 - DNA, 400 bp, Glycine max
  Clone ID: jC-gmfl02220079d05d1
ccattaaaaactttaggtccattgacaagtaaaacatactatgactatggtttaaacaaattaagtccatagtattagcaaattaaccgcattatccaggaagcgtttttggcaaggattcgggggctccgctggtaccattgagcacaatcacattaccatcagaatcaacatccactataacaaagtcgccctccttgatctttttggcaagcattttctaagccatgctgtcctccaaaagtcgcattatggcttttcttaaaggtctagctccataactagggttataaccttcctccaccactttggccctgaatctttctggcacttgaagttcaatatctttcaccttcagtctatcaaacacctttttgagcattatgtaagcaatttcctt

SEQ ID NO: 6379 - DNA, 527 bp, Glycine max
  Clone ID: jC-gmfl02220079d06a1
cgccgaacaaggcattgtcgtcgatgatgaaaatgaaattggcgaaaacattactgcttctcctttgtgtgaaactcttctgttatgcagcgattggtgctcctcaaacttgtcctgctaacaatgaggataaatgcggcgattcagatgaatggaaaggggagtttttccctgacattcccaaaattaaatatgagggtccgtcaagtaagaatgcgctttcatttaaatggtataatgcagaggaggaaattcttgggaagaagatgaaggattggttaagacttagtgttgcattttggcatacattccgtggaacaggcgctgacccatttggtgcacctaccaaatactggctatgggaagatggtaccaattcattaaacatggctaaaagacgaatgagagctaactctgagttcataagcaaactcggtgctgacttttggtgtttccacgacagggatatagcccctggtggaaaaactcttgaggaatctaatgccaacttggatgaagtggttgcc

SEQ ID NO: 6380 - DNA, 446 bp, Glycine max
  Clone ID: jC-gmfl02220079d06d1
aattaactcaagcatgctcaaagccagggaagctatgcatcacgtagttttatacataagctaacatgcacttcaccaggcttcgtatccacctagcagataacagcttcacacttatattttcccaaggaaaacgaagcaggcataagtcaatcttaatttccttttattagtaaacctaattataccgaattgttcctaatataatagacgaaaaatagccaccacacacggctagattctactttctacagaacagattggaggatcatctcggctagctcctgtttcgcagaagcaacctttggttctccccattccttgaccttcttctaagcagttcaaagtcagccttaccagcctatatttgagccccaatttcagtgtcaaaactctgataacgcttacgaacaagctcagcaagagaaccatgctcaatcaacttg

SEQ ID NO: 6381 - DNA, 409 bp, Glycine max
  Clone ID: jC-gmfl02220079d07a1
ttttgacgtgtacctaaaaaagccccgctttcttctgtcagggttccatctgtctgtctattaagaagaacacgaaatcccaatcttaatcgtaagcaattgctctctctgagagaagctctcgaattccttctgagcctagtagaaatccaatggctatttcatgatacgattgaaaaccagtgacgtcactggtgcgacgtcccttcctaattccgtgacctttcgatactgtgatcgccctacgcatgctcgatactcgatgatctctgcctatgataaagcctgagctctctggagtacttgaacaccgttgtagcccagctatcgtatcagaccacaacagggccacgggaaagaccaattctcaacgctcattgctgtgacgatcgatggcgatgacgatagc

SEQ ID NO: 6382 - DNA, 516 bp, Glycine max
  Clone ID: jC-gmfl02220079d07d1
caatagtatctatttgccattcatattataacattataaatcccatgtcatggaaatctactgtgtaattgataaaagtaacaagaccaaagagtataaacaccgataaaatatatgaatttgtacatcaaatgaaagatcgaatctctaattgagacataattattgttgttcccagtcaaattcatgcctcctcgtcaaccataccgacagcgtagtggccgaagtttctgccctcagataatatccgctgcttattaagtgattgcgtcctagccttgttcaaaaccgaatttggagacttaaacattctcttttcaccaccagacattctgtgttcgttggtattaagatactttctcttcggtgagaaaccaaagacttcatgtaagaactcattttcctgcatatgcttaatgaatcctcccccaagaaaatgcttgataaaattcaactgtatcatttcagaccatgatgatgcctgcagggaatcaccaccaatcttcattgaaatat

SEQ ID NO: 6383 - DNA, 425 bp, Glycine max
  Clone ID: jC-gmfl02220079d08d1
atatgcattgtttaaaaagacacattgtttacatgtgaattggatttataaatataattactaatttttgcaaaaaacgaaagcatgggtttactagtagatctgataccttaaattttcaacaaaactagtaaaaaatcactccatagggggattgccccaggaaagcaccaatgaacacaatcattatatagtgtcatgttcaaaattggccaaaacccatataaaaaggggtgaccatctggtctcaacaacattagctcgcgtcgtgtctagaaacaagaacttcaatccttaaggaaagccttctttctttgcaattttgaactcctccaattgaatcatgagcaattgtaaattagggccttctaaatttggggcgttattcctaaatggcttacaaaaacgcaatttccacctttatt

SEQ ID NO: 6384 - DNA, 560 bp, Glycine max
  Clone ID: jC-gmfl02220079d09a1
gctcctctcttgtacgctaacccatcaccacgtttgggtttgcgtaccacattccataacataaccttgttgtcctgaaattccagtcgttggatttgtactagaaggtgaacatgtctgggtttagaaaaacacctgcaccgactgaatcagattagaagacagcccttactgcagacaaacgatctgcttcagaacctgtcctgccagttccaaaatctaaaggaaactatttcgactacgatgacgacgattgggggaggaagccttcctcattcacagcatcaaaggacaaagacaggcactagaatggtttcagcaactctggggggctagagaaccactgtgctcaagagctggaaaactatgcagcgtacaagtctgaggagacatcacagagtgtcaacaatcgtttgaggattgctgatgacctcaatggggatgccacatggacccttgacatgttgcaccagcatggtgagcagataaccaggactcacatatggtgtgtgatactgagaaagacttgagccgggtgtgaaaactactaaacaatcttg

SEQ ID NO: 6385 - DNA, 355 bp, Glycine max
  Clone ID: jC-gmfl02220079d09d1
acatatgattgggtatctattaatttccaaggaaaaaaactcttcacacttgccaaagactcatcaaatgacagatggaggggccaatggaggaacaaaccctagcagtaccacacacataagaaaaaaatatacatgggccacctcatgagccccatcgcttgagccccacgttccccattcgaacaggcctggcccccatgtagggccacccagagtgacaaaaatactatcatccgacttttggactcccaagccaaaccacttatacgcttatggcaattaagaacccaggctaagggaccgtccctatagatgacccgcggtgagcgatgcaaagtcccagagcttcccg

SEQ ID NO: 6386 - DNA, 304 bp, Glycine max
  Clone ID: jC-gmfl02220079d10d1
ggggaaaaaaaaaaattgggaatttaaaggaccacaccggacaaaaaaaaaaaaaaaagggggaaaaaaaaaaaaaaaaaaaccaatgcaaaaaaaaaaaaaacaaaaaaaacccccccataaaggataaaaaccctaaggcccaaaaaaacccttaaaaaggccccaaaaaacaaaaacccccaggggggaaaaaaaaaaggggccaaaaaggaaagcggggcaccctaaaaaaaatgcaacaaccccgccggggacggccacaaaagaatagaaaaatatgcccaacccggtattggaaatg

SEQ ID NO: 6387 - DNA, 358 bp, Glycine max
  Clone ID: jC-gmfl02220079d11d1
aaaaccaattttaaaaacgatgaaacttttcaaattcagcactgattcaatgttttgaacaccattttgttcgcatttactttcccatgcccattaaaagggcttgaatttaaccaaactttaacccaaaattaatgacttttaaccacgcattaactatcacaccgaggtttaattatttaaaccggggggggtttttaaactttaggagaagaaccttttggcatgaaatggaacatccaaaaagaaaattcttgcttcgaaacttttaggacgacggcttaaggggctaaatttgggaaaatttcaataccaggaaatcctgtccaaaatttttccaaagacaagggaatccggc

SEQ ID NO: 6388 - DNA, 571 bp, Glycine max
  Clone ID: jC-gmfl02220079d12a1
gatttggcaagctgcgatcgacatagatgccgttaagaacccatcgtaagctcgagctccgctcgtggcctctatatcggctgctgcaagtccatcacgctctgctctctcaggtcatcagggaaaggccatgaacctaccttgggtgtccgtgtcaggaactagttacattgcatcatgcccttcccccagcagcatctggtggcacttctgatttcagagacgcccggtagtcaagaacatggaagtagaagctgtattctcgcttttgacgatatcggtgttgcaaatctgctatcattctcaatttctaaactctggtttgatgtacataattttatcaatgagaaatgctacgatgacctctaccactgtactaagaattctatctataccatatcacttgtttgagacttccacttgaggtgaaacaagctcgaaggactgactagcatgagctatagtgccgaattctttgccgcgctgatgtctgtagcacgatttccaatttcaatacacggatgccttaagatcattgcaacatgaatgcacctgttaagtgtatatactt

SEQ ID NO: 6389 - DNA, 361 bp, Glycine max
  Clone ID: jC-gmfl02220079d12d1
gctaaaaacaatttctgaattaaaaagtttataaaattaaaaggtacattcatgtttcaatgtttttaaaggatacccgtattgtaattggaaatcctgctatagaaaacagcctgacaaagaatttggcactatagctcatgctaggcaatccttcaagcttttctcaccttaagtggaataaacctcaaaatgcttggacttagatagaatccttagtacacaggtagaggtcttcctagcatttctcattgatcaaattatgtgcattagaccacagtgtaaaaattgacaatgataaccgcttcataacccccgatattgtaaaagggcaaatgaagcttctacttccatggacttg

SEQ ID NO: 6390 - DNA, 561 bp, Glycine max
  Clone ID: jC-gmfl02220079e01a1
gacaagaaaagaaaaaaagggagagaagcagaaagagagagagagagaactgaaaaaagaaaagaaaagataagactaattaacgtttttttggtttggttttcttcaacacgcaggagacacgaagtaaagagacaagttacatcagatggttaaaacttgttaaaagagttcgtgtatgtgtgtgaaagtagtttaaggttgtgggggtggtcgaagaagttttttagctttgtagatagagatgtcaggtggtggaggcagcatagcgtggttcaaaagagatctgaggatagaagacaattcagcactgacagcatgagtgagagctggtgctgcggttgcagttttcgtatgggcacctgaagaagaaggtcaatactaccctggcaaggtctctagatggtggctcatgaacagtttggctgatcttcattcctatctgaggaatcttggcactcctgtcatcactgagcgatccactgacactctctgttctcttcttgaggctgttaagtccactggagccactcaactttttttaatcatttgcatgatccc

SEQ ID NO: 6391 - DNA, 512 bp, Glycine max
  unsure (1)..(512): unsure at all n locations
  Clone ID: jC-gmfl02220079e01d1
gaatataaataaaattatataaatatactttgataaaaataaatagtattttttagatgtaacattttaaatctgagtttattagtagaccaaagatcctatggtggctctttctccctcactacacaaactatactatacagcaagttgcaaatattgtacaagaaagcagaagggactgcagatgaactgccgtatgaattgaaatttccatacacattggaggtcaggtggtggtaaaggagaaggaaattaacacatgtatgttcaatgcggcttcaacacctcactttctctcaacagaaaagtggtagtgtaatttccacctccttgcttctagtctaattgctttagatatgaattacccagtctgaggtagctgcctccaattcagcatttggtgagactgaggatgcctttgcaagaaagatgaactgtttgttataccattttcctctcctacaaattggtctgagtaactagaagctggnggagaccatactggaactaca

SEQ ID NO: 6392 - DNA, 486 bp, Glycine max
  Clone ID: jC-gmfl02220079e02a1
ttcttccaaataaaaaaaaaaaaaagaaaaaggaaggagataggaaagggttaattgaatccaaaaaaaagaagagaaaaacaaaatgggcagggtttggacttcgatgatagcattgttgctttgcctgatgacatcatcggttcggggcgaggacccttacatttactacacatggaacgtgacctacggcaccattgccccattgggtgtcccccaacagggtatcctcatcaatggtcagtttgccggccccgaaatcaactccaccagcaacaacaacgtggtcatcaatgtcttcaacaacctggatgagcctctcttgttcacatggcatggtgtccaacagaggaagaactcttggcaagatggcacattgggtgcccagtgccctatcgacccagctccaactacacctaccgttttcagggtaaggatcacattggaacttacttctactacccgaccaccggcttgcaactcgca

SEQ ID NO: 6393 - DNA, 525 bp, Glycine max
  unsure (1)..(525): unsure at all n locations
  Clone ID: jC-gmfl02220079e02d1
aggaaaaggaaggagactttcatatatatatttatgtgatattgatatagaaaatgaataggaaagggttgtacatcagtgaccacgcaagaaacatgagaaatgaactagagctaattaattaacccctcgtctcaatctcatgatggaacaattttggagctacgacgtggtggcactgatgatgatcgcagaagaaaaatctcttaactggagtaaggtggtggcttaggcatatccttgacgattccgcagacaagctgggtctctgggaggttgtactcatccctaagggacctgttgggagacaagacactcacgtacaattgctgtcccaggtaacgattctctgccatctncgacctcaagttccacatttcagcgttgtcaaaagtcaacatgattgcggcccaagactttgggaacacctggatggtgtgcctgctgacagcatcaagaatgttgtagcacttcctcttctctgggctccactgccccggctcaaccgcgacggcaaagaaagag

SEQ ID NO: 6394 - DNA, 321 bp, Glycine max
  Clone ID: jC-gmfl02220079e03d1
caaatcctacttagaatcaccagcttcagtggttcaccatacgcatgcatgctcagtagagcgatatgtgcacaaaagttactcatgccatacttacacagagacggctatgatcattgcctgaacgtccaccaagaatttgagattagcatgatcattaaaactggccctttaactgtatggtatcgcgagaatacatactgcttaagggattccttaatagtcaacagtactggaaattccttctttaatttgggactgttaagctcattgttgcttctttgaggaacactcaccttggcctggtcttagagagtgaat

SEQ ID NO: 6395 - DNA, 558 bp, Glycine max
  Clone ID: jC-gmfl02220079e04a1
tggcaatggcatctccgtccgtaacctctgtaactgtggagaacgtgacattccctgccaccgtgaagcctccctgctcccccaacaccttcttcctcgtcggcgccggcgtcaggggcctacaaactcatcacgctttcggcaaattcactgccatctgcatttacctccaatacgacgccctttacttgctctccgttaagtggaaaaccaagtctgctcaccagataacggaatccgaccaattcttctcagatatcgttaccggtgcattcgagaaatttatgcaggtgacaatgatcaaacccttgacggggcagcaatactcagagaaagtggcagaaaattgcgtggccatctggaggtctctcgggatttatacagattcagaagccgaagctatagacaagcttctttctgatttcaaagacctaacattcccaccaggctcctctatcctttacactgtctcacccaatggatcattaacgataagtctctctagtgatgaaaccattccagaagctacgagtgctgctctagaagataaactactct

SEQ ID NO: 6396 - DNA, 440 bp, Glycine max
  Clone ID: jC-gmfl02220079e04d1
aagttatgtaattagttgcttcaattcccaacgaaggatcaaatacaacagttcagtacttagacatggacagtgagaacaacacaataatgatactagaagtttagcacttagaaaaactgtaatttgccctttattgattagtagcacagtgctgaaagtcacagcagagtggttagggattttgatcttgggttgatgatataatgagttcacttatgagattgagggtcacaaaccccaggctatatgaataagtgagataatctggaggccaaactctgttgtgctgcaggggaaacgccattctgacctatcattgactgcgacacagactctgagaggaggttatgctctataacagctctggtcacttctggaatggcatcatgactagagaaacttatcgttaatgatccattgggtgagacagtgaaaag

SEQ ID NO: 6397 - DNA, 496 bp, Glycine max
  Clone ID: jC-gmfl02220079e05a1
atttttcttcctcagtagtgtcatttacgcttctcttctctgcagcaactatgcctaaccctaaggtcttcttcgacatgaccatcggcggtcaatctgctggccgcatcgtgatggagctctacgccgacgtcactccccgcaccgacgagaactttcgcgcgctttgcaccggcgagaagggcgtatggcggagcggcaagcccctccactacaagggctcgtccttccaccgcgtgatcccgagtttcatgtgtcagggtggcgacttcaccgccggaaacggatccggcggcgagtcgatatatggcgccaagttcaccgacgagaacttcgtgaagaagcacaccggtcccggcatcctctccatggcgaacgccggtcccggaaccaacggatctcagttcttcatttgcacggagaagacagagtggctcgacggaaagcatgtcgtgttcggacaggtcatcgaaggattgaacgttgacaatgacat

SEQ ID NO: 6398 - DNA, 345 bp, Glycine max
  Clone ID: jC-gmfl02220079e05d1
attaggcgaattatagatgtcctaattttattgaaggtagctcatcatgttttttttatgcttctcataacagactccattcactcactctatgaaccccaaccaaccaaccacatgatactgatattgaaaaggaaaggggaagggtttcgaaatgatatccttaacaccacaatcccctaaacgacgacacgagaaagaaaagaagagaaaaaaaaggcaaaaacgacaccgaaagaaataacacagattcagagattaaagccgcgggtcaacgtcgtctaagagagttgaccgcagttggcgatgacaacgggcttggaggtcctgcccgagctggatccg

SEQ ID NO: 6399 - DNA, 510 bp, Glycine max
  Clone ID: jC-gmfl02220079e06a1
tggaaaacttctcctcatgcttggcaaaatccagttcaaactccacaaactcattgatcattatcgttctcatatattccagacaattaccattccctcagagtctctcttgaatgaacttcgaattgtcgaggagatgaagcggcaatgcgacgagaaaagagacttgtatgactatatggtaacaagatatagagaaggaggcaggtctaaaggcggcaaaggggagactttttcattgcagcagctgcaaactgctcatgatgaatatgacgaagaggctacattgtttgccttccgattgaaatctctgaagcaaggacaatcgcgtagtcttctaacacaggcagcacgccaccatgctgctcagttatgtttcttcaagaaagcagtcaagtcccttgagacagtagaaccacatgttaaatcagtaactgaacagcaacacattgattaccacttcagtggtcctgaagaggatgatggcgatgaaggtgattatggagatga

SEQ ID NO: 6400 - DNA, 500 bp, Glycine max
  unsure (1)..(500): unsure at all n locations
  Clone ID: jC-gmfl02220079e06d1
gcaaattatatatgaaatttcaacactttctacactgtctaaatttcacaattaaaaaaataaactgatcaaataaatccaggaaaacaaaataatagaaaataagaaaatagtaaacaaaacagtcctggttgaaaaattacctctggtctaaacatccaagaaaacagcatcagccatctaatgatggccgactactagataatgatattggcatcagaggaggagaagcaatattctcagatatagatgatctatgagaggattctagtgttcttggcatatgtaatgctgccactcttgcgccactagaaggtatggagaaactacgagccatggcctgaggtggcattggcagtggagatgctgcacttgatgcaaccaaattatttgcagtcaccttttgacctctagacaccaatggaccagaatgaccccactaacctaaaagccttgaattggangggaaactgggttgaggcctaggagttcatgaagct

SEQ ID NO: 6401 - DNA, 520 bp, Glycine max
  Clone ID: jC-gmfl02220079e07a1
gaaagacagagacattactttttggtagtagcaacatgcaacgggaggaaagaaggaaagaaagagagagaatcttcattcatttttttctgctcattttctgtgtacacctttatcgtttctctcactaactttggagtctgctttactccacactccacatcaaagatcgtctgcattccctttcccttctcttttcacccccctttcttttttctctcttcttcttttttctttttctgctgggggcacctcatttgtttttgacttcataatactactacttcttcactcacatacgagatagaaagagaaggaaaaaacaggctattatggcaggaggaggagctccagctaaagcagatgagccacagccacatgcaccacaggatcagctaccaaatatttcttactgtattactagtcctcctccatggcctgaggccatacttcttgggtttcaacattatcttgtgatgcttggcacaactgtgttgatttccactgctcttgttcccca

SEQ ID NO: 6402 - DNA, 382 bp, Glycine max
  Clone ID: jC-gmfl02220079e07d1
aaatataataggatggactattcatagagctatggcgtgtaacaagatttaaattaaatattagaactagaccgtggtgaagatgatgagaccacctttatatatttgattgagcttttggacacaattaaacagaggggaagtacttgtttagattgaaaggaagggaatagaactcctcacttcttgggtcacccttgaaggacttgtacttggcccaccaatgtttacctttggccttcctaatagcagcttctctcttaaacaaagggttgtctagaaaatatgccacaacaccagcaacaaatggctttgattggaatgggacgttgattatatcattgaaccattttgcgcctgtgtggactggaccataaccatt

SEQ ID NO: 6403 - DNA, 524 bp, Glycine max
  unsure (1)..(524): unsure at all n locations
  Clone ID: jC-gmfl02220079e08d1
ccaaaatataatttttatttctcatatgcattggtaaaaaagacacaatgttcacatgtgaatggcatttataaatataattactaatttttcagtaaatgaaagcatctttttactagtagatctcataccttccattttcaacatttctagtaaaaaatcactccatatgtctattgcccctggtaagcaccaatgaacacaatcattatatagtgtcatgttctcatttggccaatacccatatctattggggtgaccatctggtctcaataacatagcttgcgtcgtgtctagtaacatgaacttcaatcctttctttatgccttctttctttgcaattttgaactcctccaattgaagtcatgtgtaattctaaattatggccttctaactttgnttcgttattcctaaatggcttagttctcacgcaatttccacctttattccataacccatttncaagtgagatggtgaaaatgttctaagaaatgttatacccttaaaattctctaactgatgat

SEQ ID NO: 6404 - DNA, 563 bp, Glycine max
  Clone ID: jC-gmfl02220079e09a1
gcttcttctacatcacatccatccttttggtccctcctgaacctgtctgcatccattcccatttcttcttccgtatgcatgttcccaccgtctaaaaaacctagcaaagcaacaaaacggcgtcatgcttgggaagtagcatgcaatggtaaccctagaaataggagggacattctgatcggccttggaggactctatggtgctacaacaagtctcacaagtcacaacactggttctgcatttggtgcttcattgtcgccttcagatccaactaactgcgttcaaccggacccagaaaaagaccctttttgcccaccaccccccttcaaagactacgagctccctccacacgatgacaagacattaccccttcgaattagaccagctgctcatttggtcactgatgattacatagccaagtacgaggaagccgtgaggcgcatgcaagaccttccacctgatgatcctcgcagtttcatgcaacaggccaatgtccaccgtgcctactgcgatggtcgcggctatactcataagggcttcgctgactacaagcttgacgttca

SEQ ID NO: 6405 - DNA, 540 bp, Glycine max
  Clone ID: jC-gmfl02220079e09d1
aacaataaaacaaacatttattataacaataacatagtatccctcacagatgaaagggatctattaagttccaaggaaaataactacaacacactaattaagaaacaacaaatgacagatagagtatcccttggaggaacaaaccctagcagtagcacacacataatttagatttattcatcgtccacctcaggataaacacgctttatccttacgtccttaattgtaacaggcttgtccccatatatgggagccagtgtgacagaaatactatcatcgtcttttgttactcccaagtctttcaacttatacgttaatggcaatttgaaagaagctttggtgatgttgttatggttgacatgcggcgagtgaggcaaagtcacaaagcttcccgcaaactctgaatcctggggtccaatctcattgtcgcctgggtcgttgatgaacacatcaaacctcacaccatcagtgctatcgtactcaacatctatcactaacacctcttctacgccttcttcttcttcttattctcgttctgga

SEQ ID NO: 6406 - DNA, 519 bp, Glycine max
  unsure (1)..(519): unsure at all n locations
  Clone ID: jC-gmfl02220079e10a1
gcctctgcccaaggtgcagatangacatagcatgcagcatagtagaccacttcnnagtttgngggtgggggcggggggtttgtnntttttttgggtgtatattttttcttccactatgctctctctctctctcttgggcccacatgtagatgtgccttccttttccaaagggagcagcaacaacttgtgtactcttcttgttgctttccacttctcagaaagagatgcctcaccacaactatttcccttgcttgttgaagcctagtatcattattgtctagttcttgctgcgcttttttgtgttctctctctctctctctctcttttatggatcttggggtagtgggtttggagggggctggtgggatcacaaagtggctgcgtgtatcgatcctatgttgcttcagatcctgatacaaagcacacgggatacagatctggtgtgcctaagccagattcatctgacattgcaagtaaacatgaccagttacgaacttatgaagtggccaaaattgatca

SEQ ID NO: 6407 - DNA, 334 bp, Glycine max
  Clone ID: jC-gmfl02220079e10d1
ggttaaggtaaaccatttcaaattttaaaacagacactattacaaccccgggaaacccaagatcaaaccttatgagtgaaagagacagtagctagccagctacaactcgggggggccacattccacaaacgcgaatccattcccaaacaaactttagaggaagaagaacaacaaaaaaccgaggcaaacttgaaaacaaggaatcagaaaactggagaccctggtgatcaaaggggccccccttggacagatcccagggctgctgatggaaagtgagccaaatgctggtttttgcaacaccccaggtggtgaagaccctagtggaggactattg

SEQ ID NO: 6408 - DNA, 655 bp, Glycine max
  unsure (1)..(655): unsure at all n locations
  Clone ID: jC-gmfl02220079e11a1
cgtcagccgagtactcatcgagatagaacacattgcagncatacgagttgggaaaaaaagaggagagaaaaaaaaagaggaagatattttatagtaataatagttctactagtaaacagggtagtactctataaatagcatttgcatgcaccttagtcttcaccaaaatactcctcttggcatcttgtgttgcgtccctcttttaagctatttccttctcttaacacaattggttgtgccaattgccatagtcaccaaccaattaacaaaggtatatatatcatcatatcatcaccaaatgaaaaatattgggttgctttttcttgtggtggtggctacttttgtggtggcagccacagctggtagcttttaccaagactttgaaataacgtggggtggtgagcgtgccaaaatctatgagaatggaaaccttctcacactctcccttgacagagcctctggctctggctttcgttccaaaaaagagtacttgctcggaaaaattgacatgcagctcaagcttgtgcctggtaactctgctggaacagtaactgcctattatttatcttctctggngcctactcatgacgaaatagactatgagtttttgggtaactcgagtggtgatccttacactcttcacacgaacgtattc

SEQ ID NO: 6409 - DNA, 417 bp, Glycine max
  Clone ID: jC-gmfl02220079e11d1
gaataataaaactccaacaattttattaatgaaaatactttacaatttcagcacatatacactgccatgaatataattttgcacgctataattatctttcgccacaaacaatggagtagtgctcaacaaagcacaaaccaacaataataacagttttagttgcattaatttacaccagaaagtaaattaacgtaataggcaacacatgtgtgtcacgttcatgaggatcattttataatgatatgcaacattgaattaaatattctcatgcaatggagcattctggaggaaggccttgagggaaacgtttgatatcagtgcaataattgtaaatcatgtaattcttttgcacccacggatctttgcctgccccgtggcgtccaatgattggccagtggaggaaaaagtttggggatt

SEQ ID NO: 6410 - DNA, 625 bp, Glycine max
  Clone ID: jC-gmfl02220079e12a1
gaacatccaatctgcagtcgacatagagcacatagaaaccattctagttgatgcaccgttctgaattttggatcagcctatgctaattgtttcaacacaatacccgattaccttcttctatagagaagatcttcatccaggcaaaacaatgaaagtacaattcagcaagcctccctttcaacaaccatggggtgtcggtacatggctaaatggaaattaaagacactactcaagaaggatatagtgtcgaagagctatgcatcaagaaagaagccattgagggagaagagaagttttgtgcaaaatccttgggaacagtaattggttttgccatttcaaagctgggaaagaacattcaagtactttcaagttcctttgtcaataagcaagaccaatacactgtggaaggagtgcagaatcttggagacaaagcagtgatgtgtcataggctaaatttcagaactgcagtattttactgccatgaagtccgtgaaacaacagctttcatggctccattggtggctggtgatggaaccaaaactcatgcacttgctatttgccactcaaatacttctggaatgaatcatcaaatgcttcatcaacttatgggagttgatccctgaac

SEQ ID NO: 6411 - DNA, 378 bp, Glycine max
  unsure (1)..(378): unsure at all n locations
  Clone ID: jC-gmfl02220079e12d1
accatatatatatagagagagagaatacgaagcacactgatcacaggatgatgctctctttaagtagggaagcagatcttatcagtacacataggtaggttgaaattctagctctagcaatctagctagagaaggtagtacttgcacaacacacagcacatgataatttattttatacacaatctcattctcatggtgctcaagatgcatggactaattaagcaacaatgttggtctgatagggcagtgtccacagantaaattgggtacccataaaatggccttgcttccaaggaaatggcaacagggttagttccaggatcaactccataagttgatgaagcatttgatgattcattccagaagtatttgagtggc

SEQ ID NO: 6412 - DNA, 522 bp, Glycine max
  Clone ID: jC-gmfl02220079f01a1
atggcagggttcaagggcgatgacgagtacgattacctattcaagctggttctgatgggccattctggagaggagaagtccaacctgctctcgcgcttgaccaggaacgagtccaatttggtgtccaagtacaccatatgggttgagttcgacaccaatagcttgaacatcgatgctaaggtcatcaaggctcacattggggacaccggtggccaggaaaggtaccgtgccattactagtgcttactaccgaggagctgtcggcgccttacttgtctatgacgtcacactccgtgctacattcgagaatgctgcacgattgttgaaagaattgagagatcacacagaccccaacatcgcggtcatgcttattggaaataaggccgatcttcgtcaccttgttgctgtcccatccgacgacggataatcttttgccgagcaagaatctctctacttcatggaaacttctgcattataagcaaccaatgttggaaatgcatttactgaagtgctttctcagata

SEQ ID NO: 6413 - DNA, 504 bp, Glycine max
  Clone ID: jC-gmfl02220079f01d1
gaagattgtgaacattgctcaaatcaatatgcaagactagccttattctacatggtgtcacgattccagtgtaggcatttacaagatgaaacaggctataaaaaccaactgccatagatgaagcatctagtttgagcagcacccaaatgtcttcaaaacggaggaatcgcctttcacatttattgactgacctttagatgggacagcataagaactggcattcttgccggtctcaacagttctcttgctcactattcacgatatctgagaaagaacctctgtaaatgcattttcaacatcggttgcttgtaatgccgaagtttccatgaagctgagagattccttgtccgtataagattttccatcttctgttgggacagcaacaaggtgtcgaagatccgacttatttccaataagcatgaccacacagctggggtctgtgtgagctgtcaactctttcaaccatgttgcagtattctcaaatgtagcacggcgtgtgacatt

SEQ ID NO: 6414 - DNA, 454 bp, Glycine max
  Clone ID: jC-gmfl02220079f02a1
ctctttcgtttctcatcatcagagacttacactccaatttccaaaccgaatcgaatgggaattgcgatttgaatttgaatttcattttcaacttccctgtgatgccttacacggtccgggagaacctttggatcgggaacatcggcgactcggcggagattctcgaaaacggcgccgtacagagcgtgacacacattctctccgtcctcagctccgactccatttacttcttatccgaatggagaaccactctctccatccccggcaaggagatcaccatagtccacgcggcggacgccgtcgtcaaatcggcgctcccgccggagaagctgctatactctctggagtacgccggccgcgacctcaagctcgtgcgcatggccgagcctgtcagagacaccgagaatgaggacctgctcgattactaggaagcctgcatcggtttcattgatcg

SEQ ID NO: 6415 - DNA, 530 bp, Glycine max
  Clone ID: jC-gmfl02220079f02d1
gaggcaagaaatatatcttcattcaggtcaagtggatgtattcatccacattggatttatattcttgtgtctgtttcaacttgtaaccaatttcttcacagcgaagaaaaaaatttgtatattgaaaataatagaaaaacgtacaatggagaacactcattttcttttgtagaaaaaagcattatccttgcttacggtaaaatcatcgagggaacaagccctaatattggaatcccaactcatgcctcaccatttactagaaaccagtaataatctccaatcatagctcgaaaaagtcattctggaagatgcacaaaaattgtaaaactataatagtcctcccttccatataactgcattagttcagcttggaaaagttgagcatgtccaaagagcaagactccaatccttccttacacaatttcattgttggcagtggaccagcttggagaattcgggcagatacaagtcctagaacaatgaccaaaatataggaggcatcccttatgcataaaatgacgcaaaaatga

SEQ ID NO: 6416 - DNA, 391 bp, Glycine max
  unsure (1)..(391): unsure at all n locations
  Clone ID: jC-gmfl02220079f03d1
gatgaattgagattttnttttacatgaaacaccattaatgtgcacaaacgtcataattaaagttacatacgttacactggaatacataccatatcaacagcaatagatgatgacatttattatcaacaattcaagcaataacccaaaattgaataaagtatcatcactaaaatgcggccttcatgaaaataagtagaggggaactttggggtattggtaataaaaataggatatggaggcttatatcaaaccctatgtttgggtacgatttatggcccagaagtgattagacttacattttactgatagatccttggcattaatctcacggaattcaaattagaaatcacggtctttagcacactggggatagacttgcgggtagcgggtg

SEQ ID NO: 6417 - DNA, 224 bp, Glycine max
  Clone ID: jC-gmfl02220079f04d1
ggggaaaaagccttcgtttttatttaattttaaatggggttcacaaccccttggaaacctagccggttccaacccaaaaggccttcatgggaaatagggccctacaacgggttaaaacccccataataaaaattcataacccatccaacccaaaaaaaaagggggggccccttttttttttttatgggacaaaaggcccggaaactttgcttccgggggttccc

SEQ ID NO: 6418 - DNA, 526 bp, Glycine max
  Clone ID: jC-gmfl02220079f05a1
ctacaagtgaagagttggaaacaaaagatggcaggtttgggaatatggatgggtttcgttagcctgtgtcttctgtctgtatcagtatcaggtctgctccaacgcctagagcaccctgtcaaagctgatggctcacttagccttatggtcattggagactggggaaggaaaggaacatacaaccaatctcaagttgccactcagatgggaagggttgctgcaaagttaaatatcgactttgtgatatccactggagacaatttctacgatgatggattgactggcatagatgaccctgcatttgaaatttccttctcaaaaatctacactgccaagagcctccaaaagcaatggtatagtgtgttgggcaaccatgactacaggggtgatgtcgaagctcaatcgaatccaatccttcagaaaatcgatcctagatggatctgccaaagatcattcattgctgatactgaaattgctgagttcttcttcattgattcaacaccttttgtggacaagtattttctta

SEQ ID NO: 6419 - DNA, 414 bp, Glycine max
  Clone ID: jC-gmfl02220079f05d1
ttttttttttttttttttttttttttttttttttttttttttttttttttttttttttttttttttttttttttttttttttttttttttttggggcgtaaaaaaggggttcaccccccacattaaaaaataatgggggacctttttaaacccaaaggccccctttcccccccttattaaaaggggaaaaaaccaaggggttaaaaaccaaacggggggtttggtttgggggaaaaataaggggggccaaaacctaaccttggggtccttttgcaacccccggaaccccaaaaccttttttatatggcgaaaaccgaaatccccaaccccctggggcaattccccacagggaaaaatttccccaaaatatgggaaaaaaccaccttggcattgggttcttcccgctccccgggc

SEQ ID NO: 6420 - DNA, 468 bp, Glycine max
  Clone ID: jC-gmfl02220079f06a1
gttcaaaagcatataagagatggggttagaagggaaggaaacgccgtcgtttatgagggattctctcgataagtgtggtggctgcgccgttattgacggtggttttgccactgaacttgaaaggcatggggcggacctcaatgacgaactctggagtgccaaatcccttattagctccccacatctctgtcgaagggttcacctagattacctcgatgcatgagcaaacataatattaacagcatcttatcaggccactattgacggcttcgaggccaaagggttctttagagaagtatgtgaaactatgcttacaagaagcggggtgattgcacgtgaggcacgtgaaacttattctgataggtgcaccagagattcttctgactctatgagagatgatagatataggtaaccttccattgtaattgcaacttctgtcgcaagctatggagcgtattgggctgatgg

SEQ ID NO: 6421 - DNA, 464 bp, Glycine max
  unsure (1)..(464): unsure at all n locations
  Clone ID: jC-gmfl02220079f06d1
cctccggcaaaaagttagccatttcattcagattattatagtttcttccattacagataaaaacacacttcaacagttatatacatttgtctttaagtttcccatatgttgcctctgctatgcctcttatagtattaggagtagtcctgcagcagccaccaaaaagggaagccccagcatcacgccacttgcctatgtaggagacaaaatcatgctctgctgccccacttgatttcacccattggttgctctcagcgatataagtctccccactgttgggatatacaagtactggtttacttgttgccttcttgataaatgaaatcaatccatgaataaatctaggagcagtacaattaactccaaccgcaacaacttgtctgcatgaatcagctattgaagcgcattcaaagatagagtcaccactaaccacattgctttcatccttacaactaanagaaaac

SEQ ID NO: 6422 - DNA, 523 bp, Glycine max
  Clone ID: jC-gmfl02220079f07a1
ctccgtcacttgtgaatctattgaatcaacaatcatgtcggacgaagagcaccatgtcgagtccaaggccgacgccggagcctgcaaaacctaccctgagcaagccggtaccatgcgcaagaacggctacagtagtcatcaaaggccgcccctgcaaggttgcggaagcttcgacttccaaaactggaaagcacggtcacgctaagtgtcactttgtgggaatcgacattatcactgccaagacacttgaggatattgtgccctcttctcacaactgtgatgtttctcatgggaatcgtactgagtaccagctcattgatattgctgacgatggatttttgagtctgcttactgaaaatggatacactaacgatgaccgtaagcgtcccactgatgagagtctgctcactcagataaaggatggatttgctgagggcaaagatcttgttggggctgtcatgtccgctatgggtgaggaacagatatgtgccctcaaggatattgggccaaaagactagctcct

SEQ ID NO: 6423 - DNA, 450 bp, Glycine max
  Clone ID: jC-gmfl02220079f07d1
cccacaatagactcctcctttataataaaatcacaggacaacaaagaaaaccagaaaaatgtgataatagtttctgtcaccacatccataaaaaccattgttaagactagtctgactagaatctatacgccaggtcttgaacaaaccaatataaaaggcttacaaaaatatctttgcttaaatagaaaatagaaataacaagcaacaagcaccaaaagctagttctttggcccaatatccttgagggcacaaatctgttcctcacccatagcagacatgacagacacaacaagatccttgccctcagcaaatccatcctttatctgagtgagcagactctcatcagtgggaagcttgaggtcatccttagtgttaccattttcagtaagcagactcaaaaatccatcctcagcaatatcaatgagctggtaatcagtacgattcacatga

SEQ ID NO: 6424 - DNA, 351 bp, Glycine max
  Clone ID: jC-gmfl02220079f08a1
gtggtgccttatcgctgcggttatcatcttcttcttgctctttcttagatctcttctttctctacgccgcacgccgaaaccatggccggaaaaggagagggtcctgctatcggaatcgatctccgaaccacctactcttgcgtcggtgtgtggcaacatgaccgcactgaaatcatcgccaactgaccaagggaacagaaccacgccgtcttacgtcggattcactgacaccgatcgtctcatcggtgatgctgccaagaatcaagtcgccatgaaccccagtaacaccgtgttcgatgccaacaggctgattggtcgtagattcagtgattcctctgctcagagtgatat

SEQ ID NO: 6425 - DNA, 413 bp, Glycine max
  Clone ID: jC-gmfl02220079f08d1
gatgactaaagacaagatatgtcatttaacaagacagaataattcctacaggtaaagtgcataacaattgagtataccatttaatacatgaaaataacgcaaataacataatgcttaaagcaacgttcatatcacaagggaaaaatagttggaatcccatccaacaaaaatcatgcgattaaaatccaattaaaaaagcataaagtaaaataagtttttaaaacaggtttttggaggaaagccactacatttagtccactttctcaatcttggggccagcaccactttcaccagaaggaggagcagcatactcattctctgctgcaccagtaccacccacgtctggaccagcgccatcttgggacatattggcaatgattggattgcagatgctttccaattccttcattttg

SEQ ID NO: 6426 - DNA, 259 bp, Glycine max
  Clone ID: jC-gmfl02220079f09d1
gcagcaagataacctgtcaaaaattgtaattcagaacacgtaaaactacatctaatgcagagtcagaaaccatagttttaaatggtatttgtagccctcttgcatagaaacacaaattaagcattcttttgtgcaggtctctttagcccctctaggctctagcatagaacaccaattaagcattcttttgtgcaggtttctttgaattgtttttccgacgaaccttcaccaaagctttttgtaaatcctcttcacgttc

SEQ ID NO: 6427 - DNA, 661 bp, Glycine max
  unsure (1)..(661): unsure at all n locations
  Clone ID: jC-gmfl02220079f10a1
cgcgcaagattgcggatagacatagaattcagatcngaaaacagatccnaatttgaagggnaaaaccagagagagagagagaaagggaaaaatttcagcgataaaagggatagttaatgttaagggacccaatataagacgggcaatgagacaatatttcctatatatgcagctttctttttaaaattgtcaatgagacacctgcactaagtgacgagttaaatataaaattaaggttaaatatgttttttcttcttcctgaaaacaggttaatatttatttttatatcttaaaagttaaattatttattttttatcttttatttatgaaaatgtgttacatctgattcttatttctatacgtgcatgaggaattaaaaatagatttttttatgaggcaaagatcagatatgatatattttcataaataaaagttaaaaaagaaataatttatttttgttttacctttttgcctagactaaaacacatatttaaccttttaaggattaaatgtttttacttgaaaaaattactaaatcttaagggtgatgggtgtacttgagaaaatgtaaaacatatttattgatggaaaacctaataattataatgaatacatataattgattattcttttttactttctacaaaatcactaaaaattt

SEQ ID NO: 6428 - DNA, 507 bp, Glycine max
  Clone ID: jC-gmfl02220079f10d1
ccaacaattaatcactatttaatttcccccacattattgttttcccttttctatttccactgttacattatgtcatgacaacaacaatagtaataatgaaagcctagaaccaattaagattcctttgtccctaactagcccaaagcatgtttaatcattaatcacttgcacccaccagcaccaaacccaattctcccaccttcaacatcatacacaacctctattgttctctgttgtacgttcccatatatagtaacatcactatcgtcaccatttgcggcaaaagccaaacaaacctgcttggtactcgccacgaagagtataccctgtggaggcagcttcaccgtgacgccgccggcgaacgaaaattctatcgtgggaatggaaaacaccttgtaaccgctgagatcatacacgtgtcgaggatggagagttccccggcggagggtattttgacatgccttgacgaaggcggatcggaggcgccgtagccgttggggggaggcg

SEQ ID NO: 6429 - DNA, 592 bp, Glycine max
  unsure (1)..(592): unsure at all n locations
  Clone ID: jC-gmfl02220079f11a1
cgctcatgattcggatcgacatagatgcacatgagaaaaccgancaaaantattaaaaaaaatcaagggaacagagaacanagggaagaaaangttgaaggcaagcgtnacgttaggccatccaacggttgtctacactcgccctcttgatgcacaaactccttcctctaaggcacagctttgcaaggagttcaactctatgggggtcacacttgtccatggagaacttgagcatgaccagattctggcagtgattaaacaagtagacattgtgatatgttctcttccataccctcaagtgatggagcaactcaaaattatagatgctatcaaagttgctggtaatataaagagattccttccatcagattttggggtggaagaagatagagtaaaccctcttcctccgttccaagctttcctcgataagaaaagaaaaattagaagggaaattgaagcagctgggatcccttatacctttgtctctgcaaactgttttggtgcttactttgtcaattatttgcttcgtccttacgaaattactgtctatggcaacggtgatacaaaagctgtgctaaactatgaagaagat

SEQ ID NO: 6430 - DNA, 452 bp, Glycine max
  Clone ID: jC-gmfl02220079f11d1
aatataaaatcaaatatttattaagaataaaatcatatttaagtctattaatcatgtatcccaaacatttatgccttttcatggtattcaacggtaatcgggaggatcacctactttattacaatttataaccaacaagtgcagggtaaaatgtcttcactcaaaagcagcagaggcaggggctggaggatcaacaagaaatatatcaagaagttcatcaatggatgtgtagttataatcaggatatagctgggaagcttcaagggcatcttctcctatctcgaacctcacgagggcccctctaacaaatacactatgaaggatagaaacgggaatattgtgtgagggggtaaaggtctgtgaatagggtgacaatctttttctcagcaacaaaatccttgcgaaaattttgccacttttttgctcccacaatgctatcaactcattttggg

SEQ ID NO: 6431 - DNA, 628 bp, Glycine max
  unsure (1)..(628): unsure at all n locations
  Clone ID: jC-gmfl02220079f12a1
tgctccgcgcatgcaacgctangacatagatgcanatangaaaacagnncgaagtttggagagagagaccggggagagggagatgagaggggaangaatttggaaaaaaggagaattaatgagaaagtatgggtgtattgaaagcgcgcttntgtgcttttgggatcccttgctgctgcttgctagcttcagctatgctccttctgtttcggccacaactgaaatttcagggaatgaagtgaacacagatgggaaggtgataaatgaagagttagcaaaaccaagtctaaaaggacatgatgaagaagcaaagttcaaaggattttttccaaaaccaattcctatagttaaaccaattccaaagccaattcctattattaaacctattccaattccagtttataagcctattccaaaaccaattcctattgttaagcctattccaaagtcaattccagttgctaagccaattcctaatgaagaagaaaaattcaaaggatttattccaaagccaattcctataattaagcctattccaaagataattcctattgctaaacctattccaaagataattcctatcgttaaacctattcctattccagtttataagcctaaaccaaaacta

SEQ ID NO: 6432 - DNA, 390 bp, Glycine max
  Clone ID: jC-gmfl02220079f12d1
tttttttttttttttttttttttttttttttttttttttttttttttttttttttttttttttttttttttttttttttttaggaaaaaccgggcccctttattacaaaaaaaaaaacgatctaaaaacgatccccccggaaactttattgaacaaagagcatgaaccacttattttccattacaggaccccaaagggggcccaaatttattttgaaaaaccaaggagcctggcctaaaaagggctttaaaaaggggacccataaccttataggtgggaaaaaaggtttaaacccttaggggggtggaaatggcttgggaaatgcaaagggggaaaaaagagggttcttgaaatggggagaaaagggaccttaagaaaaaaaggcctttt

SEQ ID NO: 6433 - DNA, 486 bp, Glycine max
  Clone ID: jC-gmfl02220079g01a1
accgttctttgcggctgtccacggttgggctttgaaagtcactaagaagatgtccgtgtctttgaaccccaccgtcagccttagctcaacgaatcgggagacagaggatcacgatgcatcatgatcttcctggggggcttctttaccaaacgcatcccactctacacctttgttgatcgtgtctagatcgtgaaagcttggcacggaaagaagatttggaccttgactgtcagtggcagatagggatcagctcgctgcagacaacagtagtagcaaggattgcgacaatgctgaaaattctgcgaccaatgatcagactgcatacgggaattccgcagatgaaaacttacaatcgcaaaccgaagttaatgctgtgtcaggatctgcaacattagaggcttccatgtccaatggttcaattaaccaagagcaatggtcagaagcatctcctatgtcacaatctgcaaccaacgagctttcctgact

SEQ ID NO: 6434 - DNA, 525 bp, Glycine max
  Clone ID: jC-gmfl02220079g01d1
gtgaaaaactgatcatcaacatcatcagttcatgaagtttgaagcagccgaagcttgtctacatatatataataaatcaactatctgattgttttatggtgaattcttaacaccacacctaagtactcattgaaatggattgcaccaactttccacacaatgtaagttgctgcaaacatcactgtgctgataaaaacaaatgagaagataatgaaaaagagatcagaacctccaggaaattggaaagtgaagcctgttgacaaccctcgtttgctatcatcaaacaaattaataggggcctctggaagtccagattttttcttccctgaccctttgtcactttgttttgaagcctccaacaccctgctgctcatgtctggcttagatgcttctgattgcgcgtatcggttgatggatcgagctgcctttaacctctctgttgcagtcatggaagctcgctggatgcagatcgtgacttacgagatgcttctgacctttgctattggctaattgaaccattggaaa

SEQ ID NO: 6435 - DNA, 588 bp, Glycine max
  Clone ID: jC-gmfl02220079g02a1
tagaagcaataagatgaaaatgaaagtgcttgttttgtttgttgctacagttttggtagcatatgaatgccatggctcagactaccagaagttccctctccaaatgaaaactgggtttggtgggcaatacagcaatgaggtggcatgtgccagttggaggcttggcgtggaagcaaacaacgtagtcaagtggcaaactgttcctgcagcttgcggagagtacatagctgactacgttctaggagaccaatatagatcagattccaaaacagttaaccaacaagcttatttctatgctaaatccctcaaactcaccaacaaagatgtctttgtcttggacgttgacgacactactctctctaatctccagtattttgctaaccatggatttggtgtggaaccacacaatacgacggcgtttaagaactgggttcttgatggcgaagcattcgcactgccagagactcttaaaatgcacaacaaactgttggctctcggcatcaagattgtattcttatcagaaagaccactgagtctaggggatgtaacagccatgaacttaaggagggtgggattcacacatgggag

SEQ ID NO: 6436 - DNA, 428 bp, Glycine max
  Clone ID: jC-gmfl02220079g02d1
cttaatggaacaagagctcataattcatgaaagcctcgaaaagggaaaacacctttgttcagggcccctacatgactaagtaataatactcaggatcttatttcatagaaattaaggagcaacttaaaggcttgatttgagagcttaatcatagtccaagggattaggcagcttaaaagtcctagtccctttgttgcttcccaggaggtcactccattggtctccaacgtttccaatgattctgtatccctccttttccagcttttctttctcagctgatttggattcaaatgataacttaccagagtactcagatggatccctgagaattaacttctcccatgtgttgaatccaacctcctttaagttcttggctgttacatcccctaaactcaggggtctttctgataagaatacaatcttgatgc

SEQ ID NO: 6437 - DNA, 545 bp, Glycine max
  Clone ID: jC-gmfl02220079g03a1
aacaaagaactcactcaaactcaacatagagagagagagagagagagagagagagagagagagagatatgaccgattacgaagagagatacgaagggaacggagaagaagaggaacttcacaattctcatcatcagcctcatcctgattcctctcctttacccacccacgacgatctcaccgattccaaatctcgccatggatctcgcgattatgacagagattcttccagaagcagagataaggagcgggagaaagggagagacagggagagaaaaagggaaaaggggagggacagggaaagggagaaaagtagggatagggattcggagagaagcagggacaaggacagagatagggataagagcaaagacagggagagggaccgggatcgtgatggtgagaaggaaagggaccgtgacagggaccgccatcatagagatcgacacagggatcgtggtgagatgagggaaaggacaagggatagagatgacgatgattatcacagaagtcgtgactttgacagaagaaaggattttgatagag

SEQ ID NO: 6438 - DNA, 377 bp, Glycine max
  Clone ID: jC-gmfl02220079g03d1
agaaaaattcttaagggccccccaaaatccctgggaaccgggaaaacctttttaacaaaatggcaaaaaggcttttttaacacccgcatttaaaaaaaacaagttttggactatgaccccaattttagcttaacaggttatgaaaaaaaacccaaaaaatttccctgccaaacaaaaaaaaacccaaaccccccataattaacccctaaaaaccccccggaaaaaattgttccctggaaaaaaaaccccttccccttgaattccaaaaaaatttgggccctttaaacccgcccgggctttttgaccccccccaaaataaacggaccccaaaaaaaccttttcaaactcaaggggggggttccccacaaaaggggggc

SEQ ID NO: 6439 - DNA, 568 bp, Glycine max
  Clone ID: jC-gmfl02220079g04a1
cttcaatttcaatagtctcttcttcatcttcattcgtctccgattctccttccacttcttcccctaccaccagaatcagacccttcttcttcccttcctccaaccgaacccctctttttgtgttccccagagctccccttcccaatgctaccctcagagcctcttcttcttccgtttccgcaccgcaggaaaatgggtcgccggaacagttcctgaagagcaattccatcgccgatttcttgcggttcaagcgccgggccgatggtggtgtcagtgccgaattgcagacagctcttgtcagctataagaagaggttcccttggtcacttatgcgccctttccttcaggttgacttggtttccacaattcacatcgctgatgaagagtattttctggccctccaaaaggaacttgagagctatgattgtgtcctttacgaaatggtagctagcatggaaagtttagaaaatagaagaaatgctactactacaaaaaggttaaaaagttcacgcacaaggggttttaacattctgggatgcatccaaagacagatggctctaattcttac

SEQ ID NO: 6440 - DNA, 470 bp, Glycine max
  Clone ID: jC-gmfl02220079g04d1
agctaataaagcatatgcttaatggctaaagttcattgaatgcaaacaatcgtatcattttaacactgaaaaatgggaacatctggaattttatatttgtcaataaaaattaaaaagcttttgatgtttacagtggcatatataagatttcttcatcctatttagcaattagtatgaattttccgagtccaatgatcatatcatctgtgaattatcaacatactgaagaagttctgagccaagttcagagacccaattcactgcagtgccaaagaagagctcccagaaccacagatccaatgctaagactgatgaaaagatgagcaatgccaaggtctgatagcggttcaatggccagcctgaggccttagcaattgtcttcagaaatggaaatgaatcagtatttaggtcctttttcgttatggaccaagctgttatccactgtacattagacgggactaaatcaaaat

SEQ ID NO: 6441 - DNA, 599 bp, Glycine max
  Clone ID: jC-gmfl02220079g05a1
tcgttttcatactttattcctttaaaaaatgtttaaaaggagcaaacatgagtgaaaatccttttcgactagactgttattaacgtgtaagccaccggcagattttaaaattctctttaataaaattaaagtatctctatttatatgaaaacgattataaaaaaattaacataatggacaaaatagtttaagcagaaattaattcatatctactcacaatgatcctatcaaatttaagaaggattaattttagtgaaagatacttatatataccaaaaacaaaagttcgttcataaaatagaagtaaaatattttaaaattaagtgatgataagtactatcacattataaagaataggttctaccaaaaaaatgaagtataggtccgttcttgcgtcaagtcaactatcctcaatttcatgaaaaaaatatatactaattgagtgtctctaaaatagatatgtgagttatacttattttttaatgtaatttaatgtacatcttgattacagatttttattttctggtatctacaaaattcttttgtcatcataacaatgtataataatcactggtttcgttaataattaacttttatta

SEQ ID NO: 6442 - DNA, 537 bp, Glycine max
  unsure (1)..(537): unsure at all n locations
  Clone ID: jC-gmfl02220079g05d1
gtgggaactgttttgtcacggacaaagagaagactatggtatttggttcagagtgaaggcccccccttcgtgtctgtcttgtacagttgggttacattaaataattgaggaatcttcttcaacatcaagttgagtgtgaaattaaggtattatgtacatttttaactgcaagtgttgttttttaaaaaaagcaaataagaatttgtttatttttaattttagtatatactgggaataatgagatttgtcttctaggctgtgttcggtttgcaaaagatggaatgaattaccggtggacggaaatgaagtatgcgagtttggttgtgatgattttagagaaagtaaagttacaagttgtgagatccgtaacatcaattttctttctttccggttgtagtaaaattatttttttaggccacaaaataaatttgtaagaaattaattnttttaagaatttttttctttgattatctaattatcagattatatttaggcaacanaaattatttttttagaacaaaaatctagattctttct

SEQ ID NO: 6443 - DNA, 468 bp, Glycine max
  Clone ID: jC-gmfl02220079g06a1
ctcctttcttagttgctacttctgcatctccccttcccttctttcattctttgtcacaaaactacaaagtcactgagtttagtgtttcgccaaaaccaatggatgatgatattgtaggactcggttttcgtccaacagaagaagaacttgtggacttttacctcaaacacatgttgctcggcaatgatccccgtgcccacgtcatccctgtcattgatctttgcgatgtggaaccttgggatgtaccagccctgttgatttcaagtattcaagaagtaaaaggtttaacaggacaaccaagtgtggcttctggaaagccactgggaaagaccgtgacattaggacaggggacactaacaccgtcattgggactaagaagactcttgtttactatcaaagccgtgtttcctgtggtgtcaagtccaactgggttattcacgaatatcatgctgttacctttcatgaaag

SEQ ID NO: 6444 - DNA, 419 bp, Glycine max
  Clone ID: jC-gmfl02220079g06d1
atgcataaactgtcattatgcaatttctaatacagaattgttttctaataaatttgctattatagaactatttatattttataacatatactcctaaatagctgccagtaatccattaatggaactaacttagattttagttcccatcatacgaagttgtctagtcttcaataatattgtcttcaatgactctgattgggtggagctatggacaaaattatgcttattttcttcattgataactatactttcaccggctaagattgaattcaggaattcatcttcctttgtagtttcaaatggattccgcataacattgtcttcatttctaaaataggcattgttaaatgcatagtttggaaaggatgctccttcctgctcaatactagttcgagactgttgtattggagagaagcaat

SEQ ID NO: 6445 - DNA, 483 bp, Glycine max
  Clone ID: jC-gmfl02220079g07a1
gaaaggtaggatatcgattgaaggggaaagagtggctctcttgggctatggatcagctgttcagaactgttcggctgcagcttccttagtggaatgtcatggcttgcgcttaacagctgctgatgcacgtttctgcaaaccactggatcggtccctgattcgcagcctggcaaaatcacatgaggctttaatcacagtcgaagaaggatcaattggaggatttggttctcatgttgctcagttcatggcccttgatggccttctagatggcaaattgaagtggcagccaatagttcttccggatcgtcatatcgatcatggatcacctgctgaccaattgtctctagccgggcttacaccatctcacatagcatgcacatgcgctcaatgtactatgacaaacaagagaggcactataggtcatgtcataacaatattcatgggatcaagttttcacttcacacgatgtacaaaggctaacat

SEQ ID NO: 6446 - DNA, 478 bp, Glycine max
  unsure (1)..(478): unsure at all n locations
  Clone ID: jC-gmfl02220079g07d1
ataactagtcgttttactatatgacaatctacatcatacacttcaaaatttcacaatattacattactttttcatattacacatggtgaatcatgttatactttgtacatcgtgtgaagtgaaaaattgaaccccttaatatttctatgacatgacctctagtgcctctcttgtttgtcctagtacattgaacactgttgctgctatgtgagatggtgtaagaccggctaaagacaattggtcagcaggtgatccatgatcgatataacgatccggaagaactattggccgccacttcaatttgccatctagaaggccatcaagggccatgaactgagcaacatgagaaccaaatcctccaattgatccttcttcaactgtgattaaaacctcatgtgattttgccaggctgcgaatcagggaccgatccaatggtttgcagaaacgtgcatcagcaactgttaagcgcangccatga

SEQ ID NO: 6447 - DNA, 499 bp, Glycine max
  unsure (1)..(499): unsure at all n locations
  Clone ID: jC-gmfl02220079g08a1
tgcacacacaaacacaacaacatatggaggtgctaagggtgcaaaccatagcttccaaatccaaagatgctgccatcccagccatgtttgttagggcagagacagagcaaccaggcatcacaaccgttcaaggggtgaaccttgaggtgccaattattgattttagtgacccagatgaagggaaagtggcgcatgagattttggaggcaagtagggactggggcatgttccaaattgtgaaccatgacatacctagtgatgttataagaaagttgcaaagtgttgggaaaatgttctttgagttgccacaagaggaaaaagagttgattgctaagcctgctgggtctgattctattgaagggtatggcacaaagcttcagaaagaggtgaatggcaagaaagggtgggtggatcatttgttccacattgtgtggcctccttccttcatcaactacagtttctggccccaaaaccccncttcttacaggggaagtaatga

SEQ ID NO: 6448 - DNA, 466 bp, Glycine max
  unsure (1)..(466): unsure at all n locations
  Clone ID: jC-gmfl02220079g08d1
aatctacttcccacaagtcacactttcattccataaattaaataacaaaacagagaaaccaacattagtcacagatcttatttaatctacttcccacaagtcacactttcattccataaattaaataacaaaacagagaaaccatgagctataattatctcgtagtgcccacttcattcattgagggatcttattgagcttacaataagcataatccttgtatttcttggttttgtattttggtggattgtcttggttaaccaactttgggtgaggaccaacttcttgttcctttttgggttctatgaacacgggccacgacattcttgtctcatctttgttcactgttgttctgtgaaaaactgccttatattttccattgctcagtatctccatttggtcgccaatgtgaataacgagggcattggggacatacttaacatcgacccatggccatncctacatg

SEQ ID NO: 6449 - DNA, 627 bp, Glycine max
  unsure (1)..(627): unsure at all n locations
  Clone ID: jC-gmfl02220079g09a1
cgcctaagagtgcgattangacatcngaagcatattngaaanaccagtatcananatgangnaaaagacccaggagggggaatagagaatatggnaaaagtttttttggactcaggattcaagacgctgatgtggttttttcttttcaagagaaataaaattattgttgatatttgtgttgtggtgatttatttagtctttagaaactgaggttttcactttttcacatgaagtagtgttgtcatttttcaggttggtgtcgatatcaaggcatgagagatggttagagaaaatgctgtaatgggtggtgccagtgaagagcgtggtgttcgggtcactcgagcaatggctagagctgttttgggtggggtctctgcctcttctagaccgtccttcaagaagcaacacaagaacaacaagggtttcggtagggtagcactagcagatgtcactaacataagcaagaaagggtgtgctacatcaaaatctcaggcaagaggaagttacaagaagactaacacaaagggagcttccaatgtctccattcaagttttgtcaactcaagaagatgttagagcaaaattagcaaaagatttaccctcaatatcaatggtacagtcacatgac

SEQ ID NO: 6450 - DNA, 338 bp, Glycine max
  Clone ID: jC-gmfl02220079g09d1
actataattctcagctttaattgtatcaatcatcatgatgtaacaatttcatgttacaagatctagaagtaccagagcttggtaccatcctacaagttacaactactgatcaggcggtgattgggaattaacaataattagaatggccaaataattacaaccaaagataatacacctttccagtatcagaaattctgaaagtcaatatttagtcttcatagatgcatcatttacagttttatacttgagccttgaaaagtgactgcaccggtttcggagacaaatttgccacactcctgaacttctgctggttatatttttcgcgtatagaattcaga

SEQ ID NO: 6451 - DNA, 607 bp, Glycine max
  unsure (1)..(607): unsure at all n locations
  Clone ID: jC-gmfl02220079g10a1
tgcccaggtgctcatcgcgctagatccagatangcataccatgtcnangttggagcagaagacgagagagggaagggagagaggaaatgcattttgcacatctaggaaatattgctgataatccgagtcgtgtaacgatgagggcatggtttgcctttggccacttgataccatttttcaaactttccatagccttagccaaagctggtgctcatgtctccttcatatccactcccaaaaacattcaaaggcttcccaaaattccttcgactttatctcatttggttcattttgtggaacttcctttaccatcattggacaatgatatcttgccagaaggtgctgaggccaccgtggacattccatttgaaaaacatgagtacttaaaggcagcattagataagctccaagatgctgtgaagcaatttgtggccaatcagttaccagattggataatctgtgatttcaatcctcactgggttgtagacattgcccaagagtttcaggtaaagttaatcttattttctattttatctgctactggaacaacattcatagtaccaccaggtacaaaggcatgtcacttatctccagaaagtctaacagc

SEQ ID NO: 6452 - DNA, 515 bp, Glycine max
  unsure (1)..(515): unsure at all n locations
  Clone ID: jC-gmfl02220079g10d1
cagagagagtgtcttattgaattcaaaaacaggagttggctttagttacccttacaagatagaaaacagatgcaattattgaaccacgacttaaagagtaggactttattcaacaaactgatgataaacctaaaataagacacagtaatgatcctcttcaacatcatattggtttcctgattccattcttaagaaactgtacaaatgcagctacgtagtgatcctggtgcagcttcaagtttcctacaattgcagcagcttctcttgtattatttctgatcttctttccttcctccaatacncatggcttgtctaagggatgcggcaatgtcatttctagtgaatgatccatcttcatttcttttcacttcaatggctaatctcttttccaccaaaaaccttgcattaagaggttgctctatataaagggtaataaacnaagtgtattcccaactggaaggttttaatgacagaaccccagncagagtgaaacaaagatccttcaatagatgaat

SEQ ID NO: 6453 - DNA, 646 bp, Glycine max
  unsure (1)..(646): unsure at all n locations
  Clone ID: jC-gmfl02220079g11a1
gccccgcccatggtgcgatagacatagatccgatgggaaaacagttcaaagttgggaganaagatcgagganggtaaagagactgttgttaaagattttacccatgacactccttctgctccttattctggtctttcacgcggcgggggccaatggacagtggcagctcctccacaaaaacatcggcattgtcgccatgcacatgcagcttctgcacaacgaccgcgtcatcatcttcgaccgcaccgacttcggactctccaacctaaccctccccgacggaagatgccgcaacaacccaaacgagttggtcgtcaaacgcgactgcaccgcgcactccatcgaatacgacgtcgcagccaacacattccgcgctctctttgtccaaaccaatgtctggtgctcctccggttcggtctctcccgacggaacattagtccaaaccggtggcttcaacgacggctaccgtgcggtcagaaccttcaccccgtgccgctcgtgcgactgggcagaagttcagcatggactcgcggcgcagagatggtacgccaccaatcacatcttgccagatggacgtcaaataattatcggaggaagaagacaattcaactacgagttttaccccaagacacaagccaagaatact

SEQ ID NO: 6454 - DNA, 496 bp, Glycine max
  unsure (1)..(496): unsure at all n locations
  Clone ID: jC-gmfl02220079g11d1
gcaaagaaatatccatgaactataattacaaacttcctagggtattatttacacgccccataggccataaatggctttatttgaattttatcttcccatatcttacagtttaaatactcactcaagaatctgttcactcccagacattcacaacaataaataacttgaataaaaagaacatatacgaacgaagttgtcgagcaggcagagacgagaattcacaatttcacaccatctggacccaaataccgtggcttggaacttcttgatggaccacaaacagcagatagaaacccggtggcgcaagaacagcggaagccggcgcggtaacttaacctcgtgcgttgattctccaaccccactaaatggtgcggcttcagcaccaacagcctctgattcatggagaacgagtgcgtgttaaatggcggncccagcatggtaacagacaccgaatccccaaccaaagtcgcgctcaccttaaaccgaagccttaacg

SEQ ID NO: 6455 - DNA, 678 bp, Glycine max
  unsure (1)..(678): unsure at all n locations
  Clone ID: jC-gmfl02220079g12a1
gtacttactgcccaatggtagcctgnctcnngacaaatagcatgtcagcatcaagnagatctaggtcngangttggangcnnanngccctgaggtggaagtaggattggagatgtattttgatatattattgatttttatgtgctgagagacccaatactcttacggggggccatagagggagagagaagggatggttgtagtggtcaatatgatcaaatttgcaatgcacgattacctcgagcacttgatccccactctgctccatcagaagagctttccacttctttgggatacatggtgcaacttctaaatcttgttattcacaacttggctgccccagcacttcataactcaggttttgcgggttcttgctctcggatatggcaacgagattcttattgggatgcacgtccttcctcaaggagcaatgaatatcccctttttatacctggccaaacttattgctctactgacggagaaaactcatggtctgagagaagctcaagcaattttggagttgcttcggtggaatctgagaggaggcatcgcctagattcatctgggagtactagctctaattattctttggcttcttcgcattctgttcaaacacacaaagatttgcagaacggaatttcacttctaaaagacagcgtagtctgcatcacagcttact

SEQ ID NO: 6456 - DNA, 404 bp, Glycine max
  Clone ID: jC-gmfl02220079g12d1
aaaagaaataaaatgaatgattatttctcaaaaagtatttagcgaacatacacttatgtgtaaaggtgatattacttactgagcccatatcaatgggtgaattcttgttaactattctgagaagaaaattttgttgaaaggttgcaaattaagatcacttccctttagcatctatgaacatggctcgagtccagtgctcaacatcctcactttgcgatggtgggggaggaaaagtgggatgctcaacaatatcccacccttcaattaggcactcatttttgccgtcagataaatcagcggcataaagaaaactaccagtagaacttggcagataattttcaatcttcggtgtgggcacagaatgtgcactttcagcaaagtagttgatgaaatagccgaattca

SEQ ID NO: 6457 - DNA, 487 bp, Glycine max
  Clone ID: jC-gmfl02220079h01a1
agcaaacagagtcttccccacaccatcctttcccccaagagaatgagcccgttcatgctcctctaccaccgaacacaccccgccaccaccgaacgctaacgcgcgccccttacttaccctgcgcctcggcactctgccttattccccctccttcataagctccgcgttaaccgtcctctctctctctctctctcggatcggagcgagactggcggctccggcgttgggggcgttagggttagggttagggtttccaagagatgtggtatgctccaggcattgatgaatctgctctcgctgcgttggaagccatttggccgcgatgctgctgatcgaatcgattccatcggagataccggaagataaggcctagacggcttgctttggctccgcgacggccgaaaatatggctctggcgatttcttcatggccgctggtcacgccaaccaggttctcggagaccatagccagatcgagtctggtgctc

SEQ ID NO: 6458 - DNA, 524 bp, Glycine max
  Clone ID: jC-gmfl02220079h01d1
aaaattcaaataatatgttataacttaataaattatcgtgcctcaagaatggcatattgtagccaggtacctagcaaaccaatggcgtatgcttcaggtatcggtacaagactgcttacaatgatacaagtcagtgatcgagagcacttcgaattgaaagtgccgggtctagcactgtgcctctggaaataaggtcgtgatttaagaataaaacaataacggatatatcatcatgaaaatggcgtcgaaccttcttgtcaatcttacggaggtctgaatatcgcatttctcgttttcttgctgcttcgtgtagagcagccttgataagtctcttggcactacccgcatgtggattgctgtttacaatatccacggctttctcattactcaagtgctcccataaaccatcagatgcgaatataaggaaggaatcatttggttggagaggatgagaaagaatagtgggattagcactcaagatgggcatgttcattggttcacgaagtctgaattttgcattaagt

SEQ ID NO: 6459 - DNA, 561 bp, Glycine max
  unsure (1)..(561): unsure at all n locations
  Clone ID: jC-gmfl02220079h02a1
caaattaaagccaacattaaggtttcatcaactgaaacaggagttatatttggtaacatagtctatgagacatcttctaatgttcttgagagaacagttattgttctaaatgatatccatattgacatcatggactacatttctcctgcatcttgtgctgatgtggcattcagaactatgtgggctgagtttgagtgggaaaacaaggttgctgtaaatacagtattacaagatgagagggacttcctgaaccacattgtcaagtctacaaatatgaagtgcctgactccaccatcggcattggaaggggattgtggattccttgctgcaaacctttatgctaagagtgtttttggggaagatgctttggtgaatgtgagcattgaaaagcaagcagatggtaagttgagtggatacatcagaataagaagtaaaactcagggaattgccctcagtcttggggataagataactttgaaacagaagggagccgcttaataagagcaaatgcccctgtttctcttatgcntccttcgtttgtatgtcttatcaacttcgtgt

SEQ ID NO: 6460 - DNA, 522 bp, Glycine max
  Clone ID: jC-gmfl02220079h02d1
acttataaacgaaactggaggtatcatttatcattaatgattattatccgaacatatgtatgcaaggccaaccagaacaattgtcactagattgattctcatatcaatatacggggtccggccccatgtgtagaaaaataaaagatgggtaataaggatttttcttaagcaatatccaaggaaagaatcccgaccaaattgaaaattcaaaaggaaaaaaaaaataatactaacaagcgggctgccaccaaaagccttaaaatttgaagcaataaccaaccttgaagttagcccccaccggaagctaccccaagttgataagacattccaacgaaggaaaccttagagaaaacagggcatttgctcctattaagcggctcccttttgtttcaaagttatcttatccccaagactgagggcaattccctgagttttacttcttattctgatgtatccactcaacttaccatctgcttgcttttcaatgctcacattcaccaaagcatttttcccaaaaacact

SEQ ID NO: 6461 - DNA, 515 bp, Glycine max
  Clone ID: jC-gmfl02220079h03d1
gaagaaaactcccaagtatcattgtctgattgacaaattgtatctggaactgtttttatcaaacatttacatgctctgagtagaatgaacatcctatattttctcttttcacacctacggctctcatttatgctaatccagctattatggatggattaggttcgccatcccagtggctgagggagctgagatgggactcccagggcttaaatccaataagccttcttattgactgtgccaaatgtgttgcatctggaagcatcaagaatgcagatattggccttgagtacatatctcagatttcatctcctgatggtaatgcagtgcaaaggatggtcacttatttcagtgaagcacttggttacaggataataaaaaatttgcctggtgtatataaagtctctcaatccatcaaaaacatcattatcttctgaagatatccttgttcagaaatacttctatgaactgtgtccatttttgaagttctcatacctgatcacaaaccatgccattgc

SEQ ID NO: 6462 - DNA, 522 bp, Glycine max
  unsure (1)..(522): unsure at all n locations
  Clone ID: jC-gmfl02220079h04d1
acaataaaaaatatattattaagaataaagaagttcaattcgagtttgaataaagttgagctagtgtaaaaactgtattaaacaattctgctatgtcaaaggagcattacaattgactagcatatcatgtctgtcattttatgcatccttccatagatctagctatggctgagtatttggtctacgaaggaatggaataaaccccctgttcagttttaaattatctaagccaataacacattctgcttcaggagaatttacgatcattctcgaaggtgcttggtcacggtcacaacagcttgccttcttgggtgtccttttccttataatagaaggaacattctcataggtcattgctaagtttcttagcaaagtttctgggttgatgtcgcctgtgtcattcttgagtatagacgttggnggagtacaaccgttattgtatgcacatgccaatgcatgtgtgtttttggacttagacattcactgaattcatctacactatgtggcatagtgttgtttgag

SEQ ID NO: 6463 - DNA, 544 bp, Glycine max
  Clone ID: jC-gmfl02220079h05a1
cttaatccctcacaagctgagaaagaagaaggaattattcctcttacggattcattgcccattatttctcagtcctacattacgcattcccttaaagtggaaggtcttcgaggcattgtaactgtgcctgccaagctggagtctacatctctcgtctttgcctatggagttgatctattttttactcagattgctccttctaggacttacgattcactaactgaagatttcagctatgctttgcttcttctaacaattgttgcacttgtagctgcaatatttgtcacttgggtattatcccagaggaaagatctacaagagaaatggagatgatctgtcctccatttttgccttataatttctaattctgaagttctaagtagttatatctctgttttctttgttagttattagttcggattttgaaatcttttgtagcttgaattgcaaaagtaatgcagaattccattaggttgaatggaggatgttttcattttaatgatgtaaattgaggagtacgaaagataatcatgaaattccgatg

SEQ ID NO: 6464 - DNA, 492 bp, Glycine max
  unsure (1)..(492): unsure at all n locations
  Clone ID: jC-gmfl02220079h05d1
gtcaaacatcggaatttcatgattatctttcgtactcctcaatttacatcattaaaatgaaaacatcctccattcaacctaatggaattctgcattacttttgcaattcaagctacaaaagatttcaaaatccgaactaataactaacaaagaaaacagagataaaactacttaaaacttcaaaattagaaattataaggcaaaaatggaggacagatcatctccatttctcttgtagatctttcctctgggataatacccaagtgacaaatattgcagctacaagtgcaacaattgttagaagaagcaaagcatagctgaaatcttcagttagtgaatcgtaagtcctagaaggagcaatctgagtaaaaaatagatcaactccataggcaaagacgagagatgtagactccagcttggcaggcacagttacaatgcctcgaagaccttncactttagggaatgcgtaatgtangactgagaaataatggg

SEQ ID NO: 6465 - DNA, 545 bp, Glycine max
  Clone ID: jC-gmfl02220079h06a1
gagaaaacaacattgcccgaaggccaattacctaacacagggaagaaaacaagaaaagaaaaaaaggtttcatcataatcataagctgttaggcatggcgactggattcgacaccgcccatgagaagaagaagaagattgccgttctgagcgtgtcttccatcctcctggtggcgatggtggttgcggcggccgtcggcataagagacggcgccgaagtggtcgaggaaggtggcgacacgatcgcgaaatctcaaaggaaccagcaagtgatatgcgaatccgcggaatacaaagaaacatgccacaagagtctggccaaagcctccggaaccagcgatctgaaggagctcatcataaccgcgttcaacgccacggccgaagagatcgcgaaccaaatcaaaaactcgacgctctaccatgaactcgccaccgaccacatgacaaaacaggccacggacatctgcaggaggtactaagttacgctgtcgacgacattcgccgatccgttcacacgttggaaaagttcgacctaaacaagttgaa

SEQ ID NO: 6466 - DNA, 493 bp, Glycine max
  Clone ID: jC-gmfl02220079h06d1
gttaaaaaagtatcttgctgacatttcttttcttctcgtagattaagaaggaacaagcagcagtagcctagctagccaagagtgaaattaaaccggtgagaattgaaattgagatcaaattcccaaggaatcggtaatttagctagaataagtctgctgcaattactagccagcatggggaaactaacaagtgcgtgaagaaaaggaaaactgaattaacaaatgagtaccactgcatcatcacttttcctttccttaaacactgccagacatatatataacatgtcaaaaaggctctgagatgatgacggagcgagcatgcagggatatatggctacatagtctattagttaaggacttataaaaaaagaccatgaaatgaaatcagatgaattaagctggtgggaatggcagcgcataagtgggccagggaatagggcaccccagacctatgatcaagaatcacgctcagtcgaatagcgatctgaaagaa

SEQ ID NO: 6467 - DNA, 529 bp, Glycine max
  Clone ID: jC-gmfl02220079h07a1
ccactttcttcacccaaacctccttcccctcccactctctctccaaaaccttcgatagcccatttcgccccatccccgaaagtcaacgtatttgcgaacttcccggcgaggaggcacgtgggggttcgagtttcgaacgcgctgatcgaaccagacggagggaagctggtggagcttgtggtgagggataattcagaaagagacttgaagaagggtgaggctctttcgttgccgaggatcaagctttcaaggattgacctggagtgggtccatgtcctcagcgaaggatgggccacacccctcagaggcttcatgagagaagccgagttcctccaaacgcttcatttcaactctctccgactcgatgatgggtcggtcgtgaacatgtcagtgcccatcgtgctggctattgatgatgcccagaagcataagatcggggataacaaaagggttgctcttttcgattccaaggagaccctgttgcaattctcaatgatgttgagatttataagcattcctaagaagaaag

SEQ ID NO: 6468 - DNA, 473 bp, Glycine max
  Clone ID: jC-gmfl02220079h07d1
gatcaaaccaaatcctccttagcacaaccacattcattatattacagagagttggcatgcacaattgcaccataagtgcaagaggctgtctaatgccatacatacagagagaggcaatgtatctgtgcctgtgcctccccagagttttaattattattattattattaaattgggccaggagtatgtatcttagcaggagaatacataaagcttaaggtttctcccaatcatgagatatacattataatacaagattaagctggaacagcttccggcactttgccattgcttgagagtactaagctatcatagtattcaaccagtaccttccaaccaccagggcacataaatccatcaggagggctttctttggtccttgccagtgtgcgcatctttgtgcctgatatgaacgggaagtcctgaggccttgaagggtcaaagaatgccattttaccctgagtcttgtcatatg

SEQ ID NO: 6469 - DNA, 538 bp, Glycine max
  unsure (1)..(538): unsure at all n locations
  Clone ID: jC-gmfl02220079h08a1
agagcagagatctagcgtattctctcgctctttctttcactgtcacagagccacatccatgggcttcccagccaacggcgcctctgcggcccagcccctaaacttcctcatctacggccgcacgggctggattggcggcctcctcggctccctctgccgggcccagggcatctccttccattacggctcgggccgcctcgagaaccgggcctccctcgaaaccgacatagccctcctcaagccctcccacgtcttcaacgccgccggcgtcacgggccgccccaacgtcgactggtgcgagtcccacaaagtcgagaccatccgaaccaacgtcgtcggaaccctcactctcgccgacgtctgccgcgaccacggcctcattctcatcaactacgccaccggttgcattttcgagtacgactccgatcacccnctcggatccggtatcggcttcaaagaaaccgactctcccaatttcaccggttctttttactccaagaccaaggcaatggtagaggatccgctgaagaactatgat

SEQ ID NO: 6470 - DNA, 456 bp, Glycine max
  Clone ID: jC-gmfl02220079h08d1
aaaaacgacaagaaatttattcaatcacgagcggtaaaaatacaacatacaaataaaaataagggagagtgacatctacacaaaatccacacaaacttaaatcaaacgaggacaataataataataataataatgatgatgataaaaatgagaaaagcttgaacctttagacttgagctttaaccttctggtttggctcgaagacatacttaataagagaatccttaatagacaacagttctggaaattccttcttcaatttggcagcgtcaagctcattgttgctcctcggagcaacaatcaccttggcctgttcctgagagtgaaggttgttccaggtgaagttcgggtcaacataatctctgtacatctccaagatttcattgtgactaaccactctgggttagtaaagttccagatcccagtcagattcctcttccccatctcaattgaaat

SEQ ID NO: 6471 - DNA, 593 bp, Glycine max
  unsure (1)..(593): unsure at all n locations
  Clone ID: jC-gmfl02220079h09d1
gtccctttcagcgcgtggcagttcagatncgtatagcacatcgcaggttaacgncaggttgactagctgactaactggcggccgcccttttctttttcaactatttttaatttaactcatttcttggtgaaaaaaggacaaatgacatgaattagaagcgcatttttatccaccacattattgggctcagactaagcaaacctaaaataaaaggactcacgaaatatataactataaaatctcacaaaacaatctatgcaaacaaaatcacactgtctacttaatttctaaggctctaatttaaccactttttttgggtacttcttcatagctgcacttaagcctgtataatgcaattctagtaataacagcactttgtctgtgatgatttgtatcttcttgatgatggatggcaatgaaatcttggataggacttttttctttccgaaatgaaaatgaattgagcttatctagctgtagatgattttggtactgcgtttgttgcttgaaaaatcagcctcccttgaagtatttttttaggagaaccttcaaaattttggcccacctttggtgaaacttaagtaacttgagaa

SEQ ID NO: 6472 - DNA, 652 bp, Glycine max
  unsure (1)..(652): unsure at all n locations
  Clone ID: jC-gmfl02220079h10a1
tgcccaagatgcgcattgtcattgaagtcacatangnanaccaggtncnngttggnngnnnngnccgnggggggggnttgggtttggacttngttgtttgaggttctggattctcagtgtttgcgaagcgctgcatcatcctttggggaagaatggatcatcaagggcatagccagaacccatctatgggggtggttggtagtggagctcaattagcatatggttctaacccatatcagccaggccaaataactgggccaccggggtctgttgtgacatcagttggtaccattcaatccacacctgctggagctcagctaggacagcatcaacttgcttatcagcatattcatcagcaacaacaacaccagcttcagcaacagctccaacaattttggtcaaaccagtaccaagaaattgagaaggttactgatttcaagaaccacagtcttcccctggcaaggatcaagaagattatgaaggctgacgaggatgttaggatgatatcagccgaagcaccagtcatctttgcaagggcatgtgaaatgttcatattagagttaaccctgcgttcttggaatcacactgaagagaacaaaaggcgaacacttcaaaaaatgatattgctgctgcaatcaccaggactgacatc

SEQ ID NO: 6473 - DNA, 386 bp, Glycine max
  Clone ID: jC-gmfl02220079h10d1
caagtaaaaatcctgctatgcaccagtaaataaatattatcatctgatgacctgtaaatttaaacatgaaaaataccattttatccagctaaatcaaagataaggttaagttttccctagcacattatctacatatgttaatagtctgcattgcatgtaaactatcagctacagcttctgctcgcaatgtagtatggatcttcccaaccattcagtttgacattcacaactgattccggggcctggttatcttaatttccacgacacatcagctaatgttctggggacaactgtcgttggtctggtggctgtggccacatttgtggtgccatgtaggggtgagactgctgagcatacatgtttgggtccatcacaggcttacccat

SEQ ID NO: 6474 - DNA, 609 bp, Glycine max
  unsure (1)..(609): unsure at all n locations
  Clone ID: jC-gmfl02220079h11a1
gctcctgcccctggtgcagtttgacatagaagcacgtangaacancagtacctaagcttggagataggntcgaggacacataagtaacataaccaatggcatcgcgtgcaggagccaattatcgtattgcacgggtctctgctcatcttcggcctccaaatttccaggaagggagtgatgttcttcttaagagtgctgagtgcagagcaaagggtggcgcacctggattcaaagttgcaattccgggggctgctgggggaattggtcaacccctttctttgctgatgaagatgaacccattggcttcagctcttcatctttatgatgttgtcaacacccctggtgtcactgctgatgttagccacatggacactggtgctgcggttcgtggctttctggggcagcaacaacttgagagtgcactcactggcatggacttggtaatcatacctgctggggtaccaaggaaacctgcgatgacaagagatgatgtatttaaaataaatgctggaattgagaggaccctatgtgaaggaattgccaagagctgccccaatgcaattgtcaacttgactagtaatccagtgaattccacagttgctattgctg

SEQ ID NO: 6475 - DNA, 375 bp, Glycine max
  Clone ID: jC-gmfl02220079h11d1
gttattacaagcaggtccaaaggtgacaaaaccgacagcatcaataaatacgggtgacatcaaaaaaacaaagctcagaacaaaaggagaaaaaaaaaaaataaggacaaaacaaaacattacacaaggaacgaaaatattagaaaccaaaaccatatcaaccttaccacaataaattgggggagaaaaatacaccctgcccggaagccttctgccccctataaatttgccttgttcaaaccaattctaccattctcaatccagggacccaacccattaaaccctggcgcatcagcaccacctaaacctaccttgggggcccagaaaggaaaatccctgccccggaaattaaaactagcacactttaataaccca

SEQ ID NO: 6476 - DNA, 381 bp, Glycine max
  unsure (1)..(381): unsure at all n locations
  Clone ID: jC-gmfl02220079h12a1
gcatcaggccaatgatgcagatcngacactagatgtcgcataagnagaccagttcttaagttcatgctcccgctcgagaagaaagatgcctatggaagggagtgttggatttctcttcagccttagattcattttcagggctttcgcataaccgacaaccaatgtggaccatagacaaagaggactattgctatgtgggcagcatcactgagcccacctcagtacttggctccagaagaagccttagccctcccacttcctactccacaatgtctacttgtcttggcagcagcaacaacagcactagcaagggtggtggtggcacctcagccaacaccaccaacaacggaacatcaccctgagactacaacatcaacaacc

SEQ ID NO: 6477 - DNA, 427 bp, Glycine max
  Clone ID: jC-gmfl02220079h12d1
agctaaattgttcgtttcttactaagcaatttgctttgtgttcaagataacaaagaaacagttacccatctttagatgatgggaatggggaaaggcataattactacccatgttcaaagtgacatactagtaatattagaactacagaatggtagattccaacccatgcagttaagaaaacatttgggtgtggatctcatcaataagcctaaattacacaaacaattacataaactgcaatgtaagttaccatgcacctttaaaaatataaggtaattagcttctgctgctgctcctcagtcctcagcatctccaagtagaaactgagatgagttctttcttctgccagcatagaacaagtgatgaaggctttctcttcacatgaaatcccctacaggtgccctctgaactagacacttagcttgag

SEQ ID NO: 6478 - DNA, 522 bp, Glycine max
  Clone ID: jC-gmfl02220080a01a1
agggaagagaaaattaaatgatagtagaataaagagggaattcaaaaaagcagtgtattcaataataatgctctaggtaaatataaaacagctcaggatctaaacacacaaacatggcatcttttagcacacatataagatgaattgcaagactatcatatctttcaggatgttcccagttccctgttcaagtagtcaatgaacattctttttgcactatctgcatcagaaggaggtggtggcccacttaaacttgtttgccctgtcaattttatgaaggtacggcgcatcctacgaagctctggaagcccaactgaccttgaaatgttaattacaggcaagtctttccctatggaaactccattaagtggtcctccaagagcttgagattgtgcttctactatagcatttgtgacctcttgtgttgctttgtccaactcatagagagaatttgcatcagaaaaacgcgaggtttgagttgcaatagttggttgtagtatcttaacatccctggttttggag

SEQ ID NO: 6479 - DNA, 380 bp, Glycine max
  Clone ID: jC-gmfl02220080a01d1
ttcgttcttttttttttttttttttttgatgggagaccctaccaaatatgctttttggcgtgttatgagagtacactcgcctagataccatggatacggtgacacaggccggcacatatcgcccaggcaaacttttttgatggaagataggcacccacggaacctggattatgtgtccctcgatatatgtttttatcgaacaataggctgctaatcgccggggcatttattgattctataacctgtctggagctcccaaactgtggcaatgtttgcccaccctagattcactagagcctaggaatgaaccttatgcgcctggggcctcacaaaaaggggaactgagcggcgtgccatggtatgggtggtggattatttga

SEQ ID NO: 6480 - DNA, 516 bp, Glycine max
  Clone ID: jC-gmfl02220080a02a1
cacaaaactgtagaatatatcacaaatacctttggaagaacctatagtttctcggtacataaacctcaacacgacacaactctcactcacccctccaagccagtgcgaaagcgcaccaaacaaaatttcataatatgggaggaaaggaaaattaatatcctttaaaaactaaagaataacacaagaaataattaattaaaaaatggggggaaagtgtctcccaaaaaaaaaaacgagaaggcactcagcatcctggtaaaggcaatggacttctggccgacccaaacagctccacttaaaactgtgtaacaggacatttcttcaaaaacatacttgataagtaaaacaagtaaaataattgcataaaattttcaatttgctcattgtttgcacgatcaactccgttgagcaaatgcagataatgcatttgcatgtgcaggtgggagattgctcagaagaggttgaatttgttgcccatataatgaacatagatgagaaaaagctctgcctactaca

SEQ ID NO: 6481 - DNA, 477 bp, Glycine max
  Clone ID: jC-gmfl02220080a02d1
ggaatcaaaactataataatcattttcaatatttaaaatgattttttactacaacaagtgtgaaaaaattaatatttatattatatccattacaatacaataatacatcattttaaaattagtctaatatcatccatgtaacgacgaacatctgatccaggaaaaatttgtctctcaagccatagccttaaaatctgcgttctagttgtggttgctacaagtatttaagtgtccaattcctgctgttgcatagtacgcacaagtagtgcaaaaatataagcaacaatacgcattcacctacgtagtcacacatgattgacaagtgagtatatgtgcgttacaagacttgccttaattgatgaaaatacttttttccaaatctttgacaaatgccttagcatgaacatcctgatttgtagcacccatttcaattaaggaagatgtcattgaggcataatcttcaatagcagtggtcct

SEQ ID NO: 6482 - DNA, 443 bp, Glycine max
  Clone ID: jC-gmfl02220080a03a1
aaacccgcagggtttttatagacaccaagttcaaaaaatatcccgtttaagttaacggggggcgaccatttgcatgttaattgaaatttagagacaaaaaacctggtggtgcgaaagcaattttacaggggaaaaatcaggttgaacccactattgattttgatgaaggctgttggcattcaacttaagaacggttttgccgttctctcttaaatttttaaggggctgaaagcttgtttcaagttggctactttcttgaatatacatattttgcattggaaaaaagagagacttcctctggggcccaagggacaattctaacttcaatgaatcctcactttggggctggtcatgcctgaatgtattctctaatccaaaaaacttttgagcgaacatttttgcttctttcagactcttctttatagcacttaatctacctttgg

SEQ ID NO: 6483 - DNA, 514 bp, Glycine max
  Clone ID: jC-gmfl02220080a03d1
gtaaacatcacatgtaagtatccaatcaccattacatatccttactctgtggctcaatgcgcaaacaaatcccgatttagttacaggatttacaattaattatacatcaataaggtatagcgtgcttgtaaactcttgagaagtaagaaaatacaattcagacataaaaatcatatataactattaatttcttaaaattacatccaaacatgttgtataaatgtgaaaccaatcacgataatagtgacttactatttgatggacataaaatgtaagcaataaaagcctatgagagaatggatcatctgggagactttaaagattcaatttgagatttgcctcgaggtcctctcattctaatgaagagtctgtattcatcgcaggtcattgctgggtagagtgagggccttttcggtgttacaagctcttttattggttctatgggtatgtcactcttggggttgcagaaaaacgcaagagagactctctctttatctgaaattactatcactct

SEQ ID NO: 6484 - DNA, 509 bp, Glycine max
  unsure (1)..(509): unsure at all n locations
  Clone ID: jC-gmfl02220080a04a1
cgttggcatcattaacgttttccctcctcactctctctcctcctctaaaatcactatacggttgtaccattcaaattaaagattgttcgaactgcagagtaaactgcagtatagagctaataattctcagatcaacgaaaaaaagaggtttcattgtcatggagctgaattcacagaatagaccattttcaatcaaattatggcctcctagtcagaacactaggcagacccttgtggagaggatgaccaacaatctgactactaaatctcttttcacacagaagtatggaactttggacaaggaagaggctgaagagaatgcaaagaggattgaggatgtggcttttgctactgcgaatctacactatgagaaagagccagatggtgatggaggttctgcattccagctttatgccaaagaatgtagtaagctcctcctagatgttcttaaaagaggacctagtaaaaaggatgatgaagtggtgacatcntgtaataccacttcatct

SEQ ID NO: 6485 - DNA, 490 bp, Glycine max
  unsure (1)..(490): unsure at all n locations
  Clone ID: jC-gmfl02220080a04d1
gaaaggaaacatcgaaaacaacatttcgataaatattgcagacattttatgtcccctcaataattgactgctgtcaaattgatgcgtcttaatagttacataaactactacgaataanaatggtctaaaaaccctctactgtcacgagagttacttgcgcagcagaacatgaaagaagactgcaactgcttcagtcaatcatcaactacaaggttcttcattttggattcgagttcatctgcaccaccttcttcatcagattcttcatcattgtctattccatcagggtcattttcgtctaatggaccgagcatgtctggagattttttaaatatatccttcaactcatcaatgccttcatcagaaatgaagttcccattaatgttcagaagtttgaaatcagccttttgcaccacagtcacagccagttgttgagccccagccctgcttatttggttggcacttagatcaatttcctttaattggacat

SEQ ID NO: 6486 - DNA, 358 bp, Glycine max
  Clone ID: jC-gmfl02220080a05a1
gtagagatgcttacaatatcaagctgacaagtccgttattcaaaccaccaaactgcgtaaatggaaacaccgacgggccatgcgataaaattcatggcgcggacgccgatatgctatttgcaggcctatatcttcgtgctgtgagcgtacgaggcataaaaggttcacttcctcctcatggagctgttcagtgtgatgagaatacaccagatggaaggaagcttacatctgcattttacaactactttgttgtcagactgttatgtggagcatcaattgcagaaactcaagtggaatggattgaatacaacaagggattgaagtggtgtgataaagaatcaagtgcatcaatcacctc

SEQ ID NO: 6487 - DNA, 364 bp, Glycine max
  Clone ID: jC-gmfl02220080a05d1
atcctgatattcataatgggtaatggattaatttataattaaaactcggtacattgcaccaagtaatatatagttctagtagagtggaatagctgcaccaatattgggctatgcatgttgcttatggacgtgatataagtaaatgaggatggagtaggggtcactttctatctcactgattattatattattttgggccaaccacaaactacctaatggaagtatattgagactgcttggatgcagagtataaatgttttacaaaagtttttacgatagagatggagctcttttgtggtgaagaaactttgaaaaactttctgaaggacgctcctactgttatatgcaaataaaacataaatgc

SEQ ID NO: 6488 - DNA, 463 bp, Glycine max
  Clone ID: jC-gmfl02220080a06a1
atgctcacaatacaagctcacaagccgacactcaaaccaccaaactgcgtaattggaaacaccgacagtccatgctataaaattcatggtgcggacgccgatatgctatttgcacgcctctatcttgtggctctgggcgtaggaggtataaaaggctcacttcctcctcatggagctgagcagtttgatgagaatacaccggagggaaggaagcagagatctgcatttttcaactactttgttttgagcctgtcatgtggagcattaattgcagtaacttttgtggtattgattgaagacaacaagggatggaagtggggtgtagtagtcttaactgcatcaatacttctctccattccagttttctattcttggctcacacaagggcaggaccatgattccagcaggaagccccatcacatccatgttcaaggatcttgttgtagcaatttgcaacaactgc

SEQ ID NO: 6489 - DNA, 568 bp, Glycine max
  Clone ID: jC-gmfl02220080a06d1
ctgaactaggttgcgttgcgggccccagttaagtgaactgattccaggggctcactgctcactggccggccttcgtcctttttttttttaaactgttcagattatattaactttacataaccctgacaagtaaaattactggacaaacattgagttctattttacagacccatagtaacctctaaacagctgctgataccagcaaataaacgaacttggctgatcactgtgaatgggcgaagaaaaaaattatgataggtttccccccaaacagatgtatgatgaacactttacctcattcatgccggccccacgctggcccataatgctgacataacactgccttcctccgaacacgaggcacacgctaaaactgcatggatggaactgccattcatattagcacatggaggggttgcatgaaaagctgattgcctacagggctcttatgtaataagctttcgagacagggaggagggacccgagtcaccaatagacttccctaagctcagttgagatatgccaaccagtgcatccacattgatagggcttttagaatgtactggag

SEQ ID NO: 6490 - DNA, 546 bp, Glycine max
  Clone ID: jC-gmfl02220080a07a1
cagcttcttcccccccacaaaatccaaaaatcagataacccagataaaacaaacatcccaaaaatcaatgaacacacacaaaaaaataatctagggtttctgaataataaattcgctcttgcgttttttcgattttcgtttttttttctctttcaactttttcctttccgccaaacaaacaccgttcccgctcctccattggccattctttcattccaagaaagcgagaattcaactgttctcggattggtaccagctggtgcatctttttttcttcaattttttttttcggaattctttttggttcctaattttatcaggagaagctgaattttccgggaaaatttgcgttgttttctcttacttgcgaccttcgccgccggctgctactgattcgtcaacggcaactcctacgaggtgttttgcctgatttgttgatcctgcggagaaggtgcttggaatagagggaagggaaaagacagagggaattgtataataaatcccaaattttcaattgatgaaaatttattgtaagtgattttcttt

SEQ ID NO: 6491 - DNA, 354 bp, Glycine max
  Clone ID: jC-gmfl02220080a07d1
aataactgagattttggatataaacattgcataaagcgtgacaaaacttgcagcaatatgttatatacaagatttgtccaaagatgtacctcgcactgaactccaacaaaccatacaagtgagaatgctcgtatgtcacatcatatccaagtttcaccaaatcaaccaacaaattacactcattttttacgtaaatagcaataaaagaacactgcacaatacaccaattttaacgatccatggggaaaaatccaaatctcatcgcagtgagcgctactaaaattctagtcgctgctcccacatttgactagggaattgaagagttaattccacacttgcataacttgaaatgca

SEQ ID NO: 6492 - DNA, 550 bp, Glycine max
  Clone ID: jC-gmfl02220080a08a1
cagcttcttcccccccacaaaaaccaaaaatcagatatcccagataaaacaaacatcccaaaaatcaatgaacacacacaaaaaaataatctagggtttctgaataataaattcgctcttgcgttttttcgtttgtcgctattttttctctttcaactttttcctttacgacaaacaaacaccgttcccgctcgtacattgttcattctttcattccaagaaagcgagaattcaactgttctcggattggtaccagctggagcatctttttttcttcaattttttttttcggaattcttttgggctcctaattttatcaagagaagctgaattttccgggaaaatttgcgttgttttctctaccttgcgaccttcgccgccggctgctactgattcgacaacggcaactcctacgaggtgttttgcctgatttgacgatcctgcggagaaggtgcttggaatagagggaagggaaaagacagagggaatgttataatcacatcccaaatctccaaatgatgaaaatttatgttcgttgatttctctttta

SEQ ID NO: 6493 - DNA, 486 bp, Glycine max
  Clone ID: jC-gmfl02220080a08d1
aataactgagattttggatataaacattgcataaagcgtgacaaaacttgcagcaatatgttatatacaagatttgtccaaagatgtacctcgcactgaactccaacaaaccatacaagtgagaatgctcgtatgtcacatcatatccaagtttcaccaaatcaaccaacaaattacactcatttttcacgtaaatagcaataaaagaacactgcacaatacaccaattttaacgatccatggggaaaaatcaaaatctcatcgtaggagtgttactaaaattcagttgttgctcccacatttgactagggaattgaagagttaatcccacacttgcgtacttgaaatgcatctccatggccttgcacgcgttcccttgtccaggagcatcagcaagccgacactctcaagcggtagcccgaacatatacttgctttggtgagctctctttctccagaaaacaattgatgagatccacttaacaat

SEQ ID NO: 6494 - DNA, 283 bp, Glycine max
  Clone ID: jC-gmfl02220080a09a1
ggaacatgccatggtacatattatgatgacagaatatccgacaatctcgattgttcagcggcagactagaccgaaattgagaaagaagaaattggtcggcccatagcactctgtctttcagaggcacataacacagggaaaaaaagttattgcggaccactctcaatctgaagatgatgaactgcgttcacttagcgactaggaagctgaatctgttggtgaagctcagccagatgaacacgaccatcatgctcaaatacagctgatgaagacaaacatcttg

SEQ ID NO: 6495 - DNA, 473 bp, Glycine max
  Clone ID: jC-gmfl02220080a09d1
gaaaaaaacctcccattagcgtaccatctattaacatgatcttattcagcggaaagcagccgccattttttcattttttacagtggcagtgccaatggcaataataatgcatgaacaaacagaaggcagaagctgcacaatttgctaaatctagtggttgacgtgtagagaacctcacaagtatacataaagaactagctagggagaagattcatctgtgcaagagaagaccataaataaagattacttctgtcccatttccatggcttccaaggttgggctatggtaagagtaaggggtaaaggtatcaccatttctccttggttcttgattcgtaacccgttcctccatggcctgcccaacaggtgattcccgattaatgattggattggttcgtgattcctccattgcccggaaatatgcatatggaccccatccttcatcatatagggcggagggaagaactgcatata

SEQ ID NO: 6496 - DNA, 334 bp, Glycine max
  Clone ID: jC-gmfl02220080a10a1
atttccatctattaatcaatgccgttgattactgcctcatcagaggcgtgtaccacagagatctgtagcccgagaatcttcttctggactcaaatgctattctagacgggacagattttggatagggcacgtatgcacgtcaggaggatgaacttttcctcactgctggaggaactccaaactttgttggttcggaggcgcgttaggagagaagtaatgttgggtctacatctgatatgtggtcctgtggagagattttcttggagctgatggctgggagcttgcccttcgatgagccatgatatgtgacactcaaccgaaacaatggcagggg

SEQ ID NO: 6497 - DNA, 501 bp, Glycine max
  Clone ID: jC-gmfl02220080a10d1
aattaaggtcatgaaatattatgaataaaagttcaaggaaatatacactctaagttttgtacgatctaggttttgtttttaccctatcaaacattagagcagactctcccaactcaacatgctccagttttagctaagcacgatatcttccatgaacaaaaaaagttcctgatatcttccaacaaaaatacgtgcatgatatcttccatgcatgcacatcttgattcttcattggtttgcttcagaatgccacactatgtcttgcaaccctgatgatgatgaaaagcttttgtagaacttgtgaaactctagtgtgtcacccccggtctttcgcagttccaccatgtgcaaggagggagccacttcaaaaacctctgtagcaactgaaaggtgacccttccttccgctcttatcaccttgcagcttcatcttataatttcgcttgtgaacattaaatcccagaggcttcgcagcttcctcaatttttgacatgatttcatt

SEQ ID NO: 6498 - DNA, 567 bp, Glycine max
  Clone ID: jC-gmfl02220080a11a1
agataaaggtccgccttaactggattatgttacaggaggcttctacagccagaaccgaatcgcgaagaacaaaaactggctataccaagtgttgaaacgccagaacatagtggtggcagatggcacagggcagaagaacatgcccacaggaatagtcctccataactgcgagatcatgccggaccctaccctcttggcagaccgcttgagcgtgaagacttacttggccaggccatggaaggcattctcaagggcagtgttcatcgagaatgttatcggggacttgattcagccagatggttatattccatggaacccaattgaaccaaacacacaggattgctacttcgctgagtttggcaacactggacccaggttcgttgctcaagcaagagccaagtttggcaaaggtcttattagcaagcaggaggctgcacaattcactgctgagccttggctccaagctagcacttggttgcctgctgctggcgttccttttgatgctagcttcaccaaagcttaaggatccgagacaaaccagcatcttgagagttataatcttttttt

SEQ ID NO: 6499 - DNA, 256 bp, Glycine max
  Clone ID: jC-gmfl02220080a11d1
aaattgcaaaacagtaatgtcaataaataccaactgttacatgatacaggaaggtgtaccattatcttgaggtactgatatctcaattagcaaaaactaactataatcatttgaaagcagattaggtacgctacaaaagagtaacccaatcaggggaaggctgcatatgtagaatggaaaacacaacatataatctgcagagctgtagacatcatcatggaccaatggccccatgaattctacagattgctttctt

SEQ ID NO: 6500 - DNA, 457 bp, Glycine max
  Clone ID: jC-gmfl02220080a12a1
gcgaggccttgggaggcaatcactctctagaaagcttagttattggaggagtggatgttgagtgtcttcctgacgaaggtgtactgccacactctcttgtttatctagagatcaggaagtgtggacatctaaaaagactggactacaaaggtctctgccacctctcctctctcaaggaattgcttcttgttggctgccccacgctcgaatgcttaccagaggagggtctgcccaaatccatttcaactttgtggattatcaattgtccgttgctcaaacaacgttgccgggaacccgaaggcgaatactgtccaaagattgctcacattaaacgcgtgtcggtattagattgaaagagctgtcaaccacgagctatgttagtacatgatttccaaattggtttgtactttgaagattaatcaatatcgggggaagaatagtttggacgtaaaaagta

SEQ ID NO: 6501 - DNA, 465 bp, Glycine max
  Clone ID: jC-gmfl02220080a12d1
gtacttgcatgatgtaagctctggaattaataagtcagtgaattcccgataaaagcaatgcccataatcctgttacaaatttagctgtacataaactaatgtttaaaaacattttagaataagcatgcatcttccaggatagcaagtagctaatctgcatctcattaaccacctgcactcaaggactttcaaaggcaccaggaggacattggtcatcgtgcaatgtatcttttccatggacacaagaaaatttgagtttgacgaccttaaccaatttcctagtctccttattcaaagctagaatatttggaggcattcagtggctggaatttctgatgatacttttgacgtacaaactattactcccccgatattgattaatcttcaaagtgcaaaccaatttggaaatcctgtactaacatagctcctggttgacagctctttcaatctaataacgacacgcgt

SEQ ID NO: 6502 - DNA, 531 bp, Glycine max
  Clone ID: jC-gmfl02220080b01a1
gaaactcaatccattttttatattagaaaatgcatggttcaattttcaagctttaatttggtatgtttgcccccaccaatagactacaatttttgtaacatagtatgacttgcaaaccaattgctacacaatgcgtgtgttcttgctatacttccatcagttgtctaagtcaataaaattgatcttaaaatctatgcaaaacttctaccaatcagtaccactgtcatggaaagtttttccagaacctcaagtttaggtccatagggaagaaaaaaaagtcaccaactccataattcaagtgctcactagcaatcttacaaacctggcaggaagtatttgcatgtcccaaaatgacaggtactttgaagttcatcagtggacccaaatttgctgcttcaacttgagagatggaaagaatgtgatgtgatctatgcaattgcatttgacaaacaagtgggccatttctccatctgaaaggcagcaaaactatcttggaccttgaccatattcaagtcagacaaaagatgtcat

SEQ ID NO: 6503 - DNA, 410 bp, Glycine max
  Clone ID: jC-gmfl02220080b01d1
gggccaaaaagctgacacaaattttccatatagaaactaaataccctactaatccaggaaacgggacctaactagccaacattccaaaattttggaaaattcaaaacataaacatagtaaaagactgttccccaatcattgtttttaaaaacacaaaggcaaatcaataattaagttagatttaatcaactttttccattttgctaccctcagcatcggcatcagcatcggcgtcctcgagagggggcatgtcagcatttgcttcaccagcattttcataaatgctcagtccaagcttcagcatcctgtgaatcctgttccgaaagtgttgggatcatcaagggtgaacccagaagttagaagagcagtctcaaagagtaggagaacgagatccttcacagatttgtcat

SEQ ID NO: 6504 - DNA, 478 bp, Glycine max
  Clone ID: jC-gmfl02220080b02a1
cgggacgagtctatcccaattggccttcctgacgtcccatcctcctattcggcggccgcccttttttttttttttttacttttttctttttttttttttttttattttttttacgaccacccttttagaacaagggaaggggtgtaaaacaccaactttccatactcaaaaaaaaaaaatacctttttattttttaccatttgcaggaaagcattaatcttaagttgtacagaggccttaaaaaaatttggtgaaagcactcaattggaaaccaccctatgcccccttcctgcaaaaaatatatctcttgacaccaatcaccataatgctataaaaactttgcgcccttatttatatgacccgcgcccgaagggcatcaaacattgtttactggaaggtaggctatgataacaatacccttggacgcctcatacacgttaccctcacaactttcaatatatacagaagcctaagcttt

SEQ ID NO: 6505 - DNA, 488 bp, Glycine max
  Clone ID: jC-gmfl02220080b02d1
gcgaacaattctaattcaggtacatccatttgttttggttttctttgcccatgttccgatgattttcaggaacaaaaatctctagtctttggttttcatataccatccaaatatttgtggcaacaatgttcccttgctcaatcagtaagcccccaaaacaaagaaaacattatgttctgttaatgaatagtaatattttacaaagaattaatgtacaacaacccccaaaaaatcatgattttgaaaaaagctggatcctattgacgtagcaagaagacgcaggatcctggaggcaattgcaaaatgcatcctcatccttgggaaatgatattggtagaggatggtcaggaatgacaccaaccttggcaatatctgtatgtgccggtgtctcgtagcgagcaacagtaacaaccaatccagagccgtcagagagctcaaaaactgattggatcttcccttttccaaatgttggctcttcaaacaatacg

SEQ ID NO: 6506 - DNA, 412 bp, Glycine max
  Clone ID: jC-gmfl02220080b03a1
attaattatttttaatttttttacggacaccattctcgaaaaagatttgggatgtaaaaccccaactgtccatactaaaaataataaacgtaccagagtaggattctatatttgcagaaaaggactaatctaaagttgtaaggaacctgaaaaaatttggtgaaggcactgaaatggaacccaacctcgggcacttcatgcaaaaactaaatcttctgataccaaacaccagaatgctatcaaaactcattgccactattgatatgaacggcgcccgaagggcgcacaaacttgtatagaggagcatcggctatgaaaacaaaacccgagggcgccacatacagcgttccactcagaactttcaatatatcctgaagcgtaggcttatggatatgacacgagagcacatcca

SEQ ID NO: 6507 - DNA, 476 bp, Glycine max
  Clone ID: jC-gmfl02220080b03d1
tttcttttttttttttaagattaataaagaagacttcttttggtattgaagcaacattacatatatgatcattattttaccatagccacgttggagtatttattcacaagagaatacagttactagacacctcctcttttaatggggacggcttgtttttctacataggaaaaatagtaaaagaaaaggggtaaaaaaaggggcattattgtagttgatcattctaggctgtacaagtaggagcttttcctgttattgcgggcttgacattagcacatttagctgttgctgcagctccggtgaatgggagatcaatattagccatctctacaccctcacatggtgcaccactactacaaacaagaaccaccccatcttgacgttctgaagtgcccttaatgttcttgaaggaaaccttgcttatcttgatttttgatggagtctggtgggagcattggttccaaggacaatgctct

SEQ ID NO: 6508 - DNA, 498 bp, Glycine max
  Clone ID: jC-gmfl02220080b04a1
ttcaacccaatccaatcctcgcacacatgcatgctgtctctgccaaagttggggccaagtcataactacatttccattgttacgattctttctttccatcccaaccacttattaagcgtctgatccaatttctttctctcaccatggatcatcgcaaaccattgttacccacttcctctgacgatgctccaaatccacgcactcggaaggaccttgttctaatgatttgcggcttgtttttgctctcttcccttgttgcctttggagggtacagggcctccaacgcgccacatgctgacgtgtcatcgccagcatcgaacgatgaacaacctagtcccacatcggtgccttttacgaaatggtacccggtttcacggggtgtttcttctggggtgtcggagaagtcatcaagcatgttgattgcggctaaagatggagcttcggaagcattttcttgggacaatagcatgctgtcgtggcagagaactgcttttcatt

SEQ ID NO: 6509 - DNA, 446 bp, Glycine max
  Clone ID: jC-gmfl02220080b04d1
gaatcggataacatttgcatcatatttctttgaaaaacagattctcttgtaagaatcattaaacatgatatgataaaattataataaacattctcataaacataaatgagcaaaaaatgaaggaatgggctttgagcaagaacccataactttatgtgtgtttatgggaaggtaaacaattgatgagtacaaattgccaccccaagatgttttccgatcctttgtgactacaagtcttttatatccaatttaattatttattttaattcttctgatcagggtggaatgggcgtataaatgcagaattcatttgccaaacattgagtgaggctgtcacagtggcctcagtagcattgttgaacaagaacaacctagcagctccatagattgcctttgttggataaacccgagatgtcacaaccgtgcttccaccttgagcaaagctt

SEQ ID NO: 6510 - DNA, 392 bp, Glycine max
  Clone ID: jC-gmfl02220080b05a1
gtatctctctctctgccatctctcggaaaatatttcagagctttctaaagcctttagaattctctggaacctttttgatcgtccgccgaggatcgcaattcctccaaatcgtcgtgactcgtcgcttagttcggttctaactgcatgaactggttcgggaagctggattcatcatcttcgaacttgaactgcaatcacttggttacttgcctcgagatttttatcctccatttttcgccttactcgctctcttccaccttcgatagccacactaatgtgggatttaattactaatatggagtcgagaactaagagtaatccccaattaacaagagctctttgctatgcaaacgatggcaatcagcagggaaggtcaccatctgttatagtca

SEQ ID NO: 6511 - DNA, 417 bp, Glycine max
  Clone ID: jC-gmfl02220080b05d1
gttgtcccaattttattataagtatactgatagaagtgacaacgcctcttaggtgcgcaatattcacattaccagttactggaaacactgactaaggaaatccaacacaaaatgtgatttcacaagtggacatatactcttaaagactatttgccaaaacatttgctatataacttatatataggttgataacaaaagaacaagcatagatagattgtgtttctgtccactagttgtgacccaaagacgattaaagacgcgatatctgaagcgggatagacatggaaccctcttctcccatcactggctggaataaatcaacctctccatatcgctcgagcacacgcattcggcaatctttagcagccatcgttccagtggagtatgccccatggacagaacctggatagctcatgc

SEQ ID NO: 6512 - DNA, 552 bp, Glycine max
  Clone ID: jC-gmfl02220080b06a1
gttacggcactgactcttcttaagaaacacctgttcaattatcaagggcatgtctcagctgctttagttcttggtggggttgatatcactggacctcatttgcatactatttatcctcatgggtcaactgacaccctcccatttgctacaatgggatcaggttcacttgctgcaatgtctgtatttgagtctaagtacaaggaaagtttgagtagggatgaaggcattaagctagttgttgaggcgatatgtgctggtatatttaatgacctaggaagtggaagtaatgttgatgtttgtgtgataaccaagggacataaggaatatctcaggaaccaccttctaccaaatcctcgtacctatgtcaatccaaaaggctttgatttccccaaaaagacagaggtcctcttaacaaagattacaccgttgaaggagaaggtggaagtgattgaaagagatgctatggaagagttacaatcattccaaaaaaaattggtgtatgagtatgaaacttgattagtgcagtggctgtgatatttgattttgactttc

SEQ ID NO: 6513 - DNA, 394 bp, Glycine max
  Clone ID: jC-gmfl02220080b06d1
gaaagcacaaaatcaaatatcacagccattgcactaatcaagtttcatactcatacaccaattttttttggaatgattgttactcttccatagcatctccttcaatcacttccaccttctccttcaacggtgtaatctttgttaagaggacctctgtctttttggggaaatcaaagccttttggattgacataggtaccaggatttggtagaaggtggttcctgagatattccttatgtcccttgggtatcacacaaacatcaacattacttccacttcctaggtcattaaatataccagcacatatggcctcaacaactagcttaatgccttcatccctactcaaactttccttgtacttagactcaaatacagacattgcggcacgggaacc

SEQ ID NO: 6514 - DNA, 545 bp, Glycine max
  unsure (1)..(545): unsure at all n locations
  Clone ID: jC-gmfl02220080b07a1
ggccttagtctccatatttcagagtaactgtttcccaccctttttattttcgtttgctttttcattactgattagtgatcagtgaagagctggacccatgaccctttccatgttttgagagttgttaatctgaactgaagatagagattgaggaaaaccagtagctagtggttgtgtgttaagagtgatggatagctccgaaatcaagtcaccagcagaaggctcccaacaggggacaccaggaaattcactgcgtagaaagaagctagccatatacttcattgagtctgaggatagaaggatggcctttggtcgtgggtacacagcaggatctacaccagttgatatccatggcaaatccattgttgatctttcaaagactggtggttggattgctgccttctttatatttggaaatgaaatggcagaaagaatggcttatttcggcctttccgttaacatggtggcctntatgttttatgtgatgcatagacctttacaagttcatccgacgcagtcaacaatttttaggaatattacaagct

SEQ ID NO: 6515 - DNA, 417 bp, Glycine max
  Clone ID: jC-gmfl02220080b07d1
atgcaattatcttgttttcatctttgcttacatgtaagtgtttaatcgtccatcaccaccaaatccattgtcttatgcagaatactccctagctagtttgcgttttcaatccctatgacgacttaatattgaaaatcttgacggtaatttttgaccattcaagaagactattacaagttattcaatggaacaaagacagcactttgtgttggtatgagtcgagttcctatgtagctagctaggagctcccaacatatgtcatttcatgtttctccatctcatgaacttggtgttccctgtgcttgtatctatgcgccgaatatacgaagatgccgaagttgatgatgctcaaagctgtgagaagccagtataagtaatcaaacctgccagtgttgatgttttgagacagacaagatg

SEQ ID NO: 6516 - DNA, 553 bp, Glycine max
  Clone ID: jC-gmfl02220080b08a1
cttcaagaaaactcttgattcttgagagtgttaaatttcctatttatgtcttcttcctcaaacccttctcctttttagtactgtccccagaacaagtccatcatataccatatggaaaccaattctagtttcttcatacactcacaagaataacaaattaatatcctaatatcatattcttgagaaagcgttctctctatctatatggcagccttattcatctcaaagtccaagcttcaatccacaggacttgttcttgtcctaaacctatctttctttttcctcttctgtctccttctaaaggtttattatctccaacctcctaataactcgaattctcaatctaatggccccctcaaaatcttcaaccatgcaagattggtcagagatgttagtgttgaaggctgcactgacctccacaagtactcagattacgagtcaaagtgtttatatgtgaagaactatcttgactgcaggtcaaaagggtacataaactatctccaaatcttctattgcagctttggaaaatttcaaattttgggacaaaccctac

SEQ ID NO: 6517 - DNA, 292 bp, Glycine max
  Clone ID: jC-gmfl02220080b08d1
gatcgagaaatgtatgatttaacataagcctgttccatgaggaccacaatggacccctttagagacttgcttctctagctaaaatttcacaattccaacagccatggctatccttatgaccaaaaagcagaggtacacactcaataggcctgcccccaaggatttatcaagcctcatattcttcttaggcaaaatcacaagtgcccaaagcacccctcccatcaagaacaaaagggtctcatagagtgaagcgttcttaggagtgacatacgggtctggatgctcagaccta

SEQ ID NO: 6518 - DNA, 133 bp, Glycine max
  Clone ID: jC-gmfl02220080b09a1
gttgacgtaatacattggtggcggggatcactgccactgcacaagagtgcacggcagagatcctcatccctcgaattatcgtgcgggctcacacgctaattggagacggacagagacagggtcaactacatat

SEQ ID NO: 6519 - DNA, 486 bp, Glycine max
  Clone ID: jC-gmfl02220080b09d1
aattaaggtcatgaaatattatgaataaaagttcaaggaaatatacactctaagttttgtacgatctatgttttggtaataccctatcaaacattagagcagactctcccaactgaacatgctccagattagctaagcacgatatcttgcatgaacaaaaaaagttcctgatatcttccaacaaaaatacgtgcatgataacttccatgcatgcacatcttgattcttcattagatatgcttcagaatgccacactatgtctagcaaccctgatgatgatgaaaagcttttgtagaactcgcgaaactctagtgtgtcacccccggtctttcgcagttccaccatgtgcaaggagggagccacttcaaaaacctctgtagcaactgaaaggtgaccctttcttccgctcttatcaccgtgcagcttcatcttataatttcgcttgtgaacattaaatcccagaggcttcgcagcttcctcaatttt

SEQ ID NO: 6520 - DNA, 376 bp, Glycine max
  unsure (1)..(376): unsure at all n locations
  Clone ID: jC-gmfl02220080b10a1
ctaccttctctctacttcaacatagcaaactttgagaaagaatggctgccatcacatttgacatttctgcctataaaaaacttccaatatatataatattgctaacccaccaccacatcacacccaacagactctttatagctaaactgtcaaccaatggctgntgtgattgtatttttcacaacagccgcctgccatgccaagccagcccagaccttcttaccttgaaggttgagcatctggtgacttaccatataagcctctgccatgggctgaacccccacagcatctatcgaggatcacagagttagttctaatgcactaccaaagggccctgcaagctgaaccagggatcttggcaacagaggcatcgggc

SEQ ID NO: 6521 - DNA, 490 bp, Glycine max
  Clone ID: jC-gmfl02220080b10d1
aaactgattgatcatcatgctctcattaacaatataaaaactaaacaattaaaaacaaaaatagaaaagaaaagaaattaaaaacagctgattaattaaccttgtagcatcatcatcatcatcataatcatcattaacctatctaatacattattattttcttcccccttagatcaagaactagaagatccattagcaccaacaacgttcaccccatcatagtgattactactcggatcttcagcgcgatcttcaccaccatcattgttagggttttcaaaaaccttgacatcactcccatttgcatcattatcagtagaaatattatttttagtagtaatattaatatcattactagtaacaatattattgttatcctttttggcaaaggtgtttttgttgttatgcatccaaaccttgagaacgcttctatcaacgccaacttcgttgcaaatttcgtgaatcaaatcctcgtcgcgcttctgaatct

SEQ ID NO: 6522 - DNA, 387 bp, Glycine max
  Clone ID: jC-gmfl02220080b11a1
gatgcaccccttcttctatttctatgcctaactcttcctttggttgtgatgaccttgttcaaataccgtataaccttcaagaattcaccactttcaccaggacctagaggacttgccataagagggaatctttatcaactagatagcccttctgttcatgagcagctatggtatctgtcagagaaatagtgggcctttattgtcccttcaatttggattaaggccggccatagctgtttcctctccaaaattggcctctgaggggacgagagacactgaccttgagtgctagggacgacctaaattactaagccaacagaaactaacctatgatgggtgagacatgggattgtcctcatacgatagttattggagagaaatcagaaa

SEQ ID NO: 6523 - DNA, 482 bp, Glycine max
  Clone ID: jC-gmfl02220080b11d1
ggagtgcttacatctttatttaataatcttcgttggaagagtacaatcattaattattttattttatttttttcagcagtagttacgacttttggattttacatatagcacttggccacaacacacagaggattcttcttatgctgtgtaactcctggcaacacttcagtatcaatgtcttcctttttcattccttgtggcaattcccagtcaaaggaataaagaagattagcaagtataagatccaatgcagcaaatgccatattcataccagggcacaatctacgaccagcaccgaatggaataaactcaaaatcttgtccataaagatctatgtcgcaatttaaaaacctctcaggtataaactcttctggatctttccaagccttaggatctctatgaattgcccaagcattcacatataataatgtcttggctggaatttcgtagccatctaacatgcattttttatttgtttctct

SEQ ID NO: 6524 - DNA, 492 bp, Glycine max
  unsure (1)..(492): unsure at all n locations
  Clone ID: jC-gmfl02220080b12a1
tgctaccattgctattcgaaancaantaggaatgtatgcacgagttaactagctcactaggctggcggacaccacccttcatggttcttattaagattaaggagatagcggaggcgcaactaggttatcaccatatagaaagcagatgacactgtgcctgcttacttcaacgactcacaacgataaggccaccatgaccccagttgaaatatctgggctcaacgcgatgcgaattaacaactagcctaccggggatgtcatagacactgggctcgacaaaaatgccactatctatggggagaagaatgatttcatcttcgcaactcagaggtgggacacatgatgtctctcttataaccaacgaggatggtattttccaggcgaatgccactgatggcgaaactcacgggggaggcgtagataatgattgcagaaagatgaaccattttgttcaagggtgcacgaggaagaacgagaaggatattaaaggaa

SEQ ID NO: 6525 - DNA, 441 bp, Glycine max
  Clone ID: jC-gmfl02220080b12d1
agcaaaaacttatatcattgttcaagtaaaaacggggaaaagtacattaaaaaaaaaagagaaaaataaaatcgcaataaaaacctattggcacgctggtatctaaacttcaaaaggggttttgacaaaatcaagaacaacccatgagaatcttctggttaatcgacttcctcaattttggggccagcaccgtttccactgccagctgcaggaccatcctcatccatgggtccacccgcattaccaccagcaccctgggacatttttgctatgaagggattacaaatgctttccaactccttcatcttatccccaaattcggcagccttagcaagttgggttccatctagcccttggatagcctgctcaaacgcattttcaaatttcttcttatcatcagaagacagtttggaagcaattttggcatccctgattggggtc

SEQ ID NO: 6526 - DNA, 368 bp, Glycine max
  Clone ID: jC-gmfl02220080c01a1
gggttattgtatttatttttttttttaatttgttgagttgttgtttagtgtgatgatggttgttttttgtttttctttgggggggaagaaaccgactgttgttttcttcaacaccccgaaaaccttaatcacccatggactcttggaaaaaaaagggggggggtgaaaaaaaacaaccgaaaagcccgtgttggggggggcctgaagggcgagacccctttgaatatgtagcccccgggttcccccccacatgtggcaacaagtacgtgctttcaagccaaacccatgagaggggcaagggccaaaaccccccgttagagggtgggcggaaaaaaaacggaacagcgcgagaatggggtgtacaagaa

SEQ ID NO: 6527 - DNA, 439 bp, Glycine max
  Clone ID: jC-gmfl02220080c01d1
tttgttttttttttttttttttttttttttttttttgttaaattttttttttttttggttttttttgtgttttttattacatttgttttttttaagtttttttttcagaaaaggaaaccggagatttttaccccgggggggggaaaaaaatagtttttttttggggtgcgcaaaaataaggaagggggcccagtgatcacaaaagacagggggggaaaaccggggggcagccaaaaaaaaaggagatgggaaaaatccccctttaccaacagggggaaaaagcagaaagggccggcccgacccccccacaaaaagttagccccccctaagggggcaagggaaacccccccttaagggggaaaaaaagggggggggggggggggtacacccctggggtcccagaaaatgagggaaccgcgaagccccccgggatttaaat

SEQ ID NO: 6528 - DNA, 463 bp, Glycine max
  Clone ID: jC-gmfl02220080c02a1
acatattactcttttatattatttataaatttaataagaacaccatgcttcaaaatgatttgggatgtaccatacaaaatgacatgactgaaactaatacactaccagagtgcgattaactattcacataaaaagactaagctaagttgttaggagttcttaaaaaaatttcctgcaagtgctgtcaaggaaccgaacctatgtacacttcatgcaaaagataaaactgaggataccaaacaccacaatgctgtcaaaactcaatgccactatttatctgaacggggcacgaagggcgcccaaccgtggatagaggaacatcaactctgagaaccagacccgagtgccctacattgacattacactcagatcttccaatagatactgaagcagaagctgatggatatgtgatgaaagcacatccacaaattacacttggtcaatctctcactgaatgaatgag

SEQ ID NO: 6529 - DNA, 454 bp, Glycine max
  Clone ID: jC-gmfl02220080c02d1
tttgtttttttttttttttttttttttttttttttggaaacgaactatccttttcttcttttggtatggagaacaacagtattgccatgacaatccaaaaatcatgacatgcttcccagacaatatcctttttggggaaccaaagaattggcggacttcgaaacaatgaaaaaagggacctttccatttaattggattttgacaaatggtttgtgtattttggccttacttttacaaaatttggggccgggagagttttgaaaaaaaccatggtagatggcaggggtcaaaattgccgaatgagatggccccagatttatggggctagaatccgatccatacttagggggcatgtgaactttttgggggacgcttgcaattactaaaaaccctgtttttctaattgagggattcaatttgctgagaaggggtttcaaattcagtaaaaagttgg

SEQ ID NO: 6530 - DNA, 351 bp, Glycine max
  Clone ID: jC-gmfl02220080c03a1
cgacgatgctggagttggtgttgttgtacaagaacccattgctccacacatccctaaccctaatcctggctttcacctttgctctcttcaagatcccactcctcttgctccacgggctccagacctacatccaccccgactcccaaccccaatccagcaatggcctcagagccgccatccgccgccccggcagcatcgacggctaccaacccttgtcttccaaaaccgccgccgaaataaaaaagcggaacaagtccaacaacaacaacaacaagtccgatttcgacgaaaacaatgctcagatttttagaatgacgctcgagcacgcccacctgcagtcctgtttgttca

SEQ ID NO: 6531 - DNA, 342 bp, Glycine max
  Clone ID: jC-gmfl02220080c03d1
gccttcgtccttttttttttttttttttgaaaggaatgttttcttgaaaaagccaaacggcgttgtatacataaaccttcggacgtggtcaaaacgtcatagcctattaaaactcagggggccttgcattttttttcattggtacaccatgaaacggtgccgtcctacccccatcccttgttgtttcttgtgccaccttttgtttaaatcgtgcgcacttaggtgacacctacaggatgaccaattgtcccggcctatggttcggcgggaattccaaggctaagtgtttggacatacaaaacacattggcggagaaccgtggggaccttctaaaaaaacatt

SEQ ID NO: 6532 - DNA, 518 bp, Glycine max
  Clone ID: jC-gmfl02220080c04a1
aactcatcaaaatgaatctgtaccactcctccaccaccaccaccaccaccaccatgttcaccgttatattcctcctccttgcaatattattcactctcacaccccacaaggccaacggtgccgcgtgtcaccctgaggaagaagcgggcctgttgggcttaaaatacggtatccgatccgacccgtccggcctgctcagaaactggatatcgggtaccgactgctgcacatggaccggagtagaatgccactataacagcacccgggttcaaagattattcttaacgggtcaaaaacccgaaaccatcttatcgggacccatctcacccaccctctcaaaactccaactcctcgatggactctacctcataaacctcatcaacattgcgggtcccttcccaaattttctttgccaacttgcaaatctgcaatttatctatctagaaaacaacaatctctctggacgaatacccgataacatcggtcaccttacacgattagatgttctcaacttaact

SEQ ID NO: 6533 - DNA, 371 bp, Glycine max
  Clone ID: jC-gmfl02220080c04d1
ttcgtttttttttttttttttttttgtcttaaattttttttttttttttttttttggcgggccggggtaaaagcaaagttctcgggtctattgcgaaaggtaaaataacaaccgcctggataaaatcccccactcttgggaaaactttcccacaaagggaacttaaccccctaaactttttgacatgtggagctcctcccctaatcctttgctgcggggggggcaacgttaggcccaaccacaaccttttccaacgaggcgcctggccggaaaaagttttttggggagccgaccccaaaaaggggtgggggtaactttcaagctttcgaggccaacaacaccgtggggaagctttcccacccccccctttt

SEQ ID NO: 6534 - DNA, 383 bp, Glycine max
  Clone ID: jC-gmfl02220080c05a1
aaaaaactaacaaggccatacctgttctctatcccattgtccgtcgaccttcgcacaaccccagaaacaaggggttgcgcctgtcatgagacttccatacgcatggggttgcgacacccacgcgcgcgcggcttcgttcactgctctagaaggccaccacttttgctggtggcgccactgctctgtaagcaaaggtcgtggtcgctggactccttacgcaacaaggtgaggctcagtcgcaatgggaactggcagaactcgcacgcgaacacgctgcaccagatgaggacctggttgatttacggaccgcctacatcgaaatacgctttagattttcttttgcttcgacgctgttgagcgcgaaccactcctctgagattttc

SEQ ID NO: 6535 - DNA, 486 bp, Glycine max
  Clone ID: jC-gmfl02220080c05d1
ttcgttttttttttttttttttggaatcaaaactataataatcattttcaatatttaaaatgattttttactacaacaagtgtgaaaaaattaatatttatattatatccattacaatacaataatacatcattttaaaattagtctaatatcatccatgtaacgacgaacatctgatccaggaaaaatttgtctctcaagccatagccttaaaatctgcgttctagttgtggttgctacaagtatttaagtgtccaattcctgctgttgcatagtacgcacaagtagtgcaaaaatataagcaacaatacgcattcacctacgtagtcacacatgattgacaagtgagtatatgtgcgttacaagacttgccttaattgatgaaaatacttttttccaaatctttgacaaatgccttagcatgaacatcctgatttgtagcacccatttcaattaaggaagatgtcattgaggcataatcttaat

SEQ ID NO: 6536 - DNA, 478 bp, Glycine max
  Clone ID: jC-gmfl02220080c06a1
gtagaaccttcactctgctctcacccttattcctctctttcctttctttcttctgcaacaaaaatcatgtctgggtccttgggattcttctttgtgggtcttacgttgttgttgatggtcggggtggctaatgctgtggccaacacttccaacaaatttgatcaactcttccaaccaagctgggcttttgaccacttcattcatgaaggggatctcctcaaactcaaactagacaatttttccggcgctggttgtacttccaagagcaagtatatgtttgggaaagtcaccatccatcttaagctggaggaaggtgactctgctggaacagtcactgctttctatatgtcatcggacggtccaaaccacaacgagtttgattatgagtttctaggcaacaccacggcggaaccatactctgtccaaatccatgtgtatgttaacggcgtgggcaacagggagcaaaggctcaaccttt

SEQ ID NO: 6537 - DNA, 432 bp, Glycine max
  Clone ID: jC-gmfl02220080c06d1
ttcgtccttttttttttttttttttttttttttttttttttttttttttttttttctgctgtgaatttttttttttaatttttattttttggggggacaaaaaaaaaaacccacaaaatatattcccccccccgccttaaaaataaaatggaaggggggaaaaacccccttcccctctctgttttccaacctttaaaaaaaaccccccccccaaagaaaggggaatattttccccaacccccccacaattttgggccttaactaaaaaataaacccacaggggggaaaaaaaaaaaaaaaaactttgaaagtttgacggggaacccccaacggggcgcttttgggtaaaggggccattaccgggggggggggccaaaaaaagggggggtgtttgaccacttcgaaaaaaccccctgggggcaaaaccccccc

SEQ ID NO: 6538 - DNA, 538 bp, Glycine max
  unsure (1)..(538): unsure at all n locations
  Clone ID: jC-gmfl02220080c07a1
aacttaacatgccttccatatctaagattttttttgctctgcaaaaaggagcgagtttgacatcatgaatgcgggccagccatgtttttggaaatctgaatttgaatgctggcattatgatctcataaaactgttgtccaaactcatggtttgagtggattatgttgaatgttactaaggatattcatgtagataattggagttacattggttgagctggctggtgatgcaaatgggttactagttaaatggagtctggttcagtggaaatacattggtagaaaagatagcttaacattatttttaagtatctcatcctagtgtgaaggagggtactgcggtaccgtcacatatgcacaaaagtcaggaccatagattgtcaatatttagtggctgcctcatgacanacaactctgcattatattcagttgtttaaaagcacgtgtagtgattgtggcactaactaactaagcatgcttttntttgagaattactattttgaggcattaccttctcttagcattacatttatggtcac

SEQ ID NO: 6539 - DNA, 470 bp, Glycine max
  Clone ID: jC-gmfl02220080c07d1
atgacgttacgtgcgtacggaagcgcaggtaaggaattgattgacgagctgactagctcagtagtcggccttcgtcctttttttttttgaaaggaaacatttaatacaacattttgataaatatggcaaaaattctatgtcccctcaataattgactgatggaaatagatgcgtcttaatagttacatgaaccagccccaaatggcttggtttaaaaaccctctactgacacgagagatacttgcgcaccataacatgaaagaagactgcaactgcttcattcaatcatcgactacacggttcttcattgtggattcgagatgatctgcaccaccttcttcatcagaggctagataattgcctataccatgggggggagaatcgtctaatggaccgtgcatgtctggagattttttaaatatatacttcaactggtcaatggcttcatcagaaacgaagttcccattaat

SEQ ID NO: 6540 - DNA, 481 bp, Glycine max
  Clone ID: jC-gmfl02220080c08a1
ggtatatattgatatatgtgtgtatttcctttgggcttgaaactcaaaactataataatgggttcttcttctcctccggacactagcaagagcataaagctagagcgatacaacagctacatcaggagactcaacagcaccaaactcctcaacgcctcctccaaactcctgttccgtgccactatcttagtcgcactcatcctcgtcttcctcttcaccttcaactaccctcccctcgccccagacttcacctaccaccgacacctacactcccactcccacttgctctcctactcctcctccttcgcctcctgggagaagcaggtccgtcactcctccacccctcgccgccccaacggccttaccgtcctcgtcaccggcgccgctggcttcgtcggcagccactgctcccttgccctcaaaaaacgcggcgacggcgttctcgggctcgacaacttcaacagctactacgatcccttcc

SEQ ID NO: 6541 - DNA, 373 bp, Glycine max
  Clone ID: jC-gmfl02220080c08d1
gaaaatgaaaacatatggataaaacaaggggagagatctgcaacctttgtggcagaccccaccctgcattattacacctttctttgtctttccttacagatctacattacattacattacatacactgccttgctgcttttgctttctgtttgtttccctgacattcatatatgcatatatatccctcatctatatatacccgatatttatattatgtataactgctacaccaacatgcatttggatccatggacacggaccaccacacttattaagaaaaaataatagtaatacttgacgagacaacaagaaaaatgttccaaggtaggcatccgaatattccgttttgctttgttccttgaaaaaacaaaa

SEQ ID NO: 6542 - DNA, 481 bp, Glycine max
  Clone ID: jC-gmfl02220080c09d1
cgctggaaagatggaatttgactatatgtgtctcacatactagtaggaaaccaattgaaccataacaaacaggctagcatatagaaagataatcctaacagtaagttttacatataatacacgtgataatgagaattgagaagaactgatttcaatattttactaaaactatgctaaccaaactacatttacattacttttttgccctaaattacactcttaaatataataatagtaaagccatgagcaacagcattgatcatagccctcccaaaaattcagcacggagctatagagaagcccataaaatgttgactccgtttatcaaaatgttgacactacaatcttcttcaccttgtccaacaaaagtagttaagataacacaaagctggagctgctatcagaatcagattcgccttgttgtggtgatttaggtgccaaggtgagccatggcttggattcagctagcttattaagggct

SEQ ID NO: 6543 - DNA, 537 bp, Glycine max
  Clone ID: jC-gmfl02220080c10a1
cgcatgtcttacgactctgactgatgccgctgcctcgctcggaattcggattgagcctctagtctcgccctacaagagctcaaacatttacataaccctgatcctaccttcacaccatgaatgaaggtacacgctctcaaatctactccaggggatgtgaataataaagtcgctcttgcgtgatgtggaggctccgtttgaggtgtctgtcaactttggactttccgtcaaacaaacaccaggtccgctgctgcgttggcattctttcatttcaggaaagcgagaacttatctgcttttggatagagaccagctggggcattggtttttcttcaattatcgaatacgggatgggttatggttacatagcagtatcaggacaagctgagtgtctctggaaaaacagccacggtctatctttcttgcgacctggggcctcggctgctactgatacgctcacggctactccgacgctgtggtggggctgattttgctctcctgccgaaaaggttcttggaattgagggaggggaaaagac

SEQ ID NO: 6544 - DNA, 418 bp, Glycine max
  Clone ID: jC-gmfl02220080c10d1
atatactaaacggataactacagcaccattacaaacggggaaccttaacaaatgataaccctaaccccgggcatgacataaaatccgcgggcgaatgacaattgagaggaactcaatccaaggggtactgctcacctgcttaaagcacaacgttgacaacaataatcacgactgcagatacctctgaaaaatcataaaagtaaacgcatggacaggcaaaccgctagcacggctacggggaccaatctccgtagctatatagaagcccataagcatgacaattgagtgtgacaaattgctgacactggaaccttatgcagggaggcctcatgggaaacgtgaagcacacatggaaggagctgaaatcagggacacattcggcacccaagggagattgaccagcccaggggagccaagg

SEQ ID NO: 6545 - DNA, 313 bp, Glycine max
  Clone ID: jC-gmfl02220080c11a1
atacagtcgttaatcctagcttcttcaactcctcgctggcaacaacagcagcactaccatgagccgtgttcttcaaacgtgactatcgagaattaccgatgggaaatgaaagaggaggattcaagggattcatgagcgcttggagcgtgccgaccaatccgtgcgatacctgcaagctggcctcggcggcactcttctgccgccccgaactcatgatttctgtgcgtcggctgcgagtccaacattgactggacgatcaaactcgcgacgagccaccagcgcatgttgatgtgttaagagtgccagcactcac

SEQ ID NO: 6546 - DNA, 416 bp, Glycine max
  Clone ID: jC-gmfl02220080c11d1
aataaaaaagtgatatgataaatatagttgggagggacagccaacaggaacggaggaagagatccgggatctggctgatagaaaaaagaaccttttatactaaaaaaagacggaaggcaaggcattgaaaagagtttaccgcccagattctaattctacacggggggaatatgaaaccgcagcccccttttaaaagtttttttttttttttttataaaaaggaaacgggcttttttggtcgatcgaaacaaattttcccaataatgttcccccatggggctccagctaaaaatcacgttcgtaccgattcgatttttgacctttttcccctaacaatcccacagaatcggtaatcattatcctaagattcatgcactccatgggttcttcattttgaaattaactaaaccgatggt

SEQ ID NO: 6547 - DNA, 524 bp, Glycine max
  Clone ID: jC-gmfl02220080c12a1
aggacgcagaagattagatagaataatagaaattccattgccaaatgaacaatcaaggatggaaattctcaagattcatgctgctgggattgctaagcacggtgaaatagattatgaagctgacgggaaaccttggggagggctttaatggagctgatcttcgaaatgtgtgcacggaagctggaatggcagcaattcgtgcagaacgtgattatgtgatccatgaagattttatgaaggctgttagaaaactgaatgatgcaaagaaactcgaatccagtgctcactacagtgctgattttggcaaagactaaaagctattataaaattctgagccatggatatctagggaaaacttcatgcaattaggttaactcagacggtctgaccttaagatgaagtggtctcttttagctatgccttctattgttcgacttatgcagctccatagagaagatgtttagttgaatcatttgcctaagctaattgaattattattattcttgatttctctgggattatgc

SEQ ID NO: 6548 - DNA, 480 bp, Glycine max
  Clone ID: jC-gmfl02220080c12d1
agattaaacaccaaatcagatttattgaagcttgcaacgcaaattcactcaacaagcagtctttaaccataaatggggaggcacgcaaactctaaattcaaagatcagtaatttgtatagcataatcccaaagaaaacaaaaataataataattcaattagcttaggcaaatgattcaactaaacatcttctctatggaactgcataagtcggacaatagaaggcatagctaaaagagaccacttcatcttaaggtcagaccgtctgagttaacctaattgcatgaagttttccctagatatccatggctcagaattttataatagcttttagtctttgccaaaatcagcactgtagtgagcactggattcgagtttctttgcatcattcagttttctaacagccttcataaaatcttcatggatcacataatcacgttctgcacgaattgctgccattccagcttccgtgcacacattt

SEQ ID NO: 6549 - DNA, 392 bp, Glycine max
  Clone ID: jC-gmfl02220080d01a1
acatatataatcacagtcttcatgcaataaactcgatcagcgcctgagtatgaaaggtgcttcatgcttggaataagcttttacaactatagtccatataataacaatacatcaccatataggactctctttctatgaaattccctatatttaggggcacaattaattagcgtgggtaaacaaaaaacagaaattacataaacagtgaaccaaaataagttaaaataactgtagagagagatagaaatagctagtataggcaacgatatctacaccgtctctgcctcttttcgcacgttttactaattttacacgtaaaatatagagagatagagattgaggcaacaacactgatcttccaattccatcaaacttcgcaactcaccctctcc

SEQ ID NO: 6550 - DNA, 390 bp, Glycine max
  Clone ID: jC-gmfl02220080d01d1
gtcaaaaaaaacaaagttccttcccctccccgggggccagggtttgccccaaaccccggggatttgtaaacttggccaaaagggacccctgggaacccaacaggccaatgcccaaccctttttggggggaggggtccccccccattttttcttttcacggagaatttggggggggggcccaaaaaagccggttcctccccggcctaatttttaaaaacaacccccccctgatttgtcccggtcgtggccttcaaaaaatgggggggttttggggccccatcagggccgggggggttccccttgggggctcccaaagttgcctagggaataacctgggttttaacgaaagggggctccggggcctttttgaaacttttttttttccccccc

SEQ ID NO: 6551 - DNA, 334 bp, Glycine max
  Clone ID: jC-gmfl02220080d02a1
ggaaagggaaagaccaccactttataatataacacccccacacctatcaatacaaagcagcttgttattatgaacgggccctaaaaatatacgccggaatgatcctcgcagcataaaaaaaaaaaacgaacttttaaacagaatccttcccttcagatgggaaatcttttttttcccaaatattccaaacccattgaacaacccatgctatactatttataaagtgaaccgagaagtcagtttaggttgtttgccagaagataacattgaataaacttttcctacactgatatgaaggtggaggtggggatcccgctttaggtcctaatgcatg

SEQ ID NO: 6552 - DNA, 463 bp, Glycine max
  Clone ID: jC-gmfl02220080d02d1
gaaacaaaaaggaattcattagatttgaataaaagttataattttacatggcgaaattattgaaaattgaggggattgagtgacagcagcaaagttacattccaagaaggtcggttggggagagagagcaatgttataaagaccatcgtagcatcgcctctctgagcaaagtaagcacagcaacaccgcttagcagttacagtgtccggtcccttcgtcgttggcaaaatggctgccggcacaactctatcaaaattgcaagacacctatgcttgcgctccctcgttcctcttgaatgcctgccttccttctcccactccgacggatgcggcgggggcgacggctcgtacctcgacggcctccgtttgaagtgccgctcgtcgtcgctagattcgtagaccgcgacggcgctgatgctcttgctcccttcgtagaacccggtcgacattgtcttcaggtgtgc

SEQ ID NO: 6553 - DNA, 359 bp, Glycine max
  Clone ID: jC-gmfl02220080d03a1
cgagtgcctcgaactcacgcctgccgctcgtagctcgaattcggctggggagcgttatgatccctattattggggagagaactctacaacaccccccttgtagactatggattgtaccaaactgatgtagagcgtgtatgtgtggacgtcaatctctgtgtaggatgcacatttatttaagtttgatctgcactccctctccccccatgtaatgttgctacccagctagctacaacttcggtgactcacattcacacacgtgagcttgttgcgcagccttcacaggggtcaagcctgctaacggcatacgctattctggaagcctcttacgaagggctgctggtggccggctcatcata

SEQ ID NO: 6554 - DNA, 446 bp, Glycine max
  Clone ID: jC-gmfl02220080d03d1
aaacaacaaattcttgtctttcaatcctttataaagatatacaccataatctggtagttgagccgttacagtgtgacctcacatttccaaaattgagctacaaaaagcttttcccacaacataaattatgaaatatgttcttactcatgtgcacagctccccaattaattgttcttaaacaaagggcttggttatggaaataataacaatgtgaagaatgaagaccccccccataatgtatggcactctctagctagtaacgcgtgaactgaatgaactatactcagaaacatgcctgccctatttgaacagggggatcagagagggatccatagagaattcttttagcaacccattgatttgctgcttgagagaagtgtatgccatcccaactaacatgttgggaaggatttttgcatggatttccatatactggtccatttact

SEQ ID NO: 6555 - DNA, 371 bp, Glycine max
  Clone ID: jC-gmfl02220080d04a1
gattgttggtactgtttgtgtttctgcaagcaactgctattttgatgagatccataaggttgatccagagtgcacttcgaccactagcttactcggaacgtatggcatgctttggggtggaaacatgtggggctgaagaggaccaccctcccttcatgcagactttatcgacttgtgtcagaagggtggagacgcttccaaaaaagcatgattttcccttgccacctctgacatcgatgtctctggcgcgagcgctgaaagcgctccaaagaggctaaccttcgaagaaatgcataggaggacctacttgggagtgaacgggaccggctcaacaaacctttgttcaacgatcggtggtgggtcggactcat

SEQ ID NO: 6556 - DNA, 519 bp, Glycine max
  Clone ID: jC-gmfl02220080d04d1
ggttaaaacatgggctacaatccgttacgaacgccgttaacggacttgatcgacgagctcactagctcagtggtcggcggtcgcccttttttttttttttttttttttttttttttttttttttggccaaaaagctgacacaaattttccatatagaaactaaatacccttctaatccaggaaacggggcctaactagccaacattccaaaatttggaaaattcaaaacataaacatggtaaaagactgttccccaatcattgtttttaaaaacacaaaggccaatcaataattaaggtagatttaatcaacttcttccattttggtaccctcaacatcggcatcagcatcggggtcctcgagagggggcatgtgagcatttggtttaccagcatctttatcaatgctcagtccaagcttcagcatcctgtgaatcctgttaccgaaagtgttgggatcatcaagggtgaacccagaagtttgaagagccgtctcaaagagtgggagaacgagatcctt

SEQ ID NO: 6557 - DNA, 531 bp, Glycine max
  Clone ID: jC-gmfl02220080d05a1
gcaccaacagcgagaggatgaagcagaacctggacatatttgattttgtgctgagtgaagaggatttagagaggatcagtcaggttccacaacgcaggcaatacacaggggacatatgggtatctgaaaatgggtcttgcaagaccttgcaagaactttgggatggagacgtttaagtattttttcaaggataaaactatggtttgggatataaactatgaaaataagcaagattcgaattccatgttattaagatgtcttgcattattattatcattatggctggctataactttatataaggacctggatggccttagtatttatttcacaagtgcccttgattgagaccttgagttgaataagagtgtggcatgtttatcattggagtgagggtgtggtgcctcttccattccatggaaacataaaagatttatatttgtcatcaatgcataccatgaccaccaaccatactgcactaacattctatgctaatgtttatggattttgcttagcttcttgcggcatctt

SEQ ID NO: 6558 - DNA, 503 bp, Glycine max
  Clone ID: jC-gmfl02220080d05d1
tgacctgacgtcgctttcgggccccgataatgaactgattccacgagctgactactcactggccggccgtcgccctttttttttttttttaagatgccgtgcgaaccaaagtaaaatacgtacacacattcgtagaaggttttctttgcccatgttgcggtgatttgtaggaacaaaaacaaatatattttggttataatatacatgcaaaggatgaggggccacaacgttactttgatgattaacatgccccactataaaaataatacatgtttttctgatagggacttgtgatatttaacctaaaggtaatgtgcaacaacccccaaaaaatcatgaatcttaaaaaagctggatcctattgacgtatcaagaacacgcgagatcctggaggctaatgcaaaatgcatacttatccttgggaaatgatattgcttgaggaaggcttagaatgacaccaaccttgggaatttccgggtgtgcgggtgacccgtttcgagaaa

SEQ ID NO: 6559 - DNA, 449 bp, Glycine max
  Clone ID: jC-gmfl02220080d06a1
gatcaacaactttgactggaagcttgagaacaacattgaccccatcgacatggacttggatcagtccctcagggctatccctgttctcgtaaatgccaactaattcaacatcatctgtatgttggcatgccattccatgtacctttttctcagaaacagcaaacagaagcttgattctttggtttgaatgtttctcgtatgtgctagctttgatccagcttgtttcttccagcctgggtttaggataaataaataaccaggctttgagtaacatgatgatcatttattatgtttattaattgttgcagaagataggagtcgtctgagtgtaactttaatctagctagtttgatttggcttgtagtgcctctttgtgttagcctttgtatgggatgtaaaacagtgtcctcttgaaggaaagaaaaaaaatagttgttctctatcgtttc

SEQ ID NO: 6560 - DNA, 369 bp, Glycine max
  Clone ID: jC-gmfl02220080d06d1
ggaatcaagaaacaaataagaacaactaatttttaaaatgactttaaaacgacacaggtgtgaaaacaatacaaaggcatacacaatgaggcacataccagccaaaccaaacttgctaaaatagaagatactcatcacacgacaccacaaacatgtgacacatgaaaaacatgtttattgagccatatgctacaaaaaggcgggctatttatggatgctacacccattctagaggacacaagctggtgcagcgttgtcccctccaagagagcttaaatctaagcaacaatacgcattcacctacgtatctcacaaaagagggacaagggatggtatgcccacatacagactaggcttaattgatgaaaa

SEQ ID NO: 6561 - DNA, 322 bp, Glycine max
  Clone ID: jC-gmfl02220080d07a1
gggaaaacccgcgatctgagcttctcttccaggcctttgttcctgggccctataaagctgtgttacgactgttcggacatggctttcgcacccttcgggctggactggagcgacatgtacaaactgtgactcgaccacctcttaatcgcgcaccgcgtttggacctttctatcaattgccgataacgaggttgcacacatggttcggaaactgttggaacacgaatcttctggttctgccgagaacttgaccgaaactgtgatgtctattacgaactctatgatatgtacaattgcttctgcgaaaagttacgggagaagag

SEQ ID NO: 6562 - DNA, 433 bp, Glycine max
  Clone ID: jC-gmfl02220080d07d1
gtaaaaccagacatatagggaaaagaaacagagagcatagtgcatgaagcataagaccccacacgggatattaacaactttcttgcgcgttacatagaaagcaccaacagcatgacagcacgtgcacttccttgccagctaggaaagatgactggtttcgtgcacaggatatacgcggtataaatcgcgtagccaaccatacacgcttgtcgaaccatggagaacacctgcactaaaacgccgagtgagtgattggacagagaccacctcacctatttagaaccgatgtgcgaatgcagacaccatttgcctacaaaaacgagcggcggcacctgtggccaaagattccccttctaaggcaaacgacctatcaagaacatggcctgctgagttgggaaactcctgctaggtctcccgagctctttgattgggc

SEQ ID NO: 6563 - DNA, 483 bp, Glycine max
  Clone ID: jC-gmfl02220080d08a1
gactcctgctgctggtggcaacccatttggacctgatatttatagggggccagtattgtcatcttctcctgcagtgtcatatgcatctgctccatttgaatatcctgtcttcccttttaattccagctttcctcttccatcagcttctttttcttctggatcaactacttatgtatatccaacatcaggcaatcagctttgctttcctgcggtaaattcacagttaatggggcctgctggtgcaatttcatctcattatcccaggcctttagttgttggccttgcaaaaggtagcaatagtggtagtgccgagaccagtagaaaatgggcaaggctgggtttaaatcttaatgcaggacctggaagttcagatgtggatgggagagactggaattctcctttttcatctaggcaactttctgttgctagttcacaggccctagctgaggagcaagtaaggggccaactggctggttatgttcg

SEQ ID NO: 6564 - DNA, 366 bp, Glycine max
  Clone ID: jC-gmfl02220080d08d1
ctcaatgaagatgggacagaagaccgcccacagagaaatggcaatagcatttattcctttatcatttaaatatatttcttaacgaaaaaagtaaccccctcactgaattacatgggcttgacacaggatatattttcagatcctctcccacaagtgacaaagtgttacaaacatttgattattcaaatctaaacacttacaagcgtttgtggtcattaaattgtatgattatatattctgctattgccatgaggattggttgtggccatcccacccaccatcaggctccttcctgttacgaacactaccagccagctggacccttacttgctcctcagataaggcctgtgaactagcaacagaaag

SEQ ID NO: 6565 - DNA, 399 bp, Glycine max
  Clone ID: jC-gmfl02220080d09a1
cttctaatcttttcacgtcattattctaaacttgcagatgttcacatgccaagcaagatgaaggggacgttaatgtttctggcgctgctcctttgagccacctttcatgtctccttctccattgactgacggcttagaggcgacggcagctacgagctgggtccgaagccctacaccctgaaaggaactgtggtgatcggcggcagccactacatcccagaatgggagacctttggcttcgacgagtacatatagtacggcctgaagcacaccgacatgctgctcttgggccccgaaggggcctgacgagagcgcctcaggaacgaagccttcattagtccatgagcaatgtgatctatggcatggactcctacatcaactgcatggaggccagcacct

SEQ ID NO: 6566 - DNA, 488 bp, Glycine max
  unsure (1)..(488): unsure at all n locations
  Clone ID: jC-gmfl02220080d09d1
atagcataaaagcaaagttgtgaataatctatatttgtttcgcaccatttattcaaagtacatgaaaggagttatagaaacacgccaccgtatatatactatacgtctatagatgatacttgntatacacacttatttttttcatatttaaatgaaatcaaactcgttacctctcaagcctctaaagaaaaaaaatagaaaataagaagcattcttaattattctcctaactatatataaaatcaaaggcttagaacccatatatataatactttgattcattagcctcacaccctagcaagcccaaattccctcatcatggtttacgcaggctcaccaacttgacatcatcaatcacaggcccacagagtgaagaaaagtcatcacttctcatggtgtagaatgtgctaaggaacatgattcttgttctaggggtaacagccacaaacttgagtgctgcacgtttgaaccctcctttgcctttggac

SEQ ID NO: 6567 - DNA, 504 bp, Glycine max
  Clone ID: jC-gmfl02220080d10a1
cggcatagataacatacgtatctctgaagctatgatcgcacgcatgcgctcgctctgaattcggattgtgggtcttgcttttcatattttaaagtcactgttcccaaccctttttattttacatcgcaatttcattactgattagtgatcagtgtatagctggacccatgaccctatccatgcatgtgagagttgttaatcctgactgaatatagagattgaggaacaccagtcgctattggttgcgtgttcagagtgatggatatctccagaatgcagtcacccacagaaggctaccaacaggggacaccgggatattcactgcctaaaaagaagccttccatatacttcattgagtctgaagatagaaagatgggctttggtcgtgggtacacagcaggatctacacctgttgatctccatggcaactccattgttgatctgtcaaagactggtgggtggattgctgccttctttatatttggaaatgaaatggcacaaaga

SEQ ID NO: 6568 - DNA, 347 bp, Glycine max
  Clone ID: jC-gmfl02220080d10d1
atattataaaaacaaagttgggaaatatgtatattagttacgaaccatttatcccgaggacattaacggaggcgttgacacatgccacgagatatatactagacggctgtacatgatactcagtatacacagtgattcgttggatatctacatgaacacaaactcgtgaccttgcaagcctatcaagataaacgctaggtataagaactcaatcttagtcattgtagctaacgatatatgaagctccaaggctcagaacccatgtataggatacttggatacattgacctcagaccctagcaagcccaaaacatgttatcatgggttacccaagctcaccgacttga

SEQ ID NO: 6569 - DNA, 73 bp, Glycine max
  Clone ID: jC-gmfl02220080d11a1
attgtgcttcttgatatgctagctaacgttccgacattatatacaccaaagtgggtgattgtgacgagcacct

SEQ ID NO: 6570 - DNA, 463 bp, Glycine max
  Clone ID: jC-gmfl02220080d11d1
aatcaaagcaattttaaaaattttcattaaaaatatttccggtagacctccaaagataaatacaaagaataacaaattgtctacggactatgaccctcatcatcacactctttaacaggactcaattgatgatgcatggatatgtgtttgtgtaatttcaattaagccttcatgaagctaaatgcgtgaggaacacggagagctttcaaccagtcgctttcaccgttggctccagcctgtaggaactgggcaggggtgaattgggtagcttgttcgcggctaataagaccacggtaacccttccacttgatccttccgttaacgttggcaccaggtccatagctgtgggattcagcctagtccaaggggtcttcgaagtgtccaccggcccatgggcaccatccttcggggtgaaggaagtcacccacggtggattccatcacaaccgaccttgagaattgct

SEQ ID NO: 6571 - DNA, 515 bp, Glycine max
  Clone ID: jC-gmfl02220080d12a1
ctcatgggtttacaatgcaaaaagttacaaagggatcgcattttctttgctaataagacatatgttccaaatgaaactccaactccactagtgaagtacagaaaagaagaattggaaaatctaagaggagatgggaaaaggagagcgcaaggaatatgataggatctatgattatgatgtctataatgatttgggtaacccagacaagagcaatgatctagctcgtcctgttcttggagggtctagtgcctatccatatcctcgcaggggaagaactggtagaaaaccaacaacaaaagactctaagagtgagtcaccatccagcagcacctacatcccaagagatgagaactttggtcacttgaagtcatcagatttccttacatatggaataaaattcatagctcaaaccgttttacctacatttcaatctgcatttggtttaaatgccgagtttgataggtttgacgacgtgcgtggacttcttgaaggtggaattcatctccctacagatg

SEQ ID NO: 6572 - DNA, 455 bp, Glycine max
  Clone ID: jC-gmfl02220080d12d1
gacatagagaaatttgatttgacattcatagatcagaatatcagacttacatacgggtgaacatgatacgggtgaacatgataggagcacaatactatacataaaaactgacacaacaccctattagatatgaaaaactagatagcatccaattacaaaacttaagcatacataagaaaattatgcacacataagtttgcacgtttatttgtcaatgagaggtacgttggaaggaaagaaaaccacacaccacacaccacacactctcattagatagagatgctgttgggaattcctctgaaagtaaggccttccccactggtaggaagaagcacagtgtagggcatctgcgccggtccattacggttcctaaggcttgaattcttggtcctccctgagattttgtcctcaatttccttcagcttgtttccaaacttcttaaaggcttgaattgc

SEQ ID NO: 6573 - DNA, 387 bp, Glycine max
  Clone ID: jC-gmfl02220080e01a1
aaaataacttaataaaaaactacgtatactgaatttctgaaatacataaaaactgtagatacagtataaatataaaataaaaacacgattttttaatgtgtgcgctgaaccacgtctaaacttgctgtattacaaaacgcgtgaggtcatcctcaatggcagataacagaaaacttatcaattgaattgcaaattgaactcgaaccacaagtgaaaccttgaaaataggaaaggtcaaatagaaaatattggggttggctgtttgctggggttctcaacaagaatttccagcgagggaaaaactagcttctaaaaatccctttggaataatggtaaactgataaattatggttaacggaattaatgccaaaggggattgcttaaaaa

SEQ ID NO: 6574 - DNA, 437 bp, Glycine max
  Clone ID: jC-gmfl02220080e01d1
ccaaatcaaataaggacgtttgactattggcagtttttccatgtaatcttcaggacagcatgatttacaataggtaaaatccagagctaccccaatgttcatggtattcactcttcatagccatcttgacaagttgctcattaccttattaccacttagtacactaagcagacagatctttgagagcatgtttatgatacataagctggtagttgttggaaatagtagtctcctgagaaagaaacatcactacacacagtaatccatgggggagcatacaatatacgagcattcttaatggaaaaaccattaaaaattggcaggggaattcctctcaataactgcgagtttaggtatggtatgaggacagtcttgaggacggttgatgtcactgactgaatcaaattcatgtgcaggttccctattttactccattt

SEQ ID NO: 6575 - DNA, 497 bp, Glycine max
  Clone ID: jC-gmfl02220080e02a1
acgatcaaaatcacagatttaataatctttttgttttgatacacttttttttgggtgttaaaaagaaaagattagacctaacaaggtaattacatcaacgattttaaataaattcttctggttcgtttgtacaaaaattcaatgggcaactcccgttacaattgccaatatacattttgaccaacctcgccacccttcaaatcctctaaatgaggaacacaaaattgggtatgcagcaatctcttaaatggtagttgaagagtgagtcaccattaataagattctaatgctgagcatgttatgtgcctagttttacaagacaactacactcaatattaaagtaagaatcacagagcttgtaaaaaatccaccattgtaatattgtgtcaagcaccctgaatttgtggaattggtagatggagccaatgctgtgccatttacgctggtaacatttttaccaccacttcctggaaatatacaggaaccatgactcgggt

SEQ ID NO: 6576 - DNA, 568 bp, Glycine max
  unsure (1)..(568): unsure at all n locations
  Clone ID: jC-gmfl02220080e02d1
gtcaaactgcacaatcaacattaactttacataaccctgacaaataaaatcactggacaaacataaagttttagtttagagacccaaagtaactcctagacgctactgctaccagcaaataaacaaactaggttaatcactgtgaatgggcaaagaaaaaaattatttaggttaccccacaaacagatgtatgatgaacacaagaccacattcatgcaggccccaagttgatccataatgctcacataacaatcccttcctcggaacacgaggcacacgcttaaactgcatggatggcactgccattcatatcaccacatgttggtgttgcatgaaaagctgattgtctagagggtccttcttcaataagttttcgagacagggtggagggacccgagtcaccaatagactcccctaaactcagttttgatatgccaaccagttcatcaacattgatagggcttttagaatgtactgcagttggtttcagcacttcatgtgtttcctccttcttggtgggctctggactgtattctgaccaatanggcagaggaaacgggaacactgg

SEQ ID NO: 6577 - DNA, 387 bp, Glycine max
  Clone ID: jC-gmfl02220080e03a1
ggcaaaaatggcaggtggaggattttctgatgctggaacactcaagagggctcatctttaccagtacaagattactggatatttcatcttttcttgcattgttggagctcttggtggcgctctatttggctatgatcttggtgtttcaggtggagttacctacatggatgatttcctcatacaattcttcccaaaggtgtgtgaaaagaagcatgcacatcttgcggagacagattattgtaaatatgatgatcagatattgacactctttacttcatctctatactttgctgcccttgtgtccacgtttggtgcttccagtgtaacaaacaccaaaggcaggaaagctagcatcttagctggatccgtaagctactttataggagc

SEQ ID NO: 6578 - DNA, 431 bp, Glycine max
  Clone ID: jC-gmfl02220080e03d1
gccgttcgtcttttttttttttttttgttttttttttttttttgattggttttcttttttggtttttgtattctgtgttcattgttttttttactattttttttctatttcaattatgcaaaaaaaaaacccgtgggcgggcgctctcaccttctggaggggaaaaagaccagagcacacgggactgggggggggggccccaacccaatgaagaattgggggcaaacggggtttccggcaactcgcagaaccggggaggggaccaaaccccccggggttgttacccctccgggtcccgaaggggggggccaaaccggggggcccccccagaattgcgcccactgcaaagagcggcccggacggcaggaaggaaaagaagccgaggctcgattgaacctctttacgggcacgcaagggggatatacccccaa

SEQ ID NO: 6579 - DNA, 437 bp, Glycine max
  Clone ID: jC-gmfl02220080e04a1
agcaaaatgaagagtgcgatttgtgggataatcctctctcccaaccacgtcttcaaaccaggggacacacattcaatttgtaaaggaccatactccaatctttgcgtacccatggttgtattggcaacagggcctggtataggaggtggggtgctggaaaagccaattattgaaaaagtcacccctggccgtgagtgtgaattcgatttaaagaaatcacgggaatcggcaccgccctatcatgttatattgcacaacgacaactttaataaacgggaatacgtggtccaagtgctgatgaaggtcatacctggaatgacccttgataatgcagttgatatcatgcaagacgcacactacagtggattgtcagtggtgatcatctgtgaccaagccgatgctgaagatcactgcatgcagctaagaggctatggatt

SEQ ID NO: 6580 - DNA, 416 bp, Glycine max
  unsure (1)..(416): unsure at all n locations
  Clone ID: jC-gmfl02220080e04d1
aatatgttgggcacttctttattcaaaatgacaactatcacatgtcttaatcataggttttttgttcatcttaatcataaggccaagttttacacaagaaatatnctttttttcttttctggtttctctaaggccttcatgaggagggaacttatgtacacctgcaaatagttccatctcacctttcaatagcataaaagccagtgagatttgaagttaaacttgtcatcagcaaccaccatttgcaggttcaattgaactgagcaatccattgcctcttagctgcatgcagtgatcttcagcatcggcttggtcacagatgatcaccactgacaatccattgtagtgtgcttcttgcatgatattaactgcattatcaagggtcattccagggatgaccttcatcaacacttgga

SEQ ID NO: 6581 - DNA, 566 bp, Glycine max
  Clone ID: jC-gmfl02220080e05a1
tttaagtgaggagctagagaatgatgatgaagtctgctatgtgtgcagtggtggttgtagcacttcttcttctggcggaggtggggcccatggctgaggctgtgacatgcaccccaacagagttgagtccgtgtcttccagcaatcacttccggtgctaaaccttccaatgcttgttgcacgaagctgaagcagcaaaaaccatgcttatgtggctacctcaaaaacgctagcttgaagcagtatgttaactctcctaatgcccgaaaaaccgttgcttcttgtgggattccctttccaacttgttaattaattaagccttcttataattaaagtgtgggatatatatatatatatagataaacagtttaatttatacacactttgatcctacaaagcatcttgacacaagcattcaataggatttcaccactttatcgcaacattttaacatgatgcggtaataaagtaaattcttgttgaatatttggataacgatgttatatactcatagtttgtgtgtataacataaacttatatttattatgtactctatatatgccactc

SEQ ID NO: 6582 - DNA, 401 bp, Glycine max
  Clone ID: jC-gmfl02220080e05d1
attggccaaaaaattgacacctattaacacatataaaaccctggacacaacatgtctcctggacgtgtccaatctagacagcatttataaagatttgagaaattcttaaccatattcatggtagatgactgcttcccatgtattgtattttaaaaccaacggggcgagacatatattgagttaaatataaataactttttaaattttgcacccctactattaggatttaacatcggtgtcctaaaaaggaggcatgatttactttgtttccccagcatgttaaaaaatggtcaaaacaaggttgaacatcctgggaatcctgttaccaaaagggtttggatgatcaagggtggacccaaaagtacggagagccgtctcaaagagttggagaacgaactcct

SEQ ID NO: 6583 - DNA, 190 bp, Glycine max
  Clone ID: jC-gmfl02220080e06a1
ccaagaaggaggaatttgtctttttttgtgctaagtcggcacaactagtaatacgtgggactggtgcaggcatgactacatatggactggggagtgggacccgaaagaggcgctgctgaactataggctgaggagaaaaacgctgagaacacattttttgacgctattattgagaagatcgatactttcg

SEQ ID NO: 6584 - DNA, 409 bp, Glycine max
  Clone ID: jC-gmfl02220080e06d1
gtgaggaaaaatgaaaaatagtccatccgaatgtattgccgaagtcacaccctttctaaatttctaataagaatacattgcttcttagaacaggggtggtacacttgcacctatattgggcgactacgaatctttgataagaggcacagtccttcacaagaggaccaccaagcgccctgttaaacaaaagaccaccctttcaaagatttcaggcacaggaacctccaaaaactaaaggacgaatacatagcgggattctacctacgatcgcagaagactcacacttctggaggaaaaatgtgaacgcatgctaggccttgggagatgctattgggggacgatcgccacggatgtcacccatcctgtgaatatccggaagtgcccgcgtctaagaaagggcttcaaaaac

SEQ ID NO: 6585 - DNA, 429 bp, Glycine max
  Clone ID: jC-gmfl02220080e07a1
aaagaatcagaatcacaacttcatgtgagattcatagacgaagcttgttttcatcttaatcgtaaccaaagcttcgcgaatctgccttcggagaagaatttaagaggggtgcttaggtcatatgtacataagcccgtgtctaaagatagcatcatcatagtagattctttgaataacatcaagggttaccgatacgagctatggtgcttggctcgagcagcagggatcagatattgcgtggttttctgtgatgttgaagaaaccatttgcaggaaatggaatgaagaacgcaaggagaaaggacaagccaattatgatgatacgatatttgaagatttggcaggaaggtttgagatacctgatataagaaacctggggcatactgcattgcttgaattatggccacacagaggaagaacagagaaatct

SEQ ID NO: 6586 - DNA, 376 bp, Glycine max
  Clone ID: jC-gmfl02220080e07d1
agggaagagaaaattaaatgatagtagaataaagagggaattcaaaaaagcagtgtattcaataataatgctctaggtaaatataaaacagctcaggatctaaacacacaaacttgggcatcttttatcacacgtataacatgaattgcaagactatcatatctttcaggatgttcccagttccctgttcaagtaggcaatgaacattctttctgcactatctgcatcaaaaggaggtggtggcccacttaaacttgtttgccctggcaaccatatgaagggacggggcatcctactaagctctggaagcccaactgaccttgaaatgtttattacaggcaagactttccctatggaaactccattaagtggtcct

SEQ ID NO: 6587 - DNA, 464 bp, Glycine max
  Clone ID: jC-gmfl02220080e08a1
gctcatcagactcctctcccaaacccaagcccaagcccaagcccaccatcaattcaacaacaacaatagctctagtaatgaaatcgccatcgccatggactgcaaagccgtcgctgacgtggcagtctccaagttccagaaggtcatttccctcctcggccgaacccgtaccggccacgccaggttccgacgcgcccctctccccaaccaacaccaacacacccaacctgcctccgaaccgtccgttctccacgctaccccgctgcaccagatcccacctgcctcccttcaccaaatccccaaaaccgagaaacacctcaacgattcatcgtctaagacgcttcatttctcatacccctccgccgttacttccttcgtctcctccctgaccggcgacgccgacgacaacaaacaaccatccccggcggccacgaccacgacctcccactttgagatcacgagcc

SEQ ID NO: 6588 - DNA, 248 bp, Glycine max
  Clone ID: jC-gmfl02220080e08d1
ccttggcaatattttttttaatgatgcagcggattcacaatgatccatttagcctggaagggaacgagaataataaacattctgataaacatgaatgcactagtgtacgggggaaggggccatcacccacaactcattactttgtggatgttaatggcccggtgaccgactggagagtgcaagttgccatccaatgatgcacgccgtacctgtgcgactgcgaaaacttgatacgcaagataaatgat

SEQ ID NO: 6589 - DNA, 349 bp, Glycine max
  Clone ID: jC-gmfl02220080e09a1
tagtagtaagcatggagtcctcaaagatctatgcttacctcttcctctgcatgatctatttctcttccaccactcccattctcggttgtggctactgtggcaaaccccccaaaaagcacaagcctggtaaaacaccaaagacacccaaaacacccgttgataagccaccagtcaccatccctcccattaatgcacctaccgtggttcttgcaccaatagtgaaacccccaagtattctccctccaatttcaattattaacccaccaaccacaccaagggagggagggaacactccatgcccaccaccaaagtatactgcgcaggctacgtgccccattgacacgcttaa

SEQ ID NO: 6590 - DNA, 488 bp, Glycine max
  Clone ID: jC-gmfl02220080e09d1
attcaacaaattaaagcgcaattcatataaattaataattgaacatgtcacagagaagcatctttgctgctacttgcctaagattatattaaaccatacatgcaacgatctcaattaaaaacaaatggttttacaaataatagcaaaacaaacaacagcagttccaatcagaagagaagagagatagtgtggctcgacatcctctcatgtcgattttgaccatatattcctcaatcctttccacctggtttagagggagcacgtgtaaccaggaggaggagacttgccacaagtcacaaggagctgaagggcaagtgggacataaatgttgaggttgagaagcttcagtttaagagtggtgcaaagacacaccgcagcttcaacctcaacaagcccttgaagcacggggcagcactggttcgcaacagggtcacccaaaccaatgtgaaccaaccctccaagaagatccacacaggcaccaagtttga

SEQ ID NO: 6591 - DNA, 436 bp, Glycine max
  Clone ID: jC-gmfl02220080e10a1
aggcgctcagtcagatacggtattctgaatctaggacgcacgcatgcgctcgtccgggagttcggattgcggactcagcatggcttactattttaagacccgtgaacgtctcactataggaattagtgacgaattctgcaagcgggcgcaggctgatcgccgaacgcctgttctaatacgaagaccacctgagcgcgaagcctagccgtgcgatgtgatggattgagatgaacatgtttagtgaagatgcggatatttaagttcataatcaggggaacagttggttgagcgggctggcaatacacgaggcttactcgcgagatgggctagggtatattgcgactacagtagttgacatgacagctgggcatgtattctaaccatgccgatccaaggaatgatgaaggcacagccgttctgcaagttatgctcccca

SEQ ID NO: 6592 - DNA, 474 bp, Glycine max
  Clone ID: jC-gmfl02220080e10d1
cattcgaattcattttatttatatattaatattatattcaaatgaaataaaaagatattaaaagatactaattataagaatttgaaagtgaaattataaagttattaaatgattaatcaatttttttctacctgttcctgtagtaaaaagagttccatctgttcttgaatagcttccttcaaaaggacttctgcttccccagtgaatgtcttggtagaagatatgatttctttgaattgaggtttattcgtgtttaagtaagcacgtaactcaacaagaaatttccttacctgtccaatttctaatgaatcaagataaccattcgttccagtataaatagttattatctgttctttcacggtaagaggagctgattgggattgtttaagcaactcgcgcaatcgttgacctcttgctaattgattttgagtagctttatcgagatcagaagcgaattgggcaaaagcttctaat

SEQ ID NO: 6593 - DNA, 398 bp, Glycine max
  Clone ID: jC-gmfl02220080e11a1
ttgcgggtccagctctatatgtaataaaggaactgaggtgcaaacttaagcggtatgtatgaattgaaatgacaggatagtgctgtagaaaaaagaagaacccaggcgcctccccattattggagagtggcgacctgagaacttattattgaccgtgacgtgaacgcgtaccatctgtgcgtatagtgagagtgattgtaacttcccggaatcatggacctagctagagcgcgtgacaagtgacactacggtaacaactgcacacatagacgctgcccttagacttaattgtaaacgcctgaggtgccgattgacccagctcacttacacaaattgtgatgtactccctgtgatcttcacggcaaatccatcggtgatcccaaaggactaatgaatcg

SEQ ID NO: 6594 - DNA, 74 bp, Glycine max
  Clone ID: jC-gmfl02220080e11d1
gaagcacaatcattactttttaattaatttatattgcttgattttgcaactcattacttttattgccaattaag

SEQ ID NO: 6595 - DNA, 74 bp, Glycine max
  Clone ID: jC-gmfl02220080e12d1
gaagcacaatcattactttttaattaattaatattgcttgattttgcaactcattacttttattgccaattaag

SEQ ID NO: 6596 - DNA, 399 bp, Glycine max
  Clone ID: jC-gmfl02220080f01a1
aaaaaaaaaatttccctttttttggctcaaaaaatttctgcaatacattggctcgttacaaatttggaaaaactcttccctcgcgaattttaactggggaagcccaaattatgggttattgggttgccatttctcaaaccaatcaacggggggtgctaaaaaaatactccctcaaatgttcccgatttgatgaaaccaggaattttttgaacaaaacattgcgagttattcaatcagacggtccaagctttttttcagggaccccaagcttgtcaaaatcttcagagctgggccctccgagtttcaatgcagcttccttaagagtacccccctttttgggggctgttttggcaactggtggtgccttgtcataaccaatttttgggtttaagggtggga

SEQ ID NO: 6597 - DNA, 457 bp, Glycine max
  Clone ID: jC-gmfl02220080f01d1
gtcaaactgcacactcaacattaacttgacataaccctgacaaataaaatcactggacaaacatagagttttagttcagagacccaaagtaactcctagacgcttctgctaccaccaaaaaaaacaaactaggctaatcactgcgaatgggcgcagaaaaaaattatttaggcttccccacaaacagatgtatgatgaacacaagaccacattcatgcaggcccgcacgttgatccataatgctgacataacactcccttcctcggaacacgaggcacacgcttaaactgcatggatggcactgccattcatattaccacatgtacggggttgcatgaaaagctgattgcctacagggctcttatgtaataagctttcgagacacggaggagggacccgagtcaccaatagactcccctaaactcagttgtgatatgccaaccagttcatcaacatt

SEQ ID NO: 6598 - DNA, 354 bp, Glycine max
  Clone ID: jC-gmfl02220080f02a1
ttttgtttttgtgttttttttttttttttttttttttttttctttaacaatccatgatattattgaatgacagaccatttttcatggttccgacatactctatcaggacgaacctgatgtcaactacaaagaagactccggtgatgtcaacaagtgggactttcgcacaacaccggataacacaataaatcctccggcgttctgtggacacacaatcatgagggataattcgcggttaaataaagaacgtaggtgcagggactgaagacgagcctaataccaacggtgccaggcttgtaaaaggggtgatttggtggttttaggaaggaaaaagagtgacaaggactggcaagg

SEQ ID NO: 6599 - DNA, 384 bp, Glycine max
  Clone ID: jC-gmfl02220080f02d1
gtcaacctgtacccgcaacattggcttgacataacgcagacagcttgactaaccgggcagacatagggtttttgaacaaagacccaaagcaactcctagccgctgctgctaccaccccatacacgagctagggttctcactgcgcatgggctccgagtttaaccatttaagccacccaacaaccctttgtttgaaggccactagacctcattgatgcctgcccgcacgcaggtccataatggtgacatggggaaacgttaactctgtgcacgaggcacgcgctctaactgtaaggaggggactgccacttttactagggcatggaggggttgcatgaacagctgtttgcctagagggcccttccgtgggatgtttccgagacac

SEQ ID NO: 6600 - DNA, 484 bp, Glycine max
  Clone ID: jC-gmfl02220080f03a1
ggaagatatcatgggaaatatgaagatgacagaatatcggacaatcttgattgttcagcggatgatttgacggatattgagaaagaagaaattggtcgggcaatagcactctctctttcagaggcagataagaaagggaaaaaaagttattgaggacgactctgaatctgaagatgatgaactgtgtccacttagcgacgaggaagctgaatctgttggtgaagttcagcaagatgaagatgaccatcatgctaaaattcaacaggatgaagacaaacatcttgatgaagttcaacttgaggaagatgaacaacttgccagggcaattcaagaaagtttgagcattagttctcctcctcgatctgagactgattctttatttcaaccttttgcacacttatttccacctgtatacagaatctgttctggctgtaatgctgagattggccatggaagatttttgagttgcatgggaggttattgg

SEQ ID NO: 6601 - DNA, 572 bp, Glycine max
  Clone ID: jC-gmfl02220080f03d1
atacaaacttttactataattacttcaactgttttatcattttcaactgttgcaaggtattttgtaatacatatcgaatctgaggtgcctacatttatctgcctacatttatctggaacttgcagaaactgcacattttatcactcctcatcagcacccccctaaaagaaaaagaaaaaaaaacggaaaagaaagatttctggcaaccgcagactaacaggagcatttttcattccttactagtccggagtagcgtgaaaactatataattttggaacctttgaatcctacataatttaaaagacaaagttgatatattggttggagtaaaggaaagaaaattgtatcatatttctggatttgatttctctaaagcgaatctttactttacagagaaaagtaagtttcaaccattgatgaaaaatcaacggttcatggatttgttaaaggttaacaaacaactctttaattatctcatcaacagttgaggccccttactgtgctctttaaagtgaattactcactctaaagggtcaaataccatttttcaatatggaaaacttcctgtcaat

SEQ ID NO: 6602 - DNA, 444 bp, Glycine max
  Clone ID: jC-gmfl02220080f04a1
ggcaaaattaagagtgcgatttgtgggagaatactgtctgccaaccacgtcttcaaaccaggggacacacattaaattgggaaaggaccatactccaatctttagtgacccatggatgtataggcacagggcatggtataggaagtggtgtgctagaacagccagttatgagaaaaagtaacccttggccctgagtgtgtattagatctaaagaaatcacggaagtcagtaccgtgatatcgagtcataatgctcaacgacaagctgaataaaccggaatacttggtccaagtgctgatgaaggatatgactggaatgaccctggattatgcagttaatatcatgcaagatgtacactacaatggatagctggttgtgattatgagcctaccggcagttgctgaagatcactgcctgcatctaagatgccttggattgttcaat

SEQ ID NO: 6603 - DNA, 398 bp, Glycine max
  Clone ID: jC-gmfl02220080f04d1
agacttaatatgctgtgcacttttttatttaaaaagacgactatcacatgttttaaacaaaggttttttgttcatcgtaatcataaggccgagtttttcacaagaaatatttgttttttctgttctggttaatataacgccttcatgacgagggaacttatgtacacctgcaaatgggggcatatgacctttcaatagcataaataccagggggatttgtggttaatctcgccatcagaaaccaccatttgctggttaaattggaatgagcaatccattgccttttaactgcatgcagtgatcttaaacatcgggttggtggcagaagatcacgactgacaatccattgccgtgtgcttctcgcatgatattaactgtattaacaagggtcattccaa

SEQ ID NO: 6604 - DNA, 620 bp, Glycine max
  unsure (1)..(620): unsure at all n locations
  Clone ID: jC-gmfl02220080f05a1
ccgcaattgcgaaatctctggaacaattgatttcattttcggatactccaccaccttgatccaaaactcgaagatcttggtgaggaagcccatggcaaatcagcagaacatagtggtggcagatggcacagggcagaagaacatgcccacaggaatagtcctccataactgcgagatcatgccggaccctaccctcttggcagaccgcttgagcgtgaagacttacttggccaggccatggaaggcattctcaagggcagtgttcatcgagaatgttatcggggacttgattcagccagatggttatattccatggaacccaattgaaccaaacacacaggattgctacttcgctgagtttggcaacactggaccaggttccgttgctcaagcaagagccaagtttggcaaaggtctcattagcaagcaggaggctgcacaattcactgctgagccttggctccaagctagcacttggntgcctgctgctggcgttcctttcgatgctagcttcaccaaagcttaatgatccgagacaaaccagcattttgagtggtatgatctcttttttagcctacctaaattaataaaactttaaacaggaaatcggttacctaatt

SEQ ID NO: 6605 - DNA, 523 bp, Glycine max
  Clone ID: jC-gmfl02220080f05d1
ggcaaattaagtagtttccattaaatagccaaaagcaaaattcccattgcttctcccatcatcagtctatggtatatgcatactgaagacagagatgaaggggttggttccaaaaaggcttaaatcataaatatgaaaagcttattgaatgattacaaattagctcctcagacaatgggggggctatgtgtgactgccttgaaattaggtaatcgagttcctgcttatagttttattaatttaggtaggctaaaaaagagattataacactcaagatgctggtttgcctcggatccttaagctttggggaagcttgcatcgaaaggaacgccagcagcaggcaaccaagtgctagcttggagccaaggctcaacagggaattgtgcagcctcctgcttgctaatgagacctttgccaaacttggctcttgcttgagcaacggaacctggtccagagttggcaaactcagcgaaggagcaatcctgtgtgtttggttcaattgggttccatggaatatgaccat

SEQ ID NO: 6606 - DNA, 506 bp, Glycine max
  Clone ID: jC-gmfl02220080f06a1
ccgtaattgcgaaatctctggatcaattgatttcattttcggatactccaccagcttgatccaaaactcgaagatcttggcgaggaagcccatggcaaatcatcacaacatagtggtggcagatggcacatggcagaagaacatgcccacaggaatagtccttcataactgcgagatcatgcctgaccctacccttttggcagaccgcttgagcgtgaagacttacttggccaggccatggaaggcattctcaagggcagtgttcatcgagaatgttatcgcggacttgattcagccagatggttatattgcatggaacccaattgaaccaaacacacaggattgctacttcgctgagtttggcaacactggaccaggtttcgttgctcaagcaagagccaagtttggcaaatgtcttattagcaagcttgaggctgcacaattcactgctgagccttggccccagctagcacttggctgcctgctgctggcgttcctttcgatgc

SEQ ID NO: 6607 - DNA, 337 bp, Glycine max
  Clone ID: jC-gmfl02220080f06d1
gggcaaaaaaagtagtttccattaaatagccaaaagcaaaattcccattggttttcccatcatcagtctatggtatacgcctactgaagacagagatgaagggggcgattcaccagggcataaatcataaatatgaaaagcttattggaggattacaaagcaactcctcagacaatggagtggctatgtgtgactgcatagaaactaggtgaacgatgtcctgctaatagctttattaatttaggtagggtaaaaaagcgattataacactcaacatgctggtttgacccggattcctaaactttggtgaggggatcatagaagggatcgtcgacaa

SEQ ID NO: 6608 - DNA, 499 bp, Glycine max
  Clone ID: jC-gmfl02220080f07a1
cgacgatgctggagttggtgttgttgtacaagaacccattgctccacacatccctaaccctaatcctggctttcacctttgctttcttcaagatcccactcgtcttgctccacgggctccagacctacatccaccccgactcccaaccccaatccagcaatggcctcagagccgccatccgccgccccggcagcatcgacggctaccaacccttgtcttccaaaaccgccgccgaaataaaaaagcggaacaagtccaacaacaacaacaacaagtccgatttcgacgaaaacaatgctcagattttcagaatcacgctcgaccacgcccacctccagtcccgtctcttcatcgatcagtactgcgtcgctttcactctctcctttgctgcccttttcacccttctcctccacacctttctcgattcccccgacaatcgtgggttcttcgccaacggcgttttcgttccctttctcgtatcaaatttgagtctttactc

SEQ ID NO: 6609 - DNA, 279 bp, Glycine max
  Clone ID: jC-gmfl02220080f07d1
gaaaggaatgtgaactttcatatgactttggcctttctatagtcagtttattgtgtatggttcttatgccaaaagcaacatacaacacagttgtacttgaaaatctgatatctgctaaagaatgaaaccgtgccaactaacctgcaaaacttatgttacaagttcaacactcctcccaaaatgaaagtattcaaattacaacaaaaggctcaccaaaggcccaataaaatcgcactcaggaaaaacaaaggctcaatccagaaacatacaaaacacaat

SEQ ID NO: 6610 - DNA, 279 bp, Glycine max
  Clone ID: jC-gmfl02220080f08d1
gaaaggaatgtgaactttcatatgactttggcctttctatagtcagattattgtgtatggttcttatgccaaaagcaacatacaacacagttgtacttgaaaatctgatatcttctaaaggaatgaaaccgtgccaactaacctgcaaaacttgtgttacaagtccaacacttctcccaaaacgaaagtattcaaattacaacaaaaggctcaccaaaggcccaataaaatggcactccggaaaaacaaaggctcaatggagagacatacaaaacacag

SEQ ID NO: 6611 - DNA, 566 bp, Glycine max
  Clone ID: jC-gmfl02220080f09a1
ctgaaatgtggtcctggacactgtcttagtattggaagtcttggaaagtatgcggatgagcaagaagtgaaagacattcgcgttaagaactgcacgatggttggcacacccaatggcctcagaatcaagacatggccagagtcctatccacgttcagcatcagctatcaccttcagtgacattgtcgtggaaaatgttaaaaatcctatcataattgaccaagagtatgattgcgaaccagcaaactgccaaaagaagccttcacttgtaaagataaacgatgttgttttttgaaacataaggggaaccacacttttaccaattgcagtggattcaaagagtagcaagcagttcccatgccaagatgtttaacttaagaacataaacctgaaccttggacccaagccgttgggtttctgatgtaccaatattaaaccagactatggggggtgtcaaagaccagcagttagcctataaatcttgacattcaagcattttgcagttcttgcaataaggagggaagggcaagtaatggttttgacaatcaaaccaaatgagggaaacat

SEQ ID NO: 6612 - DNA, 474 bp, Glycine max
  Clone ID: jC-gmfl02220080f09d1
acagcatgaagttttcattctctggtattttgtgataaaattaataaccaagaatgacatactctgaaatttactcctctcagccagttaatatacatgagttcctgacccaactgttcgaaacaacacacaacctctctagattcactctaagaagatctggcggtagttgaatggctggtctaaagggaaatgcttatatttacactttgagtacatactacataaggctagaaaaagtgcttaattcacttattctatatacaattgctggtttttctatattcagaaaaactaggcatggaagtcgattcaattggttcaaaatgttgaaaacctttccccctactcctgtatatatatgctacatgtgttcctgatttggtttgattgtccaaaacattactgtcccttccctctttattgccagagctgcaaaatgcttgaaatttcaagtacttataggcaagctgc

SEQ ID NO: 6613 - DNA, 370 bp, Glycine max
  Clone ID: jC-gmfl02220080f10a1
cgcagtagtagatacctactccgagcttgagccgcatgcctcgctcggagttcggatatgaggctaaagctgaaatgcggaccttcactccgtggtctttttgcctgggctcgaaagtgagcggttgcgcatgaagggacatgggtttccggcaagaacggctcgacgggtgggacaaccacaggcctgagaatgaagacgtgctacagtgcgcactgcaggtggaaacttatatcacacctcgagagacaggtcgactaatggttgagaagcttatcctacacgacacacaggataatggcgagacctcaacctgcactttgaagtccactactatgaatatgaaatacactatcccgtctaagataag

SEQ ID NO: 6614 - DNA, 483 bp, Glycine max
  Clone ID: jC-gmfl02220080f10d1
acaacatgaagttttcattctctggtattttgtgataaaattaataaccaagaatgacatactctgaaatttactcctctcagccagttaatatacatgagttcctgacccaactgtttgaaacaacacacaacctctctagattcactctaagaagatctggcggcagttgaatggctggtataaagggaaatgtttatatttacactttgagtacatactacataaggctagaaaaagtacttaattcacttattgtatatacaatttctggtttttctatattcagaaaaactaggcatggaagttgattcaattggttcaaattgttgaaaacctttccccctactcctgtatatatatgctacatgttgtcctcatttggattgattgtccaaaacattactttcccttccctctttattgccagagctgcaaaatgcttgaaatttcaagtacttataggccagctgctggtctttg

SEQ ID NO: 6615 - DNA, 352 bp, Glycine max
  Clone ID: jC-gmfl02220080f11a1
attcccttggttttaccacaacatgctcacttttctcaagcgacatggtgacacatctggaaatcctgtgcgggggcttgttggtcctcatgatgcacctgtctatgaccagcccccatacaaagtgttgttcaaagcagtggcttcaggggagtatacttattgcgactaaggatctctctggacctccaaacagctcaaagggcatggctactgcctgatttaaatagcatcttcaactcttggtgactctggagaggcgatctatgggaaagaaccgtcttctgcactcttggtctggagcacggtcccattcttgagacaaacaccggggttctatgacacagtgcac

SEQ ID NO: 6616 - DNA, 489 bp, Glycine max
  Clone ID: jC-gmfl02220080f11d1
agaataaacaaggaaaagggatcctcatattatgcttacaaaataacctgtcctcaatctcatcccatgcactgatgcaagggtagtataataataactaattgttatatacatgattatcatagattacaaatttacaaccattaggctgcttgcatgctcacagttgaatcacggctcataaccacggcggattcagcacctacttcctcctcagcaggtagatcatctgaatgcagttccggttgcttaaggctccggacaaactcagtgaacaaaggaaaatgctctggagagaagaatgatgctcccattctatgatatgtgaacaagtccaatacattatctccagataaattcttcttaatttgttcaaacccccctggaacaccagattcagacgaattttgacctgaaacctgaacctcatgctttttgcaagcttccataatttgtgcaagtagcaactcagggctagaatggttttcc

SEQ ID NO: 6617 - DNA, 516 bp, Glycine max
  Clone ID: jC-gmfl02220080f12a1
atagcttcatcccaaaaagctcttttccttctaaatttgattccttagttcagcattctattattatatatggcttcttcaccttcctcagaaaacaaaaacctagagggagtagctggtggtgccggacagaaacccattccacttggtgagaacgttctgcagaagcatgctgcattctttgacttgaataaagatggtgtcatctacccatgggagacttttaaagggttgcgtgaaatcgggactggggttttgctgtccgttggaggtgctattttcatcaatgtgtttctcagtcagagtactcgtcccggaaagtttccatctatactttttccaattgaaattaaaaatatccaacgcggcaaacacggcagtgacactggagtctacgatactgaaggaaggtttatttcttcaaaattcgaagaaatttttaacaagcatgcacatacacattcaaatgctttgacatatgatgagttaacggagatgataaaagcaaattgagag

SEQ ID NO: 6618 - DNA, 121 bp, Glycine max
  Clone ID: jC-gmfl02220080f12d1
ttttttttttttttttttttttttttttttttttttttttttttttttttttttttttaggatttttttttattttttttttttattttttatttatttatttttatttatatatttaatt

SEQ ID NO: 6619 - DNA, 369 bp, Glycine max
  Clone ID: jC-gmfl02220080g01a1
gccacgcataataattccacagtccttactgttacaaaatgacagggaacaatgcgagcattaaatcgaacctatgaaacccgcgtgtaatatttgaaggaaacacccacccactctccattgaccttccttattacggatttggaacagaagaatgcttataatgggggcaaaaacactaacatatgctctctattggaaataactaggggcctgctcatttagagccagagaaatcggcatcaatgacatcaccggggggttccttggctgaggatactgaggggccagaatccgcaccgggtggagttgatggccattctgcgcctgcatatcctggctggctgcaaagggactgaccaatctgga

SEQ ID NO: 6620 - DNA, 529 bp, Glycine max
  Clone ID: jC-gmfl02220080g01d1
cccaagacatgcttgagattttattaacttcagataaatatacatatttctttaatagaggaaaaagacataatattcttggcatctaggaaatttgatccaacttggttggaacatcaatttaacttgaattgatttaagacttattaattgatcattctgcaggcctttctaacctcctgtccaccattgatgctactcattctgatcatggacttcgcaaaagcctcataaaaagccttttttgaggtggcaaactttgtaaccagatttttagtgtctgggttgtcaagcaaaacttgatcagaagaaaacaagcctttctgttggaggatcaacctgtaatatgtattatcaaaagttgttgttgaagggtccatagaggtgcctgcattttttgcctgattttttagtggacaaattgagatcagttttgctgccaatgatggatttaatgaagggtcaacatcatgtgttgcattgaagtagtggattctgttctttgaagaagagcagtgagagaaaccca

SEQ ID NO: 6621 - DNA, 511 bp, Glycine max
  Clone ID: jC-gmfl02220080g02a1
cgaattgcgaagtgaatttgacagatgagagaagcggggaaaaacaaaatcctaaatctcttcttgagttattgagatttatgaatcatcacacatatatacatatttattcttacggagatataatttaccatgaattcgagtatacacctaaattgatattcatgatagtagaccgaataaaactagcgaggcttgtttgatgactcttgagactctccaaacttcgtgctgtacacgatgccacgattctgcagtatgtacatttttggccattttaacagcatcatcgattccagggaaagattgagagccgtagtcattatgttttgatggtccataaatcaaatgcttataccatgacattccaaagaggccatctctgtcagtgaatgcacgctcagccatcatcaatctatcattcagctctctcactctcaagtggtccttcttacctgttatccaacctttaccagcttctattacctttctctggctatctatcttgatt

SEQ ID NO: 6622 - DNA, 557 bp, Glycine max
  unsure (1)..(557): unsure at all n locations
  Clone ID: jC-gmfl02220080g02d1
tttttttttttttttacacacaaattaacttctttatatgaagcacttaaatatatcaaatacaattaattcctagcttgcaaccagttcaatgaaaacaaaataagggggataaaatacaacagatgaatattcgttgcttcaacatctacgtgtcatataatataaatgatcacaccataatctgaactttgaccataattcacccgtcattgaacagggaacacattcctcaactgtttcaccatggtggggatttttttcacagtcaacaaatttcgtaaacattcacagggcagtcacatgaaaaatatgattaaacttttaaaacacgccccacaagaaaagagaagaaatcaaagggacagtagagaaaattaaaactccttggctttttgctactaaggggccacctccagtcttgaatctatctaacactcttgaccctcaactgcatgtcttcttcatgtacaccactctctctgtgaaacacanattcttaaaacacgctcttacatgtttctaccaaaataatcaatcaatcactgcaaggtttt

SEQ ID NO: 6623 - DNA, 481 bp, Glycine max
  Clone ID: jC-gmfl02220080g03a1
cttgcagtcgcagaggaaaaccctagctagtagtctcagttcgtttgagagagaaaaaatggcagagggtctcgttctccgcggaaccatgcgcgcccacaccgacgtcgtgacggcgattgccactcccatcgacaactccgacatgatcgtgacggcgtcgcgcgacaaatacatcattctctggcacctcaccaaggaggacaagacctacggtgtcccccgccgtcgcctcaccggacattctcacttcgtccaggacgtcgtcctctcatacgacggtcagttcgccctctccggcttctgggacggcgagctccgcctctgggacctcgcgggtggcacctctgtccggcgcttcgttggccacaccaaggacgtgctctgcgtggcgttcttcatcgacaaaccgtagatcgtgttggcctctcgtgaccagacgatcaagctgtggaacaccctgagtgagtgcaagtacaca

SEQ ID NO: 6624 - DNA, 539 bp, Glycine max
  Clone ID: jC-gmfl02220080g03d1
aattgagattatatctcaaccatattctgaagtaaagataatattggtaaccggagaaaaacaaagatgttgaaatatccatgtaacaagtaaataaccaaaacgaacgttttaaaaaataaataaaaggccttagtgcctcggtcttcaacataaaaatgaattctacagtaaagcagtaactaactttgtcccaaaacttaaaaacagattcgcatctgaaaacactaaaaagcttaacctaataacgtccaatagcccaaactctgaccacaccatcggtatagccactaaacaaagtgcttccatgcgcactccagttcaaacttgtgcaataaataaccttcttcttgttggcgttaccaccaccggaggtggcatcagcctcagtcttgaggtcaaccttcaaattctcaacgatactcttgctctccaaatcccagatcttgatgctctgctcggaggcggcgcagagccaatacctgttggggctgaagcaaagtgcatggatgattgagccagcatcgagagagtaaaga

SEQ ID NO: 6625 - DNA, 330 bp, Glycine max
  Clone ID: jC-gmfl02220080g04a1
caagagcttgatcccctgcgcgagtgttggcgagaggaacctgctagctgacgtggcgaggattgttgagaaaaacggcacgtcgtttaagcgaaaagacgatttgaggaaggtcgtcgcagaagcactttcctctctcggctacgattcctctatctgcaaatcgaagtgggagaaaactttctcttgtcctgctggtgaggatgaattcatcgatgcgattgtggaaggggaaaggttgattgtcgatgttgattttagatctgactttgaagtagcgcgaacgactggaacttacaatgcgatgctgtaatagctgtcgttcaccta

SEQ ID NO: 6626 - DNA, 415 bp, Glycine max
  Clone ID: jC-gmfl02220080g04d1
atgacgtacgtgcgtcgcgggtaccaggttccggaattgattcccggagctacctgctcactggccggccgtcgccctttttttttttttttttttttacattggtgcgaaccaaaaatggacataagaatagtaggccttcttacaaagttttcccttacgaccaaatgatgggcaatcggaaaaactcaatactacacacagagacagggggattccctcttcagagcctttctgtcaagatgctaaattcctaaatcccactttgtacactaaacagacacaactctgtgagcaggtttatgatacgtactcgggaagaggggggaaatcggtcactcccttaaaagatccatcactactctccggattccccggggggggttgccacatacgatctttcttaatggaaaaa

SEQ ID NO: 6627 - DNA, 478 bp, Glycine max
  Clone ID: jC-gmfl02220080g05a1
tcccttcacaccattctcacaaaacaactttcaaactctgagaaagaatggctgccaacacattgatgagtactgctatctcagccttcccatctctcctttcttcctcaaaatccagatttgccaccgcagttcctctttctagctttggtgtcaccaatgcctcttcttctcgcttttctatgagagctgactggatgccaggccagcctagaccttcttaccttgatggttcagcacctggtgacttcggattcgaccctcttcggcttggtgaagcaccagacaatcttgagaggttcaaagagtcataactcattcactgcagatgggccatgcttgctgatacagggattttggttccagaggcattgggcttatgcaactgggtaaaggctcaggaatgggcagcatgttctgcgggccaagccacctacctaagcaattcagatccatggagcaccctacccaccattct

SEQ ID NO: 6628 - DNA, 493 bp, Glycine max
  unsure (1)..(493): unsure at all n locations
  Clone ID: jC-gmfl02220080g05d1
aggacgtagcgtcggtangcgagccccaattaggaaccgattcgacgagctcactgctcgctggccggccgtcgcccttttttttttttttttttttttttttttttttcaaggcaaaatctattggggaataatgatgttttcaatgtttttgtgccaaggaaaaaacaagtgatccccctccttctccaaagggtctttgccgggaaacgcggatttgttgaacccggaataacaggaaaccctaaaaaccaagacgccaattttcaagttttttttctgggaatgcatggaccgctttagggcccttaaaggaaaccaaggggtggaaaccaccaccaggggattccttcttccctgggtcctttaaaaaaccccctccttgttttaaaaaggaaatagcctggaaaaaatggggcgtattgggggcacacggagccccagggagacttccccgcttaggttgccagattggcccccagaaaccgctggc

SEQ ID NO: 6629 - DNA, 375 bp, Glycine max
  Clone ID: jC-gmfl02220080g06a1
ctcgagccgattcggctcgtgttttatctgtgcgacttgagcatcctatgctcggggaattattgaagaatactgagcaagatctcaatgaagcctactctactgtcgaggacaaggcacttctataagagggctgtgttataactgtggtatctcttgagaactcgatcagagatcgtgactctaacagagagagtaggcttgatggctctggagaaaaagaattagagactcacatctcagatgcagttatcattaagagctctgaggggacgtgatagagaaaaggagagagttgggttcgaaatggaatcttttatccacgagcaatcatctatggagaaccagacatcgtcattgggaacactgatcagt

SEQ ID NO: 6630 - DNA, 438 bp, Glycine max
  Clone ID: jC-gmfl02220080g06d1
gcatgttcctctatttgactctcattcctcattcttatatacttttcttatacaaaaccagagcattcatattcaaacacaaccatgttacccccatcctcggtattggaacttctaaaattgctttatagaaacaacactatcacatatggacctttacactgatgttcaaattacataaaagcttttaaattacaggcattacctacatttctaggttccctgaagatgaacacaagtgcaagacttgtaacagatcggtgaagcaaacacatcatttgctttgtgtagctgcaacagttcgctgaacagttgaaacaccatccacaaattttgtccggaaaagaacatttgcattattgaacatgccttccttcaaggaaaccacaataaactgagagtgcggaaagtgagcctttatcattctccctatgtttt

SEQ ID NO: 6631 - DNA, 361 bp, Glycine max
  Clone ID: jC-gmfl02220080g07a1
acattgtgcaagatgtggcattgattgggaccagaaagatggccttctcctgattgaagccgatagacttttaaaacctaggtggatactttgtttggacatcaccgctcacaaatgctcgtaacaaataaaatcagaggaggtggaagtttatgcaagattttacattaactctttgctgggaactgctgtcacagcaagatgaaactgttgtatggaagaaaactagtataaaaagttgctatgcataaagaaagtctggatctggcccttctttgtgtggtagaggtattgaaggggagactccatatgatcgagaactgcaaaactgcataggtggaatacagagcagtcgttgggt

SEQ ID NO: 6632 - DNA, 470 bp, Glycine max
  Clone ID: jC-gmfl02220080g07d1
tgaacgtcatgccgcgtccggggtcaccagttacggaactgattcgacgagctgactagctcagtggtcggccgtcgccctttttttttttttttttttggtcacaaagacgaataatatgagtttgatttcacattataaacattgacacactattaagtgcagtgatgccaagcttatacaacaaacatctaacaacctatagaaagataggctttaacataatcatacatgggggaataagccacggatgcggtgcacaacaatcacttataaccgtgttaaccaaagtgatatgtgtatgtgagtattacacgggagaggaatgaacaccacccccatactggatggtcatctgctactgaggctcgcgtggacagaacgaggtcctatgaaaaacttgccggtcctattatgacaggggggtcacatagggaacgatacacaattctctttataagccgttgatt

SEQ ID NO: 6633 - DNA, 532 bp, Glycine max
  unsure (1)..(532): unsure at all n locations
  Clone ID: jC-gmfl02220080g08a1
gattggtggtaatggcagcgttactacaagcagcagctactttcatgcaacccaccaagttgagcaggagcaacactttgcagcaaaagtctactcagtccatttccaaggcttttggtttggaacctgttggagctaaaaaggtcacatgctcccttcaggctgatcttaaggacttggctcacaagtgtgttgatgctaccaaaattgcaggattcgcccttgccacctctgccctcgttgtctttggggcaagtgctgaaggtgttccaaagaggctaaccttcgacgaaatccagagcaagacctacttggaagtgaaggggacaggaacagcaaaccagtgcccaacaattgatggtggattggactcatttgccttcaagccggggaaatacaatgccaagaaggtgtgccttgagccaacttcattcacagtgaaggccganggtgtggccaaaaatgctccccttgagttccaaacacaaagctcatgacacgtttgacctacactcttgatgagattgaggga

SEQ ID NO: 6634 - DNA, 492 bp, Glycine max
  Clone ID: jC-gmfl02220080g08d1
aaaccttgaattttaaacattgtaattggaggtcgatataatatacaaccatgacagtactctcagtagtgctaggaaagttgggtcaagggataatgcagcaacaccatgcatgaagttactaacaaaatctgagccaacaaacaaaacagaaaacaaaacactctatgactcaagctgagcataccagatgccctggatcttgacatcctttggagcctttgctcccaaatcagtgtcagatggttgaacactctcgaacacaccgataacctcacccgtctcatgcttggtcttggtgacacttaaagtgattttgccccttgaataataaggacttttaattggtttccttggcaagttcttcctcatctcctcttgcaccagcaggcaaagcaactgcattgacataacctgtggaagcacctcttcctttgaggtccaagaaagagctttcacggtaggatgggactagaaactccccactaaagc

SEQ ID NO: 6635 - DNA, 96 bp, Glycine max
  Clone ID: jC-gmfl02220080g09a1
gaaaagatttaggatgaagaacaattaagctttctcatcatacgggggctgaagcacttcttgtgctggctaaacatgcaccaatatttgaggcgt

SEQ ID NO: 6636 - DNA, 521 bp, Glycine max
  unsure (1)..(521): unsure at all n locations
  Clone ID: jC-gmfl02220080g09d1
gattcggactcatctgatncagatccggatagactagatatcacgttcgacgcgctcactcgtcagctggcgaccttgatcgtgaaattattttttttcttacattaaaatatggtttgtagaggtggtgaaaaaagaataggatcttaacctgatagtcactaacacgagccatgttcaatcagaggagaatattggaagataaagagcaccaattggacactaaagattttccctactcggcctttcactacaaccagaagctcttgtgggacaagggtgaagattacgagggcatggtccaaaaacttaaagttggactagtagtggtgctgtgggagttccaccaccttgctgtgaaattagggtaagaacactagggggcgcccatgagtggaatctgatcatgacatgcttggcgtggaagctgttggaactgccgcctctaatgaggagaacggtgtgggtgattcttaccagggttgaaatctggaaccctaatttgaatgacctgatgcctc

SEQ ID NO: 6637 - DNA, 154 bp, Glycine max
  Clone ID: jC-gmfl02220080g10a1
cggcagcatgcagatacagaacatcgaacgcacgagcacgcgtgcgcacgctcgtaatctgggatttgggctagcgccaagtaactggtagatttaatacttgagtaacaagatcgtcgtggccttaatcctggctctttcatccctagactgc

SEQ ID NO: 6638 - DNA, 473 bp, Glycine max
  Clone ID: jC-gmfl02220080g10d1
gttaaaagcaagtaacattaagttggattcggatacgcaagattattcacattatctgaagtacttcaccaatcacaaatcgaaaaactcttaaaagtcatttcggtctttgacgctcactttccggggacgaagttggtggcataggcccaggcgttgtagttggcaggggcagcaaggtgatcggagagggtctacaatggaccctttccggggacaatggcccgaacgaagaagccagacctatagaacatggccaatcgtacgatcttgggttccttcatcttaagctcagcaaaagcctttgggtcatcagcaaggcccaatgggtcgaaactgtcacctgggtagattgggtcagtgacctgaccgagggggccaccagcaatacggttaccttcagcgcgacccattatgagaacttgtgtggcccacatggtgaggatgctctgggcgtggatcaggcttgggtt

SEQ ID NO: 6639 - DNA, 372 bp, Glycine max
  Clone ID: jC-gmfl02220080g11a1
gatcaaccccactacctggacgttggtgatcagccttgatcccttggacctggactggggtctgtcgctacgggctatatgggttgctggagctgccgcctagtccgacaatatatgtatgtttcggaggctcagccatgtctcttctgctcagggccgagcggacagtactatgaatcttcgagatcgatgttgcacgtatggtcgagctactgtccacccacgaacctccagcctgcggtcagaataaaacaagaacctggatgtgagttaccagatgatcgatgtctatgattactaatgggtacagtaacgggggagggtgcgagggtctctttaatctagctggactgaaacggcttggaaggcctc

SEQ ID NO: 6640 - DNA, 420 bp, Glycine max
  Clone ID: jC-gmfl02220080g12a1
ccaactctctttgaatttgtgtctttgggtgaaaagcccaccatcctgttctccgagagacttggagaggcaggactgcaggtgttacgcggtgttggacacgaggaatgcgcgtatgagctctcgcacgatgagttgtgcacaaagatctcgtgctgtgacactattatagtgaggagcggtacgaatgtgacaagggaagagattgatgctgacaaaggaaggttgaaggttgtgggaagagccggcgtggggattgaccacgtggatttgcaggcagccaccgaatttgggtgccttgtcggtaatgcgccaactgcaaacactattgacgatgccgatcatgggattgctcttctcgctgacatggcccgaaacgttgcccaggctgacacctccaccaaagctggcaaatggcag

SEQ ID NO: 6641 - DNA, 490 bp, Glycine max
  Clone ID: jC-gmfl02220080g12d1
gcacactactagctgcaaacagctagttttattctgaatcatccaatccaaattatattacattcgcataccatagcttcaagtttcctcaaattgtccatcaaaatacctcttctacggtgtaaaaacagatctagatcatctgaagtgcatgtgcacttgagaattgtcaaaaaaacaaaaacatttctttataaccaaaatagtagctattttactttctaaaacgtaccatccatagatggtaggtagatacgcatgattgtttgtataccattacattatcaactagtactagagcttgaggaagacgaactcttcaatggcagacacggctccaatattgtcaagagcctccttgtttggttcttcatcgacaccaatagccataatagccttgttcctacgcgatgtccttcccacactcataaagctcacattcacgttttgttcacccagtatgtttccaacacgaccaatcatgccgggc

SEQ ID NO: 6642 - DNA, 508 bp, Glycine max
  Clone ID: jC-gmfl02220080h01a1
ataaaataagatgccactagtttccattgagagatatatagcatatacatatttggaataagaaacagtgagtcttctgtatgtgacccacaatcacaccctcctacatcactccaactaattactttgcctactttttcaacaaaaaatagaatcgagagatttgaccatgatgcttttatgtggtagataattaattctacacacacagtcattagtcagtctaattatagttctcctaactagttagggaacttcctagtttgtgttcttggtttggatcttggcaaattccagggtctttttaccttgtaacttgtttgttacatagtgtttactgtactctccatgattgtatattttatacttgcatgggtggttttcatccacaaactcaggcattggaccaagctccacttcatagctaggagcaaaaaatgtcacaattgagagtctagctttctcctcatgagccacagctctatgctccacactcctgtatttccca

SEQ ID NO: 6643 - DNA, 396 bp, Glycine max
  Clone ID: jC-gmfl02220080h01d1
ggggaaaaaaaaaaaccgcggacaaaaaaaatccccccccccccttttaaaaaaaaaagggaggggggggaaaaaaaccttgtccctggggttttgtgaattttgaaaaaaaccccccccccggagaagggggggcttttttctaacccccccccccatggtggtcctgaccctaaaaaaaaacccccggggggaaaaaaaacaaaaaaaaggggggaaaaatttgtggggaacccccaaggggggacatttgggaaggggggccttcaagggggggggggggaaaaaaagggggggggggcaaaacgctggaaaagggcccccgggggggaaaactctttccccctttaaaaaaagggggccccaagtttaaggggggtacaccggtgggggggg

SEQ ID NO: 6644 - DNA, 436 bp, Glycine max
  Clone ID: jC-gmfl02220080h02a1
ataaaataatattccactttttttcattgttagatatattgcatattcatatttggaataataaacattgatttttttgtaagggggggacaatcacaccctactaaaaactccgactaagggctaagactacttttgggacaaaaccttggaatcgagagatatgaacagtgatgcttaaaagtgggagataatgaattctacacacacagtcattagtcacactaatcctaacccttctaactagatagggaaccccctagggggggctcttggtgggcaccttgaaaaagtccaaagtcaccccacctcgtaacttgtatgtcacataaagaaaactgtgctcttcccgaccgccctttatatactacccacggcttgttttgatccacaaactcaggcattggaccaagggggaaaacacaccttggagccc

SEQ ID NO: 6645 - DNA, 506 bp, Glycine max
  Clone ID: jC-gmfl02220080h02d1
cacacacaaattaacttctttatatgaagcacttaaatatatcaaatacaattaattcctagcttgcaaccagttcaatgaaaacaaaataagggggataaaatacaacagatgaatattcgtagcttcaacatctacgtgtcatagaatataaatgatcacaccataatctgaactttgaccataattcacccctcattgaacagtgaacacattcctcaactgttacaccatggtggtcattattttcacaatcaacaaatttcataaacatccacaaagcagtcacatgaaaaatatgattaaacttttaaaacacgccacaaaagaaaagaaaagaaatcaaagggacaatagagaaaattaaaactccttggctttttgctcctcaggggccacctccactcttgaatctctctaacactcttcaccctcaactccatgtcttcttcatctacaccactctctctgtgaaacacaaattcttaaaacaccctcttacatgt

SEQ ID NO: 6646 - DNA, 306 bp, Glycine max
  Clone ID: jC-gmfl02220080h03a1
tgctcgtcctatctagcttaccaatacaatataaaaacattattgttgaacattacatctatatatgggcaagctctttctcatccactgactaattggagactgccttttgtactatatatccgcttgtgcataggagaactaatctgacatcataacctgaaaccccgctatcccttcatgtgtcgcacagccttagccacgatctaccaaaacataatcatcgcctatatgctcaaccttaactaccccacgatatggccagaattgacaccacagcgccagccacagtggcacataaacttg

SEQ ID NO: 6647 - DNA, 531 bp, Glycine max
  Clone ID: jC-gmfl02220080h03d1
aagttgaatcaaagacttttaattacacgtacattttggtgccattttacaacaaataattatttttttgtacaaacaaacaattatttaaagctatacaggatattcttcgcgtcctaaaaaaaagaaagaaagtagaggatatccaatcaatattccttcgatcctatctaccatctatcatcgaatcatcgatcggatccagctccttcgaagttggatccctggacaaaaggaatgcagacagtggacaaaggaagaggaaagtacagcaacttgtgtaccctctgttcaaggaaacacccaacatgacaatttaatttcgctatcttttatcaacaacctgttatcccgttttggaaacaaccaagaaaccacaattcctccccacacattcgtttgagacaccttctttctttagagtattcataaaccttcatcaaagggcacgccactccccggaatccacgatcccccagccaagaaattttcaacggtgaatttcacagcctcagtactggagatcactcg

SEQ ID NO: 6648 - DNA, 289 bp, Glycine max
  Clone ID: jC-gmfl02220080h04a1
ggctcatttgtgcagattgctattgcaattccatatgcaaagcggaacaaataagttgtgttcatgaaaaacaactctgttgacaatctgtccttgcatcctgctcaaggtagacaaactggaaagcaacatctacatcttttcgtcagtcaacgaataaacggactcttatgactgtgatcttggcgatggtacgcctatggccatattatatttatactctacctgcaaagcatgtcaaggagtagtcctcaaaacggagatgatcgcaaaccccacactctttttg

SEQ ID NO: 6649 - DNA, 394 bp, Glycine max
  Clone ID: jC-gmfl02220080h04d1
gaattatatactttttataaccaccccaaaaattgtgcagtgatgcagcaaattttcactttaggggacaaaccaacaattaccgctagccattcctgcccttctcagggctatcagctatgatagccactgtgggtgggcgggtccaaaaattttttaacctacctaccaaacagacgtttgatatacacctgatcccattgattccaggtccaagatcttccctaaggggaacaagcaatccctttctcaagacggaagcacacgcttgaactgcccggatggcactgccaaccatatcaccacaaattcttgttcgcatgattagctgattgcccaaagggcccctatgtagtaagctcccaagacacaggggcgggtcccgagacaccga

SEQ ID NO: 6650 - DNA, 423 bp, Glycine max
  Clone ID: jC-gmfl02220080h05d1
ctcaaatgaaataaggaccctgggtattatggacgtttcttatgcgaaaccccaggattcatatataaacacaacgatgtttcccaaattccccctatggtgaatgttatgaactctttatagacacatcgccaagacgtatggacccttacacccacttttaaaattcatcaaacctttttttgtgcacgggtttacgacacttatagggtccctggggatgaacacaagtgcccgagtagagaaacatcggtgaacccaacacatcatggggtaggtttcactgtaccagctttctgaagggtaaaaccaccataaacggggggtgggcggccaataaaattcggataattgagcatgggtttgtggaccgaaaccacgacggactgtgagtgcggctagataaacttcatgagcctccct

SEQ ID NO: 6651 - DNA, 359 bp, Glycine max
  Clone ID: jC-gmfl02220080h06a1
ccccttcacaccattctcacagacaactttcaaactctgagatagaatggctgccagcacattgatgagtactgctatctcacccttcccatctctactttcttgctcaaaatccagatctgccacccgaggtcctctttatagctgtggtgtcaccaatgcctcttcttctcgcttttctctgagcgccgactggatgccaggcccgcctagacctccttaccttgacggttcactcccatgtgactattgattcgaccactcttctggaggtgaacccccagagaatcttgataggttcagagagtcagcactcattcactgccgatgggccctgcgtgctcgcccagggactttgg

SEQ ID NO: 6652 - DNA, 413 bp, Glycine max
  Clone ID: jC-gmfl02220080h06d1
actattattacctaggccgaaccatcagtggaaaaaggagcttggcattgtggaagccccatggaaccacccgagcctacatcaagtctgcctacaggtactttggagggagcagaatcttgtgcattacatcactcctccacagcacccccctatttgaaatagattacaaactggataagaacgatttcggtacccgcatactagccggagcaagtttccttccttactaaaccggagtaccgggtaatctatataattgtggaacctttgaatcctacgttttgtacaacacaaagtagatatattggatggtgtaaacgaaaaagaagtgtagcatagctctggatatgatgtttgtatagggaagctgttctttacagagaaaaggaagatccaaccctggatgaaaa

SEQ ID NO: 6653 - DNA, 488 bp, Glycine max
  Clone ID: jC-gmfl02220080h07a1
aacaaatgccatttgcatgagatagatagattgaacgaaaccgaatcaatgatggggtgggtggcgaattgggggacgggcgtcgccgacgccatatggatccagtggagctgtggcgcacacgtacaccttcagcatttactgctgcgtgctcaagtccacgcagggctactaccaattcacgctcaacaccgtttatgtcttaaaagacatcggctgccaactatcggacgttatgctccggatcttctctactacgccgccgctctctacacaacccaccgcgcctgccgcttcaagagcatatggacctcattaagcgggacctgggacgaagtcgcggtcggtaccagccaaagctgcgctggctgtatctttatatgagccttcgtcgaggacctagacagcactacagcagtgccgatcatgtgcttttttccgttgcgtgtgggcaacggactgaccttcttgaacaccacttatgtttt

SEQ ID NO: 6654 - DNA, 395 bp, Glycine max
  Clone ID: jC-gmfl02220080h07d1
tttattttttttttttttttcttttttttaaatgaatggactacatatgtgcctataaaattctgcgcacattgatcttataacaaataaaacccaatttaaatagtcctcataaaccacccctagaaaactgccttaactgtatttatgccgaacagcccagagaaaacaagactggattcctcagcctttacctagtgttgaaaagcaggcaaacgcaatctacatcatcttgcgtaaacgtgtaatgatctaaacacaactcgtttatagaacctccgggtcccgaagaataatgccataccgaccaaaaactcaagaaaagcaacacgctgcgatgaaaaaaaatgacggcgtgaaacagaggatgccaaagcacgaatgatcttctttat

SEQ ID NO: 6655 - DNA, 477 bp, Glycine max
  Clone ID: jC-gmfl02220080h08a1
cttcaattcatatcatatcaattagatttgttttcagagattgctagtgagataccatggacaactacaacagcaatgacttttggaaatttagtgaccagctgaggcttgaatctggttcggccaatctgtctctgaatgattattccatttggagcaacagctacagctccaagaggcctgatcagaggaggaactttgatgtcaagggcagtgatttcaacaactcatcaaagccttttgatgacgatttcaatgatggttggaagatcaccaatttcaatggaccccttttctctatgcctgacatcaacaacactcacactcttgaagttggaggcttcaacaagggaggaatctattacaacaccaacaccagttactacttatatgctaaccataacaacaacactcttggaggcttcgacaagggcaattattccaacaccacatactcgccctatcttaaccttaaca

SEQ ID NO: 6656 - DNA, 333 bp, Glycine max
  Clone ID: jC-gmfl02220080h08d1
gggcaaagttgtgtccttcttaatggcatgtttttatgggaggttcaaatacccccataacaagaaaaaatgggcgaaccaggactaaaaggccatttgccaaaaacattctagcaattgtaccaaatcaattttaaagggttggaattcagcataaacgtcccccaccatattttaagtggcctaatcatgttcggacactttaaatttatgggcccacatgattcattcattatccaatgggcccgaaacctttctatttggaaaatgcttacccttctatgctgggatggcttcaaaaagggcatcgaaactgtcatgggtagcaaaaat

SEQ ID NO: 6657 - DNA, 396 bp, Glycine max
  Clone ID: jC-gmfl02220080h09a1
ggagaactttacggtgcagaagatatgtgttatggatacagcacaagatgaagcccaagcttaagaagacgagggaaggaggaccacaatttgagggtgtgagatcatccccccctcagttgagacacggcgctgcagcagtccctcttggtttttcccccttccatgcatgatcgctcctgagcataccctgtgcgccactcttgtgtgcgtgcctactgacctctcctgcgcatgtatggcatacaccagcgacactttcatcaacaattatgtcccgggcgtgtttcacaccgacggggcaattgcgtggagccccgtgtaaccaaacgcacgggagtgtgtgtgattctggttgagcagcagagtaccagcgcacgttgcttctgcaatacc

SEQ ID NO: 6658 - DNA, 171 bp, Glycine max
  Clone ID: jC-gmfl02220080h09d1
ggtcaacgttatttagctgatccgtcgtaactcaagagagacagacggaaaaaccttcgcaccgcagagcaaacactggagtcccgcccgaccctaagagacccccttaggcccaatccaatctgagactctgagcaccaaagcgacgctgatagagacagaaagcgacgg

SEQ ID NO: 6659 - DNA, 258 bp, Glycine max
  Clone ID: jC-gmfl02220080h10a1
tatggattgcttcagctctatatgctgctgttaacatcggacagcatccatatggaggttcaattctgaataggtcaactattagcaagagactcatgcctgagaaaggggctcctgaatatgatgccgtggataatagccctgagaaggagtttctgacgactatcactggcaagacagagaccgtcattgcccttacgcctatagagagagcatcctggcacgcattggatgagttttaccgtgcgcagagagatg

SEQ ID NO: 6660 - DNA, 163 bp, Glycine max
  unsure (1)..(163): unsure at all n locations
  Clone ID: jC-gmfl02220080h10d1
gatcgcagtaatcacgatcggatncgtatagactaaatatgaggttcgacgcgctcactcgtcggctgccgacctttttcttgaaatatatgttaacttagctcaaacctggctgatgacgtggataataatgaatagcatttcacactcatggtcacttact

SEQ ID NO: 6661 - DNA, 350 bp, Glycine max
  Clone ID: jC-gmfl02220080h11a1
ccaactacgaggaatttgggtctttgggtgaaaagcccaccatcctggtcttcgagagacttggagaggcaagactgcaggtgttacgcggtgttggacacgtggaatgcgcgtatgagctttcgcaggaggagttgggcacgaagatctcgtgctgtgacgctcatatagtgaggagctgcacaaacgtgacatgggaagtgtttgaagctgccaaaggaaggttgtaggttgtgggaagagccggcgtggggattgacaacgtggatgtgcaagcagccaccgaatttggttgccttgtcgataatgcgccaactgcaaacactattgccgctgacgagcatgggaat

SEQ ID NO: 6662 - DNA, 492 bp, Glycine max
  Clone ID: jC-gmfl02220080h11d1
gcacactactagctgcaaacagctagttttattctgaatcatccaatccaaattatattacattcgcataccatagcttcaagtttcctcaaattgtccatcaaaatacctcttctacggagaaaaacagatctagatcatctgaagtgcatgtgcacttgagaattgtcaaaaaaacaaaaacatttctttataaccaaaatagtagctattttactttctaaaacgtaccatccatagatggtaggtagatacgcatgattgtttgtataccattacattatcaactagtactagagcttgaggaagacgaactcttcaatggcagacacggctccaatattgtcaagagcctccttgtttggttcttcatcgacaccaatagccataatagccttgttcctacgcgatgtccttcccacactcataaagctcacattcacgttttgttcacccagtatgtttccaacacgaccaatcatgccgggctga

SEQ ID NO: 6663 - DNA, 509 bp, Glycine max
  unsure (1)..(509): unsure at all n locations
  Clone ID: jC-gmfl02220080h12a1
aatgggtcgtagcgtcacgaatacagtatcctccagattatattcactggagtgcgacagaggtctcgactanggtcagtgtgggcctgcgcctctcaatcttctttattgtatattttgtttgttcttcttggagttgaataatgcctcactcattttctgtgtactttctgagagtactatggatgatgtgcttacgacctgctaggttgtttactgtctggtgtatggaacactgtaggatatgctgcgcaattgacactctttgcagggacgttgtttgtgctacgaaagaattttagtggctgtgaccgctcttatatttaggcgcgggacaaatgtgatatgggaagtgttcgaagctgcctaaggaatgttgtaggttgtgggaagagtcagggtggggattgacaacgtggatttgcacgcacccaccgaatttggatgtcttgttgtttatgcgttaactgaaaacactacagacgattgcgaacatgggatcgctcttc

SEQ ID NO: 6664 - DNA, 491 bp, Glycine max
  Clone ID: jC-gmfl02220080h12d1
gcacactactagctgcaaacagctagttttattctgaatcatccaatccaaattatattacattcgcataccatagcttcaagtttcctcaaattgtccatcaaaatacctcttctacggtgtaaaaacagatctagatcatctgaagtgcatgtgcacttgagaattgtcaaaaaaacaaaaacatttctttataaccaaaatagtagctattttactttctaaaacgtaccatccatagatggtaggtagatacgcatgattgtttgtataccattacattatcaactagtactagagcttgaggaagacgaactcttcaatggcagacacggctccaatattgtcaagagcctccttgtttggttcttcatcgacaccaatagccataatagccttgttcctacgcgatgtccttcccacactcataaagctcacattcacgttttgttcacccagtatgtttccaacacgaccaatcatgccgggct

SEQ ID NO: 6665 - DNA, 492 bp, Glycine max
  Clone ID: jC-gmfl02220081a01a1
cggcgttggagctgacggagttatctttgtcttgcctggcatcagtggcaccgattataccatgaggatttttaactctgatggtagtgagcctgagatgtgtggcaatggagtgcgatgctttgccaaatttgtttctcagcttgagaatttaacatgggagggatagttttaccatttatactggtgctggtctgattattcctgaagtcttggaggatggaaatgtcagagttgatatgggggaaccaattcttaaagcctcagatgtgcctactaaattacatgcaaataaggataatgctgttgttaaatcagaactagttgtagatggagttatctggcatgtgacctgtgtcagcatgggaaatccacactgtgtaactttcagtagagaaggaagccagaatttgcttgttgatgaattgaagctagcagaaattggcccaaaatttgaacatcatgaagtgtttcctgcacgaactaacacag

SEQ ID NO: 6666 - DNA, 488 bp, Glycine max
  Clone ID: jC-gmfl02220081a01d1
aacaaaccgttgttgtgacacattcaaccaaaaaagggtaggaagatataaatatgtggcaaaatagtaagaacaagcagaaagtccacctctcatacaaatattattcagcaattcctaattccatattgggtttaacaatgggggcaacatattaaaggggcaaagatccgtaataaactacatcggctgagcctgtcatataaacatgattatcttcctccctccattcaatctgaagaggtcctccaggtagatcaaccgtgcaattcctcccagcacgaccctcaagaactgctgcaacaacagtagcacaagctccagttccacaggctagggttgctcctgctccccgctcccagacacacattttcaagtgagaattagacaacacttgtacaaactctgtgttagttcgtgcagggaacacctcatgatgttcaaattttgggccaatttctgctagcttcaattcatcaacaagcaaa

SEQ ID NO: 6667 - DNA, 556 bp, Glycine max
  Clone ID: jC-gmfl02220081a02a1
aagggatacatgcagtggtggaatgaatggttacatatccttatgtggtggagaaccttgccctcctatttttaggtctcctattgcaagcatggaagatatcatggacaatcatgttatatgtgcaatatatagactcccagatgcacataaacatattacccgaccaccacaaggagttaaatttccaaaaaagattgttgaaattggggatctaaaacctgaacctgttttgtggcatgaagattcaggcaggagacaccattctgaaaatgggaggaaaaaccctccaggatctatttctggtcgggagcttggggatgcagcacacagactcattgtcaattccttacaggcaaaggttgatactaatggataccgccatccgcataatggacctcctatatcttatcctgcacccatgggtcattatcgacaaccagtgccttcgtatggttatgaatccagcccaggatatgttgcaatgccgccacctatttcagcttcctcactccaaggcagaccacagtttgcaccttacaaatgctgccctact

SEQ ID NO: 6668 - DNA, 420 bp, Glycine max
  Clone ID: jC-gmfl02220081a02d1
aaaggataagtttttgtgaattacaatccagcctcgggacaaaatacacaatcaattgaatagcctatcaagtataaaaatgttatcaaacctgagttctaaggggggttataatttgacactgatctattcaatggaaaattggtcaagtattgtctcaactagacttaataggtgaaatacaagtacaactctcaaacctcaactaattgagagagaaaaagatttggtacaacaatttttaattcgtagggaagaatattccctgaacgaaatgaatttatttgcgactgtcaccaggtgggggcattggattcctgtttcctcttctatctaataaagaatattgattggatgaatgatgaccataatccctgtgcccactcgggttgtttggtggagtccaattctgatgagctc

SEQ ID NO: 6669 - DNA, 209 bp, Glycine max
  Clone ID: jC-gmfl02220081a03a1
atcataatacatatttgctttacgaaaccctcctttggatactgctattacactgtatgatgcacatggttcaattgttgatatgacccactacgtctgttaataatgacatgatcactgaatgccagggtctcgccacatcagaaaggagcaatttacatccagctgcagttccatttgccaaaattccaaaagaatttgaagggctt

SEQ ID NO: 6670 - DNA, 470 bp, Glycine max
  Clone ID: jC-gmfl02220081a03d1
ccaaaagaaaagggagtgggaggaccaagatttgttcaatccaaacgccattacacagttcacggctgcaacgaatgaagatatatctctctcttctcacctctaattgaccttcaactaccaaaagttcaaaaccttgctagtcatatattgctaagattaaaactaaaaaatattaaacggcttggttgcgcggaactgagatatcaataacaaaaggccttcataaaagtctatttttcatgaacaagagggcaatactcagggtaccacatattgcctcggacatactccacggtttcttcttttgacatgtttgctagctctttgaaccctacatcaccatgtccttcagcctgcttttctgcaaccgctgcatgtacaacagcagccccaacctctgctgtaacatctcgtatacagtcaatggatgggtacaagattcccttttgacatcctcatctgtcatg

SEQ ID NO: 6671 - DNA, 415 bp, Glycine max
  Clone ID: jC-gmfl02220081a04a1
cccatgataacctttgtcccaacaccatgctgatggctgctgtagctctagcactgcttatgaatggctttcactggcacttcaagtgctacatggagcgacagcacggatggaagcgacgctatcctgcacaaaaccttggactatacttgcggagctgagacattctagtataacgctccaccgaactgtgcgcgcttaatgagcccaacatcgggtaatagccatctgcactacgcacctgaacaggtgcttgcatatggaggctgaatatcatgggttctgacactctgaggaaacactcgttattgctgtatctgagcccagctatagatgaactcatgtgaaggctgctagtggcattgctaagagccctggtaccacttccgtgactacaacaccaaccaaggacacc

SEQ ID NO: 6672 - DNA, 350 bp, Glycine max
  Clone ID: jC-gmfl02220081a04d1
gggaacttccaactccagttagcttttaaccaggagattaaaaatctttgggtaattactactcaaagcactcagatgttgcccttataagataactaatttacaaggaaacaattattacacctttatatgccacaaaaaattacgaggggcaatagttgcataatataacttgggtctataatatcgagttgaaaaattacatgtcaggaagagctgaaagggttcaccgcatccctgccttttgtacaataataacttccttggcgaagattggggcccgatggattactatattcagtatttcaccgacctgtaaactgccccttctggttaagaacgaaaccctt

SEQ ID NO: 6673 - DNA, 349 bp, Glycine max
  Clone ID: jC-gmfl02220081a05a1
ctttgcaaaaacttttcgttttttctcttggttaagtactgcgcatgaaccaaatgatgagaaggattacggctgacaatgccaaaaccaatatccatcatatgatatggttagcgcacgcgcacaaacacacggttgaggtacatgaaatctcccgaaccctagttttaggtcagaggctaaagaccagtgccgtcttaatgaagcttatgtgcacacgtaaaagactgcgtcctaacggagtggcgaacgataaaatgttcggtctcatttgggaaccaccagcttcggcgtggcgtgtcatggaaggcggtaagcctactatcatcaccaacgtgggcggccagag

SEQ ID NO: 6674 - DNA, 487 bp, Glycine max
  Clone ID: jC-gmfl02220081a05d1
aatcatgtcaatcgattggtcccctctccaacttattaataagaatataaagatagattataaaacaggtaattcttgggttgataatgataattgccatcacttttaaaccccgtttaggattgcctagactcttaatccgattgctaattgatttccagaaataaacttaactattcaatgccaaatttaatctgacttattccaaggctcattgatagatggaccaatacagcaaggatgaatgttggacttctacaacagccacttgagctccttcaaaggttctgaaaatctttttaatttgctttagaactaatcttcctctttgcaaatgacggcaaacagaaagctgctgtatgaatctcagagttgtaaaatttcagtggtcttactgacttctgactctcattttcatctatgggattaactggatgcttgaaatcaacaggtggtccctcagttgagcaaagcataaaaccaatca

SEQ ID NO: 6675 - DNA, 559 bp, Glycine max
  Clone ID: jC-gmfl02220081a06a1
tggatttgcaacaggtttctgaaattattttagaaagcaaaggaaaattaaacgaaaaatctgtatctactgcattgcgtggcctttctgaaagttctgtacaagaagctagagatggtgacagaagcaagcagctccaggaagttggtcggggagtgaatggtggtgaaattgttgatgttaaggtcagttctgttgcagaagttgaggctgaagcaactgaaaaattgtcacatatagctgtggaagtggatgtacagagtgataattgtactgctgaaggatcgagtggtggtggacggacagctgctgatcttgttccgtctgatttggcaagaggaaaagatgagaatgtactccattcttctgcttatagtgttgataaggttcctgaagacttgactgaacgggagtctgaaaaagctgatgatgttgatgctgagaatcttcctagtcagtctaaaaaggaaagaaatgagtgtgaaagtgataccttgacaatgcctgagaatagaggttcatgctctatcgcgactggttttgctgctgaacatgtgga

SEQ ID NO: 6676 - DNA, 461 bp, Glycine max
  Clone ID: jC-gmfl02220081a06d1
ctcaatgaaaatgggacagaagactgcccacagagaaattgcaatagcatttattcctttatcatttaaatatatttgtgaacgaaaaaagtaaccccctccactgaatcacattaggataacacaggatatattttctgatcctcttgcacaagggacaaagtgttacaaacatgtgaatatacaaatgaaaacacttacaagcattggtgggcattagattgtaggaatataaatggctatggccatgaggatagattgtggccatcccacccaccataaggctcgttcctcttacagacactaccagccaactggatccttgcttgctcctcagctggggcctgtgaactaacaacagaaagttgcctctatggaagaggagaattgtcagatgtcccctccatgtgtgaacctacaggtcccgcgttaagatctaaaccctgccttgcccatttttt

SEQ ID NO: 6677 - DNA, 333 bp, Glycine max
  Clone ID: jC-gmfl02220081a07a1
ctattcttttatcaaaaggactgaacgaaaaaaccttagggctcctgtggtcttcttggccccccaagaatttcctggcatccagaaactaccggcttgcatagcgagcttcactcctggatttccactattacccaaaccctgtttgtcggacagagtgtcagagagagacccttgacaacatggcacaaactaggccaagcagaggagactcggattcctgctccatcagatgcaccaacacgagaccacgatctggggactgtgtgctgatgcactcctctgatacgagccagctcaccgtacgtcgggcgcggggaagagatcgaacat

SEQ ID NO: 6678 - DNA, 457 bp, Glycine max
  Clone ID: jC-gmfl02220081a07d1
aaaaataacaaagcaatcagaataggaattgaacatacaagaggaagcaaagctatcttgctttggcttaatttataccatgaatgaatcactgtcaatgtgatcatatgaacatacaagaggaaacattagaaatgttatacacagacttgaaagaatataatcacacttataaggtcactgtgatgtgcatgcaatacaccaaaacaaataagaaacaacttgagaaaaatactttgactgaagctgattttaattttctttctgtgtgaaacttgacactggtcttaggccatgtttgagtgctgcttcccacacaagatcgattctgttaacatctatggccccaacttcgggatgagaccaaccttcaaggctatgtaccactcctcctgcatggcacgcgtgaaccactcccctatccatcgtgtactcacaacacccaagtccttccacg

SEQ ID NO: 6679 - DNA, 380 bp, Glycine max
  Clone ID: jC-gmfl02220081a08a1
caaaacagcatattgtggttttgtcttctctatatataagcgacgaaggttttcattgacagggcgtcttcggttgccatatgatgatatcttgctctgggtcctcaacacatacccgtttaatagaaaataaaaccagagtcctgtggttgttaaaactaaggcatccctttggacccatcagtagcgctactactgtgtggacacgtatgtggcttgtgaaggaagcctttcactaggtcaaacaaggaacaagacatgcccattttatgtcatgcgtgacctattattcagaagaaccccagtgttattcttagcaccaggcctaggccatgtgacaacactcactgatcaaaccattgctttccctgtggcgacag

SEQ ID NO: 6680 - DNA, 392 bp, Glycine max
  Clone ID: jC-gmfl02220081a08d1
aataacaagaacaagaatacattattttttttcatcttacatatgtacaattgcaagcaatcgcacaacttgagagttatacatatttcacctccttcattcttttacaacattatattatatgttttccaaccattaatcactatttaaattgccccacagtattgttttgccttgtctattgccactgatacattatgtcatgacaacaacaatagtaataatgaaagcctagaaccaattaagattcctttggccctaactagcccaaagcatgtttaatcattaatcacttgcaccctgcagcaccaaacccaattgtcccacctccaacattatacacaacctatattgttctcttgtgcacgttcccatatataggaacatcacta

SEQ ID NO: 6681 - DNA, 503 bp, Glycine max
  Clone ID: jC-gmfl02220081a09a1
cggacctctctcttcttcagtggtggaagctactagaacactagtttgttgagcactgcgatgaggaagtggacggttgcttccgctctccttcttctctctctcctctttctctttgcagatcaaggtcgaaagtttcaggcgaatgccgagggagattccgacgagcttgtagatccacccaaggtggaggacaagatcggtgctgtgcctcatggcctttcaaccgattcagatgtcgtcaagagggaggcggagtcgatctcgaagagatctctccggagcaacgcggagaagtttgagttccaagcggaagtgtcgcggcttatggatatcatcatcaattctctctacagcaacaaggatatcttcctcagagagttgatttccaatgcttctgatgctttggacaagattaggttcctctccctcacggataaggaggtgttgggagaaggtgataacaccaagcttgatattcagaataagttggacaaggaaaa

SEQ ID NO: 6682 - DNA, 463 bp, Glycine max
  unsure (1)..(463): unsure at all n locations
  Clone ID: jC-gmfl02220081a09d1
ctcgccagatagatcttcgcgcgaggtgtagccttcacctgcacgccctaccaagagaaagtgcgaccacagctccgatcgcgaacgctaagactgagatcgctattacgagcacgagcgtcaatatcagacccgctatctacgatcagaattcttattcaggacgccattggtacccgtcggctaagcttcatccgacgatatcattcgttgccggcatccgccgccgcggatggcaagcaaaaggccagcgtgttttcccgcataagcttccctgctgaagaggaacttgctaagaagagaaaagtcaccgattcttccacaacagaacctgccgctgccgctgncgatgccgccgacggtccactgattntttggcacacctgaagacaatgtcgaacgggtactacgaatggaggaagagcagcagcgccggcgcggactactaatctagcgacgacga

SEQ ID NO: 6683 - DNA, 534 bp, Glycine max
  Clone ID: jC-gmfl02220081a10a1
cgacacacgccgtgcggattacgccccgtacgctaggctttcggctcgagctcatatcaggggttagctactgtcatgcaatgcaagtatgccatcgtgacttgaagttggagaacacattgctggatggtagtccagctcctcgtttgaagatttgtgattttgggtattcgaagtcctctgtgcttcattcacaacctaaatctactgttggtacccctgcatacattgctcctgaagttctgcttaagaaggaatatgacggcaagattgcagatgtgtggtcttgtggggtgaccttatatgtcatgctggtgggtgcatatccttttgaggatccagaggaacctaaaaatttccggaagacaattcataggattttgaaagtccagcactcaattcctgattatgttcatatatctcccgagtgccgtcatctaatctcaaggatctttgtggcggaccctgcacatagaataagtattgccgagattcgagatcacgagtggtttgtgaggaacctgccggctgatc

SEQ ID NO: 6684 - DNA, 436 bp, Glycine max
  Clone ID: jC-gmfl02220081a10d1
ggggcggatgctgtcgatataacttctcgacgttccatgcacctatacctaaggctcggactttggttcgtgaaaaaaattaattattttttttaatttttttttattaaaaaaagggaaagactgccacttaataatataacaccaccacaacttttaatacaaatcaacatggggtcttgaacggcccataaaaatataacccggaattatattcggaacttaaaaaaaaaaggcaacctttttaccagaatcctaccctttaaatgggaaaccttttttttcccacatattccaaacccggtgaaaaacccatgcttttctatttataaattgatcaaagaactcaattcgaattgtttgccacccggttacattgaataaactattactcccatgatattaatggcggggccgggatccgtttttagggcct

SEQ ID NO: 6685 - DNA, 489 bp, Glycine max
  unsure (1)..(489): unsure at all n locations
  Clone ID: jC-gmfl02220081a11a1
acaccccaatcgtagccgtcgcactttgcgttttctgcgtcatctccgattccccgacaatggccacccaaatgagcaagaagagaaagttcgtagctgatggagtgttcttcgctgaactgaacgaggttctgacaagggagttagccgaggacggatactccggcgtggaagttagggttacgccgatgcgcaccgaaatcatcatcagagccaccagaacccaagccgttctcggtgagaagggaaggagaatcagggaacttacctcggtggttcagaagaggttcaagtttcccgagaacagtgttgaactttatgctgaaaaggtcaacaataggggtctttgcgctatagcacaggctgagtctctccgctacaagctccttggtggcctagctgtgcgcagggcttgctatggtgtcttgaggtttgatatggagagtggtgctaanggatgcgaggtcattgtgagtggaaaattgagag

SEQ ID NO: 6686 - DNA, 527 bp, Glycine max
  Clone ID: jC-gmfl02220081a11d1
tgtggtcgtccttttttttttttttttttaagataaaacaaatttcttagaatacttgttactgagtttaacaatttctttaaatttaagaaactacaaaattgtgaacatgtctttgacaacaaacattgcacacaagaaaaactaggcactcagctactatgaattacttctacagtgtataacttttcaagcaacagggacctgcgtatcattagcagccaaaactggagcaggctggatgtcttcttcttcctcctttggagaatggattgtgacaagatcagggaggggagttataggaccctgtttccccttaggatcccaatcaagcatgatcttcaccttaatgcccagaacaccctgtctcaagagcacatgttttactgcagagtcaatgtaatctttgacaggttgcccagaagaaatcatgtaaccatccttaaacttcatatatttggctctctgggctctcaagtttccactcacaatgacctcgcatgccttagcaccactctgcatacaaa

SEQ ID NO: 6687 - DNA, 406 bp, Glycine max
  Clone ID: jC-gmfl02220081a12a1
acaccccaatcgtagccgtcgcactttgcgttcactgcgtcatctccggttaccggacaatggccacccaaatgagcaagaagagaaagttcgtatctgagggagtgttcttcgctgaactgagcgaggttctgcatgggagttagtcgacgacggatactgcggcgtggaagttatggttacgcctatgcgcaccgaaatcatcatccgagccgccataaccgaagccgttctgggggagaagggtaggagaatcctggcactctcctcggtggttaagaagaggttcgagtctgccgagaacagtgttgagctttatgctgaaaacgtcaacgatatgggtctttgcgctatagcagatgctgagtctctccgctacaagctccatgggggcctaactgggctc

SEQ ID NO: 6688 - DNA, 286 bp, Glycine max
  Clone ID: jC-gmfl02220081a12d1
tttggtcgtccttttttttttttttttagccaaaaaaaaggggcactaacacataaaattagaggactgatccaaaattcaatatgcggcccatggcctaattccatgactaaaactgtcaagctccattgtactctcctcctaaaaggctctgatgttctaatacaagtatttccaatgaaagacaaactctctcgagtgatactttcttggattctcagacggagcattattcagaagtgaagctacacttttgtgggcaaaccatgggaacgtactaacaagg

SEQ ID NO: 6689 - DNA, 522 bp, Glycine max
  Clone ID: jC-gmfl02220081b01a1
tacaaagggagcttacaaacccgagtctgaccgttcttgcatacatttggaatttgatatatcagggactggcttaacatatgaaactggagaccatgtgggtgtttatgctgataactgcgacgaaactgttgaagaaactgggaagttggtgggtcaagaattagatctattgttttctcttcacactgataaggaggatggcacttccctaggtggttctctcctgcctcctttccctggcccttgcacactgcgtactgcattagcacgctatgctgatctcttgaaccccccacgaaaggctgctttagttgctttagcttctcatgcatctgaacctagcgaagcagaaagattaaagttcctttcgtctcctcaggggaaggatgagtactccaaatgggtggttggaagccagagaagtctccttgaggtgatggctgagttttcatcaaccaaacctccactaggtgttttttttgtgcagtggccccttgttacagcctcgttattattcta

SEQ ID NO: 6690 - DNA, 493 bp, Glycine max
  Clone ID: jC-gmfl02220081b01d1
acagtgtagaacatccactgtattttttttaaaaaaaatacatgtttcattaataaaataattattcgttaccaattcctacacttaataatacatgaccatccactgtaaccggtatttgtttaccgatttctgagactaactatcacagagtcccccgataaataatcccacttcagagggatccaacctatcataataagagaatataaagataacagaaaataaaagaaaaaagggtaaatgtccagaaaagcatttcttctcaaggaaacctgtttaacctccactgttggtgtcctaaatttccggaaaggcagtgactaatctcaagaatatccttcagccaatcctgaatttagcatatcaaatagcaaggataccacaatctgggcagaagaatgatcagaaaaatcaccacacatcccttaggtaacgtgcatccatctgaagttttttcactatagcctcagcctttgtcgagtccacattt

SEQ ID NO: 6691 - DNA, 466 bp, Glycine max
  unsure (1)..(466): unsure at all n locations
  Clone ID: jC-gmfl02220081b02a1
gcggaactttgagctcctcaatatcaggaagtaattaagtaaaggttgtgtctttttgttgttatattctgaattatgacactcctgagatgcaagatcaccttttattcaagaatagtctcaagcattatggaaagaaacccaagagttgaggtcataatggcatgatctcctgatatcagttttggacaaaggtggacttttttctgcccccagaattgttgtttcaccaggtttctcagccactgtagcgtgttcttaagacgtgccgaagagaattcaactgaaattcttttaatatttaattactgtactagatgagacctaagttgtagtacgctccatgatacaacaccatgttcttgtttcttaacaatgaggtccaacgctgcctgcatgttacatattnaaaaaaaaaaaacaaaaaaattcaaanataattaaatcaaaaaaatgttttattaac

SEQ ID NO: 6692 - DNA, 437 bp, Glycine max
  Clone ID: jC-gmfl02220081b03a1
ggaaaactgacaatgctggaggggagtatacaacacccactgcacacggtttcataactaaaccgccatcgctatcttcgactttctgcgccccaaagatgagaagacgcaccgtttacgcatggctcgcagcacttatatgcgttctagtgctcatgatcgagatctcatccatccctcagacccaagaataccatgatttcgccgaccaccgcgccttcctcggtattactaatgcactgaacgccatatccaatttcccttctatggttattggccttcggggacttgggctctgttatcatggaaattactctaggctcagctggcaaggtgaactatggggatgggcatgcttttatgttggcgtggctgcagttgctgatggatctttgttctatcatctgacgccagatgatgctcgacgtgtgtgggat

SEQ ID NO: 6693 - DNA, 249 bp, Glycine max
  Clone ID: jC-gmfl02220081b03d1
atcttaggttagttcatttcaaactatgatacatcatacaagcgagaactaaattgtgcaactgttggacattccactgtgaaaatggagcacgcatatcatttaactaccattgtaaatgcacaaataacaatacaaattgatagtgttacagctgaggaaaggcacctgctcaaagtgccatctcagcctgcaaagctgccaattcatcttcttcaggagttcgctttgcaggaactgggcgagtag

SEQ ID NO: 6694 - DNA, 201 bp, Glycine max
  Clone ID: jC-gmfl02220081b04a1
caaaaaaactcatttctggatgcttgtgaatatgccccactggccttctatatacatatggctcgctctcaatgcacaaaacattatggagcccatggaggaaatggggaaaaacttattcatgtttatgagaacgttttggataagcatgctgcatgatcggacacgaatcactacggtagtatttacacatccgagaca

SEQ ID NO: 6695 - DNA, 490 bp, Glycine max
  unsure (1)..(490): unsure at all n locations
  Clone ID: jC-gmfl02220081b04d1
ggcgagaaacaactaaacaataatttatttctatacacactgaaaatacacaacgaccacactgaaaatacatcaatgcaatggcgtcactcattctaatccaaaaactgacttatagaaaggaaagaaatgccatgaagtaaaaaggaaaaccaaatgaaacggacaaacatattccagactcaataatttttctacctcctcaccacatggtaccaatttgaacatcattgacctcactcacatgacaatctccggcttcagaatatttgacttgatctccttgtgcggcaaaacaacaccaccattgctgtaaatttcatcacatacatggacatcttctccaaggatggtcattattatccactcgagcccattgcccaacagttgaatgccacccaacaatactgctggatacacaagcatgcttcttaactcggactccacgcattatngtgcagcttttgagtctaacaccttgctcaataac

SEQ ID NO: 6696 - DNA, 493 bp, Glycine max
  Clone ID: jC-gmfl02220081b05a1
gtagtgtgcaaaataaaactcaagctcccagattctgttccaatgcctcccgtaccaatttgccccatcaaagttgggcacattgatgatgtccaagagctaagaaaaaccaagccaaggacaattcctcaaagatttgtacgagacttgacagaaagaccaacactcactacacctctttccccaccacatagtgacatgccagtcattgatttctctaagcttatcaaagggaacaaagaggaagtcctcactgaactttttaatcttgcaactgcttgtgaagagtggggattttttcaggtaattaatcatgaaattgacctcaatttgctggagagcatcgagaacctgagcagggagtttgtcatgctacctttggaagagaaacagaaatacgctatggcttcaggaacagtacaagggtatggacaagcttttgttttctcagaagaccaaaaactggactggtgcaacatgattgctcttggaa

SEQ ID NO: 6697 - DNA, 528 bp, Glycine max
  Clone ID: jC-gmfl02220081b05d1
tttcgtccttttttttttttttttagcataaaaagaagacccataatcattagaattcgctctaaatttaccaagaagctccttttgaacagaagaaaagaaagttgaatactctcactacccccgtccacatctttcagttagtactatatatacacacaatgaacaaccgaaggtagaacctgctgaaatatgaacaagacatgccccatccctgaacctactacctgtaaggcctatctgtgctatgcacatgttctttcaggccaaagcaaaaaaaaaaggagcttttgatacacatctaatctgactaatcaaataacatcagatggcactggcaagccgcttctgaagcaactactaccactaacgttagtgacggtctcatctttgcagggcccactgcatttgagttttgattcacagttctggcatttcaggcaaacaaaacgagctggaacaggatcagtatcatggatgtcagaacacctggtggtgtggcacactgcacatatatgacacgccaac

SEQ ID NO: 6698 - DNA, 619 bp, Glycine max
  Clone ID: jC-gmfl02220081b06a1
gaagaaagaccttttcctccaattgcagagtcaaagtttaaggcctaagttctctcaactctcattcaacccacttccaccatcaacttcttccttttcttcaccccgtacattcacaaccctggctctcttcaaatctaagacaaaagccgctcctgctaagactaaggttacaaagccaaagcaaaaggttgaagatggtatctttggcacttctggaggatttggttttactaagcagaacgagctctctgtgggtcgtgttgctatgcttggatttgcagcatcattgttgggtgaaggaataactgggaaaggaatcctagcacaattaaacctggaaactggaatttccatttatgaagcggagcctcttcttctgtgtttcatcctcttcaccctgctaggagccattggaggtttaggtgaccgtggaaaatttgtcgatgacgaacctactactggaggtgttattccttcaggcaaaggcttcaaggaagcccctgggctcggttcaggtcctttattcggattcacgaaagcgaacgagctatttgtgggaagattggcttaattgggttcggtttttaagtgattgagaaattataccgaaagggag

SEQ ID NO: 6699 - DNA, 418 bp, Glycine max
  Clone ID: jC-gmfl02220081b06d1
acgacgaactcaatgcattttatgatacatgaggaaacgagtattttaaacacaagcaaacaaaagggttagcgtctaatcatcctccccgtcatctgaccccaatatgccagtttcaggatacagagcagcaatgaataaaaggagaacgttgaacaacactatgggctagatttcattgattggtaccccctggtaaatgtaaaaatggggtaaagctcccttcccaggaatcatttcttccatcgccgacaaaacaaaacccaattgagccggtctccccacaatatagatcgtacgctttcacgaatccgaataaaggacctgttccgagcccaagggcttccctgaaccctcttcctgatggaataacaacttcaatactatgtacgacatggacaaatattacatggttacc

SEQ ID NO: 6700 - DNA, 474 bp, Glycine max
  Clone ID: jC-gmfl02220081b07a1
tttcaaactctgagaaagaatggctgccaacacattgatgagtactgctatctcagccttcccatctctcctttcttcctcaaaatccagatttgccaccgcagttcctctttctagctttggtgtcaccaatgcctcttcttctcgcttttctatgagggctgactggatgccaggccagcctagacctccttaccttgatggttcagcacctggtgactttggattcgaccctcttcgtcttggtgaagtaccagagaatcttgagaggttcaaagagtcagaactcattcactgcagatgggccatgcttgctgttccagggattttggttccagaggcattgggcttaggcaactgggtaaaggctcaggaatgggcagcagttcctgggggccaaacgacctacctaggcaatccagttgcatggggcaccctacccaccattctggccattgaattccttgctatttc

SEQ ID NO: 6701 - DNA, 401 bp, Glycine max
  Clone ID: jC-gmfl02220081b07d1
aaaaaaacacattacacaatgccattccaactagtaaaaacttgggctccaaaactcacaccccccattaatttaaaccttgaaattttaagcattgtaattggaggtcgttaatgtacaaccatttgacagttcttttattgggctaggaaagttgggtcaagggatgataatgcagcaacagcatggggttacaagaaaacaaagggttgaaaaaaaaaaaaacaaaaaaaaaccctttttgacttaaggtgagcataccaaatcccctggattttgacattttttggggcctttgctcccaaattaatgtcggacgggtgaaaactttggaacacaccgataacctcgccggtttaagggttggtcttggggacactgaaggggattttccccttgga

SEQ ID NO: 6702 - DNA, 451 bp, Glycine max
  Clone ID: jC-gmfl02220081b08a1
ctcaaaaacataattaagcattaacattccacaccttttcacacacacacaaaaaaaacaaccctctaaaatctaagcctcaaagagtgctaaactttgttacaatgaacatgttaggccttagagacctagttttcatagctccaactccttctggacttcaccaccatcaacaacaccgacccatttaagcagaacaccattcaaaccttcctttgccttcacacgcctctatcagtgttggtcttggcattttccctctactaacagtgccacacaccaatgatgttcaagttcaagttcaagactgtgccaacaacaacaacaacaccgacaccaactattggaacctgaagatgtgtggtgccactgaagtgaattccacacgaaaaggtgttatgaacatggaggatgagggaagcactaagcaaatgatggagagtgaggaagg

SEQ ID NO: 6703 - DNA, 492 bp, Glycine max
  Clone ID: jC-gmfl02220081b08d1
atatatgactctggggttatttttgattttgcaaattaaattacacaatcacagccgtacatcacacatgagttgggcctcttccaacttaaaagcagaggataacattggcccatgacgcgacacatgcaccacctagtaatcataattttacatctttacatacaaaatacaaagactttaaattttaaaaagaagaaaagagataaacagatcatcttaatgaaatgaaaccaaaacccacaaacattggcttgatttttgttgttgttgttgttcccaacttgattaagcatgaaccgtttgattgaatcacttggacttgaagggaatggccctgattacaacctggtggtagagtgctgcaagagctgcaccgatgaatggtcccacccagaagatccagtgttcatcccaaccaaggtccttgttgaagatgatagcagcaccaagactacgagcagggttgataccagttccggtgatggggat

SEQ ID NO: 6704 - DNA, 354 bp, Glycine max
  Clone ID: jC-gmfl02220081b09a1
actagttctagatcgcgagcggccgtccttttttttttttttttttttttttttgttccatgggaaatagaattagctgctgttatacactacaatggaaacatgaaaccggggtttgaaaaaatttacctccaaatagccgagggttattggacaacagcatgtaagacgtgatagtatagtgtgttccgcgagaatgcaacatgaatccataaaatacggatcttggggcacgtgtagggtttgccatttatattgcgggtgcttacaatttttgtacaaatatctaaaggcaagatgtaattagggcgtctcctgccttggaaatgaaaagggtcggggttgacatcttag

SEQ ID NO: 6705 - DNA, 303 bp, Glycine max
  Clone ID: jC-gmfl02220081b09d1
agctctccagcgacacgacaaccgacatgacgatccggaagagcgccactatgggcagcctgacccactacactgattacacctcgcaccggcttcacgtcagcgagaataacccgagtttacccggtgagacgcacaaacacgccaggggcgactccagggcaacggctactatgacttcggaccaggctcttctccttgcaaatgctatagatgaagagcacatacatgggctggcgacgatcatttaaagggtatgctaagagtgcgtcaccattactaagatgatagtgctgagcatgc

SEQ ID NO: 6706 - DNA, 504 bp, Glycine max
  Clone ID: jC-gmfl02220081b10a1
acacaatccaagttgaacctcttctgagctttgaccacgacaagaactaaaacttctccctcggcctcacatcacaacacaagaaagttcctattattttccaccactttccctctctcatctcttaaagcctccaaaagctgcaatctttcttcttctactgattttgttccctggctctccagtgaaccttgcatgtttcccagccccttttgattgttttccactagaagcagtgttttctgctaatagttaggaggttctaatggctgtgctgatgatttttcacatgtgtgctgcaatagctctgcctgcttatggagatgctttcatcggtgtcaacattggtacagatgccaccaacatgccaagtccaacagaggttgttgcccttcttaaggctcaaggtatccaacatgttagactctacgatgccgacagagccatgcttcgcactcttgccaacacaggaatccgtgtaattgtttctgatcccaatgatca

SEQ ID NO: 6707 - DNA, 380 bp, Glycine max
  Clone ID: jC-gmfl02220081b10d1
cggaacgccacgtgccctgaaaacatcccgacctaccatgctccctatacctgagctcggcctttggtttttgctttatctaacaagagtcatccttttataggaaacccgttaccatacaccattttttggcaggtgctaagagaatgttaaacctgacgctggagttccatcagccattacgatgcatggtcacaggcggtcggctagaactaaatgagcaacctccagttacagttgacattgtcttggtgaccaacctgcccaccctacatatcctggtgctcaggatcacaaaatgggtgctgcgctgatcattgaaacggtcgatccagagtgactgaccattcatgagaacgtctatctgagcacgatatacg

SEQ ID NO: 6708 - DNA, 421 bp, Glycine max
  Clone ID: jC-gmfl02220081b11a1
gcggacggaggttagagtaatttgtctccgaattctgcgaacgcgctgcccccactttcgtccttagaattcttgttggggacatcatagaggaatttgtgctgattagggttgttttctgcttttgatcagaacagaaggaagaatcacttagtatagatggttgcagatcactattctcctcctctgtttagtgtggctccaatgatggactggacagatcatcactataggactttggcacgcctcatatcgaaacatgcttggctctacacagagatgcttgcagctgaaacaattgtatatcaaaagggaaacctgattattggcgttttctccagatcaacatcctattgtgctataaatcggagggagttattttttatatttggcaaaagcaactgaacttgccaatgctttc

SEQ ID NO: 6709 - DNA, 328 bp, Glycine max
  Clone ID: jC-gmfl02220081b11d1
tttgtttttttttttgtatgacatgattaaggggattgatctggctccagaccatacattatctttataagataattaatacgcactatcatatgaaggttgatggggtcgccgaacattgcttttgaaaaatcctgcccctgatacatgaactaccaaccttaagtgttaaaacaaaagcgccacaataacacgcttttacttcagttgcaattgaatatctggcataatatgggttacagactaaatctgaactcgatggactataatagtctcctgctagagttatacgacgccctttcctcatgatcgaaatggggcacgcatt

SEQ ID NO: 6710 - DNA, 341 bp, Glycine max
  Clone ID: jC-gmfl02220081b12a1
ttcttttcctttattaagcacaccttcggcatgacccataccgtccctaccatcaccctttgagcggtatgctttaacaataaccacatctcatagggccgcaagtcaaaacatgcatggaacaccttctatactgaatcggcacactgtctttctatggacacttgatgacagtcgttctacaagatgactccaacctgcaggatgacagtacatttgtattgcatatcagattcataggtgcatttcttatgcttagttaaacgctcaccgttatgttcctactcatggatggattacgcgtcttctgcaatgaaaacttcactgccttcatccacgac

SEQ ID NO: 6711 - DNA, 480 bp, Glycine max
  Clone ID: jC-gmfl02220081b12d1
aggataaaaatatacattaacataaataatttgaataacaagattcctcttggatcctacatatttatacatttgtacatcaatgagatgagattagcaagtaagtgaaaataacagacacgatagagttaattaagtaacatagcacatgataataataatagtaattcgtaataacaacaatagtaagctaactgtacaaaaggcttcggatactttcaatttcccaaatcaatagagcgatgttgatgaatttccaagacaaactccccaaaaaagagatccttcacttcttctcttcagtctttacccaaataccataccataacataccacgagatagaataaaaaatatttacacagactcgcatcttccaaaataaatctgcattgttaaatattaataataatatcagttaaccagctccgagacccacccaacatccggagcaccacttccttgacccgaacccgtacccg

SEQ ID NO: 6712 - DNA, 532 bp, Glycine max
  Clone ID: jC-gmfl02220081c01a1
cttctagtatttttcaagtaacttaaggtttcaaacctaggaagttggaagtcatggcagcaacattgatggcagcaacaagttctggcactcttaaagcaactcctttcctaggccaaggcaagggtgccaatgccaatgctcttagggaatgtgttccatggaaagggggaagtacaccatgggcaatgatttgtggtatggaccagacagagtgaaatacttgggacccttttcagctcagaccccttcatacttgaaaggagaattcccaggggattatggatgggacactgctggcttatctgctgacccggaagcatttgccaagaacagggctcttgaggttatccatgggagatgggccatgcttggagcactaggatgcatcaccccagaggtgctagagaagtggttgagagtggacttcaaggagccagtgtggttcaaagctggagcccaaatattctcagaaggtgggcttgactatttggggaacccaaaccttgtacatgcacaaagcatcctggca

SEQ ID NO: 6713 - DNA, 367 bp, Glycine max
  Clone ID: jC-gmfl02220081c01d1
tttctttttttttttttttttttttttttttttttttttttttttttttttttttttttttctctttaaacattgctatgcctttttaattgggcgcttaaaacaaaacctggatcaacaaacaggggcctcccagtgtaaagaatgaagccctccaccttatgaatgccacttatccaacaatttttttcaacatatgctctccccctagatcacaaaggcaaccccaagggttttaaacccagggattcgggaaaaaaaaatcatttacgtttaaaaacctggggccaacttaggggcttaaacccaagcttttgaaaccacaggtgtactagggtgggccaaaagggtctccaaagggcctttt

SEQ ID NO: 6714 - DNA, 372 bp, Glycine max
  Clone ID: jC-gmfl02220081c02a1
gggagagattccaattccaattatggttttctcatcatcatcgactttttctcttatgcaaggaaggttctgcttctccgatttcaatttgattgaacgagtagtgttaagattatgatatattttgagaagcttcctttctctccttaactaaaccccttgattgttcggcttcatctaggaaattatttgcactccattcctggtagtatacattctccccattcctatacagcctgaaattctacgtggttaactctctccgagttgattctatatcctatataaggtgattagatccactcctatctatctctctcgctctctcgctgtcgactcgacacctgatcaagagaacatggaccctaatca

SEQ ID NO: 6715 - DNA, 357 bp, Glycine max
  Clone ID: jC-gmfl02220081c02d1
gtaaggggaaatgataatcatgtttcccttcgggtctttttgggcttaaggaaaaaacccaagggttggggagaaccagagatttgaaggggccttctttgcgaactagcctaaggaaaaaaatgcttattgtcggccaaaaaacagggggatcaaggaaaatggggggaagcgaccaaaagggggtcccccccccataacaaaattggggggcaacacaatggggggggtcttacatgcgcgggcgcccaaatggaccaaggggggggcgacaaaccccttaagaggcccggccctaaaaaagggataaaaaaggccttttgaatccaaggcggataatggaaaaggggggccctt

SEQ ID NO: 6716 - DNA, 479 bp, Glycine max
  Clone ID: jC-gmfl02220081c03a1
cttcttcgtctcaaacctcttcgttccttcgattcattccatttcttccaaaatggccaaagacccagttcgcgttctcgtcactggagccgcagggcaaattggatatgctcttgtccctatgattgctaggggagtgatgctgggtcctgaccagcccgtgatcctccacatgcttgacattcctccagcagcagagtcgttgaatggggttaaaatggaattggtggatgctgcattccctcttcttaaaggtgttgttgctacaaccgatgtggttgaggcatgcactggggtcaatattgcagtgatggttggtggattccctagaaaagaaggtatggagaggaaggatgtgatgactaagaacgtctgcatttacaagtcccaggcttctgcccttgaaaagcatgctgctgccaactgcaaggttcttgttgttgctaacccagcacacaccaatgcattgatcttgaaag

SEQ ID NO: 6717 - DNA, 338 bp, Glycine max
  Clone ID: jC-gmfl02220081c03d1
gaaagctaacatgataaattttatttcatcagaggttaacctatccaaaggtaaccacttctatgggtccatttggagttttaaagttcagacaaacataaacagaatctagaacattgtctagaaatttcaaattaaatgtctgattttcacacaatagagataaatttcaactacctaatcacagattcctctaacacaaacctccaagctacttcctaggtgaacgtgtgaagaagctagtccgatagcaagaagctagaggcagttaatggaacggaatcagtcaaataatgatcaccattttggctggtgttattgaggaatgtcgatagaat

SEQ ID NO: 6718 - DNA, 545 bp, Glycine max
  unsure (1)..(545): unsure at all n locations
  Clone ID: jC-gmfl02220081c04a1
aaagaatcagaatcaaaacttcaagtgagaatcatagacgaagcttgttttcatcttaatcgtaaccaaagcttcgcgaatatgccttcggagaagaatttaagaggggtgcttaggtcagaagtagataggtccctgtctaaagatagcatcatcatagtagattctttgaataacatcaagggttaccgatacgagctatggtgcttggctcgagcagcagggatcagatattgtgtggttttctgtgatgttgaagaaaccatttgcaggaaatggaatgaagaacgcagggagaaaggagaagccaattatgatgattcgatatttgaagatttggcaagaaggtttgagaaaccagatagaagaaaccggtgggattctccattgtttgaattatggccacacagagaagcaacagagaaatcttcccctgctgttgtagatgctgtctcctacttaaccaagaaagtggactccaaaaccagggatgttaagatactacaaccaactattgcaactcanacctcgcgtttttctgatgc

SEQ ID NO: 6719 - DNA, 306 bp, Glycine max
  Clone ID: jC-gmfl02220081c04d1
gggaggaaagggcatccagatttagttgggtccagaagctttcattggttgaatcaagagaaccgcgctacaagaaaaatgacctttttttattgacagaaagccgtcgctttatattaaaaatccggaggtaaatgtatgatagacttcgccttacggatatttcttccggccactttgggggacatataataacggatgattgggtgccactataagctttacctgctgtgtatagaggggagggaaaaggcattaaactgtgctgacctcttctaactgaaggtaaaagtctttaatatgtgg

SEQ ID NO: 6720 - DNA, 570 bp, Glycine max
  Clone ID: jC-gmfl02220081c05a1
aaagaacttcttgatactgtgatgaatatttacatcaagactatggttgaagatgatgacaaggaagtggttgctcaagcatgcactagtgtggctgacatcattagagattttggttatgcaactcttgagccgtacttgtcccagcttgttgatgcaacttcattgttgcttcaagagaaatcttcttgtcagcagatagagtcagacagtgaaattgatgatgttgatagtgcacacgatgaagtgcttatggatgcaggttcagatcttctccctgcatttgcaaagaccattggagctcaatttgctcccatttttgcacagctatttgaacctctaatgaaatttgcaaaatcgtctcgtcctcctcaagatatgactatggcagttgcctgccttgctgaagttgctcacaacatgggttttactatagcatgctatgttgatagggtgatgcccttggacttaaagaactagcatcatgcgaggcaactaatagaaggaatgctgcattttgtgttggagagtttgcaaaaatggtcatgaacagctttgaaaactatgaca

SEQ ID NO: 6721 - DNA, 410 bp, Glycine max
  Clone ID: jC-gmfl02220081c05d1
gacaaaaagtaactgagaccagatcatgatttcacgatgttaattgttcgtgtaaaactaacttgaaatttgtttgctttgatgacaataaacttcccatgttccctaaagcgcaaagcaataggaaagacacgatatcttttggaaaatcaaatgctacttatttccttttaagcaacattttgatagtctactgaaaccaatcacaggccctaaaacctaaacaaacaaatttcttgacactactcttgactgctgaaaacaatgaccaactaaaatcgaaatgtagatatttcaaaactaccattgagggcctaattaacctaaatcagagttagtccttgacaccggactctacatcgaatgattgggagaaggctgcatattactggggccattgaccatcggat

SEQ ID NO: 6722 - DNA, 494 bp, Glycine max
  Clone ID: jC-gmfl02220081c06a1
tccatttgtctctgatcttccaactccttattcctcagagaagagacaaaatggatcaccatttcacttcagaaacctctctcattattcttctcctcatcacatccctctcctcccttgccaccgccaccaacatcaatatcctccaccacgacctccaatccgacatcaccgaattctgcaagaaaaccaccaaccccgccctctgtgccgagaccatccatcctcactttctcaagaacagaatcgagcccttcaaggcgctcgacatagaagtggacgccaccctggcgaaggcaaaaaaaaccctagccaacattcaaaccctagaatccaaaacgggcaccaccaaatcgttcaaggactcgttcgacatttgcaaggaccagtacaagagcatgctcgacgccttcaaggaaaccaaagccgcgattgctaataaggacatcatcaccgctaagttcaagttcagtgctgttttgtcgttccaagcg

SEQ ID NO: 6723 - DNA, 297 bp, Glycine max
  Clone ID: jC-gmfl02220081c06d1
atatcattcaaatagtcgcaagaataaaattttattcatcgagacctgtacattttaaacgggaggaaaaattaatctatatccagcaacggccccaatctttggttcaactagcagactataaattgaccctgtcccgctcctgatctcgacaaaaacatggttacttatgtataaaaatggacacctcacctgaaaaatatgagacgggttcggtgacccatgccaatgccatgggggcggttggtagcaccattatatttttgggtggaacgagccctttcgccatttcataaa

SEQ ID NO: 6724 - DNA, 503 bp, Glycine max
  Clone ID: jC-gmfl02220081c07a1
catcaacagagggtgttactaaatacctgatgccatctgttgctggttttcttttgcaaaaggaacttgattaccttgttggggcagtatcaaaccccaaaaggccatatgctgccattgttggcggttccaaagtctcatctaaaattggagtgattgagtcactttgaaaaaaagttgacatccttcttcttggtggaggaatgatcttgacattttacaacgcacatggtctttcagagggttcataccttgtagaagaagataagttggatcttgatacatcactgcttgcaaaagcctaggaatagggggtgtttttgttgttaccaagtgatgtggagattgcagacaaatttgctcctgatgctgatagcaaggagctgccagcatctgccatccatgatggctggatcggattggatgttgggtcacattctgttaaatcattcaatgtatcgttggatactacccaaaccatgatatggaaaggaccaatggga

SEQ ID NO: 6725 - DNA, 500 bp, Glycine max
  Clone ID: jC-gmfl02220081c07d1
cacgttctctccgggagaggtagagagaaaaattattatatactccaaataactccgtgtgttcatgtagggatctcagtcaaatagaaatataaaaattgattatgaaatgattggggggagtatatgcataatatattactgttataccaaccttgcaaattgacaagaagttcatgtccgttacactgtctccaagtcccaaatcaggcaagttggttccaaactccttcaatatcacctcctttttgtgaacaccaacaagcacaccaggctccttagcgagccccgtaaccctccccgacgccgtcaccaccagctttgtcccgagcaccgtatccgcgccgagaaacgttttcgcgaacggctccaccatcacccgggggctcgccgtgacaatgcaccgcctccccccgaacgcgttgaacacgcgccacgtggtggggtgcacgtcctcggcgtagaacctcggcagcacggagcgggacacgagctcgacg

SEQ ID NO: 6726 - DNA, 526 bp, Glycine max
  Clone ID: jC-gmfl02220081c08a1
gttctctcaccgtgaaagagagagagaggttaggctatggctgatgagagcgttgttgagtccccagtgaagaggcagagagatgatggtgaagaaaatggtgtctctgtttccatggacgcggagggtggcaaagaccctcttagtaacggtttatcatctgtgattcctgggtggttctctgaaatcagtgcaatgtggcctggagaggctcactccttgaaggtggaaaagattttgtttcaaggaaagtcagaataccaaaatgtcatggtcttccagtcatcaacatatggcaaggttcttgttttggatggagtaattcagctaacagaaagggatgaatgtgcctaccaagaaatgatcactcatcttcctctttgctctattccaaaccctaaaaaggttttggttatcggtggaggtgatggaggggtcatacgagaagtagcacgccattctttagtgaaaagatagacatttgtgaaattgacaagatgggtgttgatgtctccaaacaatactt

SEQ ID NO: 6727 - DNA, 506 bp, Glycine max
  Clone ID: jC-gmfl02220081c08d1
caaagagaaatagatataattattgagacgtacaagcatgcgtcttcagaattgcacaagtacttgcctaggaaaatattaaaagcataagttaatacaggtggaccccctagtccgcaactgaagtttaatcacaataattcagtactttccaacccaaggacgtaaactaagagtaattcaacatactactatcagcttagcttgcaatttgcatcaaactgcttcttatggacaccactaattgtattcgtggctacgttgcttcttgtggcaggttcatccgtgcaattgaaaaccaggtttgaccccatcatttgatcatttgatcagaatgcatcgaattggtgatgcctcagagtgaaccaacctaagaggcaagcaattcagtgaatatattcctgctgggacatcatcaagctttaggccttccacaagaatgatttccttgcttttcaggaaaacaagatgagatggaatggagtgatcataagcagcaacagata

SEQ ID NO: 6728 - DNA, 584 bp, Glycine max
  unsure (1)..(584): unsure at all n locations
  Clone ID: jC-gmfl02220081c09a1
gcacttagtgctattcaataattacgaaaaaccaacagcgagtgttgtttttgtttggtccaggctggaccagggaatgaatagagatgagaggctttcggttgaagagaactgagttaagcggcgaagccaaacgcagaatcggcggcagaaattgccaccggaagcacgtcgaagacgggtgaaccaaacacaaaattccatccaccacttctcttttcaatccccaactcaaatctgtgaagaaaatctcaatttctaaattgtaattcttagcactactgctagtagtagtaaaaaaaaacaattagaaagtagtagagtgtttttttttctttttttcgtttgttttacttttaagatgggtgagaagagcaacgttggcggcgacgcgattaacacgacactgcttcacgggaagtacgagctgggccggctgttaggccacggaaccttcgcgaaggtgtaccacgcgcgccacctgaagacgggaaagagcgtggcgatgaaggtggtgggcaaagagaaggtggtgaaggtaggcatgatggagcanatcaagagagagatctcagccatgaaca

SEQ ID NO: 6729 - DNA, 328 bp, Glycine max
  Clone ID: jC-gmfl02220081c09d1
agctcttctgggtccgattaaccgactgttcgatccggaagagcgccagcatgggcaacctaacccactacgctggatccgggacggctcccgctccatgttggtgagaataacccgaggatacccggggagacgcccgttgaccgccgctacagcggccacggttactcctccgaggacttggaacccggatcttgttctagctaccgtgaaagaaagaaggcaggtccatggactgaggacgaacatataatgtcagggcttgcattgcataaggtgggcaaaggcgattgacgtatgattgaaggaactatgttatataaaggac

SEQ ID NO: 6730 - DNA, 425 bp, Glycine max
  Clone ID: jC-gmfl02220081c10a1
tgttatactcgccgtcagtgatgtacgcgcccgtaagaccagcatactagctcgggggccgccctgtctttttcattctttttcaattttaacaccatcaaatgaacctagtggtatgactgaaacccgaggagaaagcaagactacagctacactactggagatcttaaactaacccacgaaatataaactaattgtaatgtaggaaagcacgggatacctgaaatctcagacagagaaaagggcatcggtaaatcctgtaataattattgaatggaatgcagaatgtacgactaattctggacatactaataatagttgacagtcatagtatcatgctatggatcgtttttggggtcactttcagcctctaacttagtgtcattttccttctcgactggtggttgacgactgatgtccacgct

SEQ ID NO: 6731 - DNA, 522 bp, Glycine max
  Clone ID: jC-gmfl02220081c10d1
ggagaaatgaagttttggtacctcaagcttaccgcagaggatcagacctttctgcttcctgtggtgacagttcaccaaagatgataacaatttcattacacgaaagtgttttcaaatccggttccttggtttatttcactgctgatagtatgcaatggattgttgatgaactccctgatcaggcccttttgaacactgctgaatggagattccttattccacaattatacaaaaaatatccaaatgacgacatgaatcttaatatgtctgtatcttctccaccagatatacaagtgacaaacaaagatgtcggtgtcaacattttcatagacataacaattgatgttctggaagatggtgaagacatacctgttgcatgcatctcggtggattttagtgcctcttgtgctgtggaaatcgtaggaaacaatcttgccggttgcttaaattgagaaagtttccacgtacttgaaatggagttaaatagggaaactgcacatgaatttgatttagtcagtgaca

SEQ ID NO: 6732 - DNA, 523 bp, Glycine max
  Clone ID: jC-gmfl02220081c11a1
ctacactcagctattcttacctcttggcatgaccatccaaatgtcttcttttctcttagcttctcttgctgttctctttttcttctcctccttggagaagagttttgcctttcaagcactaggaaaggaggacacagaaagcaacaatcttcatcagtatactcatcgtgtacacctccgctcactccttgcttcatcttcttgcaactattgtaccaaaagtcccaaaacaaaagcatcattagaagtggtacacaaacatgggccatgctcccaactgaatgatcatgatggcaaagctaagtctacaacaccacacagtgacattctgaaccaagacagagaaagggtgaaggacattaactcaaggctctctaagaacttgagccaagatagtagcgttgaggaattggactcagctaccctaccagccaaatgaggtagccttagtgggactggaaattactttgtgggtgtgggtcttgggacacccaagagggacttgtctctcattactgacact

SEQ ID NO: 6733 - DNA, 363 bp, Glycine max
  Clone ID: jC-gmfl02220081c11d1
atcgacaatttagatgatagaacttttatattagaacctatagagaagtttattcaaacttagcctataaccggaagttaaatagttatcaaaaagctgccttaacaataagattttttttttcacatttgccaaaagcagaaaataacaagatagattctctttctccattggaccaaaacacagagcctttggcaagttatgctactgggggcctgagaacatggtcctgtgaggtatcaacagccgtaggtgataaaaactgcgacatggcaactactgggtggcccatgaatggcaccagcttgttgtcaacaatttgtcctgatgcacacagaaagctgggttgtgaactcaaagctt

SEQ ID NO: 6734 - DNA, 485 bp, Glycine max
  Clone ID: jC-gmfl02220081c12a1
ctcgctggttttcgttgcttcctttcttcgttgcgacgccaatggcttctacgggcgagaaagcaatggatgtcgaagatgcagagaatgaagggtcagttgcatctgctattctcaattcgatagcgtctcggcagaatgaagctctttctccagaagatcttgcttgggttgaatcctgcctagttaaagattctgatatttcagacactgattggatccctttgaaaaatgctttattagatattatcagctcccaccctcaatctgtcagcactgaaggagaagacgttaaaattcctccctacattattagctctgaatatgctaatactgccacaacttctgatgagaaacttaatctgcaatcttcaacttctgatgagaaacttattattctgcgatcttcaacttctgatgagaaacttattctgcaatcttcaacttctgaggggaaacacttatctgagccttcttcaacttat

SEQ ID NO: 6735 - DNA, 434 bp, Glycine max
  Clone ID: jC-gmfl02220081c12d1
agcatctcaaaagttaatagataacagaattatttattgtaagtatatcaatacaatctcaaatgagaaagagagaggttatatacgtaattaacaaacataatgaacataatgagcaagaggtcggactcggagctaaacaaatcgacaaaacttaaattcctaatatagttcttatctgattaggtggatgccttgccaacgacctggggtccggataaccattcttgggatccataatagccttataaataaggtcataagcttcggccagtgacctggccacgccaatagtagcttcagaacgcaaccttggaacctgcatctgctcaaattccggcagggaactttcacttcccaagataaggccaaacagagctttcaaacactccgaaagaacagctggactagtgtcctccatctcagccaatggg

SEQ ID NO: 6736 - DNA, 514 bp, Glycine max
  Clone ID: jC-gmfl02220081d01a1
ggctgattttggtgactattttgggttgcttttcatttggctagcctccatcttcattttacgtgtaatattattcacaaagtctagcatcgagtcacgtctacccccaagtgctagagccctccctgtgtgaggacacctttaccttcctcaccaaagcttcccccaccaaggcattccacaacatctcaatacgttatggtcctttggtctacctcttgttcggttccaagccttgtgttcttgtttcatcacccgaaatggcaagacaatgcctcaaaacccacgaaacatgtttcctaaaccgacccaaaagaaccaatttggactacatcacatacgggtcttcagattttgtgctggcaccctatggaccctattggagcttcatgaagaggctttgcatgactgaactcctcggtggccgcatgcttcaccagcacctttccatttgagaagaagaaaccaagctgttttttaagagtatgatgaacaaggctttgtttggagagga

SEQ ID NO: 6737 - DNA, 522 bp, Glycine max
  Clone ID: jC-gmfl02220081d01d1
gcatgaatcaactgacaatttgatttgccccttcattatggtttggagtttaagttcatgcaacatttcatgctaattttgcacacaagaaaaaaaagggtatttttttcttcattaattaaatgcatggatagactaaaacatgcacaagcatagattagacttcagcaaaaggatggagtctagccgcagggaaacattgcaagggatgtgccctaggaagggccattcctggtccctcttccatgtcaaccattcccttcccttcttcaccaaccttccattcaaaacactgaatcattccagctagggtgttgggaataatctgcaaagctagtgaagcaccagggcagcttcttctcccagctccaaatgacaaaagttcaaaatgctgccccttcagatccaaaggactctgtccctcttcgttaaggaacctctctggcttaaactcaagtggattttcccaatagttagggtccctaccaatggcccacacatttacaaacaaagtggtcaatg

SEQ ID NO: 6738 - DNA, 485 bp, Glycine max
  Clone ID: jC-gmfl02220081d02a1
gacatccagtcaatgactggagaaaccactaacatggatattcatcgtgtcttggaactgcgcgctcccatcattgttcaggtgcttcaaagcatgtgttttatgaacaataagattttcagaagacatctaagagacttctaccccttgctaacaaaactttgtttgctgtgaccagatggatgttcggggagctcttggtgatttattccacgcacaactaaaacctcttttaccataaccgtcgtataatgccgctgataatactgtgtgatcagatggacgttcggggagctcttggcgattcatgccaagcacaactgaaagctcttttaccataactgtcttataatgcgcgtgttaggattctcagatataaactccagggtattgccgttgtcagttctagctggcttggagagaagatatatggcggctttctttgttttatcttttatggaaattttgtgattgtgctaacagtt

SEQ ID NO: 6739 - DNA, 303 bp, Glycine max
  Clone ID: jC-gmfl02220081d02d1
agaaaccaaattacattgctatttcttttctacaaaacggttagtacaatcacaaaatttccgttaaaagattaatacaaaaaaatgccgccatattttttttttccaagccagctgaaactgacaacggcaataccctggagtttatttctgagaatcctaacagcgggattataagacagttatggcaaaagagctttaagttgcgcttggcataacataccaagagctccccgaacgtacatctgatcacacaggattatcagcggtattatacgacggacatggtaaaagaggctttag

SEQ ID NO: 6740 - DNA, 538 bp, Glycine max
  Clone ID: jC-gmfl02220081d03a1
aaaaaagaaaatgatgctcggagagcaccatcgcgcgaatccaacggttcacgtgccaccgtggccaacccacgacgatccaacggccgagatgtactccgcgtttttaacaaacgacgtcaatgctggtgagtactctccgtactatcttcaagaagcactaacggctctgcagcgttttctgccgtctaacgaaacggacgctgactcggacacggaggctcaacccgacgcggcggtggacgcgtactcgtgcgaccatttccgcatgtacgagttcaaggtccgtcgatgcgcacgtggcaggtcacacgactggacggagtgtccgtacgcgcatcccggcgagaaggctcgacgccgggacccgagaaagttccactactccggcgcggcgtgcccggagtttcgcaagggaaactgcaagaaaggcgacacgtgcgagttcgcgcacggcgttttcgagtgctggctccacccggcgcgctattcgactcagtcttggcaggacggcacgagttgccggcggcgggtgtgc

SEQ ID NO: 6741 - DNA, 400 bp, Glycine max
  Clone ID: jC-gmfl02220081d03d1
acgaaaagggatacccttttcaattaaaacaactttagaccggaaaattcaaaatccaaaaggggctagttttttggttcaccaaaagcctcatacaaaatcttaacaaatgaaagcagggggctgctccccacaatggttaggcaaatgttacaaaaaaaaaaaaaaaaaccgttttttaagatttgtgaaaaacagggaacccatcctgataaatgcttttgattgaagtttgcctcccatggagatatgaagagggttaacgagaccttttttgccccatttaaaaaatttgccaaaaacagcaaaagaattccctgtaatggggggatcatttcacaggcaagatcttgatgacagaagcggggcccacacgatgaagtgccacaaccgaatcccc

SEQ ID NO: 6742 - DNA, 511 bp, Glycine max
  Clone ID: jC-gmfl02220081d04a1
ctcagagctgaagaagtgtttcgcttggggcttgaagtctctgcaccaagcgaagcaatgccactgccttctcctccgtctcggtctccaccaagacacctacctcatcaacctcctcctacgctcttccctccacttcgccgccacgcaatacgctaccgtcgttttcgcccaaaccccgcaccccaacatcttcctctacaacaccctcattcgcggcatggtctacaacgacgccttccgcgatgccgtttcggtctatgcctccatgcgccagcacggctttgccccggacaacttcaccttccctttcgtcctcaaagcctgcaccagactcccacattacttccacgtgggtctcagccttcattcccttgtaatcaaaactgggtgtgactgggacgtgttcgttaagaccggccttgtttggttgtactccaaaaacgggtttttaaccgatgcgcggcaggtggttgatgaaattcctgagaaaaatgttgtgtcttggact

SEQ ID NO: 6743 - DNA, 417 bp, Glycine max
  Clone ID: jC-gmfl02220081d04d1
cgccgtgtggattgattgccgggctgactagctcactggcgggcggccgcccttttttttctgtgtttaacaatacggaagcgaaaaatccaaaaaaaacccttgtattgtataacgaataatacatagttacacacatactacacgtgaatacgaatgacacacgcacatgttgcgaggttctcgcataccgatctctgagactacctgtcacagagcccgcggatcaaccattccgctttagagggacccaacctatcataataagagaagactgagacttccttggggtgaagaacaaaggggtaatgtccagaaaagcatgtgttataaaggaaacctgttaagcccgcactgtgggtgagcgaaattctcggaagggcagttgctaatctcaagaatatacttcagtgaatc

SEQ ID NO: 6744 - DNA, 99 bp, Glycine max
  Clone ID: jC-gmfl02220081d05a1
gccatctttttatgttgtatcgacaccaaactccatgcatgagaaagtcggggctcaaccattccaatccagagacctcgctccatataatgttgctca

SEQ ID NO: 6745 - DNA, 530 bp, Glycine max
  Clone ID: jC-gmfl02220081d06a1
atacaacacgcctaggccaaacccaaatccaccgctctttattttcgtcttttctacccttcccggatcccaatccctaatctttctaccactctcactccaaaaatctctaattttttcatctgggaagatcggttgacgaatcgaggatccgatcgcttgcgaggaactagggtttcaatcgatcgcatcacacacaaacaatcatgtttagccggatgttcggtaaacctaaacaggaaaccaatgctgttgccactttggacaagctaaacgagacacttgaaatgctggagaaaaaggagaaagtgctccttaaaaaggtggcagcggaagttgaaaaggccaaagaattcacaagggggaagaacaaaagggcggcaatacaatgtctgaagaggaagaggttatatgaacagcaaatagagcagcttggaaatttccagttgcgtattcatgaccagatgatattgttggaaggtgctaaagctaccactgaaacagtagatgcattaagaactggagcagct

SEQ ID NO: 6746 - DNA, 408 bp, Glycine max
  Clone ID: jC-gmfl02220081d06d1
tttctttcttttttttttttttttttttttttaaagtataagtttttgtgaattacaatccagcctcgggacaaaatacacaatcaattgaatagcctatcaagtataaaaatgttatcaaacctgagttctaaggggggttttaatttgacactgatctattcaatggaaaattggtcaagtattgtctcaactagacttaataggtgaaatacaagtacaactctcaaacctcaactaattgagagagaaaaagatatggttcaacaatttttaattcgtagggaagaatattccctgaacgaaatgaatttatttgcgactgttaccaggtgggggcattggattcctgtttcctcttctatctaataaagaatattgattggatgaatgatgaccataatacct

SEQ ID NO: 6747 - DNA, 445 bp, Glycine max
  Clone ID: jC-gmfl02220081d07a1
tccatctcagcctttgtcccaacaccattctcatggctggtctagctctagcactgcttcttctggctttcactggcacttcaagtactacacggggcgtatgctcggatgtaagcgacacaatccctcccaaaacctcatactatgcttgcgcagctggcgctgactgttatactctccaccaagactgtccatgtttccaatctaacaccgttaggggccactgtgactgctcagtgaacagctacatacaaatgaagggttatgctgaaagaccctgcaactttgatggaacaaccatatgttactgcatctgaccccagatctggtggtacttgcgtctacccttctagtgacagtgctgcatgcactggtacaacttcagtgactaccacaccaaccatgggcaccatggctacaaatggaacttccataacaagcaccg

SEQ ID NO: 6748 - DNA, 515 bp, Glycine max
  Clone ID: jC-gmfl02220081d07d1
aagaaattaatagttgtcattatatattaatcaatccaatacacagcacacaggaaaaaggccccaaagaccttttacccctatgtgaaagagggttctcctctcttgaaaacaaataaaaaaattcaaggtttttaaattaaaacctatatatacacgtgttttcatcacacgcgcggacaccagccattggagtcctgtatagttaggccaaaactcatggccaaaaataggaaaaaatatataaacagctcccgcaaagaaaaaccaagaaaaagaaaaatcacacgtacacacttcattggcacgcaccagaaccgactgcacacgtgccaatacccaacaaaaaaagtccacgatttgtagccaaacttcaacttattgcccttcaattgttctttactgttgagggtcccatcaaagtagtagtaacgtggatgatgaagaagcagtgatgctggccaagaaatgaagctttgcttgacttatgaataccatgatatgaacattgaaca

SEQ ID NO: 6749 - DNA, 520 bp, Glycine max
  Clone ID: jC-gmfl02220081d08a1
atttccgatccctgaaattctctctctcttccaattttccaaaacagagtctgttttctcgcgattgcccagaacgaatatttcttttccccccttttcctctttccaaagactgtaagaataatttaatgtgttgtgtgtataaataaatacaaaaaatactgatcccagattaatccaacgacgaccatcaaatctcaccatccaaaccctaatctgaaaccatcgttccctctatttctctctctacaacctccaaattccgatctcatattcctctcctcgctacccgatccagaggctacagacctttctccttcgagatctcgccccacgcgcctgtttccgcctccatcatggtcgtgagcggagggaagggcctcaaacgcgccgcgaagaagagagtcaccgccgacttctacgacttcctaacgttccccacgccggcgctcgccgagtcggagaacttcgccgggcgaccgttcccgctcaacgtgcgcgcctttctgacgaagcacgc

SEQ ID NO: 6750 - DNA, 504 bp, Glycine max
  Clone ID: jC-gmfl02220081d08d1
atcaaaaaaagaattaccttccgctttcgctttcactaatcattcaaaagtttatgaacatggtacatttgaatttgatgactgccttaacgtctacacttgtacagggagaacttgcacattcaaaactttaaccaacccaaaaattttggataaaataaatggggaaacattcaagaggattgcttctaaaatgaattgcactatcaactgcaactacacattcctttatacacaaaaaaataggccattcaagataataacatggcccaagttactaggttagtggatggatccggtttaaactcctggttcccgttggcctgcgtttgctatttgcatttactattccagtgcgtgttccgaaagcagacagtatataaagtattttgcgatgaaaaatattttcatttagtaaccttatttgcactcttaaacacctgcccttgttagtacgagaagccgtcaaagtaagccgcaaatttcatttctgcttcataatat

SEQ ID NO: 6751 - DNA, 522 bp, Glycine max
  unsure (1)..(522): unsure at all n locations
  Clone ID: jC-gmfl02220081d09a1
gatcccttgcaagatgatgcaacacagagccatttcagtgtggcaaatgccaaccctcttcagtcccagatgaattctctttactcccaaccttttgctcactacaacacacagccgcttaacatgcaggctacccaacagcagcctcaggctcagaactcccaaaatcagaaaatccactataacgtttgaggaactttaggagcttaatgtggctttgatgggttatagtctttgcaatcagcaactgggtttgtgcctgtcttttgtgctgaaatacgtttgcatgtgacatccgaaggattgccttgggatagctatatcgaggaattggtatatatgatttcagttgatggaagtttggggcattacgaagatacaagcaggcgcatcccgggctgaaaattgataagataacccnctttaccgtactgaagttttgtattggttgggattaaggtgaaattgttcgagaaaagcatacatggaatggttttgtcgaaagggtntcgatcttgaagc

SEQ ID NO: 6752 - DNA, 527 bp, Glycine max
  Clone ID: jC-gmfl02220081d09d1
cgagaccaagaaaaatacaaaacttgatcgcaccacgaagcctcaaaactctctccccatcccacatcttcatgcatattagatcgatgaaggtgaagtacctaacataaaagagccttggtaacagaaaaaacacatcatgagctcctgaaccacctttatcgaccaggatcataagtttaaaacatggagatgcagcggatgagggagttgctgttactgcggtcatcatttgaaagcgagggaatgtcccttgtgggtggaaatcacactgccggcaggttttgcactcgctaaaacaatattccacagcccgctagcctctgtcttttctctctaatgatctctactttagcattcctctctctgtcttcttctacatatatataacaactctgtttgaaatctcaacactgtggacgtcatcatcgacatcttctctgtgaagcggtctcttttgaatgccctacacttgcttccgaagccacaaaccaaccaactatatatctcgggtacctaattgagaa

SEQ ID NO: 6753 - DNA, 517 bp, Glycine max
  Clone ID: jC-gmfl02220081d10a1
cccgcagaccccatgtcgcaggttccaaagccaacgctgaagctgcctcatacgttgtctcagtcttcacctcctcatacataccatcacacatagtttcctacgaggtttctctcacgtaccctttgtcacgttcgttggttctaataacgaacccttctacaaccttcactctccaccaagaaacctacgagggtgatccttatgctgacgtggcagatgaggttgtccccactttccacgcgtatgccaagtcaggcactgtggctgctcctgtgtgttatgtgaactatggaagagtggaggactatttgactctgaaggataaaaatggtgtgaatgtttcaggcactgttgtgttggcaaggcatgggaagatatatagaggggacattgtgaagaatgcttatgaagaaggtgctgttggggtggtgatatattcagataggaaggactatggtggtgaggaaaagtggtttcctgatgagaagtggctgccaccaagtggtgttcaggt

SEQ ID NO: 6754 - DNA, 402 bp, Glycine max
  Clone ID: jC-gmfl02220081d10d1
agctcttctgggtccaattaaccgactggttgatccggaagagcgccagcatgggcaacctaacccactacgctggatccgagtctgccccgctccatgtttgttagaataacccgggtacacccggggagacgcccgatcacgcctgcgatcgacgtcgaacggttacttcctccgaagactgccgaacccgaatcagcgttctggcgatcgagaaagatagaaagttgtcccatggactgaggacgaacatacaatgtttctgcacgcattgcataagctgcgctaaggcgattggcgttgaatggcgaggaactatgtcatagcaaggacgcctactccggtggcccgcactgcaaatacatatttcatgaggctacgcaatgtgtataggcgaaaaag

SEQ ID NO: 6755 - DNA, 518 bp, Glycine max
  Clone ID: jC-gmfl02220081d11a1
gcaaaaagaaagaatcccaggcgaggagaaagatggaggggaaggagcaggatgtgtcgttgggagcgaacaagttccccgagagacagccgattgggacggcggcgcagagccaagacgacggcaaggactaccaggagccggcgccggcgccgctggttgacccgacggagtttacgtcatggtcgttttacagagcagggatagcagagtttgtggccacttttctgtttctctacatcaccgtcttaaccgttatgggagtcgccggggctaagtctaagtgtagtaccgttgggattcaaggaatcgcttgggccttcggtggcatgatcttcgccctcgtttactgcaccgctggcatctcagggggacacataaacccggcggtgacatttgggctgtttttggcgaggaagttgtcgttgcccagggcgattttctacatcgtgatgcaatgcttgggtgctatttgtggcgctggcgtggtgaatggtttcgaggggaaaacaaaatac

SEQ ID NO: 6756 - DNA, 392 bp, Glycine max
  Clone ID: jC-gmfl02220081d11d1
tttggttcgtctttttttttttttttttttttttttttttggcgagcaaacaaacaggaatccaaatttcaaaaaactgaccattggtttttactccatttttcatggcctgatgttatcccaaacattaaccctggccggggtgactcttttgggccaccaggggaaacagatcaatggttgtcctcagtctatgaccaatactttcatactctgagggaaactcgtaaagtgatgtctttctcgcctgcggtgaaagctgaaccttgcaaacacaccttggtaccgcagctgcccgtgaaattcatcacggggtgaaacttgaacatgggttaatgcctcgtgagggcgctgttttccaccccttaggctcaaccttgacatcaaatgcc

SEQ ID NO: 6757 - DNA, 426 bp, Glycine max
  Clone ID: jC-gmfl02220081d12a1
ataaaattggggttaaagtcatcagccttgctgcattgaataagaatgaatcactaaatgggggtggaaagctttttgtggacaagcaccctaaccttagggtccgagttgttcatgggaacacgttaactgctgctgtcatactcaatgagatccctcaagatgtgaaggaggtgttcctaacaggagccacatccaagcttggaagagcaattgctctctacctttgccaaaagaaagtgaaagttctgatgttaactctctcaacagatagatttcagaggattcaaaaggaagcccctccagaaaatcaaagctatcttgtccaagtgacaaaataccaagctgcacaaaacttgcagacctggatcgttggtaagtggatcacgccagagagcaatactgggcaccacgtggaacccattt

SEQ ID NO: 6758 - DNA, 484 bp, Glycine max
  Clone ID: jC-gmfl02220081d12d1
tgtggtcgtccttttttttttttttttttttttttttttttttaaaagaacaataaacttgttattcggatttttaacaccggcacgccacggaaacagttggcttgggtttaatttacaccatgaatgaagcactgaccctgtgatcatcttaacatgccacaagccacattacaaaatgcatacacggacttgaaagaatttacccacacttgtaaggttactgagccgtgcatgcaatggcccaaaacaaatcccaaacacctggagaaaaattctttgactgaagctgaatttacatatgtttctgagagaaacccgaccccgctgttgcgccatgtgagagtgctgattccaacaccagaacccctttgaagacatttaaggccccaactgcttgagaagaccaacggtcaacgctgtgggccactaatcctaaatgggaccctagaacgattagcctatacattgtgggctggcaaca

SEQ ID NO: 6759 - DNA, 455 bp, Glycine max
  Clone ID: jC-gmfl02220081e01a1
gaagtaaccaacgcaaccacatcactctttctttcaaatctagggtttcctccttctgcaaccatcaatgtcggcaatcgcggctccccaacacagatcctcgaagacagagtcctacgtggacaataagcgcaaggaggatattcgtcatgccaacattgggggcgcacgctcagtcgccaacgcggtttcgaccagtctgggccctaagggcatggacaagatgatctccaccttctccgacgaggtcatcatcaccaacgacggcgccaccatcctcaacaagatgcaggtccttcagcccgccgacaagatgctcgtcgagctctccaagtcccaggactccgccgccggcgacggcaccaccaccgtcgtcgtcatcgctggcgccctcctcgagcagtgcctccttcttcttttccacggcattcaccccaccgtcgtatacgacgccc

SEQ ID NO: 6760 - DNA, 333 bp, Glycine max
  Clone ID: jC-gmfl02220081e01d1
aaaaaaccatgggaaaacccccaacccttttgaaaccgggggcttgggaacattacaatccatgggggccttcaaaattgcaaacaacacggggggcccaggtcaaaagaacttaacccaaggggcttgaaagaacattttacccccccccataaaattaaggcccggaggaccaaaaaaaaaaaaacagggagatgggggggggttcaatttttccccaaaatgcggttgggtgaaaaaaccttcccccaaaggtacaaaaacaaaaatcttaaaaaacatcccccccccctttgtcgccaaggggatccccctggggcttacaaacggggg

SEQ ID NO: 6761 - DNA, 537 bp, Glycine max
  unsure (1)..(537): unsure at all n locations
  Clone ID: jC-gmfl02220081e02a1
attagatttccctctctctttctatctctagctattgcaaacctttccctctgccttcaaaataggcaaattcatgggtcttagagacattggtgcttcactgcccccagggtttcggttttacccgagtgatgaggagttggtccttcattacctttacaaaaagatcactaatgaggaagttctgaagggtaccttgatggaaattgatttacacacgtgcgagccatggcaactccctgaggtggctaagcttaatgcaaacgaatggtacttcttcagcttccgtgaccgtaaatatgcaactggatttcggaccaatcgtgcgacgacatctggctattggaaagcaacggggaaggatcgtacggtgcttgaccctgccacgcgtgaggttgtagggatgaggaagacattggtgttctacaggaacagggctccaaatggtatcaaaacgggttggatcatgcatgagtttcgcttggagacgccacatacgccccctaagaggactgtngtttgtgtagagtgtttcac

SEQ ID NO: 6762 - DNA, 392 bp, Glycine max
  Clone ID: jC-gmfl02220081e02d1
cataacaacaccacactattattattatcaacctcgaatctcattccatccaagtttgatgccccgccatcatggaagctattttcttcgaggtccatgtcccataagaacccatatccattatcatcacatttgggactaatttgagtaacggtgctagagttgttggtgtttgtttccctagagaactgaaggagactcatcaaggagttgttgttttggctttggtttggaatatgatgatgatgatgatgatgggttgccattgaggaagagaatggggcaagtaattggttatacccaattgatggtgtggtgttttggttggttggagatgacgaagccaaagttagggatggaactgtgctctcgtacatgatgagtttggcact

SEQ ID NO: 6763 - DNA, 522 bp, Glycine max
  Clone ID: jC-gmfl02220081e03a1
gaggaagaagaagaagaagagtatgggaacgacggtggcgggtctagcgccgggtctgtcacggaagctgaagaaggttctagaatctcggatcgatacgccagacctcttgtcttcgctcaacacgctctcttccttctacgatgacaacactcctcaggcgcgtcgcaacctccgatccaccatcgagaagcgcgccctctccatcaaccgcgaattcctcgacgcttcccacgccgcgcagctggccttggatagcgtggagaacgaggtcgatgcgctcgctgagtgctgtgacaggatagcaaaggctttgaatagttgtagtgctagcaccgctgacattatcggcaccacagagaggctcaaacaagagcttgaaactactacacaaagacaagagattgtagcatgtttcttacgtgattatcagctctcccctgaagagataaatgcacttagagaagaagagctgaatgaaaactttttcaaggcattatctcatgtccaagagatttatgc

SEQ ID NO: 6764 - DNA, 413 bp, Glycine max
  Clone ID: jC-gmfl02220081e03d1
aaaagggggccccccccctggaaaaaggagccccctttggtttgcaaaaactttaaaaaatttttttttcctacgggaaaaaaggccccggggggcccctttattgaaaaatttggcaaaaacacatgttacaatgccaaaaattggtggcacattagggggggcacttgcaaacttaggacaaaaacatgggggcgggggtaaaaaccaaacaaaactggggggggcaaaaaaaaccggttaaaaccccccttcccccgttttatttttaaacaaacgggtttattttttaattttttaaaaaaactttcacgagattaaaggccctttttttcttttggaacaaaaagaatttttcttggttcttcccaccccttttaaaaaaaaataattaaaatttccggtcttgagaa

SEQ ID NO: 6765 - DNA, 548 bp, Glycine max
  Clone ID: jC-gmfl02220081e04a1
agcaggtcaagcacaatcacacccaactctgccttttctctcttctctcacaacccctttgtctctacacagacaaacttattattctctctctttcttaaccaaccaatacataaacacacagaaacatgctactgtgcaaatcattgggtttctctgcacagaaccaccccgccccaattcatttcacttgttaaattctcctcctttttcactctccacactcaatatgaatttgaggtaagttttttttctaggaagtgctagtctttctggatttttgctgcgttttaccatcgggggttgccgggaattgccgcacgatcatgccgccggcgctgtccgatccgctgtcggtgactccggcgagctccgacgctgttttgcagcgatcggcgccggacaatcggcgattcggtgatcttagagggctgcagtggcggataaatcttggggtgttgccgtcttcctcttcgacttcaattgatgatcttcgtcgagtcaccgctaattgaagaagaggtatgctagcttgagaaggcgcctac

SEQ ID NO: 6766 - DNA, 429 bp, Glycine max
  Clone ID: jC-gmfl02220081e04d1
aacttcacaatctgtatttaacatcaaattcctagtttcagactttcagcaattctgcatgattcataaccacattcatagtgtggcaagtagaaacatgcatgcagcaacttctataatgaataggcacccagtctttctctgcacaagtaataaaaatagtaatacaaaaaaagcaatcctgcaggttcacaatcaatctgtatagcatatcaaatccatagttccatttcttttgcagagtttatggctcagtattctcttccaactcaggttttgattccttgtcttctgagatgaaatctgaactgccttcagcagcaacggtcccatcatcagtatgtcctacagctggagggttcttaaagagttcattattttccagttgggctaacttatctttggattctcccttcagtagctctacca

SEQ ID NO: 6767 - DNA, 551 bp, Glycine max
  Clone ID: jC-gmfl02220081e05a1
cttccttctgattccacaaccgaccttcaaattccggccaccggagttctctctcggttttccgaccggccagccaatctgcaattccgattttgcttagatctctcacgaatcccctttctgcaccttcctagggtttactagacaccatgactctttcggacgacgaggacgagaatctggctcaatttctggaatcagaagtcctctcggaggtatctgacaaggaagaggaaaatgtggaggaaccgaaagcaaagagagcgcgcttagaagaggatgagattactaagcaaaaacaaagttctgattcattatctgcgccgaagaacattgttgtcaacaacggggtggtgcccagaaggattgagactggttatttcagtcaaattccaccggagcttttccatcacatccttaaatttctgtcctccgaggaccttgtttcttgttccttagtttgtaggttcttgaattatgctgcatcagatgaggcattatggcgtcgcttgtactgtatgcgatggggcatgcttccccctacaaggaag

SEQ ID NO: 6768 - DNA, 502 bp, Glycine max
  Clone ID: jC-gmfl02220081e05d1
aaaatgtcaaaggaatgatcacttttgtaacatagagaatcaacaatagcagtatcgagaaaattaactattgcctactgaaattcaactatacattaaggcatacatgatacactattgatataaaagacaacacataagcggagttttacaatctgagactaagcaaatattcttcagccatgagaaattgtgaaatatttaatgttaaatactagataggtaaatgaggagacataggatcatccacactactgaaagcgtaaagtggggatcagcaaagcctcagtgtatcttcaagctccttgtcatcagcacaattgtatcccagcgaataagctcgcgcaaaacggccagatcccataaatggctcggccttatgagtcacaccaccttgctgctgctcagtatcaggctccatttgcgaaggtgacaataatctatcaaaacagtgccgccatattgtacagaccaaaagctcgtttgtgggatccataactac

SEQ ID NO: 6769 - DNA, 544 bp, Glycine max
  Clone ID: jC-gmfl02220081e06a1
gaaagatcttcatatagaaaagatggagaaggagattagggagctaactaagcaacgtgaccttgctcaatcaagggttgaggatttgcttcgcatggtcggaaaggatcagatatctggaaaagaaggggaagatatctgggaagatgattgctcaatatcagagtcatccagcatttgtggtcctcatcgtcctaatacacatattagagagttcaacaatcctcattataatgatggagacagtgatcctgatgcttttgcttgtacagaagaccctgatgattattgcaaagaagttcgatgtgttgagaatggggagttagctctaccaatatctggagacgaaagtggaataagccaagaaatatcttcacatttgaatgaagatactggagacagtcagatccaagaaaattcaacattgctggagcagagactgcatgttgtacagccaaccattgattctcttgatgtccttccctgatgaacatctccacagtcatgtcaaaaataataagatcttagataactagaagctgag

SEQ ID NO: 6770 - DNA, 447 bp, Glycine max
  Clone ID: jC-gmfl02220081e06d1
gaagtaacgaaaagaaaacaaaaaatgtcactttgttaaatgataaaccagaactataaaaaagacaatacaaccgcccaatcaagaagaactcatacatctctcatctcaacgaagaggcatacatgaatcaggaactctgataaaatttctctaacactgtacacgtgagggccaaaaaataaaacgactataaaagagatgttgagctatttttccatggataagatgatcttcgccccgtgagttggggtgtgaagctaaggccaaacatctccttgagggccttgcctctttcccaaaacctaactaacttggcaactattgtagcactttgcattacgaggttcatatcattttcgctccataaacggctccctaggtgcaccctcctgcgctttgaatccaatgcaatgccccactcctcgaatagccttcttcgctcct

SEQ ID NO: 6771 - DNA, 536 bp, Glycine max
  Clone ID: jC-gmfl02220081e07a1
aaacaatagtgacagcagtgatgataatgactatggaagcagaggcttgagcattcgtgatggaagtgacaatggaagtggcactcatagttcatggactaaatgtctagctcaagttggcagtcctcatccagtttcacctcataaacagttggttgatgcccctgatagcacatgtgcccaagtgatgcaaacaaagactgaaaaagttagtagtagatgggtgcatgcgacggaaaaagagtgccatgaacttattgatcttgatgatgttgcaagggttaaggacttggctatgggaatatctttgaatatgcaactagagcatccactcgaggaactgtctagcaatccaattgtgggtaaaggggcaaataagatgtctgatgtagatgatatgcagatcattaagagaaagagcaatgtctgtgaaaaaggacaattggaatacaatggtgataaaaccgggacacaggaaaatcaggctatgaatgttattgatgttactgatagcaacagttcacatgctgaaagca

SEQ ID NO: 6772 - DNA, 341 bp, Glycine max
  Clone ID: jC-gmfl02220081e07d1
ggaaagaatagttatgcctatgctatttcaaaccttttcattttaaccctgtccctgattggccaataaaaccctttgttatcccgggaacccatgaaatacccttgttaccctttccttacattggagggaaaacaaaattttttaacggagtggggggggcaaagtaacaaaattacaaatctatggggaaattaattatgctgctttcgaggttctcgactagaactctttttggggggcatcattgttggggtccataaaacggtccttgcaatgggatcttttggtgggagcaccctccccataaggggtgtccatataacccacaggtttctttt

SEQ ID NO: 6773 - DNA, 525 bp, Glycine max
  Clone ID: jC-gmfl02220081e08a1
aagaaatatctgatgatttgtgtatttgatgagctttgatattaatttgttagggaacattctataaccatttttttcttcatgtaatcattgtatagaagagccccataggagtagagcaaactaaatgaagatataaaataagaaagactagaaactgaaaatgaactttggctttgttattaaatcaaagaaatctactcaagatacctttggctagccttcttagcataattagagtaccagcccaaccctggtaacaggattaagttgtttcttgaattcttgcatatttctctctactaacggaacccaattggaataatctttcatatttttccattttcttcctcttttgtttctccccattgtggcttcaatcccattctctaacattaacatatcgttccatgtcaactgtacttgaacatgctaatttgaagctaaaactgcacgtttgctgcagtttgtgcttagttgaaatttcagacatgaataagcattcttccatttaaaccgaacaaa

SEQ ID NO: 6774 - DNA, 393 bp, Glycine max
  Clone ID: jC-gmfl02220081e08d1
gacacaaaaaacctcagaactttttggttataggccttctactttaccataacattacaagtttacttgccctggaacggattctgggacccccctaatacagcccaaagacttagggtatagtaaccggcttctaagcttcaaacactttgtagcacaaaacgcaatgcgagattttgcatgctctcaagaaaattacactgtaatataagacttactgtgctgttcattgaccaagctggtcccaatgccaatgcaatatgcactggtgcaaaaccttcttgagatgttaaagaccggtgccaatgctataattgccgtggctatcatgtaccatgatgcctcgccctgcatgaataggtggctcaacaagacaatgataaagggcgcacc

SEQ ID NO: 6775 - DNA, 531 bp, Glycine max
  unsure (1)..(531): unsure at all n locations
  Clone ID: jC-gmfl02220081e09a1
cttcacttctcttcttcaattcattctagttctggattccgactcgccgcattgactcggtccgggttggggtcgactcagttcggtttttcattctctcgcgaatctaatctataggaaaagctaagggcacatcacaatgaaggcattgattctggttggggggtttggaacaaggctgaggccactgacactcagttttcctaagcctcttgttgattttgctaacaaacctatgattctgcatcagatagaggcccttaaggccattggagttactgaggtggtgctagccatcaactaccaaccagaggttatgttgaatttcttgaaggattttgaaacaaagctcggcatcaagatcacatgttctcaggaaactgaaccattgggaacagcaggtcctctggctcttgccagggataagctgatagatgactctggagaacccttttttgttctcaacagtgatgttatcagtgagtatccactcaaagaaatgatngaattccatanaaaccatggaggaga

SEQ ID NO: 6776 - DNA, 529 bp, Glycine max
  Clone ID: jC-gmfl02220081e09d1
cgagaccaagaaaaatacaaaacttgatcgcaccacgaagcctcaaaactctctccccatcccacatctccatgcatattagatcgaggaaggtgaagtacctaacataaaagagccttggtaacagaaaaaacacatcatgagctcctgaaccacctttatcgaccaggatcataagtctaaaacatggagatgcagcggatgagggagctgctgttactgtggtcatcatttgaaagcgagggaatgtcccttgagggtggaaatcacactgccggcagggtatgcactcgctaaaacaatattccacaacccccttttctctctctttactctctaataatgtcttctttaggattgctctctctttcttcttctacatatatataacaactctctttaaaatttcaacactgtggtcgtcatcatcgtcatcttctttgtgtttctttctcttgcgagtcccctacacttgcttttgaagccacaaaccaaccaactatatatctcggttacctaaatgagaaat

SEQ ID NO: 6777 - DNA, 447 bp, Glycine max
  Clone ID: jC-gmfl02220081e10a1
gacggagtagtaggggtcctgagatgcctgtaacagctgacgcaccacctctggttgctgttgtaaatgatgaattgtatgctgatgattatgccgacatggaagataacaagtctgacacggagagaaaagtgtggctaaccattgggagactgtcagaacgagcaacgtcaatgaatggctggggtcttgcattcagggcatgcggagataatcttattgtcattgatggacctaggactcatggcgagggctttattgaactcaatccatgggtgcctagggaaggacctccaccgtgggatctactcgctagaaaacgttccggccactgtgtctataattgtgctgtgacgggatgctgaagcatcgaactttcaaaacacattttgatgctccgagtccaacgagatgcgcaacattgaatgatccatttacacaagattc

SEQ ID NO: 6778 - DNA, 328 bp, Glycine max
  Clone ID: jC-gmfl02220081e10d1
atagtacttaaattatcttggttgttttggttgcattcttgaatttgatcattatctttgagaaattttgtacaacaggcaagggggggggcataaactactatgcaaaaacatgccctaatgtggagtacatagttgtcaaggaaatttaggatgccaaagctagggacagatctgttacagcagcaattctgcgaatgcactctcacgattgttttgctcgggggtgtgatgcctctgtgctgctaaaggcacaacgaagcaagagatcatgaaaagactggccaccaaatgtaagtttgcatgccctctatgctagtgaggcacc

SEQ ID NO: 6779 - DNA, 558 bp, Glycine max
  Clone ID: jC-gmfl02220081e11a1
ctcgagccgaatcggctcgagattctctatcactcttcaccttcctctgcgcaatttgtgcgcactccgtcgccgtcacctccgcggcatatccttccatccccggcacggaaaccggagagtgctccctccgcggcgtcggcgtcggcgacggtgttctggtccctccgcggcgagaagtgtacgaggaggggcgaatcttcgacatcacccacaggtatgtccccgagatgccggtgtgggactcgacggaggggctcgggcagcacttcctgtggctcgaaaagagcatgaagaatggctcgcgcgctaacaactccaacatgaagctcggtgttcacaccggcacccatgtcgacgcgcccggtcacttttacgacaattactacgacgccggcttcgatgttgactcactcgacctaacactcctcaatggccttgcacttttggttgatgttccacgggataaaaacattactgctgaggttatgaagtccttgaatatccctagaggtgtaagccgcgtgcttttcagaactttaaacactggcaggcaac

SEQ ID NO: 6780 - DNA, 457 bp, Glycine max
  Clone ID: jC-gmfl02220081e11d1
aataaaacattttacacagggcctttccaactagttaaaatttgggcttcaaaactcacccccccccttaatttaaaccttgaaatttttagccttgttatgggggggtttttttggacaaccttttgacattttttttattgggctaagaaagttggggcaagggatgattatgcaactgcagcttggggttaccaaaaaacgaaggcttgaaaaaaaaaaaaactcaaaaaaagccttttttgactcatggtgaacctaccaaatcccctggattttgacattctttggggccttttctcccaaataaatgtcggacgggtgaaaactttggaacccaccgattacctcggcggtcttaaggttgggcttggagacactgaaggggattttccccttgggtgatgagggccttttgttgttttccttggaaaggtccttcttattttttctttcc

SEQ ID NO: 6781 - DNA, 496 bp, Glycine max
  Clone ID: jC-gmfl02220081e12a1
attagatatgattgcaaagcaatggcatcgtcactacaagcagcagctactttcatgcaacccaccaagtttttgcagctaaagtctactcaggccatatctaaggcttttggtttggaacctgctggagttaataaggtcacatgctcccttcaggctgatcttaaggacttggctcacaagtgtgttgatgctaccaaaattgcaggctttgcccttgccacctctgctctcgttgtttctggggcaagtgctgaaggagtaccaaagcggttaacctttgacgaaatccagagcaagacctacttggaagtgaaggggacaggaacagcaaaccagtgtccaacaattgatggtggattggagtcatttgccttcaagcaagggaaatacaatgccaagaagttctgccttgagccaacttcattcacagtgaacgcagagggtgtggccaaaacgctccccctgagttcaaacacaaagcttatgacacgtt

SEQ ID NO: 6782 - DNA, 459 bp, Glycine max
  Clone ID: jC-gmfl02220081e12d1
tttggtttgttttttttttttttttttttttttttttttttttttttttttttttttgttctttttggtctttattaaagacatttcacaatggtttttctattataaaaaacttgggcttcaatattctcacccccccttaatttaaaccctgaaaatttaagccctgcaatgggggggcgttaaggctccaacctttgaaaggcctcttattgtgctcggaaagctgggccaagggatgaaactgccgccacagcatggggttccaagaaaacaagggcctgaaaaaaaaaaaaaccaaaaaaaaccctttttgacccagggtgagcctaccaacaacccggggtcttgacattctttggggcctttgcccccaaataaatgtcgggcgggttaaaactctggaacaaaccggatacctccccgggctaagggttggccttggggacactgaagggg

SEQ ID NO: 6783 - DNA, 394 bp, Glycine max
  Clone ID: jC-gmfl02220081f01a1
aatagattaaccgtatatgtttttatctctagatattgcgaaccttgccctttggctataaaatcagcaaagacatgggttttagagacattggcgcttaactgcccccagggtttcagttctacaactgagacgagggagggatgcttttttgcctttacagaaagatcactattgatgaagttgtagagtggcacctttatggatattgacatacacacgtgcgagcaatggagactccctgtggtggcttaacttaatgcaaacgagaggagcttcttctgctgacgcgatcgtaaatatgctactggattggggaccaatacagctacgacatgtggttattgataagcaacagtgtaggatcgtccagtgcttgctccttacactcttg

SEQ ID NO: 6784 - DNA, 312 bp, Glycine max
  Clone ID: jC-gmfl02220081f01d1
catagcagacaccaaacttttattattaacaacctaaaatatcattccatgcaagacagatgccccgacaccatggaagctatttttttcgcggtccatgtcccataataacccagatccattataatcacatttgggactacataggctaacgatgctaaagatgatggggaacgatcccctaccaaaccgaaggagactcacaaacgggttgctgttctggcttggggatggaatatgatgaagacgacaacgaggggttgacaatggggaagataatggcgcatgcaattgagaataccaaatggccgg

SEQ ID NO: 6785 - DNA, 563 bp, Glycine max
  unsure (1)..(563): unsure at all n locations
  Clone ID: jC-gmfl02220081f02a1
acaaaacgcacaaaggattattattgcaatggcagaacaaaaccaaaaccagacaactgaagctggaaggcaccaagaggttggccacaagagccttctccagagtgatgctctttaccagtatattctggagaccagtgtctacccaagagaacctgaattcatgaatgaactgagagagttgacagcaaaacacccatggaacatcatgacaacctctgcagacgaagggcaattcttgaacatgctccttaagctcatcaatgccaagaacaccatggaaattggtgtctacactggatattcacttcttgccaccgctctcgctcttcctgaagatggaaagatcttggccatggatattaacagggagaattatgaattgggtttgccagtaattaagaaagctggtgttgaccacaaaattgaattcagagaaggtcctgctctcccagttcttgatgaaatggttaaagatgagaagaaccatgggagctatgacttcatctttgtggacgcagacanggacaactacctcaactaccacangaggttgatagagc

SEQ ID NO: 6786 - DNA, 369 bp, Glycine max
  Clone ID: jC-gmfl02220081f02d1
acaaaaatatgttttttttttattttaaggtccccgccctttttcaccctatttttttttttaaaaaaaaaaaaaacaagaaggcgtgcaaaaaaaaaaagcccgcggcccccccccctagaaaaaagaaagaaaaacccccccccccccctgttctgcaaaaaaaaaaaaaaaggggaaaaacccggggggtttaaagaccatgagggggggcccccaaaaagcaaaaacacctacccggggggcaaaaaaaacaccggggggcccgcccccgacatggtcaaaaaaaaaaaaaaaacacaacccggcccccgggggaaattgggccccaaccccccggggggggaggagaaatttttggcggggggg

SEQ ID NO: 6787 - DNA, 557 bp, Glycine max
  unsure (1)..(557): unsure at all n locations
  Clone ID: jC-gmfl02220081f03a1
gcctcagtaatctgagagagaaacaaaaacaatgaaggtttccattgccaagttccactcccttcccctatgttttttccttctcttggccttcaacacaaaacccctcctagcagcagaaccagagccagtggttgataagcaagggaaccctttggagccaggagtagggtactacgtgtggccactttgggctgatgaaggaggcctcacactaggccaaacaaggaacaagacatgccctctttatgttatccgtgacccttcattcattggcaccccagtttcattcttagcaccaggccttgaccatgttccaacactcactgatctaaccattgatttccctgtggtgacagtgtgtaaccagccaacagtgtggaggctcaacaaggtagggtcagggttctggtttgtgagcaccagtggtgaccctaatgatatcactagcaagttcaagattgagaggcttgaaggggatcatgcttatgagatctacagcttcaagttctgccccagtgtgcctggtgcgctgtgtgctcctgtggngacttttg

SEQ ID NO: 6788 - DNA, 495 bp, Glycine max
  Clone ID: jC-gmfl02220081f03d1
gtagaacttgaacaatgtgttaagactaaggtggtaaggcaaaattccaaggggatagtatgattacagtaagactaatgttctcctttaactacttatgaaatcaaaactcatgctaaagaagtcttttacggtctatcttaaagctaaaacaaacaaaggggaatcggcagcaccgtcattaaatagtggatgtcatgcaaaatctacaactcgtccttgacatcattatcatcgttaacagcatcagtttcaggctttgaatcttctttcgcgtcactttcagcctctacttcagtgtcatcttcctcctcaactgttgcttcaggactgatgtccaggctagtcttcactgaatcataaatccgggaagcaaaatccttgggatcatcaagcaggaagccgctttaaagagtgcagtctggtacatcagctgtgctgtatgcttcacaccctcatcctcagggttctttactactctctctcggagctcct

SEQ ID NO: 6789 - DNA, 532 bp, Glycine max
  Clone ID: jC-gmfl02220081f04a1
gttgtgtgacacagaaattaagctagagcttcatagtttcttcttcttttctcaccttccttctctcccttcagacaaagggacaaaaaatcagtgtgtgagagagagagagagaaattccaaaaccatgtcccacagtcatctaagtttcgcctttgggattctatgtaacattgcctccttcgtgtgctttctggcaccactaccaacattttatagagtttgtaagaagaaatcaaccgaagggttccaatcaattccatatgtggctgcactcttcagtgcaatgctttggatcttttatgcctatgtgaagaccggagaaacgcttcttatcaccatcaatgcattcggttgcgtgattgagacaatttaccttgccgtatttatcacttactgcccgaagaaagctaggatgtcgacattgaggatgattgttttgttaaattttgggggattttgcacaattgtcctcttaacccacctactagcaaaaggagaagaagcccgtgtcaagcttctaggatggatt

SEQ ID NO: 6790 - DNA, 250 bp, Glycine max
  Clone ID: jC-gmfl02220081f04d1
gtaccccccacccaaaaagaaggtttaattttttttgaaaaaatggggggatagactaaagggggcacaaacattttttggactaaagcaaaaggatggtccctaaccgggggaaaacataaaaaggtttgtgacgggcgaagggccataactggtacctcttccaagaaaaccattcccttaaaaaccgcacccaccaaaatggtgaacactgaaagggtccttcaacggtgttggggatcatctgaaa

SEQ ID NO: 6791 - DNA, 537 bp, Glycine max
  Clone ID: jC-gmfl02220081f05a1
gggggttgttattattcttcataatggttgcaacagctgctacggcgtcgtttctccctgtgccttcgccggacgctggaaaagggaaacccaagggtggtggtggcggcggcgtttctgtgaacctcggaggactcaaagagaagcaaggtttgtgcggttgcttgcaggtcaaggcaaacgcacaagcccctccgaagaccatggagaaggttgagaatgatttgccatggttgccgtcgtcgctgatttcgcacgccccgaggacttttataaatcagatacctgactggagcatgcttctggccgacatcaccaccgtgttcctcgcggcggagaagcagtggatgatgctggattggaagccgcgccggcccgacatgctcattgacccctttgggattgggaagatcgtgcaggacgggctcgtgttcatgcagaacttccccataaggtcttacgaaattggcgcagacaaaactgcgtcaatagagaccttaatgaatcatttgcacgagactgcacttaatcatgtta

SEQ ID NO: 6792 - DNA, 370 bp, Glycine max
  Clone ID: jC-gmfl02220081f05d1
gggaaaaaacaaaaaggggaaaaacccccggggccaccccggttacaagaaggggccggccccttaaaggggtctttaaagcaaaaatccctccccccccaagacccaaatttgggggcccacggttttgcttttggttaaaccccccaaggggccccggggggcccttcccgcaagcaaaaaaaagggttaattggtgggggatggccccaaggaattttgcccccttttttttgggggaaaaaaaaaaggacctttattgccccccctcccccttttttagaaacaacaaaattttggggccccctaacgggggcaaccccaaaacaaaatggccccgaagggaaagtcggggaggggaccttttttt

SEQ ID NO: 6793 - DNA, 507 bp, Glycine max
  Clone ID: jC-gmfl02220081f06a1
gggggttgttattattcttcataatggttgcaacagctgctacggcgtcgtttctccctgtgccttcgccggacgctggaaaagggaaacccaagggtggtggtggcggcggcgtttctgtgaacctcggaggactcaaagagaagcaaggtttgtgcggttgcttgcaggtcaaggcaaacgcacaagcccctccgaagaccatggagaaggctgagaatgatttgccatggttgccgtcgtagtcgatttcgcacgccccgaggacttttataaatcagttacctgactggagcatgcttctggccgacatcaccaccgtgttcctcgcggcggagaagcagtggatgatgctggattggaagccgcgccgccccgacatgctcattgacccctttgggattgggaagatcgtgcatgacgggctcgtgttcatgcagaacttccccataaggtcttacgaaattggcgcagacaaaactgcgataatagagaccttaatgaatc

SEQ ID NO: 6794 - DNA, 443 bp, Glycine max
  Clone ID: jC-gmfl02220081f06d1
aagaaaaaacacataacttggactacttgtggctgaggataacaatttgttcaaaattcaagaaactacaaaattttgaacatgtctttgacaacaaacattgcacacaagaaaaactaggcactcaggttctatgaattacttctccagtgtatgaccttctaagcagcagggacctcagtatcattatcagacagagctggagcaggctggatgcattctgtttcctcctttggagaatggattgtgacaagatcggggaggggagtaataggaccctgtttccccttaggatcccaatcaagcatgaccttcaccttaatgcccagaacaccctgtctgaggagcacatgttttactgcagagtcaatggaatctttgacaggttgcacaaaacaaattatgaaccgtccttaaacatgataaaattggctctctgggct

SEQ ID NO: 6795 - DNA, 592 bp, Glycine max
  Clone ID: jC-gmfl02220081f07a1
cccagatcgtctactaccagacagggtccaggttggcatgactcaacatttcatgaagagttactctgatctcctcatcaggacatgccacaggcgcggtgtgcatgctatgggaggaatggcagcacagattccaatcaaagatgacccagttgcaaatgacgcagcactggaacttgtaaggaaggacaagcttagagaagtgaaggcaggccacgatggaacttgggctgcacatcctggcctcattccatcctgcatggaggttttcaacaacaacatgggcaatgctcccaaccagatagacacagtgaaacgcgatgatgctgcaaacttaactgaacaagacctcttgcagataccaacaggaaccctgaccatggaaggtctcagattgaatacaagggtgggcattcagtacttggcagcatggctcagcggaagcggttgcgtgcctatttacaacctcatggaagatgctgccactgctgagattagcagggtgcagaactggcagaggctcaagtatggagtggagctagatggcgatgggcttggagagaaagtgaacaaagaccttttcatttagtgg

SEQ ID NO: 6796 - DNA, 513 bp, Glycine max
  Clone ID: jC-gmfl02220081f07d1
tttggttcgtcttttttttttttttttagccataaaaaaggggcactaacacataaaattagaggactgatccaaaattcaatatgcggcccatggtctaaatccatgactaaaactgtaaagctcaaatatactatcctcctaaaaggattagatgttgaaatacaagttattccaatgaaagacaaactctctcgagtgatagttccttggtatcttagaaggagccttattcaaaattgaagctacacttctgtgggcaaaccatgggaacctactaacaaggacagtagccaagaaggagcgatggtttctaatttaggcatgactaagccaatgccttgtccttagaaagctcttctgcggtcaagtccaacttctttcttgagaactcatcaatgggaagtccttgaactattgtccattccccattggcacaagtgacagggaatgaatagatcagttcagctggaacattgtgggaaccataagaatatactcccattgacaccc

SEQ ID NO: 6797 - DNA, 439 bp, Glycine max
  Clone ID: jC-gmfl02220081f08d1
agtaatacaaataatttaaaaaggggattttacaaggggggaaagtaactttgtagctagctcagggacagccctttaatttatgaactacacacgcatcctgattttcatggatctattcattctattgttacatgtattgagtactgggggagccatgtattttacatatagcaaatggggtgatgtgctgcttcctccattgtaacacagcattgcaaaccgatacccttctgtccccaaagatgggagcattcctcttacagcgcctttggataatcagcccagaaatgagctatccatttatacgaacgtgccatcttctatggttgccttctccattatgatggtgattcctgatcgaatgtctaatccatcttctggtctatctgcttctagaaccccatctttgtttgcgatgatgacatctttgccgatc

SEQ ID NO: 6798 - DNA, 473 bp, Glycine max
  Clone ID: jC-gmfl02220081f09a1
cccaaggttccctctctacctcgttctccctccctcactctccgagcctactccaaaaccaccttcttacggccacccaaatccactctcaccgcctcaaaatccgtaactgttaacccttccccaacagagctatcccttgagaagctcttcggaccgccggagaccaccgtgtccctcgaaagatccagagtcttgaacggtttcaacattgtgctgagttactacgccaatgatgctcaggtgttgcaagccgagtttgtgaaaagcagtgtgaagatcgaggattgtcccttcgatggacttcctgaggtcactatcgttggccgctccaacgtctgaaaaatcttgctcctcagctccctaaagcgccagaagaagctcgccttgaattcgaagaaacctgatagggcttggagataggattatgctgtgctgatcgagggagagctcctagatgcgcatttcgagac

SEQ ID NO: 6799 - DNA, 450 bp, Glycine max
  unsure (1)..(450): unsure at all n locations
  Clone ID: jC-gmfl02220081f09d1
ataaaatccaactcggcctctttcgcacatatacccaaccctttaaatcaaaacctaagaatttgatatgagagagcgattgtgtttccgttagtatatataaacgaattgaagcgtatctactatcttacccttagacataacaatatcatctagctagctagctagctagcanatagcattgttaaaaaaccaaccacaaccagattggcctgagcccattgtccgggttcagtccttatccgaaaactgcgaagattcaatccctgaaaggtacatcaagccttctactgatagaccatccataaaaagttgtgattttgatgatgccaatattccaatcatcgaccttgggggactatttggtgctgaccaacatgtctcagcctcaattcttaagcaaatctcatatgcttgcaaagaatggggcttcttccaagtcactaatca

SEQ ID NO: 6800 - DNA, 547 bp, Glycine max
  Clone ID: jC-gmfl02220081f10a1
cgctcatttcagaaacactgagtgtccctactctctaaccttttctctctcactaaccctaatcccaactaattcgaatttcgcttccgtcgtgtctccttccatttcacaaggtcaattcatcttaacccaattctgctctttctttttagtcttttactatgcagtctcttgttatttctgttccttaattccgcgcgtaggtacaacatttcacgccgcttaacgttagggtttcaaatttgacagatcttgccaattcgtttttttcttttctccctgctttttaaagcacttcgccgattcggttaaagactttctaaatccaaaatttcatgggaagcaacgataatttcggcgacgggattttcaaaacccgtccccatctggcggacgtcacgaatcttccggccaaaaggtcgttatctttggttttcggcgacggtggggacttgcagttcaccaagaaaattcgcttatgggtggaaaagtttgcacaagggaaaagcccaatgcaatttggggcacatgcctaccttaacaacga

SEQ ID NO: 6801 - DNA, 417 bp, Glycine max
  Clone ID: jC-gmfl02220081f10d1
tcggcctttggtttttgttaacttttgtttttgtcatctaaacttagttagagtaagcgcactttgatcagcaacaatggcaacctactggagccatgctaagaaaaccatcccttcttccttggggaaaccagttactgttagtgccaaaacaacatcattatacctcacactctcaattaccatacctgtgttacccttcagctgatcaaaccactctctcaccgaaaaccttaagctgaactccactttgccacacttttgcttgtcttcagttcccaagaaatctttcacttgtagaagccaggctgagcctgttgactctgaaaaagtccaagagttgactgtgtatgatatcatcgagcgtgaccgaggaagccctgtttatcttcgattgagctataaaagtgtcaattc

SEQ ID NO: 6802 - DNA, 512 bp, Glycine max
  Clone ID: jC-gmfl02220081f11a1
ggctcgaggaggaaaagtcatttcagttccatgatgttttcaatttggataatgagaatagggcagaggatatgccaactttaatagatcgaaaggacaatgtctttatcatttccaatcccaagtcaaagtatccagttcttcaattagacttgagattgatatcagatctcgcagttgtcattggctctgcaacctgtggtggcattgcctttgcttgtgctggacaaccggtgatgactggatatctgctagcacgatcaatcattggacctggaggtttgagttttgttagtgcaatggtccaagttgagacagttgctcaatttggtgtcatctttttgctctttgcattgggcttagagttttcaacaacaaagcttttagttgctcgggcagtggctattcttggaggcctactccaaattttcttatttatgtgcttgtgtggaataacagcttcattatgtggtggtaaatcatctgaaggaatatttgttggtgcattttta

SEQ ID NO: 6803 - DNA, 504 bp, Glycine max
  Clone ID: jC-gmfl02220081f11d1
gggcgcgtcgactcgcggaacccttccggggtagatgagcggactgacgaggcgactggcctgtggtcgtcctttttgtctgcttcttttttatttatttgaaaaaagggctctcagccggggttgacagaaacacgctatatacgtgagaagccaatgagagctcatgcaaggtaacaggtacactaacaaacttagaagggggctacaacggatggtcgggagcatgagcgacaacaatgactgctgtggaaggcatgcttattcacgaggaattgtggcttacacaacggctgggacggctcaattaagagcaagggctcctgaacgctttaagtattcccatttcttgagaatggcaccgccgcccgccgatctgttgttgaggcactggaaccttcctctatgtcgacagcagcaactgtgtcccgagctccgattattgtgggcaaaacgttttcactgaacggatccaccattacccggggggtcggtgtgacaatg

SEQ ID NO: 6804 - DNA, 430 bp, Glycine max
  Clone ID: jC-gmfl02220081f12a1
tgctcgaccttttttcccccaacctatacacttcaccaccacaccacaaccctaccctatctctctgtcatggtcattggaggagccttccctcgtttcgacccaatcaccaaatgtagcacccaagaccgctccaaccagaccatcggctcggacctcgatggcacccttcttgtgatcccggagtgccttcccctactacttactcgccgccctcgaagccggcagcgtcttgcgagcccttcttctgttaaccttcgtcccgttcgtctacttcacgtacttcgagctcttcgaagccctagccatcaaaaccctaatcttcataacctgcgcggggcttaaactaaaagacgtcgagctcgtgtcccgctacgtgctgtcgaggttctacgccgaggacgtgcaccccaccacgtggcgcgtgttc

SEQ ID NO: 6805 - DNA, 404 bp, Glycine max
  Clone ID: jC-gmfl02220081f12d1
tttggtttgtttttttttttttttttttttttagaaacaaaccaatgcctttattggtggtggcttagagtcacaaacattcttctggagaactctacttgggataactttcaaacattggtgcaaaaaagatattcaaatggactttgaaaagatgggggggaggtttagcgtaaattttgggactgacggtttcccataaactttaataggaattgatgataataacaatgttcgtaagctgcaatttagaggggggaataaacacaaccattcgttttccctctaatattggtaaacgcttcggaaaacaacttgggagatcaagacacttaatccccccacgggatggacagatgaatcaaattcgtctatttcgaatttcgactactctacttatatgg

SEQ ID NO: 6806 - DNA, 530 bp, Glycine max
  Clone ID: jC-gmfl02220081g01a1
ttcttcctcttcctcagtagtgcgattttcgattctcttctctgcaactatgcctaaccctaaggtcttcttcgacatgaccatcggcggtcaacctgccggccgcatcgtgatggagctctacgccgacgtgactccgagcaccgccgagaacttccgcgcgctcttgaaccggcagaagggcgcccggcggagcggcaagccccttcactacaaaggctcgtccttccaccgcgtgatccctaacttcatgtgccagggcggcgacttcaccgccggaaacggcaccggaggcgagtcgatctacggcgccaagttcgccgacgagaacttcgtgaagaagcacactggtcccggcattctctccatggcgaacgccggtcccggaaccaacggatctcagtttttcatctgcacgacgaaaacggagtggctcgacggaaagcacgtcgtgttcggacaggttcgtgaggggatggacgtcgtcaatgagatagagaaggttggattcagcttcggcaggaccgcca

SEQ ID NO: 6807 - DNA, 415 bp, Glycine max
  Clone ID: jC-gmfl02220081g01d1
aggcgaataatagaggtcctaatttttattgaagggagctcatcatatttttttatgtggctcataacagactccattcactctatgaacgaaccacatgatcccgatattttagaacggaacggaaggatccaaaggggaagggtttccaaatgatatccataacaccgcaagcccctaaacgacatgggaaagagaaaaaaaagggaaaaacgaccccgaaagaaacggctcattgagagccaccgacacaaagataaaagcctagggtcaacgtcgtctatctaagagagatgaccacagacggcgacgactacaggcttggcggacctgccggaactggatccgaccttctatatctccttgacgacatccatcccctcgacgacctgttccgacactaagtgctttccgt

SEQ ID NO: 6808 - DNA, 487 bp, Glycine max
  Clone ID: jC-gmfl02220081g02a1
ctctcacttggtctttctctctctaaaatctcaggactcagattgagccctttttgacaaacctgtgctctttgattccagttggcttctcagacgtgtgttagtgaagtatttattgaccagagaatggctgggactgtgagtgaggagtatggagtgtgaaagtccgcggcgggtatttcaaatgggcagcgtcgtcaatctggggaagcattggcagagtggcggtcttctgagcaggtcgagaatggtatcgagtgcacttcccccccttactgggacactgatgatgaagatgatggaccacaacctttggcattatatggaagatctacggggaagatagaaaagttttctcatattaccaaaggggaacttcgctctagtgcatttgaggttggcggttacaaatggtacatttaaatctatccacaaggctgtgatgcttgccatcatctctcggtgttgctggtgtagctaatcatga

SEQ ID NO: 6809 - DNA, 391 bp, Glycine max
  Clone ID: jC-gmfl02220081g02d1
aactcaaaaacactttttacaaaatgtattttttatcagagattacatacaaccttactccaatttaaaaagacccaacaatttcctcaaatgcattacatttgttggggacctctcatttgaggacacgcttcgtaaccctttaaggaccacttgatggcctgaaaacagtataaccattgacaccacatgctttatttgagtaatcgggggaggatccataactataattctgtggggttgtcatacctaaaggcaacagatcagaacccgccacctgccattggtttggaatcaacccatcgacctggccattgacgccaggcacaccactaaccggtggaatataatccctcagggaatgataatgcccaccagacaagccataccc

SEQ ID NO: 6810 - DNA, 553 bp, Glycine max
  unsure (1)..(553): unsure at all n locations
  Clone ID: jC-gmfl02220081g03a1
cttcatgaatctaatataacgttattcatagtgaaaataaatcgagccaaggaatttattaataattgtcttcatttcatattagctgcctgctgcgacttccttatgcataattttactgtttatagaaattgtgaagctatactgttgtaattgtcatgtaaattgttccctttttcatcttacttgatttggtaaactccggttacttgtatccaaataagatgggccatttgtattgcgggggctttgtataattgtacaattatctacttgtaagaagttcagattcgggcgacaacatttgtaatgcagaattaggtcattaacattgtaaatcttctggcgatgattggaatatcaatgtgaagacgctatatgacttctgctatgacaatatcattgtggttgtcaaggtatttttgaagaaatatcgtggatttacaaagaatctggttaggcttctacaattctttaaggtgaagataacttcggctctttacacaagcatagaatgatatttnttcttggtatcaagttattcagtatgtat

SEQ ID NO: 6811 - DNA, 354 bp, Glycine max
  Clone ID: jC-gmfl02220081g03d1
acaaaggaaacaacacagacacatttcatttacaagtacagagatgcccaaattaaaacctgactttgaaaatctataaaaaaattgtcataatgctttaatataaattacaagccctacacatgccacgagatccatctattatggattgatgttgcattctcgcaaatacacaagatcatagtcaacatactttgtccaataacctcggaacttgggaaaacttatctcaagccacggtttcatgtttgcattgtagtgtataacagcagcaaatttccttgtcctcaaaaacaactttagtaaatattaaaaggaatgggcggccgctggcgatctaaaactagtctcgag

SEQ ID NO: 6812 - DNA, 542 bp, Glycine max
  Clone ID: jC-gmfl02220081g04a1
ctctggatcagagggatacatcataggattcgctccaactcctatcgaataaggtattatctgtcaatttacattggaaagggttaggatattcaattttacataattaaagataaaatcaacgatagctatagttttaaaattaaccatcgatttagttgcaactggaacacaggtttctttcaatgaaataatattaatatcaatttaataagctggtaatgtaaaatactgctaatgttaatatgaagtttggatggtcttattggcagaagatgctaggtggtgttcatcaatattctgaaaggtaaaacgattttggtttttaatgataatataaccatgaatctaacatcagatattgaacgctacacatcaaaaataaatcgagccaacgcatttaattgtaagtgtcttcatattacctgtgttctgtcacatctttttgcataatattggcactaagtcttttttgatagaaattgtgaagatgtactgttatcattgtatcaactatattgtgcccttcttttttatttgat

SEQ ID NO: 6813 - DNA, 433 bp, Glycine max
  Clone ID: jC-gmfl02220081g04d1
ggggttggttttttttttttttctaaaaaacctatggaacaccccccaacccttttgaaatcggggactcgcaaacctccctatctctggtggcttttaaactttgaaaccataaggttgggcccctgtcataaagaccctttccccatgttgcttaaaagaaccttttttcctcccacttaaaatttgggcccgaaggcccaaaaaattttaaacaggaagatttcgggggatttaatttgttccccaattcgaattgtgggaaaaaacttttccccacgggtaaaatttcacaagtttttaaaagcatcccccccccctttgttcccagggggatccccattgtgcctaacaagggggggcgggacaaatttttctaaaggaggggggaagagcccccctttctattttatacccggcttttttcccccct

SEQ ID NO: 6814 - DNA, 401 bp, Glycine max
  Clone ID: jC-gmfl02220081g05a1
gataaaacccagcatatccatgtttctaacgtcatgtaacatcaaatcaacgggacacaagatgggtatctcttgaaaaggctctgatcaaatcttggaaaggtatctatatttgcacaacgtacccaataacgaggactttgaccctgatacacgcctcaagaatcatgcattacacaaatatgatagcgtgccagccattcaattgacctttgcctcggggacacacacgcgagtactatatttagacaaaacgactgttaccacatcgatgaacatcgaccctgactgttaaacgatctaggagcgacaccggcgaatcttgaaatgcactccgaggagggcctcataggatgaacaacattcttatctgccacagcccattttatatagccagaaag

SEQ ID NO: 6815 - DNA, 388 bp, Glycine max
  Clone ID: jC-gmfl02220081g05d1
gcatcacatgacaattttattttcccctttaccatggcttgcagtttaattatatgctacattatacgctcattcttcacacgggagaaggaagggaagttttttgttcatgaataaaccgccccgatagactaaaccatgcgccttcattgtttagactttagcgcaaggatggcaccttgccgcttggaaacatatgcatggtatgggccctatgaagggccattcctggtccctcttccatgataaccattcccttcccttcttcaccaacctttcattcaaaacactgaatcattccaactccggcgttggggatcatctgcatagctagtgaagcacccgggcagcttgttctcccagctccgaatgacaaaagttcaaaatg

SEQ ID NO: 6816 - DNA, 408 bp, Glycine max
  Clone ID: jC-gmfl02220081g06a1
gagaaaacacagcgtatcgttgtttttaatgagatggaacaactaatgcacgggagacttgatgggaatggcttaaaaaggcatggattatataatggaaagggttcagtcatgccacaaggtacacgctttcctgttctttgaccataatggcggcagcaaaatctttgtattacataaatatgatggcgtgcgatccctcccatagtccgttgctacggtgacataattgctccatctttcttcagaaaatgcaactgtctcacaaccaaggaagatggatttctaccgattcacgctctgcgaggtcgaccgtgcgtttcttgaagctcatgatatgggggcccttctacgatggactctattcatgtctgcccaagacacttttaatgactaagattgtctgag

SEQ ID NO: 6817 - DNA, 337 bp, Glycine max
  Clone ID: jC-gmfl02220081g06d1
tttggttttttttttatgataaaaatatacattaatataaataatttgaataacacgatttctcttggatcctacatatttatacattcgttcataaatgagatgatattatcttgtacacgttcataacagacacgagtgggataattaagtactcatatacatgatactcataatagtacatcgcaatcacaactttttttcgctggccgttcaaacggctccagatactatcaatgtcctaaatcagtagagggatgtcgatcaattttccacaccaatgttttaaacccagagatgctacagttgataaggtgaagggttccttccttccgga

SEQ ID NO: 6818 - DNA, 511 bp, Glycine max
  Clone ID: jC-gmfl02220081g07a1
ataataaccggtttttctcacttttctttttcttttgggctttcagtttcacataacaaaccgtttgcagaacatcccataaaagcttagcttgtattcagtttctcttctcccaacgtttttgtcgctagtaacagaatattacaaagtaacggctttctcagtggagcgcttgatttgggttggtgggtcaacttcaagtttcaatttttttttcatttttgtctggtcgattgagaaggctcagttgcagagacggtgggggtgggaaggttatggctttttgcccaattttttgttgcggaaatagttcggatcgcaaaggacgagggaagaaacaacctccatggcgggtgttttctttgaaggaattacactccgctacaaataatttcaactatgataacaagctcggcgaagggggattcggcagtgtgtactggggccagctctgggatggatcgcaaattgcagtgaaaagattgatagtttggagcaacaaagcagacat

SEQ ID NO: 6819 - DNA, 472 bp, Glycine max
  Clone ID: jC-gmfl02220081g07d1
aagataaaacaaataacttagaatacttgtaactgagtgtaacaatttcttaaaactaagaacactacaagatatggaacatgtctttgacaacaaacattgcacacaagaaaaactaggcactcagctactatgaagaacttctacagtgtataacttttcacgcacacagggaccttaatatcattagcagccaaaactggagcaggctggatgtattcttcttcctactttggagaatggattgggacaagatcagggaggggagttctaggaccctgttttcccttaggatcccaatcacgcatgaatttcatcttaatggctagaacaccctgttttacgagcacatgtctcactgcagagacaatggcatcgttgactggttgtccagaagaaatcatgtcaccatccttaaacttcatagattcgggtatctgggctttgacctgaacacttacaatgaccttgc

SEQ ID NO: 6820 - DNA, 534 bp, Glycine max
  Clone ID: jC-gmfl02220081g08a1
ggtattctctgcgccgtcatgctcgacaccaaggggcctgagattcgaactgggtttctcaaggacagtaagcctatccaactgaaacaaggtaatgaaataaccatttccactgactatgacctaaagggtgatgagaagacgatttgtatgagctacaaaaagctgcctgaggatgtgaggcctgggatggtcatactctgcgcggatggcaccatatcatttacaggtttatcatgtgacaaacaagcgggtttggttcaatgccgatgcgagaactctgccactcttggtgagaggaagaatgttaatttgcctggagtgatagtggatcttccaactatgacagacaaagacaaggaagatatcttggcctgcggagttcccaataaaattgacatgatggctctttcttttgttcgaaaaggttctgacctggtgggagtcacgaaagttctgggaaaacatgccaagaacattatgctcatgtctgaggtcgaaaaccaagaaggggtttgcaaatttgatgaaatc

SEQ ID NO: 6821 - DNA, 519 bp, Glycine max
  Clone ID: jC-gmfl02220081g08d1
gaagctcaatccattttttatattagaaaatgcatggttcaatattaaagctgtaatttggaatgttagcccccaccaatagactacaatttttgtgacatagtatgacttgcaaaccaattgctacacaatgcgtgtgttcttgctatacattcatcagttgtctaaggcaatacaattgatcttaaaatctatgcaaaacttctaccattcagtaccactgttatggaaagtttttgcagaacctcaagtttaggtccatagggaagaaaaaaaagtcaccagctacataattcaagtgctcactagcaatcttacaaacctggcatgaagactttgcatgtcccaaaatgacaggtactttgaagtttatcagtggacccaaattggctgcttcaacttgagagatggaaagaatgtgatgtgatctatgcaattgcatttgacaaacaagtgggccatatctccatctgaaaggcaccaaaactatgttggaccttgaccatattcaagtcagac

SEQ ID NO: 6822 - DNA, 410 bp, Glycine max
  Clone ID: jC-gmfl02220081g09a1
cacctctttctccttcagacttcttgggtttatgtgatgatggctctcaatatctcttctcctgctgaagtcaatgacatttttttcgatgattacttcaaggctaactgcatcactgcaaagctcacaggtggctttgtctttaagagaaaagagcgtggagctgcatctggagggcgagaatgttgctcagtgctggcaccaccaccaccggcctggccgggacgagcggtttcagagcaaggcagcacgacttgggatggaccaaaacccatttcaattgttgggtgtactggtacaaatggaactcagacactacatattgcggcagacaatccacataagtataaagttgtggcacttgcagctggacaaatgttactgttcttgcagaccaagataaaagattt

SEQ ID NO: 6823 - DNA, 497 bp, Glycine max
  Clone ID: jC-gmfl02220081g09d1
gcacataccaaatggttttttgttgatgtcaaaggtccttgcaaggctcctattgaggttcaagttgatggaacaattcaagcacctgcaaacccaactgaccttaaggcggctcatcaatggtttgttgttcaatatgttaactctttcaccctgtccggtaaaggtgattttgatggtcaaggggcaactgcttggaaacaaaatgattgtacaacaaacaaggactgcaagatgctttgcatgaattttggttttaatttcctcaataattcaattgtccgtgacattacttccaaggatagcaaaaactttcatgtgaatgttttggggtgcaacaatttcacatttgatgggtttaaagttagtgcaccaaaagatagccccaacaccgacggaatccacattggaagatccacagatgtgaagattcttaacacagacattgctactcgagatgactgtgtctcattgggtgatggtagcaaaaatataac

SEQ ID NO: 6824 - DNA, 225 bp, Glycine max
  Clone ID: jC-gmfl02220081g10a1
gaactctcacactgtaaatcttgtagagttgatgggatgagcacattctgcatttcttgcgctgtggaagtactcgacttccattcggataagaactgcatggctagccgcgacacatgtgtaattcagacacagggctgttaaaggagacagaagagctttggatctatatggggatcgctgggatgctgaccatcgcttgtaacaccaactacctcttggacc

SEQ ID NO: 6825 - DNA, 478 bp, Glycine max
  Clone ID: jC-gmfl02220081g10d1
gtgatgatgacactgtgtataagtgacagtatatgattattttgttaatatccgcaagatagatcttcgatattctgccgatctcccatgtatcaacgttgggaaaccaaaaaggccaacttacattcctcttgaggtcgtgccaatgagtttcagaaatgaattgcatggtccacgccaaaatctacgacattggtacaacagctgctacatgagacaaggagcactagccatacacaaggcaatcccaaatttagttaatgtgtaattctggaatatggcttctgaaacaataaagcaaaaattggtttttactggaagtgaagaaggaaaacttgcaccaattggtcaaagctttgccgaggatattggagttcttgagtgctgaaataagccgaacatcattggttggtattgtcaaatatatatgttagtctatgcttgaagaagtgatttttacaggaggctgcaaatattg

SEQ ID NO: 6826 - DNA, 277 bp, Glycine max
  Clone ID: jC-gmfl02220081g11a1
agccaatccttgattttctgagcatccatacacacatagtctggatttggaaaactctaagggtgcagataaaatgtgaaccaggacgggacgagcgcacgtgaacaaacaccttctgtcttacataaccggaaaccaccttaaacacgcagatgtcatgggccttgactgactcgtttgggatcataggaccctcttccctccaaacaaacgtggtgagccaactgcgatgattaatgactgtaaggaccctgtatcgctcgcttcaagaggattg

SEQ ID NO: 6827 - DNA, 594 bp, Glycine max
  unsure (1)..(594): unsure at all n locations
  Clone ID: jC-gmfl02220081g11d1
gggacgcgactccngcggaaccactcccggatcaattagctgactaaccagctgaccggcctgtggtcgtccttttttttttttttttttaagaaattaattgttgtcattatatattaatcaatccaatacacagcacacaggaaaaaggccccaaagaccttttacccctatgtgaaagagggttctcctgtcttggaaacaaataaaaaaattcaaggtttttaaattaaaacctatatatacacgtgtttacatcacacgcgcggacaccagccattggagtcctgtatagttaggccaaaactcatggccaaaaataggaaaaaatatataaacagctcccgcaaagaaaaaccaagaaaaagaaaaatcacacgtacacacttcattggcacgcaccagaaccgactgcacacgtgccaatacccaacaaaaaaagtccacgagttgtagccaaacttcaacttattgcccttcaattgttctttactgttgagggtcccatcaaagtagtagtaacgtggatgatgaagaagcagtgatgctggccaagaaatgaagctttgcttgacttatgaataccatgatatg

SEQ ID NO: 6828 - DNA, 473 bp, Glycine max
  Clone ID: jC-gmfl02220081g12a1
atccgtcttccattcatcaacaaccactctctctcccctctctgcagcaaaaccaattctccggcgacatctccggtcaggttccggcagcctctccggcgactcggcatggcaactcaatgaatgcggaatcaccgccggggctcctcatgtcggcttcctgcctctccgactacgacctcctctgcggagaggactcctacggaatcctctccggagagtcgccggagtgctccttctgcgacatcgactcctcacctcctgcgccgtcgccgacgacagaggattgttattcgatcgcgagcttcatcgagcacgagcgcaacttcgttccgggattccagtacctgacgcggttccaatctcgctccctggacgccaacgccagagaagaatcacttggatggattctcaaggtacacacgtactatggcttttagcctttgacggcgtaccgtagccgaaactatatg

SEQ ID NO: 6829 - DNA, 466 bp, Glycine max
  Clone ID: jC-gmfl02220081g12d1
tttggtcgtccttttttttttttttttttaagaaattaatagttgacatttttttttcgttttttcatttccccgcgcacccgaaatgggcccccatgaccttttacccctatgtgaaagagggttctcctgtcttgggaacaaagaaaaaaattccaggcttttatattaccacctatatatacacgtgttgacatcacacgcgcggacaccagacattggattccagaatggttaggactaacctctgggcccacagtatgatttaatctctaaacagttcccgcttcgaaaaaccagcatgaagaaaaatcacacgtacacacttgattgtcgcgcaccataaccgactgcacacgtgccaatacccaactaaaaaagtccacgagttgcagcccaacttcaacgtattgcccttcaattgttctttactgttgagggtgccatcaaagtagtaagaacgtgg

SEQ ID NO: 6830 - DNA, 528 bp, Glycine max
  unsure (1)..(528): unsure at all n locations
  Clone ID: jC-gmfl02220081h01a1
gaaatggtacagtggataaggcacgagggaaagacaaatgatcctcaatttgtcgctatggtgcggcaaggatcattgcggccaacaactgtcggttcaacagctcgcttagcggccaaggataatgactttagagacagtggcactaaccatagatagtatatcttgacatattcttgtttcaacagtcaatggtgtgtgccagctttattgtgcctatagttatggaattgcttactggctcctctcaaccagaaatatgatgttgcttacatccacttacatggtaatggcatggtgcacacaaccaaaccatcatttggcagtgaaagtggacagtcgaataaaaatgtataccctattttttggctatttgaggctgtatagcgttaatttatagtctgctttttgtatcatagatagtagccgttactgggtatagcttgaattctttgtaggattatatagcatagcttcatattatagaaatcaattcctttcanggaaaaatggaatcgtttgagtaag

SEQ ID NO: 6831 - DNA, 403 bp, Glycine max
  Clone ID: jC-gmfl02220081h01d1
ggaaggaactgatttctataatatgaagctatgctatataatcctacaaagaattcaagctatacccagtaacggctactatctatgatacaaaaagcagactataaattaacgctatacagcctcaaataggcaaaaaaataggtatacatttttattcgactggccaacttcactgccaaatgatggtttggttgtgtgcaccatgccattaccatgtaaggggatgtaagcaacatcatatttttggttgagaggagccagtaagcaattccataactataggcacaataaagctggcccacaccattgactgttgaaacaagaatatgtcaagatatactatctatggttagcgccactgtctctaaagtcattatacttggccggtaagcgagctgtt

SEQ ID NO: 6832 - DNA, 508 bp, Glycine max
  unsure (1)..(508): unsure at all n locations
  Clone ID: jC-gmfl02220081h02a1
gcttacaacgcctaccgcagattgtcgtatttggtttcccatgcgctggttgcgttgcccgcattagcatttctctcgctggctttcgcggcagccacgttttgggccgtgggcctggacggtggaatatcgggctttttgttttattttctgataatattcgcttcgttttgggccgggaactcgttcgtgacgtttctttcgggggtggtgcctcacgtgatgctgggttacaccatcgtggttgcgattctggcatacttcttgctcttcagtggcttcttcattaacagggataggattcccagttactggatatggntccactacttgtcgttggtgaagtacccatacgaagcggttctgcagaacgagttcgatgaccccgtcaagtgcttcgtgaggggtgttcagatattcgataacactccgcttggctcgggtgccgagcctctgaaggtgaagcntttggagaccatgagcagcacgctgggaacgaagatcacca

SEQ ID NO: 6833 - DNA, 416 bp, Glycine max
  unsure (1)..(416): unsure at all n locations
  Clone ID: jC-gmfl02220081h02d1
aaggggcaatgattaaatgcatcaaataatattaaatgaaaactttcttttttgggaacaatattaaataagaactttactttaagcagttgaggattgacgagtgtttgaatgcttgtagcaagcaaatatttaaggaagtagtaaaaaagattacaatgtttttttagcagaataccaacaatgcatgcagttggcaagaacagaacaaattgattaaaaaaaaaaaaaattgcccaaatacaatcccgggagctatagcaacaaggcaatctaacaacaacatgatgatgatgatgatgatgatgatgatgatggccanctccttttgttcttgctgcccagtaacaatgacaaatagaagaggaacctaaagaagaatccccaagccaccgtgatccagaagcagttccact

SEQ ID NO: 6834 - DNA, 374 bp, Glycine max
  Clone ID: jC-gmfl02220081h03a1
cattggaggagccttccctcgtttcgacccaatcaccaaatgtagcacccaagaccgctacaaccataccatagcctgggaccgcaatggcaccctccttgtcgcccggagcgcctatcgctactacttcctcgtcgtcctcgaagacggcagcgatttacgagccctacttataataaccttccgccccttcgtgtactacacgtacttttgactctccgaaaccctagccatcaaaaccctaatcatcataaccttggcggggcttaaactaaaagacgtcgagcacgtgtcccgctccgagctgacgaggttctactccgaggacgtgcacccgaccacgtggcgcgtgctcaactcgttcggagggaggc

SEQ ID NO: 6835 - DNA, 410 bp, Glycine max
  Clone ID: jC-gmfl02220081h03d1
cgaacaacggcgacaaatcgaacccctccgagagcgaaatgatgtgaaaagcattcatcgtagtaaaaacctcctgctcatgctgtttaatcttctcctccagatccaattcctctcttttctttcccatcaagttcttcggcacgggtttcttgaaccacgacgagtccatgatttttgaaattgtgattcgcgtgttcgggttggggtcgaggagcttggtgatgaccctccgcgcctcggaggagaaccacggcggacacttgaagtcaccgcggtaaatttttttgtacaaggccaccaggttgtcatcctggaagggtaaaaaaccagcaagaagtccgtagaggattacgccacaagaccaaatatcggccttggcgccgtcgtagcctcttttcccaatcacc

SEQ ID NO: 6836 - DNA, 562 bp, Glycine max
  Clone ID: jC-gmfl02220081h04a1
gactagtgttattctccggtggctccttccttccttcgccatggcgttctacgtgctctcgcgtcgtttatcagctggatccaactcaacgacgctcctcgccctgcgttttgcttcctcttccagatccttctcctcttccttcagggaagaaagagatacctttggacccattcaagttccctccgacaaattatggggagcacaaactcaaagatcgttgcagaacttcgacatcggtgggccccgcgaacgcatgcccgaacccatcattcgcgcttttggcgtcttgaagaaatgcgctgctaaggtgaacatggagtatggtcttgatcccatcgtgggagaagcaataatgcaagcggcacaagacgtagccgagggaaaactaaacgaacattttcctctcgttgtatggcaaactggcagtggcactcaaagtaacatgaatgctaacgaggttattgcaaaccgagcagcagagattcttggccataagcgcggtgggaagttcgtgcacccaaatgaccatgtcaatagatcgcagtcttctaatgataca

SEQ ID NO: 6837 - DNA, 126 bp, Glycine max
  Clone ID: jC-gmfl02220081h05a1
aatcaaagcaagcttctgcatgtttattatgccaggtatcaacaagtcattgggagacaagatggctatctctggagaaggccctgatgaaatcctaggagggtttctatgtttgcacaaggcacc

SEQ ID NO: 6838 - DNA, 60 bp, Glycine max
  Clone ID: jC-gmfl02220081h05d1
aaaaacgatggaacaatcccccagctttttgaattgaaggatctgggaacagaaaaatcc

SEQ ID NO: 6839 - DNA, 605 bp, Glycine max
  unsure (1)..(605): unsure at all n locations
  Clone ID: jC-gmfl02220081h06a1
ctccagcatacccttttggccggagatgagtaatagtaattgggtgttggattatgattatctagacaacattcctctcaccacccttgaaccacccaatttctcttggtcttcctcctctcctcctactacactcagtgtggagctagatgactcatttggaatgttggatggtctcaaggaaaacaggtcaagacaacgtttgaggccatctgattctaaagcatgtagagagaaaatgcgaagggatcgacttaatgacaggtttatggaactggggtctatcttggaccctagaaagcctctcaaaatggacaaggctgttatattaagtgatgcagttcgagttgtttctcacttacgagaggaagctcaaaagctgagggagtccactgagaatctacaagagaaaatcaatgcattgaaggatgagaaaaatgagcttcgcgatgagaagcagcgactaanagtagagaaagaaaaccttgagcagaaggttaaatgcttgagttcacaacctagctcttctgctgcaacaaagacaagttgttagcagcaagctggtgccattcatgggctacccaagagttggcatgtggcagttt

SEQ ID NO: 6840 - DNA, 165 bp, Glycine max
  Clone ID: jC-gmfl02220081h06d1
aacaatccatatcacacgtggatttgtattagagctgaagagggtcctctattgcaaagatacctcaggggccttgtattgtcctgactaacattatgttcatcttgcccgcaaagaaggctttgaacctctaactactattgctaactcttgaacgtaacataa

SEQ ID NO: 6841 - DNA, 531 bp, Glycine max
  Clone ID: jC-gmfl02220081h07a1
ccgcgatatcccatcacgcagcagcctagtcaatagtcaaaccccactctcatctctgcaaccaaaaaataaagcgaggccgaaaaccatttgaacccaatttatttatttatttaaaaaagagaaaaacccactctctggactacccactggaataacgacatctccgctcgaaatcacggttcttcgattcgactcagctatggcgagcttgactcggagatcactgtctcaactcggaactatattatcgatgaagaaaattccgggtttggatccacctttcttttcagctattacttgctcctagtgttgcttcagccatctctcgccgttgatttcgtccaaatcccctagatctgagccgttagggggcaatcaacggcgtttgtcatgtcaattggtatatagaaaaaggttcaaggcttggtgcagaaatggatgctcatattatcttgcttggtatttgtgattgaggctggtgaaaatgataaaacaatggagcccccttctttatatgattctggatca

SEQ ID NO: 6842 - DNA, 177 bp, Glycine max
  Clone ID: jC-gmfl02220081h07d1
ggggattggactggctttgccattatcatttcctttaaataatgccacgttgggcttatctgaaatagaataatatgggccacccaacattcttgtaaatagaggctaacacgttacatgttgcactaaactcaagagtcaaactgaattggccacaataaattgcatctgcctagg

SEQ ID NO: 6843 - DNA, 557 bp, Glycine max
  Clone ID: jC-gmfl02220081h08a1
gggtaccactaccacctttccgccttcagccgtttcaaccaccagcaaatggctgggcttcgtggcggccgtgtggattcaatgcatctccggcaacaactacactttctcaaactactccgacgccctcaaatccctcatgcaccttactcagctacaactcaacaacctctccgtcgctaaagacgttggcaaagcctttgggcttctcgcgggcctggcctccgaccgcttacccacttgggccattctactcataggctccgtcgaaggcctaattggctacggaacccaatggctcgttgttagccaaagaattcaacccctcccctactggcagatgtgtgtgtttctgtgcatgggagggaacagcacgacgtggatgaacactgccgttttggtaacatccattcggaacttccgttcaaacagaggacccgtttcggtgattctgaaaggctttgtagggttgagcactgcgatattcactactctctgttccgctctcttcgccgacgatcctggctccttactcatcatgctctctgtcattccct

SEQ ID NO: 6844 - DNA, 504 bp, Glycine max
  Clone ID: jC-gmfl02220081h08d1
ctctctctctccaaaatctaatctttctcatctgggtcactgaattaattccccttttcaacttgctgagcggttgcttagcgtgatgatggctgttttctgtcacaacaatgagtgctctgaataggactattatttccttcaacaaaacttcatccttcaatcatcgaaggactctcggcattgcaagtcccagagtgattcataacaaccgcttcggatgtgtctctctgaggcttcaggttcttgtcatctttgtctctgtggtttccttctttttagccataggtggctacatgtacgtgcttccaagccttagccacgcgtttttcaatggccaagctcccttgttattatctgaacataacagcaacggatcagtgagagaatgtgatgtatttgatggaagctgggtgcaggttaaaaaagatcacaccttgtacaatgccacagagtgtccttttgtggaacgaggattctattgtttagggaatgggaggagtg

SEQ ID NO: 6845 - DNA, 295 bp, Glycine max
  Clone ID: jC-gmfl02220081h09a1
gcactatcacactggacatgttgtttagccgatgcgacgtgcgcattatgcatttctcgggctgttgaagttcttgaattttcttcgcactcacatcacctttgctgccgcgctagattgtaggacaggccagcaggcttggacaggagacagaagatctcgcttctgtgtctggatggctggaatggtgaacattggttgcaatcaccaaccacggattggtcgatacgtgcgctgcaagatactcacttggcgactcggaatcaacgattgccagttatgataactccatgga

SEQ ID NO: 6846 - DNA, 471 bp, Glycine max
  Clone ID: jC-gmfl02220081h09d1
cggaaggcactacactggaataacatcccgacctacatgctcctattccggaggctcggccttttgtttttgtttttcttaccctcttttttcgaatctgaatcgaaatggcttaggagactgagacgtctgctttttaggccgtgatcaaccagctcctcagtctaatcatcaacaccttctacagcatcaaggagatctttcttcgagagctcatcagcaatgcctgctgatgactttggacaagattcgatttgagagtcttacagacaagagcacgcttgatgctcagccagagttgatcattcacattattcctgacaagaccaacatctcattgtctatcattgacagtggtattggcatgactaaaggcgatttggtgaataacctcggtactattgcaaggtctgcgaccaacgaattcatggaagccctgtctgctggtgctgttgagagcatgattggaca

SEQ ID NO: 6847 - DNA, 461 bp, Glycine max
  Clone ID: jC-gmfl02220081h10d1
gaagtaacgaaaagaaaacaaaaaatgtcactttgttaaatgataaaccagaactataaaaaagacaatacaaccgcccaatcaagaagaactcatacatctctcatctcaacgaagaggcatacatgcaatcagaaaactctgataaaaatttctctaacactgtacacgtgagggccaaaaaataaaaacgactataaaagagatgttgagctatttttccatggataagatgatcttcgccccgtgagttggggtgtgaagctaaggccaaacatctccttgagggccttgcctctttcccaaaacctcactaacttggcaactattgtagcactttgcattacgaggttcatatcattttcgctccataaacggttccctagttgcaccctcctgcgctttgaatccaatgcaatgccccactcctcgtatagccttcttcgctccttctccgaaag

SEQ ID NO: 6848 - DNA, 480 bp, Glycine max
  Clone ID: jC-gmfl02220081h11a1
aggcaggtgaggtgaattgaggttactgcaatgtcttctgcttgcgcgaccttgaaatccaatacccatttaccaaactctgagaagggctctctaggagaaagaataatgaggtggtcttcaaacaacagtagcccttggtaaatgaatcacctcgtctattcgttctacaagccacaagagggtgaaacatggggccggtgttgcatctgctgtcctcacttcaaacaatgccaaagaatcactgaccttgccagtgcctttctttttaagaagaagggctgatccaaagaatgttatttccatcatattgggaggaggacctgggacacatctttttcctgtcaccagacgtgctgccacacctgctgttgctgtggggggatgctcccggcttatagacattcctatgagcaactgactgaacagtggcatcaacaaaatatttgtgctgacacagttcaactctgcatccctcaa

SEQ ID NO: 6849 - DNA, 465 bp, Glycine max
  Clone ID: jC-gmfl02220081h11d1
atacaaagtttacagttaatatttttgtgtaaaagctaacttgggatgtattgttttacctagtccacagtcaagtgtaacaatattccgtaatccagtataagcctttattattttttgttctatgggaaagtagcacattactggggctccacagcctgcacatttgtgtaagaataagagtagctttcagtgttggggttgccctctctgaacttcgtacaggaaaccctccacgttttaagcaaactttgcctctcaggttcaacactcctcttagcaggcatgattgttaagaagacaggaaccattgctgcaaccagatgcttaagtgtgtgaccactgacaatatgtcgcgtccattcggagatcacatcatcagtagcctctagcaccttagctagaagataagaccctgctgcccagagccaatatgttgaatgtgagtacattggacgcaacaaa

SEQ ID NO: 6850 - DNA, 411 bp, Glycine max
  Clone ID: jC-gmfl02220081h12a1
atacggacaaaatctctaacgattttttttccttactttaaaataattgatctattgcgataaaccgagtagaggaataatggtgtagtagtagtggagagaaatcgcgatctggaacagagtttacctgaaagaaaaaagaatcgagttgaaatgggtttctttggtaccattttggggtctttgggatttggggttgggatttcgattggtctctgaggctggctactttctcttcatctacttccaacccaccaatgttgacgatcctgagaccaagccattggcggagcaagagcaagagactctgcaacgaatgtatcccgagattgctctttggataaaacatcccgattttgatcggcttgactggctgaacaagtttgtagattatatgtgggcgtattttga

SEQ ID NO: 6851 - DNA, 417 bp, Glycine max
  Clone ID: jC-gmfl02220081h12d1
gacaaacaacgaagcttagcttttatagatcattgcaaaagccaaatacgaaagattagtaactcctatacattattcaactgaaacaatttaacccaaatccaagctagcctgggaaattctaatgtattatggacatctatatattattggggctcaacttcgccgcccttgagcaaggaagcttattccttttacacagtatggtgtgtatttatataaaagaaaacatggatcactacctaaagattgaattaattgtttttgcgtgcagaactttcttttgtcaacattgaatgctagcttccatcgtacactctttggatccggatcttatgtagtgagccatctgtcgatttggcaagttcgtacaggactttccattcaaccaggccatcaatccttactttgaaaatt

SEQ ID NO: 6852 - DNA, 341 bp, Glycine max
  Clone ID: jC-gmfl02220082a01a1
cccaacccaatgttcaccttcgcccacaacaaattccattcctggatctcctccttcagcatcgctgctaactttactttccattcatgtgacttcctccccgagaaaaaaatggcgaacgcagcatatagcctggccgggcatgatgactgcaagctaaagtttgttggagctcaacgcgaagaggacgtaccggcttatctgctttaagattgaggagaagcagaaccgcgtcattgtggagaaactgggcgagcctgcagatggttatgatgatttcgctgccagtatttctgccgacgagtgtcgatgtgctgttcatgattctgattacagtcact

SEQ ID NO: 6853 - DNA, 132 bp, Glycine max
  Clone ID: jC-gmfl02220082a01d1
acattatattttttatattttaattgtcaggaacagaggaaaacataacattcgaagggataagcaagccactaaggacaggaacgaaaactgcgctttaactgtggaagtcagaggtacggcagatgtact

SEQ ID NO: 6854 - DNA, 341 bp, Glycine max
  Clone ID: jC-gmfl02220082a02a1
cccaacccaatgttcaccatctcctacgtcaaattcgattcctggatctcctgattgaggatgagaagatacctttactttacattcatgagctttctgccatagagaaaaatgggaagagctgaatagaggcctggctctggcatgatgactgatagctaaagtttgtgtggctcaacgcgaaggggacgtaccgacttatattctttattatagaagagaagcagaaccgtttcattgtctagaaactaggctagcctgcagatgattatcatgatttctctgcaagtatttctgacgacgagtgtaaagctgctgttcatgattctgagtaattgact

SEQ ID NO: 6855 - DNA, 275 bp, Glycine max
  Clone ID: jC-gmfl02220082a02d1
tgattaagacgtgggctactgcgtccgcaattacaggaacagaggtcccggagctacctgctcagctcggcggcggccgccctttttttttttttttttttttttcaaagaacacattagacgggacgtgacaggattgcgcgattaagctatccgaagtttagcaggactcccttaataaacggatacagaagattcttcgatgtggtgaggttcagagagatctctgctggaggtcctcaataaaaagcacatccgagagagtcatatgaatc

SEQ ID NO: 6856 - DNA, 427 bp, Glycine max
  Clone ID: jC-gmfl02220082a03a1
tgagaaacgaggagctagatcagttacgtggcattgggcaaggtgaactcctgagctgtgagagaatatacgattacgatgcgtacaatgatcttggagatcctgatagcggcgacaacctcaagagacccgttcttggtggcaatcaacatccatacccaaggcgttgcataacaggaaggcctcgttgcgacaaagatccattatcggagaaaagaagtagtacggtttacgttcctagagacgaaggcttgtcggaagatcatcaactaacgttctcgacaaatactttatatgatgggttgaaagctgctcgtgccggcgctgaagacattgatagttgacaagaatctagggtctactgtgtgctcagccatatgatgacctgttccatgaaggcctttactcgcctgctgtaaaaggcatc

SEQ ID NO: 6857 - DNA, 367 bp, Glycine max
  Clone ID: jC-gmfl02220082a03d1
gccaataagtcactattcatatgaggtatcgatcattcattaacaagtgacatgtgtgttaaacaatacaccttaatgctagcagccaggctagcgccgatccactgtcatgcacaccacacactcaaaccgagatgctgtacggaacccccttatctgggcaccctgctccgatgaaggcttgaagaagtcatagggcacaataccgggaccgatccagctcctactggccctatccgaattcctggcgtcaataatgactatgcgctcaatgaactaccctctaaactcgtcaaacgcggacttaacaaggggtttctgctggcacgccgggtacacagtcctcctgagatacttctggtccggc

SEQ ID NO: 6858 - DNA, 250 bp, Glycine max
  Clone ID: jC-gmfl02220082a04a1
ggaaaaggcatggtgctctgctcctctgtctaattctctctgatgatttgcttccgggtactgggactggtgcaagggctgtttccagattccctgtcccaaaccacgatgttgacacattccacataaccctcttggcttcctctattctgtattgaaaagggttcttctgcttacagggcggagagagcagctagtgttcatgggataggaccaagcactatgggacacctactctatacaccatact

SEQ ID NO: 6859 - DNA, 127 bp, Glycine max
  Clone ID: jC-gmfl02220082a04d1
aaatgatatttgattttattaatttgaggaacagaggaaaagataacgtacaacgcaagagatatacgaggaaatatacggatagaaacaggaaactcactgtacatgtcaaaggaacgctaaattg

SEQ ID NO: 6860 - DNA, 299 bp, Glycine max
  Clone ID: jC-gmfl02220082a05a1
ggaaaacccatagtgctcctctcctctgtctaattctctctcttgatctccttttgggtactgggactgatgcaagagctgctcccagacaccctttcccaccccactatgtttccacatttaacagtaccctttttgcttctcctattctgtgatgaattgggtcttctgcttacacaggcagaatgagcacccagtgttcatggcataggtccaagcatatgggacacctactctaaacaacatactgcacaagattggggatcatcgacccggttacatgagaactgatctttatc

SEQ ID NO: 6861 - DNA, 222 bp, Glycine max
  Clone ID: jC-gmfl02220082a05d1
cctcaatgcttctaagtttgatgtccggtctaacgacacaagcgcccaagcctggcggtattaggcaacgtacaacgcctccatgcagcatgacggtcttgaacatgaaagagggaaggctgcagactatggactgggacacagtgatcacagcttgtctaccgcatacagacgagctgattataacgtactacagggctgagagaattaggcagaatatgg

SEQ ID NO: 6862 - DNA, 347 bp, Glycine max
  Clone ID: jC-gmfl02220082a06a1
ggtgggctttacgtatacccataaaccttggttaagaaccgtgaactcagggggatccacatgaggtgggccatgctcggcgccttgcactgcgtactcacgcagctgctgtgccgcaacgaagagaagcttggagaagccgtgtagtttaaggacggttccctgatcttcatcgagggcggactgcgctactagtgcatcccgagccggatccacgcccagagcatcctcggcatctgggccacacaagatatcctaatgggttccgttcaaggtcaccgcatcgctggtggccccctcggagagggcactgacccaatctagccaagtggaagcttcgacccatt

SEQ ID NO: 6863 - DNA, 544 bp, Glycine max
  Clone ID: jC-gmfl02220082a06d1
ttcgtttttttttttgtaaaaagcaagtaacattaagttggattcggatacacaagataattcacattatctgaagtacttcaccaaacacaaatctaaaaactctcaaaagtcatttcgttctttgacgctcactttccggggacgaagttggtggcataggcccaggcgttgttgttgacagggtcagcaaggtgatcggcgaggttctccaatggaccctttccggtgacaatggcctgaacaaagaagccaaacatagagaacatggccaatcgtccgttcttgagttccttcaccttaagctcagcaaaagcctctgggtcatcagcaaggcccaatgggtcgaagctgccacctgggtagattgggtcagtgacctcaccgagggggccaccagcaatacggtaaccttcaacggcacccattaggataacttgtgtggcccagatggcgaggatgctctgggcgtggatcaggcttgggttgcccaagtagtcgagcccaccctcgctgaagatctgggacccggccttgaaccaca

SEQ ID NO: 6864 - DNA, 125 bp, Glycine max
  Clone ID: jC-gmfl02220082a07a1
cgaaaatgcatagttctccgataaaacgactaataatatctcaagatctgcgggggggaacagacactgaccaacctccacctaccagccccacttgcccacccaactatgtggacacataaaac

SEQ ID NO: 6865 - DNA, 528 bp, Glycine max
  Clone ID: jC-gmfl02220082a07d1
aataaagacagtgccacttattttcatttataatagaggcaaatataaggtatacatagatgagccagctagctaataagacataggcaactgaacacaacacatgatatccccacaaaggataaatcataagacgtacaaaagcacaaaggtaaggactattattaattcatggcccttaaaaaatactaaaaacaccaagggggcatgcaaatgatacatatgtaattattattaattaagcaagaatctccttcaaaggcttggcctcaagttttgccttctgatcaagttcttgcaaatgcttttcattctcaaggtcctgcaaatgcttttccttagccagcttcttcatccttgcaatctcaatgtccttgctcatcttcctcctgtacatttcagcaaaagtgattggttcctccatcacaggcttctctacttctcttatcttcagagggtaaacaagtgcatttggtgctgggttttgaaaagtggctatggacaaacggctatggtttgagttcacca

SEQ ID NO: 6866 - DNA, 515 bp, Glycine max
  Clone ID: jC-gmfl02220082a08a1
caaattgagtgatcgtgatggcaccaaaggcagagaagaagccagcggagaagaagcccgcggaggagaagaagtcgacggtgggagacaaggctccggcggagaagaagccaaaggccggaaagaagcttccgaaggagggaggcgccggcggagaagggaagaagaagaagagaaacaagaagagcgtggagacatacaagatctacatcttcaaggttctgaagcaggtccaccctgacattggtatctcaagcaaggccatgggaatcatgaacagcttcatcaacgacatcttcgagaagcttgcccaggaatcttctagacttgcccgttacaacatgaagcccaccatcacttcaagggaaattcagaccgcggtcaggcttgtgctgcccggtgaattggccaagcacgccgtctctgagggtaccaaggctgtcaccaagttcactagctcttgaactgactattatgccccttcgcttcgatctaagtgtctctggtaggaatat

SEQ ID NO: 6867 - DNA, 486 bp, Glycine max
  Clone ID: jC-gmfl02220082a08d1
gataggaataatatacgtctctgtattagcaactaattccatacaaagaaggatcaacaaatcccatattcttcacttacaaattgctttcaccaaaaagaaaaaataaaccaacacttcaacataaaacatattcctaacagagacacctagatcgaagcgaaggggcataatagtcagttcaagagctagtgaacttggtgacagccttggtaccctcagagacggcgtgcttggccaattcaccgggcagcacaagcctgaccgcggtctgaatttcccttgaagtgatggtgggcttcttgttgtaacgggcaagtctagaagattcctgggcatgcttctcgaagatgccgctgatgaagctgttcatgattcccatggccttgcttgagataccaatgtcagggtggacctgcttcagaaccttgaagatgtagatcttgtatgtctccacgctcttcctgattctcttcatcttcttcc

SEQ ID NO: 6868 - DNA, 436 bp, Glycine max
  Clone ID: jC-gmfl02220082a09a1
caccacttcttccacctgatatatgaaaggcggtttatgtagctgtaatgcaacgggcgagcaaatctaacagatcgggttatgaatcccttttgaaagtatataaggaagctgacctaagtcaggagaaaacgcgtatcctgggctctctggcatcttcacgtgatccagatctaatgcttgaagctctaaacttcatgtggtcatctgaggatcgtaggcaggatgctggtgttggacttgctgttacccgggaaggacgagatgttgcttgggcatggcttaaggaaaattgggaacacctcataaaaacatatggttcatgatttttgataacttggtttgtctgtgcagatgtgtcaccgtttgcttgctttgagaaggccatggaggtagaggaattctttgctacccacgctatgccatccattgctag

SEQ ID NO: 6869 - DNA, 408 bp, Glycine max
  Clone ID: jC-gmfl02220082a09d1
gaatgcttcagtttcataagggtctaccaaagataagaaaatacgtactgaaatgtgacaagtacttaatgaaccagagacattcatgtcattttcttatattgacattgtaccatacatgcactctggtatgcgagaggatgatccctgaactctcatttgggttgcatcgtctgatgcggacgagacttatgtccggaaatatccaggagcgagggtatatgggtaagactcataccaaattctgccctagccacgctacttttggcgacctctggcaaatcgctgtagaccagaacggaattaacactgactgccaattcctacatagcatcaccagaggctatgatcaatctgaacactctgaacccagtttgcattgagcttgaccagctcaaggctctgact

SEQ ID NO: 6870 - DNA, 194 bp, Glycine max
  Clone ID: jC-gmfl02220082a10a1
ctaaaacatgtgcaaaggatgcttgttttgctattacagcagctgacctgaagaccgtgaccatggacatggtcacgggcctgttactgttcacgggcttaacgggcgcatctgccctagacatgtagataatgtcgtacgacagcgctcactccgcctcgacgggcaacgactaggagctgaagtccatgtac

SEQ ID NO: 6871 - DNA, 272 bp, Glycine max
  Clone ID: jC-gmfl02220082a10d1
aataattcatattcatacaatgctaaaaatgattcccccatggggactcgaaaaggacttccgctacagagcattaaaactataaccccatgtccacggcccccatctgcctgagacaaggccccgaatagctcacaacgtgataacagtcacttggctcaatgaaacatgtgataaagtgaaggggctgcgtgcctgaatgtgtataaatactgcggaactaggccatatcataagagggtctttgctagccgatcacatttcctttaacc

SEQ ID NO: 6872 - DNA, 441 bp, Glycine max
  Clone ID: jC-gmfl02220082a11a1
tttatttattgtttttgtctagtacatgtttcgatcttctcactataatgctaatgtgttcttcacctctccaaaacttgtagctgacgatcttattactcagcaaaaattcatggaagttccaatcaagtctccggcaaaactcacccttagggtggctcttacttgtatcatggcggccaccgacggagcgatttgtggctatgaccatggcgatgcaggtggagtgacctgcatggattgcttcctgcagaagctcttcccatctgtatatgaataggagtctcgcgtgaagccttcttcaaaccagtactgcatattcaacagtcagatactgacactgcttacatcttccctttatctaagtgctcttgctgccattcttggggcatgcagcataacccgaatgttgagaacacgtgcaaccatgatcatggctgg

SEQ ID NO: 6873 - DNA, 543 bp, Glycine max
  Clone ID: jC-gmfl02220082a11d1
aatcaagttgataatcaattgttaaaggtctttgcagtatacaaagtgaagatttcatcttaaaatgttatgtacattagagtatcataaagaaagctaggccaataaattcaagttgttaaagcagacgtggataaatcaaagactgaaaccaacacaactagtaatcaacatttggagttcattttgtcgttttggatggggttgtccgactccaaaaatttgccccagatggggtgtttctgccaaaccatactcatttcctcaagtgggatgccctttgtctcaggcaataacttgtagatgaataaggtcatgatcaccacaaagcacccaaagaagatgaacaaaccaaacttcatgtgacagagcattgatgtgaagaattgagctatgaagaaagtgctgatcatgttgacaccaactgtgatactctgagcagcaggtctaatctcaaggggaaagatttcactaggtatcaaccagcctagaggaccccatgaccaagcaaaacctgaaacatacacacagatgatccccaca

SEQ ID NO: 6874 - DNA, 154 bp, Glycine max
  Clone ID: jC-gmfl02220082a12a1
attatattcaggaacagaagaaaagataacggtcaacgaagcaagaaaaccaggatagacactgaaggaaactggacactcacaatgcaagtcgaacgcacgacaaatggacagacgtcgacaagaccgtaggcaagagccaaagaccgactcg

SEQ ID NO: 6875 - DNA, 416 bp, Glycine max
  Clone ID: jC-gmfl02220082a12d1
acagaaaagaatcattttattgattattactgtatttccatttttgtaaaattacttactgaatcgggcacagatttcactgccatcttattacataaaaccttctcatcccaccaacacaacctcctaactgaatctaaattgcactatatattgatttcactagacttgagaaacttttgttctcaagtccaagacccaaatccacaagaagaaaaatcgagaaggagaaagaaaaaaagaccatcacaaaaacgtgggaaaaccaaatccatagcagctgctgctattaacccatttcaagtaacctggccttcatattccgttgactttttacatctttggaatttcctgtgcagggttttcgttcataactagtcttgctagcatccagataagagctcttcattgacaag

SEQ ID NO: 6876 - DNA, 536 bp, Glycine max
  unsure (1)..(536): unsure at all n locations
  Clone ID: jC-gmfl02220082b01a1
cacgattccacgaccttattttggagccgcggtggcggtagcggtggccggcgattgtagcggcgtaggagcaagaaatggttttatgttgtgaggaagattgttaagctgtgggaatatgtcattgagaagcatagtccgtgaactcaaggagatgagagatggaataggaagcacatcaaagcggggtgcagaaagcaagcatcggctcagtcggacaaagtcacatgtagctccagatgttcttgcaactccatttgaacctattcaacagggacaatgggcaaatctaccatcagaattgcttttggacataatccagagggtcgaagagagtgagacatcttggcctgcccgtgctgttgttgtcttttgtgcttcagtatgtaaatcatggaggtccattacaagagagattgtcaagactcctgaacaatgtggaaggatcacatttcccatttcattgaagcagcccggtccgcgtgattctccaatacagtgctttatcaggagggacaaagaanactctacatatc

SEQ ID NO: 6877 - DNA, 474 bp, Glycine max
  Clone ID: jC-gmfl02220082b01d1
acaggaggacaaatagatagacagatggaaaaagagattagagagccagtctattaggagagggatacagcaatttgacagtggaagataagagcagggcaaatcgactgaagaggtcgtaaacgtagccaaaggcagatacattggagtgaggcttcacctgtgagccacaggcctgtttacaggcaaagctgctcaagcagatggcgtaggcttgaaacgttgagagtggataacagtaagccatggtgaatatgtcttttccaatctttccaaactgcgagatgaccttcactggctcctcggcagagatattatgagatggatcagcagctggtacaagttgaaagttcttaacagaagccactgaaacgcgacccttgaagttcagacaccagcactgtagctgatcatgccatctgggagccttgttattcagagctaattgctcggttgagccttgggtcaatactg

SEQ ID NO: 6878 - DNA, 449 bp, Glycine max
  Clone ID: jC-gmfl02220082b02a1
ctcaaactcactgacagtttattatctatgggggttgctaggttaattaatacaaatcagggggatgcgatgttggctatgccagctaatgctgttcacaagctatggaaatggcagagaaatgagcggaacactactgggaaggccactgcaagtattcaaccacaactatggcaaccatctagtggaatactgatgactaatgatataagtgatactaacccagaggatgctgcgtcatgttttgcactgtcaaagaatgactcatatgttatgtctgcttcaggggggaaaacttctctattcaatatgatgacatttaagacaatgacaactttcatgccaccttcaccagctgcgacattacttgcatttcatcctcaagacaataatattattgctattggcatggaggactcttccatacaaatctataatgctagagtgga

SEQ ID NO: 6879 - DNA, 211 bp, Glycine max
  Clone ID: jC-gmfl02220082b02d1
attattatcaggaacagaggaaaatataacattcaacacaagaactgaaccacaatataaaaggttctactcggcacttcacctctgcatgtacatagaactggctgctgatgatccagctggcacagccactgctatctattcatcatccacagactcagaacatgatggactaaaccttgagggccagggaaacagaaccggacaacct

SEQ ID NO: 6880 - DNA, 250 bp, Glycine max
  Clone ID: jC-gmfl02220082b03a1
ctcaaattcaatcttcccacatacactgtatgcgtctttgaccacatctgcttcttcaatgtggaagctttgtggacaccctctatagctcttcctccctaggtgacgaatgtgtcaaagggcacatatatctatagagttcccattgtctgtgaaggaaagcttcgaccttaggagtgttttggagagtaacatgttttcttttgatgatgactaagcgtagaggatggttgctttgtgaaacagagaa

SEQ ID NO: 6881 - DNA, 222 bp, Glycine max
  Clone ID: jC-gmfl02220082b03d1
attaatagccggaattggggaaaaaataatgtgcaactaaggatagctaccaggatagaaatttaacaaggcagaactctaaccgtgcatgtcataagagagatctgtaaaggtaattcaaggaaaacgtcacatatgagagtcagttgaaacctaacgaactgattgagagacatgccaataggcgtcagtaggatgaggtggaaagtcaaagcaccaact

SEQ ID NO: 6882 - DNA, 180 bp, Glycine max
  Clone ID: jC-gmfl02220082b04a1
gaatatcctgtctactacgtattcaaagctatgtgcacgcagtgcagcgcgtctcgtaagtctcggatttgcgctcgagcgataatgctcttttcccgtttctgttttaaagcaattatttcttaattggaagaggatgcgtaacgataacgttcacatgattcatagtctcatgggccg

SEQ ID NO: 6883 - DNA, 259 bp, Glycine max
  Clone ID: jC-gmfl02220082b04d1
caaataaaatgtggacatataattaaccggagcagcgcatcgcatcacagtcctgaaactagctgtgctaaacaataaagtagatcaagggtgccgacaaactctacacgttaaaacacagctaaatttaagcaattctgccaccgactattaagaacccagtactgggaacatcaggcgcgagatgacggcgaagacttcaaactcttgtcgaaagacatgctacctatgagcgaagacactagagtacagaaatgaa

SEQ ID NO: 6884 - DNA, 134 bp, Glycine max
  Clone ID: jC-gmfl02220082b05a1
ggatcaggcttgcttctctgatctcgggtctaactatctttcattattttctacctggtacagggaccggactaagcactgtgtccagctttaatatccaatacgacgaagatgacacattccacataacccac

SEQ ID NO: 6885 - DNA, 188 bp, Glycine max
  Clone ID: jC-gmfl02220082b05d1
ccccaattcttctatcctcgatctcagctctaactatacatgctgatctgctgcgaaggacagatcactgaacgtcgcctccgttcagcatgactaactagaacaacgaataagaccgatggcacactacggtctggttcactgtgatctctgcttgaggacctcagacacaagcacagcctataccg

SEQ ID NO: 6886 - DNA, 501 bp, Glycine max
  Clone ID: jC-gmfl02220082b06a1
gaaataactggtctgatatcagagctctgacttctcatgcacgctgccctcggccgggaactcggctcgcgcttatagcttcatcccaaaaagctcttttccttctaaatttgattccttagttcagcaggctattattatatatggcttcttcaccttcctgagaagacaaaaacctagagggagtagctggtggtgccggagagaaacccattccacttggtgagaacgttctgcagaagcatgctgcattcttggacttgaataaagatggtgtcatctacccatggtagacttgtaaagggttgcgtgaaatcgggactggggttttgctgtccgttggaggtgctattttcatcaatgtgtatctcagtcagagtactcgtgccggaaagtttccatctatacttatttcaattgaaattaaaaatatccaacgcggcaaacacggcagtgacactggagtctacgatactgaaggaaggtttgtaccttcaaaat

SEQ ID NO: 6887 - DNA, 616 bp, Glycine max
  Clone ID: jC-gmfl02220082b06d1
attataaaattgtattctttattttactgtatacgtgcttttcggatgaattcaaacatgatagatgacacataagtttgacttgacatatacattattgatgaacataaaaataaacagacactttgaatattgcgactaacttactagcatataaattcataaaaataaccaattttgctgagatcgacaagtaacttcttcttttcacatacgtgtctgaaaaatattactacttctctttgcctgaagagtgttgttttttcagttgttcaaataaacttccatcgtaaacacctcggattgtttctttctgcagtaatccactcttatctttagcaagtttgtaaagaattttccattcaaccacactaccaatccttcctgagaaatctttaggctctctatttgcctttatcatctccgttaactcatcatatgtcaaagcatttggatgtgtatgtgcatgcttgttaaaaatttcttcatattctgaaggtacaaaccttccttcagtatcgtagactccagtgtcactgccgtgttttgcgcgttggatatttttaatttcaattggaaaaagttagatggaaacttccgggacgagtacttgact

SEQ ID NO: 6888 - DNA, 232 bp, Glycine max
  Clone ID: jC-gmfl02220082b07a1
ggtgaattcttggttctccgatcatccttcgacccaattatttttctctgcgtgcagcaacggaaccaggtcactctgctccctctcagctcttctaaccagaaccactgctgtgacgcagcgcagagaagttccgagaatccgtgtgtttcaaggccaggtcccagatctttatcgagggcgggctcgactacttgggcaacccaagcttgacccacgcccagagcatcct

SEQ ID NO: 6889 - DNA, 343 bp, Glycine max
  Clone ID: jC-gmfl02220082b07d1
tgtctttcgtgcagtctgcgtaaccgtgtccggaattagttcccgggtctacctgctcactggccggctttcgttttttttttttttttttaaagtaaattcgttaataacatttccgaaaaattattagagaagtaaggattctgcctgattgcagtcaagattcacacagcggaaatgtttcccacgtattctttatggtggatcacgtcacacgtgcactcaaaccagggttctagtttaaagatggaaatgtaacacagtgagttgatttctgtgctacattactagaaaaataattgtgattgtacagcctcaattagcttaaaatgctcaagtctcc

SEQ ID NO: 6890 - DNA, 233 bp, Glycine max
  Clone ID: jC-gmfl02220082b08a1
ctaaaatgctttgttctctgatcatatgtcttattatatatcttgatctgctgccgggaactggaacagtactgagggcagcttcaagatccactatcccaaacaacgaagatgacacattacacacaaggctcttgagttcctctatccaagaaggataagcgtctactgttcaaacagcgtcaagcgcaatcagaactcagcgcataggaccaagcatacggtactcctac

SEQ ID NO: 6891 - DNA, 177 bp, Glycine max
  Clone ID: jC-gmfl02220082b08d1
aaattatatttgattttaatattatgagaaaaagaggaaaagaaaacatacaacgaaagagataaacgaggaaagaaaaagaaagaaacagggaaataacaatgcaagtaaaaagtacggtaaatgcacgtaagacgaaaaggtcctatagacaagcaaaagactgacaaattgagg

SEQ ID NO: 6892 - DNA, 288 bp, Glycine max
  Clone ID: jC-gmfl02220082b09a1
ctcaaattcttccacctgatatctaataggcttcgaacggacctgacctgcgacgggcgaccgaatctgtcacctcgactgaggaatccttgaccacaggatataacgatggtgacctatgtcacctgaggatgcttgtcctccgctctcaggcatatacaccttacacgcatgaagctcttaaagctatgcactggctgcctaaagaggagcgctagcatacatgacgcgtcgttcgcacactgtgcgaccaggaatcggcaaacctgtcctggctcatggattaat

SEQ ID NO: 6893 - DNA, 291 bp, Glycine max
  Clone ID: jC-gmfl02220082b09d1
aagagaataacaaagacaacaacatacgtaatggaaacttacaacaacttaagaaaaccaagacaataacgacatcaaaccaaaatgaaactgtacaaaacaagcgcacgaaaattcgacatgaccatacatgaacactcgctgagccaaacatctactatacgacacgaaaaattgacctgaaatatccaagaccgagggtatctccgtcaactcattccataatcgcacgacaccacactcatgtccactatctctggaagatcgctctagacagagcctattcaacat

SEQ ID NO: 6894 - DNA, 505 bp, Glycine max
  Clone ID: jC-gmfl02220082b10a1
accatttctcgcagaattccagttccagtttcaggttcagtttgttgatggctaaagttggtaagttgcggagcaaggctcgaggtcacagggcaagcccacatcttttgtcttgcggaagaaaaaatctgaaagatgttaatgttaggaagagctcttctaaagcattggagaagaaagattgggaagatgcaacctgctcagtctgtatggaggtcccccacaatgctatccttctcctttgttcatcttatgataagggttgtcgcccatacatgtgtgccactagtcatcgccattcaaactgttttgaacaatacaaaaagacatatacgaaagcaacttctgttcaaagcttgcagctagaagcaaacaattccaatattgatttaagcacaggtgaacctaaagacgatactgaagttcctgagcttctttgccccctttgtcgcccgcaggtcgaaggttggacagtggttgaagtggcacggaagtgtctgaatgc

SEQ ID NO: 6895 - DNA, 519 bp, Glycine max
  Clone ID: jC-gmfl02220082b10d1
cctaacactatcaaatagtagtatgatttattattcagtaattcaacctgtacatacagaaagtaaatcatacattggaagaataacgcaacagttcaaaatgaaattatatgggacgtcttcttgttgaccctaaatgccacctgtgttcaattcaccactttgcatgaccgcataataactaatccaacctatgggatctaacaatcataatgaactgcatctcctagacctagaaatcagacgcaatgagcactctaaaattgccttttgtacagtctatttaatttttttttataaaaacagggaaagtcacggtggtaccatatcaatctataaatgagatgaactgctataatctgccaaataaattataaaatgctctggcatagcaacaaaaccagccatgccaagatcactgacatactatttgcagaagaacagctctttccccacatttctggagttcatatttgaatttaccttgttgcatttgctatcctatgcctccgtcgtctt

SEQ ID NO: 6896 - DNA, 203 bp, Glycine max
  Clone ID: jC-gmfl02220082b11a1
atataccgaaaccacggccaatgaatcagccaacagtgtcacaaacccagactgatttaacattggaagaacgcttgaaccttgctagtgcactgtaagcacaatgcctaggtcgcatcatgctgttcagcttaccaagaaaaccatgggctcaaatgttatactgagacagttcactggggtcaatctgctgcatacaggaa

SEQ ID NO: 6897 - DNA, 398 bp, Glycine max
  Clone ID: jC-gmfl02220082b11d1
ggttaaactttcaccttgaatattaaatcaagactgaacacacgcattccttgatagaaactgatgagttatctcatcccataattgggagagggattctccctcaaaataggggaacctagtactagctaggagagaaaacttcagtcaagtgcacgttatcgaaactattgcccctttagggcattaacacggatactgagctgtaacaaacaatccataatagctatctctgtgataaaatctgattctgaattaaacggggaatattaatgttaacttgcaccaacgtgcaatgtatgccgaaggcaatgcaacacctttacagcaaaggccacgtcactacagctactgaaatctggtataggaatggctatccgccttgatgtctccaagac

SEQ ID NO: 6898 - DNA, 471 bp, Glycine max
  Clone ID: jC-gmfl02220082b12a1
aactataatgctaatgcgtggttaacctctccaaaacttgtagctgaggatcttattactcagccaaaattcatggaagttccaatcaagtatccggcataactcacccttagggtggttcttacttgtatcatggcggccaccggtgggttgattactggctatgaccatgcagtttcaggtggagcgacctccatggactgcttcctgaagaagcacttcccatctgtatatgaaaaggaggctaccgtgaagccttcttcaaaccagtactgcaaattcaacagtcagatactgacactgcttacatcttcccttgatctaagtgctcttgctgcggatcttggggcatccagcataacccgaacgccgggaagacgtgcaactatgattatggctggaatattctgtgaggcaggtgcattactccatggattagctgtaagcatctggactgctattgctggcagg

SEQ ID NO: 6899 - DNA, 187 bp, Glycine max
  Clone ID: jC-gmfl02220082c01a1
ggacacgcctaccttgacagcgaaacctgaaacctgttctgggtgctgtgctgtgggatggatgcaatatacattgaccaagctaggcatagtgatctatactgtcatgcaattattgcccaccagcatggtgatactcgtagctgcttagtgatattaggtcatttaccacttcttgagtgcgggt

SEQ ID NO: 6900 - DNA, 306 bp, Glycine max
  Clone ID: jC-gmfl02220082c01d1
aggtacagatgatcagaagacgtcaaacacacagcaaatgtccatgctataaaaggatagataatgcaaggtcactctgcatgcaaggactactggagatgcatgcagcgggacagtagccgggacaaggacaaaatcctagacctgcaaggttacccagaggacccatgccgcaggcgcttgcacgaggctgtattctagacatgtatagcctgctctatcaaaagggcttgaggtacgtcaatggatgctaagcagaagccaaaggatcttgctatagggccataggaccgaaccagccatcgg

SEQ ID NO: 6901 - DNA, 142 bp, Glycine max
  Clone ID: jC-gmfl02220082c02a1
ctaaaattctttcttatctgatcaagtgtctaattctattatctgattttcttccgggggctggagatggtgtgaaagctgtgttcagctattctatccaaaacaactcagtgtacacatgtcacataacccacttggtttc

SEQ ID NO: 6902 - DNA, 154 bp, Glycine max
  Clone ID: jC-gmfl02220082c02d1
attatcaggaacagaggaaaagataacgttcaacggaagaagcaaaccacaatggacagggtcaaaaactgcgctgtagcactgggggtaagatgacagccaaacacaggggaatatgtaacgaaccacactatacactggaacaggaaaagct

SEQ ID NO: 6903 - DNA, 225 bp, Glycine max
  Clone ID: jC-gmfl02220082c03a1
gctagagccaaaattctctgatcacatgtctattgataagtgctgatctgctaccggggacagggacacgagcaaaagcacctacaagatacactatccaagacaacgaagacgatcatgtccacaaaacgcactagagctccggtattccagaaagagaagggtcgactgtttacctggctaagagcgacaacggagcacatggtatacgaccaagaatatggg

SEQ ID NO: 6904 - DNA, 199 bp, Glycine max
  Clone ID: jC-gmfl02220082c03d1
ccgcacctttttttttttttttttttttttcaaacaaaaatcgctgatatgcacccaaggacggggacacgaacctacgcccactgcagccggactccattgacagacgcagaggacacattgcacactacggacttgatctcagagatctctgcagctcggctctaaacaccaccaccgctgagacgagtcagcgaca

SEQ ID NO: 6905 - DNA, 103 bp, Glycine max
  Clone ID: jC-gmfl02220082c04a1
cctcgaggcttacttctctgatcttgtgtctatttatctttcttgattttctaccaggtacggggcctgtagtaaagactctgaccagctttactatcccata

SEQ ID NO: 6906 - DNA, 120 bp, Glycine max
  Clone ID: jC-gmfl02220082c04d1
ctggacgctgcgagcccgacgcggaatgcacgcggcgcgaccagcgtactaggctgcaggccgcacctttttttttttttttttttttttctaataatatttgcagatatgcagccacgg

SEQ ID NO: 6907 - DNA, 111 bp, Glycine max
  Clone ID: jC-gmfl02220082c05a1
ccaaaattctcttatcctctgtctatttacttactataatcttctatctgctaccgggaacgaaacaatatctcactccagattccatctctcataccccgatgtacgcat

SEQ ID NO: 6908 - DNA, 158 bp, Glycine max
  Clone ID: jC-gmfl02220082c05d1
ctcgaattctgccatcctcgatctcagttctaactatacatgctgatgggcggcgaaggacaaatcaatgaaggtcgcctccgtgcagcatgactacctagaagaacgaataggaacgatgccacattacggtctggatcactgagatctctgatgga

SEQ ID NO: 6909 - DNA, 139 bp, Glycine max
  Clone ID: jC-gmfl02220082c06a1
caaaaatccatatatctttgatcatatgactttttgtctaattttatatgcggccgggaacagaaaactttgaaaattcaattgctagatccactaccaaaagcaacgatgagttctaatgacacattactgttttcaa

SEQ ID NO: 6910 - DNA, 170 bp, Glycine max
  unsure (1)..(170): unsure at all n locations
  Clone ID: jC-gmfl02220082c06d1
ctcaaatatatatntatatataaatatactatacttactctctaatattactattacttatctacatctcctcgatgtcatatatacctatctcaatctaaatctattaatatcataactgtatactgatattataatgtagtcttggtatctagctaactattttgaat

SEQ ID NO: 6911 - DNA, 547 bp, Glycine max
  Clone ID: jC-gmfl02220082c07a1
ctaaaaccctaatatctcttttccttgtaagtttgattccttattacaaggtgctattattatatatggcttcttcaccttcctcagaaaacaaaaactctcagggagtagctggtggtgccggagagaaacccattccacttggtgagaacgttctgcagaagcatgctgcattctttgacttgaataaagatggtgtcatctacccatgggagacttttaaagggttgcgtgaaatcgcgactggggttttgctgtccgttggaggtgctattttcatcaatgtgtttctcagtctgagtactcgtcccggaaagtttccatctatactttttccaattgaaattaaaaatatccaacgcggcagacacggcagtgacactggagtctacgatactgaaggaaggtttgtaccttcaaaatttgaagaaatttttacaagcatgcacatacacattcaaatgctttgacatatgatgagctaacggagatgataatgcaaatagagagcctaaagatttctcacgaaggattgtagtgtggttga

SEQ ID NO: 6912 - DNA, 215 bp, Glycine max
  Clone ID: jC-gmfl02220082c07d1
aattgaaaagctattatatgcttaatttgatcgatttcactgccaacgtagcatcattaaattccacagcaccaaccacatttacttcatgtaacacattaaaaaggaatagtccaacatgactaatggggacttgataacaaatcattctccaagtactcttaggagtgatgataaccatcagttaagatagatattatacaactgaactgaag

SEQ ID NO: 6913 - DNA, 152 bp, Glycine max
  Clone ID: jC-gmfl02220082c08a1
ctaaaattcttttttatctgatcaagtgactaactatattttattatttgctaccaggaacggaaccattagtaaaaacagttttaagctttactaaccaaaacaactaagatgacacattacacaaaacgctcttgggtttttgtgatcaa

SEQ ID NO: 6914 - DNA, 108 bp, Glycine max
  Clone ID: jC-gmfl02220082c08d1
aaaattatgaaaaaaaaaagaaaaggtaatatttaaagaaaaaaacccaagaagacctaaaaaaatggaaactgaacactaacaatgcaagaagaacgtacgaaaaat

SEQ ID NO: 6915 - DNA, 207 bp, Glycine max
  Clone ID: jC-gmfl02220082c09a1
ctaaaatgcttttttctctgatcatgtggctgactattattgtttatctgcggccggggactgaatcaggactgacgccagtgttcagctctactaccccgaccaacgcagaggtcacattgcacactacggtcttggtctcttggatcaaggaaagagatccgccctcttttcaagcagctcaatctgcaatacggactcatctca

SEQ ID NO: 6916 - DNA, 112 bp, Glycine max
  Clone ID: jC-gmfl02220082c09d1
ataaaatatattttatttaataattatgaaaaaaaaaagaaaagggaatattaaaaaaaaaaaacccgagaaggccgaaaaaaatggaaaatgagaaataacagtggaaaag

SEQ ID NO: 6917 - DNA, 129 bp, Glycine max
  Clone ID: jC-gmfl02220082c10a1
ctcaaattctttcttctccgatctcaggtcttactatctgtcctgatttgccacggagtacaaaacacttcataacggcttagatcagctgatctatcctgctcaacgaagaggaccattgccacatta

SEQ ID NO: 6918 - DNA, 155 bp, Glycine max
  Clone ID: jC-gmfl02220082c10d1
aattattatgttaaacaaaggaaacggaaacttaaaaaaacataataaagccaagatacaaacaaactcataaaggaatttgactatgcaagtaaagggctcggcaaattcaagcccagactcaaatggggcacgcaaatccagccatgaactgg

SEQ ID NO: 6919 - DNA, 463 bp, Glycine max
  Clone ID: jC-gmfl02220082c11a1
gctgataatttttcctgatggtgctctaggagaactcctgctccggtgacttcgagaatgggatcttacagggctcttgctgacacttctaagagaacgagttctcgcagggcttctactgacacttctaccattcctgcctctcactgggcttctactgacacttctgcaattcctgcctctcactgggcttctactgacacttgtcccattcctgactcttactgggcttctactgacacttgtcccattcctgactattactgagctactactgacactgctaccattcctgactctcacagggctgctactgacactgctcccattcctgcctctcacagggcttctactgacacttattccatgcctgcctctcactgcgctactactgatgcttctgctcggactcctgctgatgcttctggcaggacttctgctcaaactcctctgagatggaaga

SEQ ID NO: 6920 - DNA, 293 bp, Glycine max
  Clone ID: jC-gmfl02220082c11d1
aactcgaccctttatgaactaattgaaccggaacatacgcaaggcttgacatacacaggagcaataacgcaacacagcgtggggacagggtctgggacgccgacttgggaagcctagatgtcacccgggtacgactcaccagtcagcataaccgcatcctaactaatgcctcctacgggcaccaaaacgcgtactgagctgcatctaatagtccttgaaaccagactctgcggacacactaggattgccattagcacagcatattgatccatatcttgtgccaacccgcaaag

SEQ ID NO: 6921 - DNA, 397 bp, Glycine max
  Clone ID: jC-gmfl02220082c12a1
attctatcaatttctgatttattcatatcccaaaaccactgacatggaatcagcgttcagtgtcacgtacacaaactggttcaacattggtacaacgctttaaccttgcaaatgaaccatcatcacattgtctatgtcagattgcaatgctcagcttactgagagtgccaccggctcaactgttatgctggtccagtgctctggtgcccatctgctgtctaccataacaaccacgtgcaagctgtacacatgtgtagatatcggagactggatccaaaagatgctggggactagagcctctagtatgacaaccaaggcaccggctggagctcgaagtggaacgataacgctgtcatcataagaaagtgatggacgaacttatttgtcaccctgttga

SEQ ID NO: 6922 - DNA, 384 bp, Glycine max
  Clone ID: jC-gmfl02220082c12d1
ccaaaaattaaatttccgtaaaaaaataaagccggaacaaaacccaaggggaccaaaatttttttaaacatgccaaaaccccatgctataccccgaaccgggggggggccctcatccctgggggggcgttccctggaaaaaaaaaaggaacaagaggtggcaccccccactaacagcgggggggttggggcccctttgggggggcaaccccagttccaaaacccggaaatggggccccatgggaacccccgggggcattaacaaaaaaaaaagcccggtgattggtctaagggggccgcccccgtttaaacacgccccccccggtttggggatggggggccttaaaaaaacccggacaggggcctggaagggccaagaaggggg

SEQ ID NO: 6923 - DNA, 388 bp, Glycine max
  Clone ID: jC-gmfl02220082d01a1
ggacactgctgggctttccgcagacccagaaaccttcgccaagaaccgtgaactcgaagtgatccactccaggtgggccatgctcggagccttgggctgcgtcttcccggagttgctgtcccgcaacggggtgaagttcggagaagccgtgtggttcaaggccgggtcccagatcttcagcgagggtgggctcgactacttgggcaacccaagcctgatccacgcccagagcatcctcgccatctgggccacacaagttatcctaatgggtgccgttgaaggttaccgtattgctggtggccccctcggtgaggtcactgacccaatctacccaggtggcagcttcgacccattgggccttgctgatgacccagaggcttttgctgag

SEQ ID NO: 6924 - DNA, 518 bp, Glycine max
  Clone ID: jC-gmfl02220082d01d1
acattaaattttttattttatcattttataatacacatgatagtgatagatctcaccaaactcatcaatcgaacataggaaatgttatttagttctttgacactgagtatcacgtgaccaaggcagtggcactaggcccagtacgttgatgatgacagggtcagcaaggtgatcggcgaggttgtccaatggaccctttccggtgacaatggcctgaacaaagaagccaaacatagagaacatggccaatcgtccgttcttgagttccttcaccttaagctcagcaaaagcctctgggtcatcagcaaggcccaatgggtcgaagctgccacctgggtagattgggtcagtgacctcaccgagggggccaccagcaatacggtaaccttcaacggcacccattatgataacttgtgtggcccagatggcgaggatgctctgggcgtggatcatgcttgggttgcccaagtagtcgagcccacccttgctgaagatctgggacccgggactggaccaca

SEQ ID NO: 6925 - DNA, 335 bp, Glycine max
  Clone ID: jC-gmfl02220082d02a1
ccaagactctgacttacctggcccaggagaaaaccctagaatcgagcttcgttcgggacgaggaggagcgtcccaaggttgcctacaacgaattcagcgacgagatcccagtgatttctcttgccggaatcgacgaggtggatggacgcagaagagagatttgtgagaagatcgtggaggcttgcgagaattggggtatattccaggttgttgatcacggtgtggatcaacaactcgtggccgagatgacccgtctcgccaaagagttctttgctttgccaccggacgagaagcttcgttttgatatgtccggcgccaaaaagggtggattcatt

SEQ ID NO: 6926 - DNA, 517 bp, Glycine max
  Clone ID: jC-gmfl02220082d02d1
acaggaccacaaaacaaaagacagaataaattccagaatcaacaaccaatttataagggggggattccaacggcagcacagctatgatttcagctgtatgccaccaggattggcaatcaacaactcagcagatgacgattacaatgtagtaatgcaacacctctcattcacaggcaggtttagtgtcaaagctgctcaagcagatggcgaaggcttggaaagtagagagtggataacagtaatccatggtaaatatgtcttttccaatctttccaaactgcaagattaccttttcttgctcctcggcagaaatattatgagatggatcaacagcagctacaagttgaaagttcttaacagaagccactgaaacgcgacccttgaagtttagacaccagcactgtagctgctcatgccatctgggagccttgtttttcagtgctaattgctcggttgagccttggctcaatactggtggctctgataagcttgcaaagtttaaatctgagacttgagc

SEQ ID NO: 6927 - DNA, 121 bp, Glycine max
  Clone ID: jC-gmfl02220082d03a1
cttaaatccattcttctctgatctagtgtctaacagtctgagatgattttcttccaggaacaggcccctttgtaaaagcagtgtacagctttactcaccgaatccgacgcagatgatccct

SEQ ID NO: 6928 - DNA, 156 bp, Glycine max
  Clone ID: jC-gmfl02220082d03d1
ctcgaactcttgaatgcttgacctgtggtctaactaaattcgatgatcagctacccaggacgaggcaatggaggtcgccgtagtgcagctggactcacttgagagacgcataacgtccatagcacactacggtgctgttcccacagatctcagaag

SEQ ID NO: 6929 - DNA, 327 bp, Glycine max
  Clone ID: jC-gmfl02220082d04a1
ctcaaatattttcaactgatgtttgaattgctctttcagcagctgacatggagacggtgaccatggccatgataacgggagtggtactgttcacggaagtatatgatgcagctgacctagatatggagataatgtctgtcgtcggctctcacgcctcttcgctggacacagacttagagcttaagtctatgtactagctgtggctatgagagcatggtaagcagtacgctgcgctcggactgactgataccaggatacgaagctttgtgactgcgcgtgaggtaatgggaactccggatcacctgatgaacacatatgcatgctgat

SEQ ID NO: 6930 - DNA, 113 bp, Glycine max
  Clone ID: jC-gmfl02220082d04d1
gaggaaaagaagataagttaacgttaaacgaagcaggtataccatgatagacactgatggaaactgggaaatcacagtggaagtcaaatgaatgacagatggaggggcgtcga

SEQ ID NO: 6931 - DNA, 465 bp, Glycine max
  Clone ID: jC-gmfl02220082d05a1
ctaaaatatttgcaaaggatgcttgttttgctattacagcagcttacctgaagaccgtgaccatggacatggtcacgggactgttactgttcacgggcttaaagggcgcatctgtcctagacatggcgataatgtagttcgacagcgcccactgcctgctcgaaggcgaagaccaagagctgaagtctcatgtacgagcagtggctatgaagacacggtaaggagtacaccgcgctcggagagaatgacaacaggattcaaagcttggggactgcctgcgaggataagggaccacaactccccagatgaccgaacctgcatgctgtgtcttgaccgcttcgctgatctaaccaactaggactacaaggacaagcacttgggaagcaacatcgataccaaccttatgctctgttagaccctctgcaaccgatgcacgcaacgtgtaggggacagactacctgaatc

SEQ ID NO: 6932 - DNA, 159 bp, Glycine max
  Clone ID: jC-gmfl02220082d05d1
ctcccgttttttattccttgacttctgttcgcactaaactctctgatgatcaacataggatcgatcaattaatcaatcctttctgtagcagcactccattaacaaacgaataatcaagatacttcaatacggtgagcttctcagaaatctctgcaggag

SEQ ID NO: 6933 - DNA, 366 bp, Glycine max
  Clone ID: jC-gmfl02220082d06a1
ctaaaactcttggttttcagttcaggtgaatttcaaattatggttatctgctgaggggtaacgtaacacatcgatatgcggctaccggtggctcttgccaatacgaggatgaggttcaatggagcataggcactacgtgccttctatgtgttaggtgatactctcgtcgtcaatggcagcatcaactgcatagccaccacagctagagcatacgctccaccttatggcattgattatccaactcgcagacccactggccgattctctaatggcctcaatattccagagtctatcagctgagttctaatgttgattactccatcgctaatatatttggtgctgactaattaagactatatgtcgtat

SEQ ID NO: 6934 - DNA, 536 bp, Glycine max
  Clone ID: jC-gmfl02220082d06d1
accaatctgaatagtaagaaccctctaatttttctcaaaaccaaaaccataactagaccctaataagatccaagatagaagtagtatcaattgaccctcccctaaatacattctcattcctcaaaatcacacaaaagaactcacttattctgcggtttctctttgcttcaatggagaagaaggcacatgtcattattcgaaggagcggaaaaacatatataattcttcactttctggacattccaatacggaaatatcacacaaataaattaacaaacgctgcttttctgtaactgtagtgtatggaagatgtatgattagtatttcttggaatccaaggccaaaatagtgctgagattcattgggtgcatgtactttgaggttcctgacataatctgctgaacgatcaacctgttggctttttccgatggatggaatggatcccaaaacgcgaattcgtgacggtttggacataagttggacactaccgtgcatagtccaagaccattaaagggtccttgaccgcaacatgctac

SEQ ID NO: 6935 - DNA, 272 bp, Glycine max
  Clone ID: jC-gmfl02220082d07a1
ctaaaattcttggttctcagcccaatggaccatcgctctatcttgatttgccacgatgtgcgggaacatggctagagccaccgttcagctgttctatcacagtctactcagttgctcatttccacactacgctcttgggtcctcctattctggaaggaaatggggcgacttgacaaattgctgaaagcgtagtcagattttatcgtgcagtactgatccgatgtaattcctgtttggtgtaccagcttgcaaatgatgcacaacctttgcat

SEQ ID NO: 6936 - DNA, 242 bp, Glycine max
  Clone ID: jC-gmfl02220082d07d1
aatatatgataatataattttcaaataaataattttgccattatatttacacattaaaaatattttttaacactgaaattgaaatgttggataaatcaacacaatttgaaaatagtctcagtaatgctagcgttaatttactctagattttaaattaaggtaatctgcaagacatcatttatacgctcctgaagactctttcttaaagttatgcactacagacttgaatcgtttgattcaag

SEQ ID NO: 6937 - DNA, 264 bp, Glycine max
  Clone ID: jC-gmfl02220082d08a1
ctaaaatgcatttttttactaaatcggggccaagtattgatctatatttgattctgggaagggaatcgtttttcatgactgacttcagctaattaaggcaaagccactgactgaacacattacaccaccgggcttggggttgcggctatagatagaaaacctgatacatggaaagtttctgagagtgcatatgatgatcatcccaggactgcaaaaaaatgtcgtgcattatgtacaggagaaaatggtattagtccatcatac

SEQ ID NO: 6938 - DNA, 100 bp, Glycine max
  Clone ID: jC-gmfl02220082d08d1
actaagggtaaggtaacgttaaacgtaagatttttaccaggatatttagacattgatacagcgctttgaccatggatgttagacgctcgataaagtctat

SEQ ID NO: 6939 - DNA, 321 bp, Glycine max
  Clone ID: jC-gmfl02220082d09a1
gtaaaattcaggtttctagagacctgcggccatgcattcaatgtaaatttttaaggggcaaggaatcgggggtgaaggcagtcctcacctggactacctagatcttcgtactggacaaattacacgcaccgggctggggctggcggcatcaagaacaaacatcttagacggttgccttgcgacaatagcagcatgtgacatatctgggacttgtaagaagatgcttaagacttgaaaatggacgccaatgccatcgaccatcaccatcttatcaggaacatgacggggaggctattgcattcaaagctagatctttggttg

SEQ ID NO: 6940 - DNA, 92 bp, Glycine max
  Clone ID: jC-gmfl02220082d09d1
attattatcaaaaacagaagaaaagggaacgtacaacgaaaaaacaaaaccaaaaactacacaaacgcatactgaacactaccaatgcatgt

SEQ ID NO: 6941 - DNA, 180 bp, Glycine max
  Clone ID: jC-gmfl02220082d10a1
ccgcccttctttttttttttttctcatgtctaacgctataacctgatttgctacgagggactggggaattattaacacctgacaccagcgttactcaataaaacttcgaactagccccatggcacactacgatcctgaaacatgagctccacacacaaaaacctggatcatgtacggaac

SEQ ID NO: 6942 - DNA, 333 bp, Glycine max
  Clone ID: jC-gmfl02220082d10d1
ataaattaaatttgctaaaaatatttagatacaccgcggaaaaggaaagataaaaagagaaaaacaaaccagaacagcaacacaaacatagagtaaaataacgatgcaagttataccatcggcacacatacacaactactacttccctcatggctgagcaaacatccacgaccatataccagctcacaggccaagctccgagtgacgctcataaaaccgtagactgctcatatcaactgatgcacatctatacgtgacgcgaaaagatcggggctcgctcatgcccaattgaagctacactcgaactgcctgacaggggactgaagattgtct

SEQ ID NO: 6943 - DNA, 147 bp, Glycine max
  Clone ID: jC-gmfl02220082d11a1
ctcaaattcttatatcccagatcacaggtctgaccataagtgctgagctgccacgaagtacaaagcactgcagaacgcctcagaacagcagaactatcgagctcaaccaagaggaccgatgccacattacggacctgaacaccggga

SEQ ID NO: 6944 - DNA, 164 bp, Glycine max
  Clone ID: jC-gmfl02220082d11d1
aatataactgttgggtggatactatgaagcgagaaatcatgagaagataacatagccaagaaactaaaagaaacaaagcgtgcatggacggtcaatgaaatcaacaaggaaaagcatagactgaaccaaatgggacacgcatgatcaaccattaaatggcgaac

SEQ ID NO: 6945 - DNA, 289 bp, Glycine max
  Clone ID: jC-gmfl02220082d12a1
accgagaataactatgtttgttgtttttacaaaacgacccggggcacaaaaaccaagacctctaggaaagaacaacaccccaaaaattgaggggagacacccccacaatcagcaatgtatgacaaacagaaggccgcccaacaaacaaacagggggccaacaaggcaggacaaaaagaccagaccatgaatcggcatcgcgaaccatactgtgctgacagaaacgagccgccaagcgcgggggggggcccaaaacaaagctcacatggcgaggaaaaagctggcaacaa

SEQ ID NO: 6946 - DNA, 204 bp, Glycine max
  Clone ID: jC-gmfl02220082d12d1
aagagtataacaaagagaacaacataggaactggaaacttacaagaacttaagaaaaccaagacaataacgacatcaaaccaaaatgaaactgtacgaaacaagcgcacgaaaattcgacatgacaatgcaagaacactcagtgagccaaacatctactatacgagactaaaaatagacctgaaatatccaagaccaagggtat

SEQ ID NO: 6947 - DNA, 144 bp, Glycine max
  Clone ID: jC-gmfl02220082e03a1
ctaaaattctttcttctctgatctagtgtctaactatctttgatgattttctaccgggaacagggccctttgtgaaagcagtgttcagctatactatccaatacgacgaagaggatacattccacacaacgcacttggtttctt

SEQ ID NO: 6948 - DNA, 173 bp, Glycine max
  Clone ID: jC-gmfl02220082e03d1
ctcgaactattgaatgctcgacttctgttcttactaaatttgatgatcatctacctaggacgcggccatggagcacgcatttctgcagctgcactacatcgggagacgcataaggcccagtcgacgctacggagctgttgtcacagatctctgcaggacagccatcgtcacta

SEQ ID NO: 6949 - DNA, 429 bp, Glycine max
  Clone ID: jC-gmfl02220082e04a1
accatttcttgcaaaattccagttccagtgtgaggttcatttcgtagatggataaggggggcaagttgcggagcaaggctcgaggtcacatggcaagcccacatcttttgtcttgcctaagaaaaaatatgaaagatgttaatgtcacgaagagctcttctaaggcatcggacaagaaagattgggaagatgccacctgctcagtctgtgtggaggtcccccacaatgctatccttgtacttcgttgatcctatgataagggttgtcgcccatacatgatggccaataggcatcggcattcacactgtaatgaacaatgcataaggacatatgctaacgcaacttatgttcaaagcttgcatctcgaatccaacaattccaatattgatttaagcacaggtgaacctaaagacgatactgaagccactg

SEQ ID NO: 6950 - DNA, 567 bp, Glycine max
  Clone ID: jC-gmfl02220082e04d1
gtccctcttttaagctatttccttctcttaacacaattggttgtgccaattgccatagtcaccaaccaattaacaaaggtatatatatcatcatatcatcaccaaatgaaaaatattgggttgttttttcttgtggtggtggctacttttgtggtggcagccacagctggtagcttttaccaagactttgaaataacgtggggtggtgagcgtgccaaaatctatgagaatggaaaccttctcacactctcccttgacagagcctctggctctggctttcgttccaaaaaagagtacttgttcggaaaaattgacatgcagctcaagcttgtgcctggtaactctgctggaacagtaactgcctattatttatcttctctggggcctactcatgacgaaatagactttgagtttttgggtaacttgagtggtgatccttacactctgcacacgaacgtattcagccaagggaaagggaacagagaacaacagttccatctatggctcgaccccaccaaggactttcacacatactccgtccaatggaatcctgcaagcatcatattc

SEQ ID NO: 6951 - DNA, 399 bp, Glycine max
  Clone ID: jC-gmfl02220082e05a1
tgtttatctggcgtagtacgagtctcgacgtcttatgcacgcgtgcgcacgctcgtgaatctggctctgagggatcgagcccaacttctctgacctgatatatgaaagtctaggttaatttctttgatggatcaggggggcaagttgaggagcacggctcatggacccattacgagaacatatatttcgtctggcctaagaaaaaatatgacgcatgttcttggcactaagagctcttcacatgattcagagctgatactttaagctgtaaccttcatggtagtatgtgaggatggcacgcacaatgctgtgcttgtactttgttgataccaggataggggatgatgtccatagatgatggctcatagtcatctgcattcacactgttacgaacaatgc

SEQ ID NO: 6952 - DNA, 544 bp, Glycine max
  Clone ID: jC-gmfl02220082e05d1
gaaactatgtgcctacctgggcctttgatcacatcaaatacctcaatggtggttctgagattcagcttcatcttgataaatacacaggtactggcttccaatcaaaagggtcctacttgtttggtcacttcagcatgtacataaaattggctgctggtgattcagctggcacagtcactgctttctatttatcatccacaaactcagaacatgatgaaatagactttgagttcttgggaaacagaaccgggcaaccttatattttgcaaacaaatgtgttcaccggtggcaagggtgacagagaacaaagaatctacctctggtttgaccctacaagagaatatcacagatactcagtgctatggaacatgtaccagattgttttctatgtggatgactacccaataagggtgttcaagaacagcaatgacttgggagtgaagttcccatttaaccaaccaatgaagatatacaacagtttgtggaatgctgatgactgggccacatggcgtggtttggagaatacagattggtccaaagcccc

SEQ ID NO: 6953 - DNA, 177 bp, Glycine max
  Clone ID: jC-gmfl02220082e08a1
ctaaaattcaggcttctcagatcaaaggactaactataactcaagaactgctacagggtacggaaacagtaataaaggcagtgtacagccctaatgaccaggacgacgaagatgaaacataacacaaaacgctcttgagttcttcgtattccagaagcaaatgaggcgacttgttaa

SEQ ID NO: 6954 - DNA, 94 bp, Glycine max
  Clone ID: jC-gmfl02220082e08d1
gttaaacagaggaaaaggtaacggaaaaagaaagaagcaagcgaggcaaaaaaaagaaggaaacagagctatgacagtggaagtaaagcgcacg

SEQ ID NO: 6955 - DNA, 489 bp, Glycine max
  Clone ID: jC-gmfl02220082e09a1
ctaaaattcttactttttatatgattggtgttgcttatacacaagaataggtaaaggctatggcacctgatattgaggcggttgatggccctaacgacgagggtgacatgtttacacgctctgacaaactcagcgagcgttttcctcatccatatgcaaatgaagcaactgttaggtttgctaatggatgagcttatcctccagagctaagtcttattaccaaagcccgttacaatggtcacaactatgtttttgcccttctaactggatatcgtgacccacctgctggtgtttcaatatgagagggacttcattataatccttgctttactggtggagcaatacgccatgcctaaaatgcttaatgatggcgctagggaatatgaagatggtacccttgctacagatgctcagatggcgatcgatgatgtgtcacatttaagttgggccgccgaacctgagatggaagacagaaaactgatgggattt

SEQ ID NO: 6956 - DNA, 137 bp, Glycine max
  Clone ID: jC-gmfl02220082e09d1
gaataacaacagataaggtaacattcaacgaaagaagcaaaccagtctaataacagatacaaacagcgctttaactatgcaagtaaaacgcacggaaaaattacgtacaactaaagagaactattcaaagccaaaga

SEQ ID NO: 6957 - DNA, 265 bp, Glycine max
  Clone ID: jC-gmfl02220082e10a1
ccgccacttttttttttttttttcttgtgtctaactctatgtgctgatctgcttccaaggactggggaacgtatgacggctgtgtccagcgctactctcgaaaacaacgaagatgacacagaccacaatacgttcttgatctctgagatctctgaagaagaaccttagacagtaccacggcatataccagcagcgagaacttcaggatcacgacgaagcctatgtcgtgcctcatttgtagacagacatgctcagtctaagcatc

SEQ ID NO: 6958 - DNA, 96 bp, Glycine max
  Clone ID: jC-gmfl02220082e10d1
aaacaaaggaaaaggtaatattaaacggaataataaaaacagacaaaaaaaaaattcatacagtactataacaatgcaagcaaagagctcggaaaa

SEQ ID NO: 6959 - DNA, 156 bp, Glycine max
  Clone ID: jC-gmfl02220082e11a1
ccgccattcttttttcctcgatctcaggtctaactatatgtgctgatctgccaccaagtacagagcaattaagaacgcctgacataagcgtgactaactagaacaacgaagaagaccgatggcacactacgatcttgttccctgagatccctgcat

SEQ ID NO: 6960 - DNA, 164 bp, Glycine max
  Clone ID: jC-gmfl02220082e11d1
aataatatgtaaaaaagaggaaacggaaatggaaaaaggaaaaacaaagacaggaaaaaaacagacgcaaagagaaaagggacggtgggagaagggagctcggcaagtttacagtcccacggagaaacggtattcagagccaaagatcaacaagctcagcacct

SEQ ID NO: 6961 - DNA, 268 bp, Glycine max
  Clone ID: jC-gmfl02220082e12a1
gtggactatgtctgtacacgatccgctggaattgctcgccggctcgagcagctacactcgtctgcggccgcccttttttttttttttttttttttttatatgccatttgacattattcattagagggaatgatctaaggataacatccaactcaagcgatatacgataaaacaaacgaaaagaaacagggcacacaatggacatgtacacggtgctctaagttggtataactcgaaaaggtgcttcgccgatcaagtggcagagaact

SEQ ID NO: 6962 - DNA, 167 bp, Glycine max
  Clone ID: jC-gmfl02220082e12d1
attattatgttaaaaaaaagtaactaaaatgataaaagaaaaaatatagacagaaaaaaaacaaacaaaaaaagaaaagtcactatgggagcagcgacctcggaaagtttacatactagggaaatatggtatttaggctccaaagaccatcagtctcatacctgaaa

SEQ ID NO: 6963 - DNA, 533 bp, Glycine max
  Clone ID: jC-gmfl02220082f01a1
cttatagcttcatcccaaaaagctcttttccttctaaatttgattccttagttcagcattctattattatatatggcttcttcaccttcctcagaaaacaaaaacctagagggagtagctggtggtgccggagagaaacccattccacttggtgagaacgttctgcagaagcatgctgcattctttgacttgaataaagatggtgtcatctacccatgggagacttttaaagggttgcgtgaaatcgggactggggttttgctgtccgttggaggtgctattttcatcaatgtgtttctcagtcagagtactcgtcccggaaagtttccatctatactttttccaattgaaattaaaaatatccaacgcggcaaacacggcagtgacactggagtctacgatactgaaggaaggtttgtaccttcaaaatttgaagaaatttttaacaagcatgcacatacacatccaaatgctttgacatatgatgagttaacggagatgataaaggcaaatagagagcctaaagatttctc

SEQ ID NO: 6964 - DNA, 249 bp, Glycine max
  Clone ID: jC-gmfl02220082f01d1
gctcactggccggccttcgtcctttttttttattatttgattggcttttatatgctaaagtagacctgcttctcggacgacgtcacacaattaaattgcacagtaccaaccacatttacttcatgtaacacattaaaaaggaatagtccaacatgactaatggggacttgataacaaatcattctccaagtactcttaggagtgatgataaccatcagttaagatagatattatacaactgaactgaag

SEQ ID NO: 6965 - DNA, 252 bp, Glycine max
  Clone ID: jC-gmfl02220082f02a1
ggagacttgagcattttaagctaattgaggctgtacaatcacaattatttttctagtaatgtagcacagaaatcaactcactgtgttacatttccatctttaaactagaaccctggtttgagtgcacgtgtgacgtgatccaccataaagaatacgtgggaaacatttccgctgtgtgaatcttgactgcaatcaggcagaatccttacttctctaataatttttcggaaatgttattaacgaatttacttt

SEQ ID NO: 6966 - DNA, 207 bp, Glycine max
  Clone ID: jC-gmfl02220082f02d1
aattgtaaagcttttttatgcttaattagaccgatatcactgacgacgtatgcactgttaaatgccacagccccaacctcatttactttatgtaccacattttaaaggaacagtccaacatgacttacggggactcgatcacaaagcatactgcaggtactcttaagagggacgatgaccattattcaagatagccattatactact

SEQ ID NO: 6967 - DNA, 409 bp, Glycine max
  Clone ID: jC-gmfl02220082f03a1
gtgagaggcttgctgctctgatcaagagacctgcaactgtccgttatttgcttactgttacaggcccatgtctcaacacagtggaaatctcttctgggtagtacgaatccgagatccgtgaacaatctaggtactgggtccattgtatggcggaacatgatactgggatctttcacgtgggacacagtgcaatccttaaatgggtgatgtttgagatcctaggttgatctacattagttgacagaccgagcaatttattaaccaccatagcgatatagtctacgaaaaaagttggactctattgactttaatgcgggatctgaggtgggcatgaatggggaccaaatgcaccaatgctttgttgtccggggggcagggataagacatgcctacagcttgcacgtggtgg

SEQ ID NO: 6968 - DNA, 506 bp, Glycine max
  Clone ID: jC-gmfl02220082f03d1
ctaaaatgctataaatagctttgtctagtacatgtttcgatcttctcactataatgctaatgtgttcttcacctctccaaaacttgtagctgaggatattattactcagcaaaaattcatggaagttccaatcaagtatccggcaaaactcacccttagggtggttcttacttgtatcatggcggccaccggtgggttgatttttggctatgaccatggtgtttcaggtggagtgacctccatggattccttcctgaagaagttcttcccatctgtatatgaaaaggagtctaacgtgaagccttcttcaaaccagtactgcaaattcaacagtcagatactgacactgtttacatcttccctttatctaagtgctcttgctgcgggtcttggggcatccagcataacccgaatgttgggaagacgtgcaactatgattatgggtggaatattctttgtggcaggtgcattactcaatggattagctgtaagcatctgggatgcta

SEQ ID NO: 6969 - DNA, 136 bp, Glycine max
  Clone ID: jC-gmfl02220082f04a1
ctataaaggcaggcttctctgatctagtgaccaactctctatcatgatttgcttccaggaacaggggcaggtgtgaaggcagtgttcagcttttctatccaatacaacgaagaggtcacattccacacaaccctct

SEQ ID NO: 6970 - DNA, 614 bp, Glycine max
  Clone ID: jC-gmfl02220082f04d1
caacatacataggcactgtctctgcttctatttctcactctctgaactctgaacaccgaaaatccgccatggattttcgcatctatggcgtcacgatccttctcttcctcttcccaaccctcacattctcaatctcacagggtcagataaactcaaactcaatccttgtcgctctgttggactcccattacaccgaactcgctgagcttgtggaaaaagccatgcttttgcagactctggagaacactgtcatgaacaacagcaacaacatcacaatcttcgctcccagaaacgaagccctcgaacgcgatctcgaccccgatttcaagcgtttcctactcgaaccccgcaatctccattccctccaaaccctgctgttgtcccacatcgtccccaaaagaatcaccaaacccgaattcaaaaccgggtcgacccgacacagaactttagcgtctcaccaccacctcactctccaagccctgaatatgactcactggaatggtgagtcttgccgggttattaaccccgattcggtaacccgacccgacggagtgatccacggcatcgacactcttctcatccgtcgctcagtccaagacgaattcaaccgtcgc

SEQ ID NO: 6971 - DNA, 154 bp, Glycine max
  Clone ID: jC-gmfl02220082f05a1
cttaaattcattcttctccgaccaagtgtataactgtatatcctaatttggggccaggaacagcaacacttctcattacagtgatcagctccactgacaaaaacgacgaagacttcatataccacggactgctctggatatctcctcttacaga

SEQ ID NO: 6972 - DNA, 453 bp, Glycine max
  Clone ID: jC-gmfl02220082f05d1
aagtgacaagacattaattagatgggaactggcaatattacattaatacctgatcccagatttacgtgctatcacacaatgaacagttacaggattaactagtaggaatagggctaagatgacacccagacacgggtgatatgtcacgaaccacatgatacgctggaacaagaaaagctttgtggaagctgctatagacctgatgtcaaaactgggaaaattgagtccaaattagccaagttgaccatccccatgacaactactattatgcataatcagaatcatccaattggcacggcttttgaacacatcaagacccatctcagctggatcagttgcttgcagctcaatctgaatcccatcaagctccctagtgaatctatctttggagccggcataaatcatactggctgctaaccctagatgtatcaggggaccatgcaatgaagaaaa

SEQ ID NO: 6973 - DNA, 112 bp, Glycine max
  Clone ID: jC-gmfl02220082f06a1
ctaaaatgctgttttctcacatcaaatggcattcctgcatctcctccattgcggatgggatgcaaactatgctgtcgattccatgtgacttctgccctagagaaaaatggga

SEQ ID NO: 6974 - DNA, 437 bp, Glycine max
  Clone ID: jC-gmfl02220082f06d1
aagtgacaagacattgtttagatgggaactggcaatattacattaatacctgacacgagtgttaagtgctatcacacaatgaacagttacaggattaactagtaggaatagggcgaagatgacacccagacacggggaatatgtcacgaaccacacgatacgctggaacaagaaaagctttgtggaagctgatatagacctggagacataactgggaaaattgagatcatattgggccagttgaccatcctgatgacaactacgattatgcattatcagaacgatgctattggcacggctttggaagcacatcagagagccatctcagatggatcagatgcttgcatgtcaatccgaatcccatcaagctcgctatggagctatccttggggccggcgtagatcacacggctgctaaccctatatgcatcaggggac

SEQ ID NO: 6975 - DNA, 391 bp, Glycine max
  Clone ID: jC-gmfl02220082f07a1
ctaaaattctgggttttcagttctagtgaatttcaatttatggttatctgctgaggggaaaagaatcacatgggaaggcaggttaacagctggcctagcgaatacgacgattaggtcacatggcaccttaggcactacgtgccttctatgtgataagggattgtctcgacgtcaatggcgagcggcaagtacatagccaccacagttagagcgtacgctccaccttatcgcatcgattagccaactcgctgacccacttgccgatcctctaatggcctcaatattcctgaggttatcagctgagtgctaagtatgattactccatcgctaatatatttggtgctgaataattaatactatatggcttatggtactgagggacgaaacatgc

SEQ ID NO: 6976 - DNA, 114 bp, Glycine max
  Clone ID: jC-gmfl02220082f07d1
caaaaacaaaggaaaaggtaatgtcaaacgtaataaacaaaccaggctagaaacaaaaagcaacagcgcaatccccgtgcatgtaaaaggctcggaaaatgcagatccctctaa

SEQ ID NO: 6977 - DNA, 138 bp, Glycine max
  Clone ID: jC-gmfl02220082f08a1
ctaaaattctgtgttctctggtcaagtggctatttatatttttttatctgctactgggaacggaaccagttctgaggccagagttcagctctcctgccacgatggactcagatgtcacagtacacactagggtcttgg

SEQ ID NO: 6978 - DNA, 233 bp, Glycine max
  Clone ID: jC-gmfl02220082f08d1
ctgaacaccgaaaatccgccatggattgacggatatatggcgtcacgatccttgtattgggcttgccaaccgtcacattctcaatctcacagggtcagataaactcaaactcaatccttgtcgctctggaagactcccaatacaccgaactcactgagcttgtggaaaaagccatgcttttgcagactctggagaacactagtatgaacaacagcaacagcactatcaatact

SEQ ID NO: 6979 - DNA, 154 bp, Glycine max
  Clone ID: jC-gmfl02220082f09a1
ctaaaatgctgggttctctggtcaagggaccaacgatatttcctgatctgcttccgggtacggaaccagtactgaggccagcgacaagctgcactaccacgaagtacgaagatgacacataccacactaggctcttgggttcttgtattccgga

SEQ ID NO: 6980 - DNA, 462 bp, Glycine max
  Clone ID: jC-gmfl02220082f09d1
ctatgttacatttagtacatagcgggtaatgtcacatgagactcgaaagggaagcgaaacatagtgaggctatggaagctagcacggctgattgggatcctctgtttgagccttatcccttttttgaatcatacaagaattatctacagatagatataacagcagagaatgcagatgaccttagacaatggaaaggttgggttgagtctcgtcttcgccagttgacattgacgattgagaggcacactgatggtatgcttcaacgtcatccacatcctggtgaattctcagaccattctagaccctatcaccactgagactttatgggtctgcagcgtaagcaaggagttccagtgaatgaaggtgaacagcttgatataacgctcactgctgaagaatttaaacattctgtcagtgcttacactctatggaaaccttgaatgaatatccatgtgtcccatg

SEQ ID NO: 6981 - DNA, 201 bp, Glycine max
  Clone ID: jC-gmfl02220082f10a1
ctccaattctttcttctttgatctcttttctaactatctgtgctgatctgccaccaaggacaggcacattaacgacgcctgtgtccagcgtgactaactagaaagacgaagatgacccatagcacactacggtcttgatctccgagatctcggcaggtgagccgtagtctgtagaagcacctaaatctgtcagcgagaact

SEQ ID NO: 6982 - DNA, 161 bp, Glycine max
  Clone ID: jC-gmfl02220082f10d1
tataacggcggccgccctttcttggattgttttgtgatcactggatcgagcacgacaatctgaaagaggtaccaacagaaaaggaaagattccaaggtagatacactacatgatgtaaacaacgagactccgaatcctaacggatcacgaggacattccgg

SEQ ID NO: 6983 - DNA, 180 bp, Glycine max
  Clone ID: jC-gmfl02220082f11a1
cccaaattcttttttcctcgatctcagctcgaactatacttgctgatctgcaaccaaggacaggtcaattaacatcgcctacgtgcagcaggactccctaaaaaaacgaataagaaagataccacactacggtctgcatctccgagatctctgaagcacagcctcagactcaagcacagc

SEQ ID NO: 6984 - DNA, 165 bp, Glycine max
  Clone ID: jC-gmfl02220082f11d1
aatattatgatgtgaaaaagaggaaactaaaagggtcaaagaaaaaacaaagacagaagaacaacagtcagaaagagaaatgtgacgatggaagcagcgcccaaggcaaggtcagggactagggagaactggtatttaggctgcacagacgtacaaattcagcac

SEQ ID NO: 6985 - DNA, 181 bp, Glycine max
  Clone ID: jC-gmfl02220082f12a1
ccgcacacttctttttttttttatttcagttctaactaaacatgctgatcggcagcgaaggacaaagagacgaacatagcctcaactgcagcatgactaacgagaagaacgaagagcaccaatgccacaacacgatctggtacaatgagatctctgatggacaacctcaatcacaagcaca

SEQ ID NO: 6986 - DNA, 174 bp, Glycine max
  Clone ID: jC-gmfl02220082f12d1
atcattatgttaagaaatggtaactaaaatgataaaagacaaaataaagacagaagaccaacaaactgaaaaagaaatgtcacgatgggagcagcgtcctcggaaagtctacataatagggaatcctgatattcagcggcacagacgtacaaactcagtacctgcaatggacgc

SEQ ID NO: 6987 - DNA, 117 bp, Glycine max
  Clone ID: jC-gmfl02220082g01a1
ctcaaattctatcttctcttatcacattactaactctctatccatatttgcttccggggacagatccatttattacaacacctacaagctccactatcccatacaactctgattttc

SEQ ID NO: 6988 - DNA, 191 bp, Glycine max
  Clone ID: jC-gmfl02220082g01d1
aataatattagaattaataaataacaggaaaagaggaaaacaaaacggacaacaaaagcaagaacccagagaacaaccaacagcaaacagtgcacaaaacgtgcaagaacaccgagagcccagcaggtggacctcaaaaacaagcacagccgagacagtcagcgacaactgaacccgcaaaagagcgacaa

SEQ ID NO: 6989 - DNA, 215 bp, Glycine max
  Clone ID: jC-gmfl02220082g02a1
cttcagttcagttgtataatatctatcttaactgatggttatcatcactcctaagagtacttggagaatgatttgttatcaagtccccattagtcatgttggactattcctttttaatgtgttacatgaagtaaatgtggctggtgctgtggaatttaatgatgctacgttggcagtgaaatcgatcaaattaagcatataatagcttttcaatt

SEQ ID NO: 6990 - DNA, 591 bp, Glycine max
  Clone ID: jC-gmfl02220082g02d1
ctgttatgtgggcgtccggaattaatgtcccgggtcccggtgctaactgctcagtggtcggcgttcgtccttttttttgtttaattgaaatgctattatatgctatacgggtacacatgatctgtcacattatctgaagtacttcaccaaacacaaatctaaaaactctcaaaagtcatttcgttctttgacgctcactttccggggacgaagttggtggcataggcccaggcgttgttgttgacagggtcagcaaggtgatcggcgaggttctccaatggaccctttccggtgacaatggcctgaacaaagaagccaaacatagagaacatggccaatcgtccgttcttgagttccttcaccttaagctcagcaaaagcctctgggtcatcagcaaggcccaatgggtcgaagctgccacctgggtagattgggtcagtgacctcaccgagggggccaccatctatacggtgaccttaaacggcacccattaggataactcgtgtggcccagatggcgaagatgctatgggcgtggatcaggctcgggtcgcccaagtagtcgagcccagcctctatgaagatctgggac

SEQ ID NO: 6991 - DNA, 517 bp, Glycine max
  Clone ID: jC-gmfl02220082g03a1
gttcgaggcgctccttaggttacaagagacctgcaggcatgcagtcaatgtatatatttaagcaaccaggcattgggggtgaagtagtgccacaccaggataactcgttcctttatactgaaccacaaacatgcaccgggctgtggctggccctacaagatgcaaacatattaaatggttgcctttggacaatacctggatctcacaaaaatgggcttgttagaagattcttaagagatgacgatggtgtcaaattcgatcgaccatcaccttcttatgatcaaaaagagttgggtcctattgaagtaaaagctgggtctgtggttgtcatccatggtgatcttatgcaccaaagctctgaataccagtgtccagaatcaagacatgcgtacagcttgcacgtggtggatatggttggctgcaaatgtgcaccagaaaattggatcagacgaaatgatgagccagaaccactctttcgtagctgaaatctgcatatagatagaaacgacgtaatgat

SEQ ID NO: 6992 - DNA, 478 bp, Glycine max
  Clone ID: jC-gmfl02220082g03d1
acgatgattgtttcttggggaacagcgctggtggaggaggagttgatcagggtcaagagaagcctccaacttctttggccaagacactcacacaatctgatgctaacaatggtggaggcttatctgagcctagttactgtgctgaaaccatgatcccaaggttggattattctgctgagcctcctgttcataccatcatcgctaaggatatgcatggacagcgctggatgttcatgcatatctatagagggacaccaaggaggcatctttcgaccactggatggatcaatatcgtgaaccagacgaggcttgtcgctggcgactctattgtgctactgagggcagagaatggagatctctgcgctgagataacgcgggctaagatggggattgacggagggactgagtgaccttacggtggatggtataaccctctgtttggtggtggctccttgtgtgagagtgagaacaatgtgat

SEQ ID NO: 6993 - DNA, 342 bp, Glycine max
  Clone ID: jC-gmfl02220082g04a1
gttagaggctggctgatggggtcaagagacctgcaaacgtgcaataactgctaataggtacgggaccaggaattggggcagaggtactatcacaccacgagaactagtccttgtatactgaacacaaaacgtgcaccggtctgtggctgtggcaacaagaagctggcatattaaaagtggcggctatggacaatacctgtatatcacaagggtgggcgcgtatgatgatcttgatgagatgaccagggtgccgaatactatcgaccatgaccttattatcatcaaaaagagttggccgctattgaaaccaaagctggaacggaggttgcaatacatggggat

SEQ ID NO: 6994 - DNA, 325 bp, Glycine max
  Clone ID: jC-gmfl02220082g04d1
caagaatgatcatcactgacgtagcatatatagctacacatatgtacataaagctctgagattagatcttatcaactcggccatggataattatgatcgtgatcttgaatctgcgaatactgataatcatacactcgcacccactgatactcaacgctacatcgaatacagacaagctgatggtcatgaacagcttaccggatatactgaaatagaagaacgtgatttacgtgacactggtgaaccatgccatgatcaaccacggcatatgctcgctcaccattcccggacatcacgaggtgatagtgatctggatgggagcctc

SEQ ID NO: 6995 - DNA, 386 bp, Glycine max
  Clone ID: jC-gmfl02220082g05a1
ctcaaattctttcttttctcctcagtggtcgtagcgttggccgtcaattgttgcggcgtacgagcaagaaatggttttatgttgtgaggaagattgtcaagctgtgggaatatgtcattgagaaccataggccgtgaactcatggagatgagagatggaatacgatgcacatcaaagcggggtgcgggaagcaagcatcttctcagtcggacaaagtcacatgtagcttcagatgtgcttgctacttcatttgaactctatccaccagggacagtgggcaaatctaccatcctaattgcttttggacataatccagaaggtctaagagagagagacgtcttggcctgaccgcgctgttgtagtgtttcgtgcttcagtatgtaaat

SEQ ID NO: 6996 - DNA, 524 bp, Glycine max
  Clone ID: jC-gmfl02220082g05d1
catagaattcactaaacttcatttaatttaattttacaggaccacaaaacaaaagacagaataaattccagaatcaacaaccaatttataagggggggattccaacggcagcacagctatgatttcagctgtatgccaccaggattggcaatcaacaactcagcagatgacgattacaatgtagtaatgcaacacctctcattcacaggcaggtttagtgtcaaagctgctcaagcagatggcgaaggcttggaaagtagagagtggataacagtaatccatggtaaatatgtcttttccaatctttccaaactgcaagattaccttttcttgctcctcggcagaaatattatgagatggatcaacagcagctacaagttgaaagttcttaacagaagccactgaaacgcgacccttgaagtttagacaccagcactgtagctgctcatgccatctgggagccttgtttttcagtgctaattgctcggttgagccttggctcaatactggtggctctgataagc

SEQ ID NO: 6997 - DNA, 405 bp, Glycine max
  Clone ID: jC-gmfl02220082g06a1
ctaaaattcatatatcacctatcaaggttcctaggataattcatacaatgcagcgggatgcgaaaacgggtatgaaagctgatgccagctacaatgccaagaactacgcagagataacagtgcaccacaactgcgaaggccactgtatgcattcaaccacagctatggcagccatctagtggaatactgaagactcatgatataagtgatgctaacccagaggatgctcctacatgtttcgcacatgttgaagagtgactcaaatgatatgtctgcttcaggggggaaaaagtatctatttaataagatgacatctaagacaatggcgacaatcatgcggcctcaaccaactgcggagtttattgcatagtagccagaagacaataatgacatagctattggcat

SEQ ID NO: 6998 - DNA, 381 bp, Glycine max
  Clone ID: jC-gmfl02220082g06d1
tttatttatatctttaagtgaataaaaaccatctataacgactagctttgctgcctatattaaaaaagatactacgcagataaaggtccgaccaaagagcagaatatggtctcaatgaccctacactctgcaacgccgacatcgcagttacgccagtagtcctatgagtgcaatatcatactgtgccattgccacggttcggacgcctctagtaacaacgggagaatggttcaattggatgcgcactaacctactgacacctacgtaccgcagctgccattgggaaaccgaatggaggcaccacagagcgggatcatatgccttcaaaacacacactcaaagctccttacagaaaagtgctacagaatgtgccatgcatca

SEQ ID NO: 6999 - DNA, 119 bp, Glycine max
  Clone ID: jC-gmfl02220082g07a1
ctaagatgctcttttctcacatcaaatggcattccttcatctcctacttgcggatgggtgcagactatgctttcaattctggtgcttgctcccctagcgaaaactgggaagagctccat

SEQ ID NO: 7000 - DNA, 228 bp, Glycine max
  Clone ID: jC-gmfl02220082g07d1
aataagaaaggcaaaggacaggccaaaccgaataaagaacccaggcccattaactagcgagaccgcgtactacctatgcgagtagaacgcacgcgaaaacggctgaaacactgatgggctttccgaagacccagaaacctttgcctaaaaccttgaactcagatagatccactgcaggcgggccatgctcggagcactgggctgctgcaagccggagtcagctgtcct

SEQ ID NO: 7001 - DNA, 120 bp, Glycine max
  Clone ID: jC-gmfl02220082g08a1
ctaaaatgctgtcttccccgatcaagtgtactacaattttttctaaactgcttcagggtacggaacgagtacttaaaccagcgacaagatcccatagcccaatggacccataggacacat

SEQ ID NO: 7002 - DNA, 249 bp, Glycine max
  Clone ID: jC-gmfl02220082g08d1
ttttgtggttggattatagagcatgatgaatatcgtcaccaagctagtttcctaagaagggcatggggcaggccaaaccgagtcaagtacttgggcccattctatggcgagcccccgttctacctaaccggtgagatcccacgcgaatacggctggaacactgatgggctttccgcagacccaggaacctttgccaagaaccgtgaacttggactgatccactgcaggcgggccatgctcggagccttg

SEQ ID NO: 7003 - DNA, 138 bp, Glycine max
  Clone ID: jC-gmfl02220082g09a1
ctaaaatgcttgcttctctgatctagggtccatctataatttcttatctgcttccgggtacggaaccattactgacaccagagtccagctcccataccccgatgtactcatatgacacataccacactacggtcccgg

SEQ ID NO: 7004 - DNA, 240 bp, Glycine max
  Clone ID: jC-gmfl02220082g09d1
attaataatttttgattttattattatgaaaaacagaggacaaggtaacataaaacgaaaaaagcaagccaaacaagaaacgctctgaaagagagctaggacgatggaagcaaaccgtacgggcaataaacctaataggaagaggccctaaataaacccagagacgaacaaccgcacatctacgatgacgaccatcgacaagggatcagttgccgagcaccatagcatcgacatgcaagc

SEQ ID NO: 7005 - DNA, 113 bp, Glycine max; identical to SEQ ID NO: 6930
  Clone ID: jC-gmfl02220082g10a1

SEQ ID NO: 7006 - DNA, 282 bp, Glycine max
  Clone ID: jC-gmfl02220082g10d1
tgtagttggaaagagggcttgccggcgaaagtgtcatatcatcgaaagatgtggttatggtactctttgagactgctattctaactactgagctcagccttgatgatcccaacactttctgtaacaggactcacaggatgctgaagctcggactgagcattgatgaagaggctgctgaagcacatgctgacatgcctactgtggaggacgccgatgctgatgccgatgctgacggtagcaagatggaagcagctgatactgtctaacttaattactgatctg

SEQ ID NO: 7007 - DNA, 173 bp, Glycine max
  Clone ID: jC-gmfl02220082g11a1
ctccaattattgaatgcttgacctctgttctaactaaacgcgatgatcatcaaccaaggatgaagcaatggagcaagcatttgtgaagctggactacattgagagacggataacgaggatagtacactacggagttgttatcagagatctctgaaggacaggcatcaacacta

SEQ ID NO: 7008 - DNA, 100 bp, Glycine max
  Clone ID: jC-gmfl02220082g11d1
cattatcttaatccacgggaacagcaaggttccaagatagatacactaccttctgttaataacatgactacccaagctcttgctgcaagtggaccttcag

SEQ ID NO: 7009 - DNA, 479 bp, Glycine max
  Clone ID: jC-gmfl02220082g12a1
atattaaatttgtttttattaataagaggaaccagaggcttaactaagaccctactgtagagccaagacagaagtagtatcaattgaccctaccctaaatacattctcattcctcagaatgacacagaagaactcacttattctgcggcttctctttgcttcaatggagaagaaggcacatgtcattattcgaaggagcggaaaaacatatataatgcttcactttctggacattccaatacggcaatatcacactagtaaagtaacaaacggtggtttcatgcaactgtagagcatggaagatgcatgagtagaaattgttggaatgcaaggccaaaatagtgctgagattcattgggtgcatgtactttgaggtaccttgacataagctgatgaacgatcaacctgatggctttgttcgacggattgaatgggtcccaaatcgcgtaattgcgacggtttggacataagttgaacac

SEQ ID NO: 7010 - DNA, 98 bp, Glycine max
  Clone ID: jC-gmfl02220082g12d1
atgatattaagacatgaaaactttaaagatacccggccaaatttttacatttgaacaatagtctgaactatagacatgatcattgaattagagctcaa

SEQ ID NO: 7011 - DNA, 568 bp, Glycine max
  unsure (1)..(568): unsure at all n locations
  Clone ID: jC-gmfl02220082h01a1
atcacaaatagccctcttggccttcaatttcgtccaattccaaatcatggctagctcttcagttttcacgtcttacattgttttgagtctagtgatggcactagcaattagcggtttcaatttcaaaggggcagaggcagcacgtgccttctttgtgtttggtgattctctcgttgacaatggcaacaacaactacttagccaccacagctagagcagacgctccaccttatggcattgattatccaactcgcagacccactggccgtttctctaatggcctcaatattcctgattttatcagctgagttctaattttgatttctccatcgctaatatattttgtgctgtttaattaatactatatggcttttttttttgttggacgttacatgcgttcgaacccatttcctgatgaaattgtcttactacaattatacggaccaagaatgcccataactaatatatgacttattatgccatgtagtgtaagttaatttgtgattaaattttgcaggtcaagaacttgggtcagagtccacgttgccatatntaagtcctgagctcaa

SEQ ID NO: 7012 - DNA, 507 bp, Glycine max
  Clone ID: jC-gmfl02220082h01d1
gaatagtaagaacctctctaataattctagggccaaaaccataactagaccctaatagatccaagatcgaagctagtaacaattgacccttccctaaatacctgtatcagtcctcaagatcacacagtagaactcacttaatatgcggtttctatatgcttcaagggagaacaaggcccatgacattattccaaggagcggaaaaacatatataattcttcactttctggacattccaattcggaaatatcacactagtaaattaacaaacgctgcttttatgcaactgtagcgtatggaagatgtatgactagtatttcttggaatccaaggccaaaatagtgctgagattcattgggtgcatgtactttgaggttcctgacataatctgctgaacgatcaacctgttggctttttccgatggatggaatggatcccaaaacgcgaattcgtgacggtttggacataagttggacactaccgtgcatagtccaagaccattaaagg

SEQ ID NO: 7013 - DNA, 570 bp, Glycine max
  unsure (1)..(570): unsure at all n locations
  Clone ID: jC-gmfl02220082h02a1
tgatagcaaagcaatcttggtttcaaaccaaatgaacctttgcttgatcttggaagcacaagattgtggatgattggcttgatcagcacttgggtggtgtacttacggtatggttagtacctcatttcaataatcaaagcaaagaacatactcgtttgcttggtactagggcggtaagacaaattgtaaaaagtaatgtaaaattttgcaatgaaatactgttttggtgaaattgttgtttggtgtcatcgctaccaaatgatgcaatatctttgcatggattatctctgcaaaaagattaacgcgtgctgtaatgctagtgtcactaatgttcatcacatatagcagtaatcttcgatctaagatatgaaactataacatgaaattttttattctttttaatagctaaaatctagaatttacgagagtgacagaagtcagtggaggtgaactntggtaatactggttctgaaagaattgatgttaaagagaaattaattcctgtctgcaaattacggagtattctatgaatttcatttgactggatagcaaagagcatcatgttttaag

SEQ ID NO: 7014 - DNA, 571 bp, Glycine max
  unsure (1)..(571): unsure at all n locations
  Clone ID: jC-gmfl02220082h02d1
ctaactcgtctccagccgccctttttttttttttttttttttaacaaaaacaccttaaaaaaatatccaaggaatcaaaaacactacaaaaggatttataacaattgatatattctgctcaatcaactgaaatataattaattaactgaactacaattaaaagaaatccacaaaacatacaacattttctcttaaaacatgatgctactttgctatccagtcaaaatgaaattcatagaatactccgtaatttgcagacaggaattaatttctctttaacatcaattctttcagaaccagtattaccaaagttcaccttcactgacttctgtcactctcgtaaattctagattttagctattaaaaagaataaaaaatttcatgttatagtttcatatcttagatcgaagattactgctatatgtgatgaacattagtgacactagcattacagcacgcgttaatctttttgcagagataatccatgcaaagatattgcatcattcggtagcgatgacaccaaacaacaatttcaccaaaacagtatttcattgcaaaattntacattact

SEQ ID NO: 7015 - DNA, 517 bp, Glycine max
  Clone ID: jC-gmfl02220082h03a1
acgatatcaaagacatagaatcgtgatttggttggtgttgcttatacagaagaagaggtaaaggctatggcagctgagattgaggtggttgatggccctaacgatgagggtgagatgtttacacgccctggtaaactcagcgatcgttttcctcagccatatgcaaatgaagcagctgctaggtttgctaatggaggagcttatcctccagatctaagtcttattaccaaagcccgtcacaatggtcagaactatgtttttgcccttctaactggttatcgtgacccacctgctggtgtttcaataagagagggacttcattataatccttactttcctggtggagcaattgccatgcctaaaatgcttaatgatggtgctgtggaatatgaagatggtacccctgctacagaagctcagatggggaaggatgttgtgtcattcttaagttgggccgccgaacctgagatggaagagagaaaactgatgggattaaatggatatttgtactgcactg

SEQ ID NO: 7016 - DNA, 364 bp, Glycine max
  Clone ID: jC-gmfl02220082h03d1
ccgatctccggttatttttgagctgcgctttcagcagcagagtggcgaagtctcaaggtgtcaagctgcgttgcacggctctatgtctcacgccaaccgcgaataaccatggtcgtggatgatacatcacgacctattgcactgttaccacgacctctaggctagaatcgcactgtaaggctcgagaacagactatctcagctttcgctatgcaggcacacgcacaatgccgtcctactactatatgagactgacagacaaggattgtctacactacgatgagcatcactggctctctcgaaccagacagtgctgcttgatgcagatcgtactgtgacactgcatgcacagacccatgatccat

SEQ ID NO: 7017 - DNA, 536 bp, Glycine max
  unsure (1)..(536): unsure at all n locations
  Clone ID: jC-gmfl02220082h04a1
ctcgcgtaacgcatgcgtttctttactcaatcggagcccagcactgatctatttggaactcttggaggtctgtggttttactgtactcaatttgataaattaaggcaaagacgatgaccaagaagaagaatcccctggtgtttatggatgtgtccatcgatggggatcctgttgaaaggatggtttttgagcttttctatgatgttgctcccaagactgcagaaaactttcgtgcattatgtacaggagaaaaaggtatcagtccaaatactggaaaatcactgcactacaagggttctttcttccatcagatcataaaaggttccattgtgcagggtggagattttgtcaatcgaaatggaactgctggagaaagcatatatggttcgaagttcccagatgagtcacctaagctaaagcatgatgctaccggactnttatcaatggcaattgcagaccgtgacacacttggttctcattntattatcactttgaaagctgatcatcatcttgataggaagcatgtagtctttggg

SEQ ID NO: 7018 - DNA, 548 bp, Glycine max
  Clone ID: jC-gmfl02220082h04d1
ggtttttgatcctcagtatcctggttggtattatgacacaattgcccaagaatggcgttcattggaaacttacaattcaaccatccagtcttctggtcatggacatgaaaatgggaatgcttctgccaatacattctcacccaatgatcatagtttgtatagtgaatacagccaagctgataattatggacaacagggcttcgataatcaggctgtagatggcagctggagtggtttgtatggcactaaccataagcagggttttgacatgtacacaactgggtctgccacaacacgaggggatagtataacttctggtggcaaccaacagattaatcattcttatggttcaagcatctctgtgaacgaacatcaacaaaatacttctagctcttttggatccgttgcattgtacaatagagtaaaccatgatcgtggcttggctaatggaacttttgaaccacaaagctttggccctactggggacactgctcaacagcttaattattcaaccacaaagcttagtgaacaaaaagttgtttcaaatg

SEQ ID NO: 7019 - DNA, 264 bp, Glycine max
  Clone ID: jC-gmfl02220082h05a1
cttcagttcacttgtataatatctatctaaactgagggttgtcatcactgcttagagtacttggagaatgatttggtgttaagtccccattattcatgtaggactattcctttttaacgtgtcacatgacgtgcacgtggctggtgctgtggaatttagtgacgctcctttagcagggaagtctatcgactatagcgtataatcgcttttcaatgcatgagaaaaaatactaacgggctgacgccggctagagagctcatcgac

SEQ ID NO: 7020 - DNA, 332 bp, Glycine max
  Clone ID: jC-gmfl02220082h05d1
atgaacattggttcacacataagaacacattatcataacaagacactcactcgcatatgtacgtactataacttgataaccaattcatggaccctcactttccacagacgattgatgagaatgaggcccaaaacttggtggtgacaggataccatccgcgacctgctatgtgctccaatggacactatcctatgccgctggcacatggatggattccggacatgctgagcctggtcaatcaaacgagctggaggcacttcaccggaagctaagcaaatgccaaagtatcatcagatactgccattgaacctatgcatccttcggggctgaaa

SEQ ID NO: 7021 - DNA, 338 bp, Glycine max
  Clone ID: jC-gmfl02220082h06a1
cgcgaatgaatggtgctgcggtcgtgggaggatctcgtggactgaaattggagcggcgtacgagcaagaaatggttttatgtcgtgaggaagaatgccaagctgggggaatatgtcatagagaagcatagggcgtggactcaacgtgatgaggcatgggatacgaagcacatcacagtggtgagccggaagctgcgcatatctgtcagcacgacaaagtcgcatgtggctccagatgtgctcgctacattatgtgaacctattcatcagggacattggtcaaatgtaccatagcaaacgcttctgcacataatccaccgggtctatgagagagcgaca

SEQ ID NO: 7022 - DNA, 332 bp, Glycine max
  Clone ID: jC-gmfl02220082h06d1
atgaataacagaggcaaagataacgttcaactaaataagcaagcgaggcaataaaatgtaggaaactgaactctaaccatgcaagtcaaacgtacgataaatgaacagacgttgaaaaggtcctaggcaaagccaaagactaactcatgggcatctaaaattacgacgaacaccaaggggtcatgcatatgccacattagtaactgcttgcaagcaatccagaactagcttgaacggcttgaccataggctcatggccccgatggagagcctgcagattgctggcactaacaaggacctgcacatgcgcatcctgaaccatgacattgatcc

SEQ ID NO: 7023 - DNA, 345 bp, Glycine max
  Clone ID: jC-gmfl02220082h07a1
cttctatttctagatcttctatctgggttattaggataatttatacaaatgggggggatgctaacgaagctttggcacaaatgctgttcacaagctttgggagtggcagagaaatcagcgcaccgctgcggcaaatgccattagatgtatacatgctgacctgttgcatgtcctcctgggaatactgttgactaatgaccgagacgatgctcacccagaggatgcactgtcgtgtgtcgcaccgggcatacatggctgatatgttctgactgcatcatggacgaagatgcttgtctttcataagctgacaattgagactatgtcgacactgatgcctgcttacca

SEQ ID NO: 7024 - DNA, 350 bp, Glycine max
  Clone ID: jC-gmfl02220082h07d1
gatattgtcatttataacgactagttttaggcagcaacagctgactaaagtttcaggagacctggcagcacattgagggcacaaagtcaaaaaccacctgatctatgaaacttaatcccaaagcaattcaactgtagcctctataggctctgtggacctcatacagtgactagcgcacatcgagcataggccaaggcgcctgaagaccaaccacctgcggtaccggcgccagctgaagctcgaacgcggcaggcatatgctcctgcctacagggcgaaaaggaacgggatagagactgctcagttcgcagggctgtgaccgacttcaaggacactagactcaccccagcc

SEQ ID NO: 7025 - DNA, 136 bp, Glycine max
  Clone ID: jC-gmfl02220082h08a1
cttaaattcttttttctaatgtctaattaacatcaataatttattatctgttaccggggacggaacaaggtctgagaccagcttcaatatcaaatacgccgaagaagtcatagttcacattacacactacggtcct

SEQ ID NO: 7026 - DNA, 239 bp, Glycine max
  Clone ID: jC-gmfl02220082h08d1
atatataatattataataaattaatagcaaaaacaaaaggtaaggcaatagcgaacggcagaacagagccaaagtatgaacacatacaaagagcacttgaacagtggaagccaaacgttcggcaaatgcacgtaccactaaaaaaacctaaaccaagccaaagacggactagctcacatttagcatggagccaatcaccaagaggccatacaaagtgaagagtactcactacttgaaag

SEQ ID NO: 7027 - DNA, 183 bp, Glycine max
  Clone ID: jC-gmfl02220082h09a1
ctaaaattctttcatccttgatctacattctaactaaatttcattatctgctaccgggtacgcaacaatttattacccatgtgttaagctcaactaccacgacagacgcatatgatacatttcacactacccgcctgatttctcagatttcagaagaacatgcatcgacattacaagctgttc

SEQ ID NO: 7028 - DNA, 165 bp, Glycine max
  Clone ID: jC-gmfl02220082h09d1
attatgttaaacagaggaaacgggaagatagaaagggataatagggacagaatagaaacaatcggaaacaggaatgtaactatggaagctaaacgtccgggaaattgacatgatactcaaagaaggtattcggagccaaaggcggacaagtgcagcacctgaaag

SEQ ID NO: 7029 - DNA, 548 bp, Glycine max
  Clone ID: jC-gmfl02220082h10a1
ctcatctaggttggaggccgccctttttttttttttttcttttttttttactttttttggtgattattgtcataggaaccatccaattaacaatggtttatgtagcatcatatcatcaccagacgaaaaatatcgatctgattttacttgaggagttggatacttttgaggtggcagtcactggtggttgctatcaccaagactttgaattaacgcggggtggtgagcgtgccaaaatatacgagaatggtaacctgatcacactcttccttgacagatcctatggctctggctatcagtgcaaaagcgagtacttgtgcagaaaaattgacatgcaactcaagctagtgcctggtaactctgctggaacagtatactgcctatgatgcatcttctctggagcctactcatgacgaagtagactttgagtttgtgggtaacttgagtggtgatccttacagtctgcacacgtacgtatgcagcctacggatagggaacagagaacaacagttccatctatggttcgaccgcaccaaggactttcacac

SEQ ID NO: 7030 - DNA, 268 bp, Glycine max
  Clone ID: jC-gmfl02220082h10d1
gttgttaattttttattgttttttttatgatgttaatacgaggaaacgggaaggtaaaaaggcaaaaaaaagacggcagaaaaacagacggaaggaggaccgtaataatgggagcaaagcatacggcaagtatacctgagacgcacagctggcataggaccgtaagaggcacacaagagagcgactgaacggacgactaggcataagtgatccactgataacgaggaacagtatcgaaatgcaagcaacactgactaagcatggctcg

SEQ ID NO: 7031 - DNA, 388 bp, Glycine max
  Clone ID: jC-gmfl02220082h11a1
gtgttaattgtcataggaaccaaccatttaacaaaggtaaatataacatcatatcatggccagacgattaatgtagatatgaactgacttgaggaggaggatacttgagaggtggaagtcacagctggttgctgttaccaagaccttgaactaacgcgtggaggtgtgcgtgccagaatatatgcgaatggtcacctagttgcactattcctaagacagatcctatgactccagttatcactgcaaaagctagaccatgcgaacaaaaattggcttgcaacccatgccagtgacgggttactgatggagctcaacatgggcatactgtagatcgtccctgatgcctgcacatgacgaatgatagtctgacgtcgtggggtacctgact

SEQ ID NO: 7032 - DNA, 551 bp, Glycine max
  unsure (1)..(551): unsure at all n locations
  Clone ID: jC-gmfl02220082h11d1
aataaaactccaacaattttattaatgaaaatactttacaatttcagcacatatacactgccatgaatataattttgcacgctataattatctttcgccacaaacaatggagtagtgctcaacaaagcacaaaccaacaataataacagttttagttgcattaatttacacaagaaagtaaattaacgtaataggcaacacatgtgtgtcacgttcatgaggatcattttataatgatatgcaacattgaattaaatattctcatgcaatggagcattctggaggaaggccttgagggaaacgtctgatatcagtgcaataattgtaaatcatgtaattcttttgcacccaacggatctttgcctgccccgtggcgtccagtgattggccagtggaggaagaagtttgggaattgaagtttctgtatgaggctgtgaatggtgccttgctccaatccgttttcacaagcccaccccttgtggcccaatcctcagngttccaaagactagagtatattctcatgggttggctctctgggaatgggaaccctt

SEQ ID NO: 7033 - DNA, 512 bp, Glycine max
  Clone ID: jC-gmfl02220082h12a1
gcagacctttttcctacctgttcacttttgatcacattcaaatactctcaatggctggttctgagattcagcttcatcttgataaatacacaggtactggcttccaatcaaaagggtcctacttgttaggtcacttctgcatgtacaacgacttgcatgctggtgattcaggtgacacaccacctgatacccagttaccatccactcactcagaacatgatgaaatacactctgagttctcgggaaacataaccgtgcaaccttatattttgcaaacaaatgtgttcaccggtggcatgggtgacagatatcatagaatctacctctggtttgaccctacaagagaatatcacagatactcagtgctatggaacatgtaccagattgttttctatgtggatgactacccaataagggtgttcaagaacagcaatgacttgggagcgaagtttccatttaaccaaccaatgaagatatacaacagtttgcggaatgctgatgactgggccaca

SEQ ID NO: 7034 - DNA, 332 bp, Glycine max
  Clone ID: jC-gmfl02220082h12d1
ggctagggaaccaggggtaattttggatggaaatgagaaaatattaccgattccaattaagggacattggcatatcttttggtacataccttaaactggggttcattccattttaactggaattgatgatggcctaaattattaaccattcaagcaataaccccaaattgaattttggatcaacacttaggggcggcctttatgaaattaaatggatgggaactttatgggaatgggaataaaaattggagatggcagctcatattaaattatatgtcccgggagggtctatggcttaaaagggataatacccaataaaactggttgaaact

SEQ ID NO: 7035 - DNA, 561 bp, Glycine max
  Clone ID: jC-gmfl02220083a01a1
ctgaacaccgaaaatccgccatggattgacgcatctatggcgtcacgatccttctcttcctcttgccaaccctcacattctcaatctcacagggtcagataaactcaaactcaatccttgtcgctctgttggactcccattacaccgaactcgctgagcttgtggaaaaagccatgcttttgcagactctggagaacactgtcatgaacaacagcaacaacatcacaatcttcgctcccagaaacgaagccctcgaacgcgatctcgaccccgatttcaagcgtttcctcctcgaaccccgcaatctccattccctccaaaccctcctgttgtcccacatcgtccccaaaagaatcaccaaacccgaattcaaaaccgggtcgacccgacacagaactttagcgtctcaccaccacctcactctccaagccctgaatttgactcactggaatgttgagtcttcccgggttattaacccgaattcagtaacccgacccgacggagtgatccacggcatcgacactctcctcatgcctcgctcagtccaagacgaattcaacc

SEQ ID NO: 7036 - DNA, 198 bp, Glycine max
  Clone ID: jC-gmfl02220083a01d1
ctggactcccccggggagagtttgaccgtactatcactgtgagcacgtacctaccttctttgggggggggggggggaggcaggaggatgcgaggggtagggggcgaaaaggatggatgcccgtccctatacagggtatgcatagtggaggatagaaaattggcgaagcttattgatatagacagttgaatgcagagtg

SEQ ID NO: 7037 - DNA, 519 bp, Glycine max
  Clone ID: jC-gmfl02220083a02a1
cctgcttatccttgtatgaactccacttacaatgtgacatcaagtacattgcgtgttatgtcagatgagtttcgaaggggaagtgaaatatgtgaggctatggaggctagcaaggctgattgggatactctttttgagccttatcccttttttgaatcatacaagaattatctacagatagatataacagcagagaatgcagatgaccttagacaatggaaaggttgggttgagtctcgtctccgccagttgacattgaagattgagaggcacacttatggtatgcttcaatgtcatccacatcctggtgaattctcagacaattctagaccctttcaccactgttactttatgggtctgcagcgtaagcaaggagttccagtgaatgaaggtgaacagtttgatataaggctaactgttgaagaatttaaacattctgtcaatgcttacactctatggaaacctggaatgaatatccatgtgtcccatgtgaaacgccgtaccattcctaactacata

SEQ ID NO: 7038 - DNA, 205 bp, Glycine max
  Clone ID: jC-gmfl02220083a02d1
agacgagcgggttaacttagctcgtatctacgctgtgtgcagtgccgccgtctttgggggggggggggggggggggggggggggggggggggggagaggggagaggaagccagagaatatcaaaaccggaatagaccaacaggcgcagcgataaagtcgacgcataatacgaccaacacccttggtgaatcaaaaagtaatggct

SEQ ID NO: 7039 - DNA, 378 bp, Glycine max
  unsure (1)..(378): unsure at all n locations
  Clone ID: jC-gmfl02220083a03a1
gctgagaagcctgtgataactgatgattcaaaccaacttgaaccttctctacttgatgagcttcttgccaacattgctacactatcttctgtttatcacaagcctccagatgcttttgtaactcgtgtacattcagctcagagaacagaagacgaagactttgctgagggaagcgaaacagggttttctgagtcacctgcaaatcctgctaatggtcctgcatcaccgcctacatctgcaacaggtgcaccagccacaccttcatctgttgcacctgtgccagatttacttggtgatttgatgggcatggataattctattgttcctgttgatcagccagttactcctactgggcctncatttacctatttactacct

SEQ ID NO: 7040 - DNA, 510 bp, Glycine max
  unsure (1)..(510): unsure at all n locations
  Clone ID: jC-gmfl02220083a03d1
agctagncgaggcaatgttgccgctactagctatgtacatgtgagcacgtcctcctgtcttgggggggggggggggggggggggggggggggggggagagagaaagaggagggagggagataaggagctgataggtacgtaaattgaaataaaagcgcgtggtagcactataatgcaagttagccccttaagaatcctaaaaagcctggcacgcaaaggtgcttacccgtaatgaagcccaaaccagaagggagagctaaagaacagagatgtatattgcgttaccagagggagtaaagaggcgaataaaaatgagagagtagtaatgatggatacaaaaaatatggggcaaaatatagggatttagccgaacacgtgaaagcctggtcaaaaaaacgctacaaagggtaccctggccacgtggcaggctatagggcatcttacccgggttacgtaatcgccgaacggtaaggaataagcctagtttgtgacccaccgaactgcccaacg

SEQ ID NO: 7041 - DNA, 287 bp, Glycine max
  Clone ID: jC-gmfl02220083a04a1
gattgtagtgagaacactggattgagcacgacaatctgaaagaggtacagctctggcaggatggaatcttttgtgttgataccggatgatgttatctctgagactaagaatccaaagggacgatgaggttgaagcagtagtattcaagttagcatgagtatcaatcgttgcaggatggaatcttttgtgttggagtttgttttctctttcagtattatttttttaaccctctagttaaatagttaaaaagatcttaattaataaacacataaaaaaaaagggcgagt

SEQ ID NO: 7042 - DNA, 333 bp, Glycine max
  Clone ID: jC-gmfl02220083a04d1
ggcgtgacgttgccaggagatttgccgtgactgcatgtgtgccacgtcctcctttttgggggggggggggggggggggggggggggggggggagaagaagggacggtgggaaggaagagaatgcggttaccggaatgaacctacaggcgtacagattaactgcaggtatcacacgattaactgaattggtaaatcatgctgtaaatgtgtaatcgcttgggccatttggacttgtgcacaaaatagaagctcccaagcatatataccaggctagatgcttagacagattagtggtagtatgccctcactgtaagttactcgcattgtgataag

SEQ ID NO: 7043 - DNA, 625 bp, Glycine max
  Clone ID: jC-gmfl02220083a05a1
tcactaggactagcgtagatctatgggtagccaactgtgccaggtacctgtacacgactgaaagtagtcaaagggtgggattgctggtgcggacgttgagcagcttgtaatattgataattacggtacttataggtggtcaccgccggacaccaccaaagagtgtggctgaatacgggcaaaccatggacaggtggccacaagccctatcgcagcaaattgcatggattagggaaactgctgcgcctaagtgtgcattagctgctatggctacggttgatttactaagtgcgaacgctgacgatgaagagcggggagctgtagcagtgtgtaaaactgcaacatgggctaagagtagttaaaaggcagcttaggctagtggtgccaataggtatgcagaatgtgcggcgcaaaatagtagttattggctaactgccgggcaaaaaagtgtgccgtacttcattggtgacctattggccattgttgttgccgggtacgtagcggttgttgaaataaccggtatttatgcgggtgcaggtaggacgcccaagttaaggagccagcaggatacggccggccagcccagagtacgcttgctagtaattaatcagggacctttgcagccg

SEQ ID NO: 7044 - DNA, 581 bp, Glycine max
  Clone ID: jC-gmfl02220083a05d1
ctgctagcgcttgccaggcaatttgccgtgctgcatgtgtgcacgtcctccttcttgggggggggggggggaagacaaaaaacagttaaaggggagggaacaaaagcttaaagtaagtgactagactagcaaaataggtaggctaaacgtaggagaaggtaatactgaatagcgcgcaaagtgaaagtgtaagccttagagttaagccgaggagggattacagttgctacgcattgcaaaattatcagtactgcttgttaaagtgcgtcaggtgttcctcatctaatgtagttaaaccaactttagtacaatcccaacgttgtgcaaaacaacatattttatgtatattttgaggccgtttatatagtgtatatatgtgtacccacttaggcggcggcgtagaccgatatcgtgcctagtgttatctttgcggatggttaatccggttttggttccgcagttcgttttcttctcctaacaatggaaaaccttatggcatactagtaataagtttgcaagcataatggggagacccggacaatttcaagaacgatgttgtactggtacagaaacaacttttc

SEQ ID NO: 7045 - DNA, 572 bp, Glycine max
  Clone ID: jC-gmfl02220083a06a1
tcactaggactagcgtcgatctatcgctagcaatgtgccagagtcctgtcaccactacaaccacggtctaattctggtttggtggttgggggactcctcgtgtgcggcgctaatagccaccataacagacacatgctacataaaaaccgctgccggcagaggcgaaaaggactataaaaaacacctggaaacccgaagtgcccacctgccaaacaaggtggcaatacgtagcagaaaaacgggcccctaccgggcacgcagttagtaaacacagtttagcaccgaggcctgctagggtgaaacataggggtaaaccaccaacagggaaacggggggcagaatagtagctcatagtaggtaaagtaagagagcggccactcatgcaaacagaaagtgtagcaggttttgcactacacctgacgttaactaatgtgctactagttaggagagttaggccaggaggtagggttagtaaggcagcaacccgccagacggcgaaatggtaaaaataaatttaagcgcagcaacgtgatgcaaagccggctggcgcatgctcaaagccggtgtgcgca

SEQ ID NO: 7046 - DNA, 545 bp, Glycine max
  Clone ID: jC-gmfl02220083a06d1
ctagacctatgccaaaccaacgttatagcatgtgtagcagtaccaccttcttgggggggggggggggccacaaagagcttaattaggagattagactaggaaaaagggaaaattacgcgaagcgagataccgattttatgaaaaaacgataaacagacacaggagacgtagtagggtgtaactagtaatctgaaaaccccataaaaaaaaaaaaaaaccctccgtctttgggggggggccgggggcaaataaaatccataaaagagtgtagatacctgccgtactataatccacggaggaataatctatgggtgaagcggctttaatgaacacatctagcaagacaaaacggaagtataaaaaaccacccaaggcgattgaacaaaaggaagagtctggcagagaaggaaggtttcatgtcacaaaggacccgcaaaaaaagcaaacaaacactacagcgaccgactgaaacccacacgtagagctataaagcattactagatggtaacagcccaagtaatctattgcacagagcacggcttaga

SEQ ID NO: 7047 - DNA, 245 bp, Glycine max
  Clone ID: jC-gmfl02220083a07a1
acactaggactactcgatctatagtagcaactgtccagagtcctgtcactaaccagtagagtgtacagcagagggcaattagatcgcataactgaagtgcaccatatcgtacagacagcgcacgacccagattggtgtaaactggaagcgttagccatttagaacagtagatagtgaatgtgcagctagtctgatactataattcaactgccacatatcatcaatcgccactagatcatcagtgg

SEQ ID NO: 7048 - DNA, 560 bp, Glycine max
  Clone ID: jC-gmfl02220083a07d1
ttgaccgaggcaagtttggccgtgctagcatgtgtagcagtaccacctgcttggggggggggggggggggggggggggcgaaaaactaacgaataggaacggccaggcccagatataacagaaggtataggagtgcaacgataggctaagaatagagatggtattaaatataaagtgaaaaatgtgtaaaacgttataacgtagttggggtgggtagctgtatggcttccccatcaacggccgcctcgacctttacctaggcggcggcatgcccgttctaaccgcagtactaaccggtgttaagccatttggattccgcataagccttgcaataaacaatttaaatagacacaatagccttaagtgtttcggtggcacggttggtattggaactgtactaaaacttgtgcccgtagtactaacctttaagcccgtaaactgcttattacccgacaggcccgtacgcattgtattcacccctttattactaagatcagaatttgtaatactatttaggaccagaatggcccgcctttacagcctcaacagctgtgccctcg

SEQ ID NO: 7049 - DNA, 580 bp, Glycine max
  unsure (1)..(580): unsure at all n locations
  Clone ID: jC-gmfl02220083a08a1
cactaggactagcgtcgatctatcgctagnaatgtaccagagtcctgtcacctggcgctatgccatttgcaaccagcgccgcgcaaagggcttagccggtggctgcagagcgggccagcgcagcggaagtttttgaggatgaccgaaagggggaggcggctaggtaacaaggagaaggtgatgcaagttgcagtcagaagctgaaagaaaagagagacggccaagcccctggagggagatatgtcgtatatggcctagaaggaaagggatgcttgctaggggggggttagtgcagtacgcggcggaagccgccagcctccggtagcctacaaactaaaaaagttcttagaggaaaagagcctccagccgcgactccaaaagcctccagcgtagccgccataaaaaaaagagagaaggagagagatagagaaagaggaataaaataagacagaaaaaagaaagagaaagaaaaaaggaaaaaaaaataagccaggctaggtaaagaaaggaaaaaacgggtagcacggtatagaagaattaacgattactattaaagaaatgtaggtaacacggtaaaaga

SEQ ID NO: 7050 - DNA, 550 bp, Glycine max
  Clone ID: jC-gmfl02220083a08d1
agctgccgaggatttgcgtgctacatgtgtgcagtaccgcctgcttgggggggggggggggggggggcatgctaataataataagaatacaaataagctgggacgtggtaggcagaatgtacaaaactgggcaaagaaaaataaagggacctggcgtaagataggaacgttgctgggaggtgtcggcctgataggttctaaaaccgcgtgacgtatgtaacagcaacgggagagtgggcagaggaggttggaatcaaccacaaataaatatgcaaattaaaagaagcaagctttttttacgtattactgctaacctattaggctggtaagcgcggcagtgattattgagctaaaaaagcaaatgacgaggatatcgtgggtttggcgggcctaagaaaagggaacatgttgttatgtttaaagaggcccacgcacaactgcttaccaccctgctattaagcttacacttagtaggactagctgtaagcataagccgtgtactacttgtagtgtttactaaggttggtacgctatgtgttaactaggtgtg

SEQ ID NO: 7051 - DNA, 430 bp, Glycine max
  Clone ID: jC-gmfl02220083a09a1
tgagtgactaggactagcgtcgatctatgggtaccaactgtccaaggtccgtcactgttttggctcttcttctactaagcggcatcaatgttctagttcctccgcatctgttggtgtctccggggcagatcttcatctgccattggcaagtcctcctctgctgttatctcagtgttcactagcctcccgatctcgatcgcactagcctcctgtgcctcctaaatcctcataggtctctcctccacctcctcgctcacagcctcgcccactactgctatgtccccttcgcctatgtccgctgcttccgcgcctctcatctggatgttagcctcgcttgttgtcgcctctcttattatgattctaatcttcacggtacccatctctgggaccggggccagggcccaagtagtagcccacctatctgttgttc

SEQ ID NO: 7052 - DNA, 571 bp, Glycine max
  Clone ID: jC-gmfl02220083a09d1
ttgccaggggagtttgccgctgctatcatgtgtagcagtaccacctgcttgggggggggggggggggaaagaaaggatgaaatagaaaggaatgtactgcgcccgactataacaaaggtgctggtggaggataacagtgattactaaacggccaaaggagaacaagaataagccagtttatggaggttagtccataggtaatagttagattagatcccagtatgcagagcgccatacatgttatagcctagattagaatgaagaaaaaaatagcctagactagaaagaattaaatttaaagaagaaagcagataacaggtagttagcaataacataacaggtggactgagggataaagctataagctgggtgcagtgtggtggagcgtttgcgtgggataggaaggtggcttaggggtgttagccaacggctaaatgtactaaacaaaggcgtaatgcatttggtaactaaggtaagcagggcacttgggcgcatgcacgggcgtaataagctaccagtgcatgcaaagacattttggtgtggaagtatagcatgagacgactgaacagta

SEQ ID NO: 7053 - DNA, 533 bp, Glycine max
  Clone ID: jC-gmfl02220083a10a1
ttgatagcactactatgattatggctaggaatgtaccagagtctgtcaacttgtttgcagcggttgcatggttgttaaaaatattggtgttggtggagaagttgctgaagcggtttatgttgtttaaactattggtattgagggatatgttattaaagcggttgatgttgttaaaaatattagtgttgctggagacgttggtaaagctgttggttttgtagaattaattgtttgagctattgatattgttaaaaatattggtgctggtggagaagttgttgaagcgttttatgttgtttaaaatattggtattgagggatatgttattaaagcggttgatgttgctaaaaatattagtgttgctggagacgttgttaaagctgttggttttgtagaattaattgtttgagcgggtaatattattaagcatattggtgttaaggaagacgttgttaaagcggtttatgatgatgttaagaatattggtcttggctaattaattggagcggttaatgtttgtaaatatgttggtg

SEQ ID NO: 7054 - DNA, 296 bp, Glycine max
  Clone ID: jC-gmfl02220083a10d1
ctaatcaataggggtacttaaagcagcaccgaccagaactataattcaagttccaaaaaaaagtttgatttttctaaccaagagtggtgcttagagcagcaccgaccagaatggttagggaatacactccaaaccgggacggggttatagacgacgcaccgtttagtctggctggcgtcgtttcgttcgacgacgacggcgtttgagatgatcccgacgacgacgacggcgagggggttgttgccgccgcaaacggtaatggcggcgatgttgccggggtgagggaggaaaagggt

SEQ ID NO: 7055 - DNA, 572 bp, Glycine max
  Clone ID: jC-gmfl02220083a11a1
agatacaggactagttgatctatgctagaatgtccaggtccgtcatgtggctagtggcgcggcgcgtttgtggggaactgagggttggtgtggaatataaggccggcgcttaaggcttagacgtattaattaaggaataaaccgagagagagtagtagagtagtattaaagcaaaaagaggcccggcagggggtggcaccgccgcctgatggggcgccgcctacttatactgccgactggggattaacatgggcaaagaatcgccccgccgcactcgcttaaaagtgagcacaagccaaattggtgtatatgtgtttggcatacacttgtgcctgtgcctgggtcggttaaaaaacacgatggcggtccaaaaaggcatagctactgtaactggcgcttgccgaatgtgctgccaatacgaatgcttgaggagggagtggtgtgccccttgatgtagcatcaaagacatgagcacgggggcccgaatggcacgccgcagttggatatgtgttatatcaatcgaggtacttaaaccaaacccaatacacaataatacggttagtgagccggtc

SEQ ID NO: 7056 - DNA, 540 bp, Glycine max
  Clone ID: jC-gmfl02220083a11d1
aataaaactccaacaattttattaatgaaaatactttacaatttcagcacatatacactgccatgaatataattttgcacgctataattatctttcgccacaaacaatggagtagtgctcaacaaagcacaaaccaacaataataacagttttagttgcattaatttacacaagaaagtaaattaacgtaataggcaacacatgtgtgtcacgttcatgaggatcattttataatgatatgcaacattgaattaaatattctcatgcaatggagcattctggaggaaggccttgagggaaacgtctgatatcagtgcaataattgtaaatcatgtaattcttttgcacccaacggatctttgcctgccccgtggcgtccagtgattggccagtggaggaagaagtttgggaattgaagtttctgtatgaggctgtgaatggggccttgctccaatccgttttcacaagcccaccccttgtggcccaatccctagcgttccaaagactagagtatattctcatgggttgctctttgggatg

SEQ ID NO: 7057 - DNA, 595 bp, Glycine max
  Clone ID: jC-gmfl02220083a12a1
atcactagggactacgtcgacgtagtgggtagccaatgtacccaggtccctgtacactgcacacccagtaaccctgtgctgttagtaagctgtgcaacattacaggtattcttgtgctaacaaccgtgtctgagatggataggtttgattggatagccagcatgtgcatgagattagttgtagtacgcctagcaactaaacgcatagtcgcggtgctgcatcatgtaactacattagcaaacattatgggtgtcaacttatatgtggggcctgtatttaaattacaattgcgctgtgtaacagtacaaaccccaatagctcgaaaagttggtcgctggatggggaccataggtatcggccgcttaaaaaacgcaattactaacccaactatcatggctctgggagcagcaataatctttagcgtgggccatattaggcgtcaccaattccagtgtaaaattaaccgtagcgtacagtggcaagtcggctggacaactaactacggtgagcattctgtgcatgctagtgaaaaatatactggttgtggagatcacgctgataatagtcaataagtcactggacatgtgcatagcct

SEQ ID NO: 7058 - DNA, 462 bp, Glycine max
  Clone ID: jC-gmfl02220083a12d1
aaccactagaggaacatgaaatgaatcattgtctaaacttatcaagcactgcgcaattacacaggagtgatggctcatggacacgcgaaattgaatatctacctctagcaaaaaggctatggttaacaagaatctttccaggatgaacccccttgataggccacttattttaatgcagaatgtaaagaacggttacagccaggacgggcgggcacccaacttgcgcttgcactcatcatcacctgcatggcaatgttgatatgcaccatacggcgcaaacctactgtgtaaggagtaacatgcaataacctgccagtcatgctagcatagttactgagagaccagcatgttccaaacttttcaaatgcatgactatcctcatgcaggtcactaactgcacatgttccagtcctggactcaccatcaatgattcttgatatggatgacatctaagatgcactt

SEQ ID NO: 7059 - DNA, 486 bp, Glycine max
  unsure (1)..(486): unsure at all n locations
  Clone ID: jC-gmfl02220083b01a1
ggggatgagagagcatgaggaagaccgtcaccaagcaggtctcctcaggaagcccatggtacggcccagaccgagtcaagtacttgggcccattctctggcgagcccccgtcctacctaaccggtgagttcccaggcgactacggctgggacactgctgggctttccgcagacccagaaaccttcgccaagaaccgtgaactcgaagtgatccactccaggtgggccatgctcggagccttgggctgcgtcttcccggagttgctgtcccgcaacggggtgaagttcggagaagccgtgtggttcaaggccgggtcccagatcttcagcgagggtgggctcgactacttgggcaacccaagcctgatccacgcccagagcatcctcgccatctgggccacacangttatcctaatgggtgccgttgaaggttaccgtattgctggtggccccctcggtgaggtcactgacccaatctacccaggtg

SEQ ID NO: 7060 - DNA, 337 bp, Glycine max
  Clone ID: jC-gmfl02220083b01d1
aacttaccggaggcattaccgtgctagatgtgtagtagtaccaccttcttgggggggggggggggcgaaaaactacgaataggaacggccaggtccagatataacagacggtataggagtgcaacgatggtattaaatataaagtgaaaaatgtgtaaaacgtagggtcggtgggcatctgtatgggttccccatcaacggccgcctagacctttacctcggcggcggcatacccgtactaaccgcagtcctcaccggtgttaagccatttgggttccgcataagccttgcaataaacaacttaaatagacacaatagccttaagtcgttcggtggc

SEQ ID NO: 7061 - DNA, 592 bp, Glycine max
  Clone ID: jC-gmfl02220083b02a1
agaatacagcatttcatttctcatcatcaatggctttctcttgtaaacttgacagcttcattctctctgcctataaaccccaaaactccattctcccactttcaatccaaccttcctccttccttccatctccttcttctttgaagcctcagaagcttcccttcagaattcgctatggttctaccatcagagccacgtcatcatcctcaaccccttccgcaaccattgccgaacctgaaggcattaagattaaatcgattccaaccaagcccattgatggacaaaagactggaaccagtgggcttcgaaagaaggtgaaagtgtttatgcaagacaattaccttgcaaattggatccaggctctgtttaattcattgccaccggaggactacaagaatggtttgttggtgttgggaggtgatggtcgatactttaatcaggaagctgcacagataataatcaaaattgctgctggaaatggtgttggaaaaattctggttggaaaggaaggtattttgtcaacaccagccgtttctgctgctataagacagagaaaggccaatggtggattaatatgagtgcaagccataat

SEQ ID NO: 7062 - DNA, 215 bp, Glycine max
  Clone ID: jC-gmfl02220083b02d1
aggctttccgagggaattagccgtgctacatgtgtagcagtagcacctgcttgggggggggggggggggggggccaatagatcgcaaaggccgaggtgctggcagcacaacgaatgttacgggtgaaatggacaaaaaaggccataaaatgggcaaaccttgactgttggacactactaaatgaggtggggggaggaggaggggcggctatcgtc

SEQ ID NO: 7063 - DNA, 320 bp, Glycine max
  Clone ID: jC-gmfl02220083b03a1
tgtagttggaaagagggcttaagggtgaagggagaagggagaagggaggagaggttgtgggttcggattccccattgacatttctaatcaaactaacaaactaatatttgctgataaagaaaaaagaatcgtaatgattttgattgatagtctcttattttgtgtgagtgataattgtgatgcttatgtagctaagtcaacatggctcaccttgaagattcaagtgcatggaattcgagtatacctcaccctaagctcaatgaaagaattctgtcttctctgtcacggagaactgttgctgctcacccctggcacgattt

SEQ ID NO: 7064 - DNA, 395 bp, Glycine max
  Clone ID: jC-gmfl02220083b03d1
ccagctcgacctgaggcagagtttgccgcttactagctatgtctagtgtgtgcagtatcactgtgcgttggggggggggggggggaagaggtgaaaggaaagaggagggggggggagggggaaccgggggggggggccggaatgcaaaaggtgggtagcgcggatgagggggttaagtttaaaatagcccgaaccattggaaggtggcaaagcaatggtagagggcccccgctaaataattccgggtaagctaaacggggaaatatgcgggccataagaattcagctagtatggcgctagggtaaaataccacccgaagtataaagcgggagcccgcggtgtaggttaaggggatgtggggacggccacagtatgcaaagtcccggggaaatggt

SEQ ID NO: 7065 - DNA, 439 bp, Glycine max
  Clone ID: jC-gmfl02220083b04a1
aactgaggaagcgagctgatgctgacaagaatgacaaatctgtgaaggatctcgttctcctactctttgagactgctcttctaacttctgggttcagccttgatgatcccaacactttcggtaacaggattcacaggatgctgaagcttggactgagcattgatgaagatgctggtgaagcagatgctgacatgcctcctctcgaggacgccgatgctgatgccgatgctgagggtagcaagatggaagacgttgattaaatctaacttaattattgatttgcctttgtgtttttagaaacaatgattggggaacagtcttttactatgtttatgttttgaattttcgaaattctggaatgttggctagttaggtgccgtttcctggattagtagtgtatttagtttctatatggaaaatttgtgtcagctttctggcc

SEQ ID NO: 7066 - DNA, 411 bp, Glycine max
  Clone ID: jC-gmfl02220083b04d1
ggcttgacttgaccagcaagtttgaccgtactacatgtgtgcacgtcctccttctttgggggggggggggggggggggggggggggggggggggggggggggggggggggaggggggggatggggggggaggggaggggaaccagtggaatggccagaaaggctagacaccacacaatttacaacaataatggaaccaaaacatgcgggtttagtacccgggtaaaaaaaataggcccccagtaagaaggaccccacctggaaatcctgctggtagtgactgatttgtactggtcctagatctactcctcgttcacacaccacctagcgtactggtgcagagtttactcgcggtagaaagctgtacggtaactggaaaaagatgcgccagttgcgggttcaaacccggccc

SEQ ID NO: 7067 - DNA, 200 bp, Glycine max
  Clone ID: jC-gmfl02220083b05a1
acactagtgagtagctgtcgatctatcgctagcaatgtaccaagtacctgtcactgtagagcgcgctggcagaacagagtgcatgataaccctaatcaatgcaacacacagagtcatgcaggaagcgcaggaaacaaattggactcagctagtaacctaacagattttctggaggcgcaaaagagtgtttagctaggctg

SEQ ID NO: 7068 - DNA, 490 bp, Glycine max
  Clone ID: jC-gmfl02220083b05d1
tgcttccttgccagcaatttgccgtgctagcatgtgtgcacgtcctccttcttggggggggggggggggagggggaataggttaggggactagaattaggcgcaattagtagccagaagagacggcccactagtatgtttaaacacccacgcatgggaagagttggactgctgttgccgtttgcgatgactgatagcttgacacttcacccaggtaactcaagtagcttaccggtgtaaattagcacaccaattgatccaagtttagcacagctattgtatcgccactgatgatatgcctggtatgtttgcgagagcttgtactggttgaatggggcctggcggtttgtccactgctggattgaagtgaaggtgtgagtataacagtgccaacgctagggatactaccatgcaaataagccctcagtaatggctgtagccaagttgccctaccgcaatgcgctgctagcacactaaccccagctatgggc

SEQ ID NO: 7069 - DNA, 474 bp, Glycine max
  Clone ID: jC-gmfl02220083b06d1
cgacttgacggtggatttaccgttctagatgtgtagtagttgcaccttcttgggcttggggggggggggggggggggggggggggggggggggggggggggggggggggggggggacgagtacaggcccacaactgttggaaacattcaaaaaataatacccaactcggggaaataaaggccttgcggggaacgggattccccagctggaggaggtaccgaagaaacagtttaacgcctattagggggaaccgggtaaggtttgtgggaaatttcggaaaaggggggtttaactaatggtggaaaaactaggcggaattggaatataaaatcattggggttttattaaaagagttccaagaaccctaacggatttagggaatagggctacagggggtaaaataggagttgttgcctcggccatggcattagggcttgcccggaaattttctcggggtttggttgcaaactttgg

SEQ ID NO: 7070 - DNA, 516 bp, Glycine max
  Clone ID: jC-gmfl02220083b07d1
tcgactgacgagcaaggttgccgtgctacatgtatgcagtagcagcttctttgtcggtggggggggggatacgttgaattaagaaattgagaagagaagaccgggccagagccggggcggcgattagggggtagtaaggcatatactgcagtgaatcgggcgagataattacacaacccgaaaaaaagtagacaagggggactggatagtgatagaaagcaaggagaggtagtaagtcgcaggcaccgttcggtgagcaaaacatggaagagtgccgcgagaagccccgtggtggtacagcccatatcatgcaacagtggcgttgtaggtatagtagcgtgcgtagcgaataaagataaacagcgtagaactatgattggagggcagtgggttggaaaaaagagcccatcaaaggcaaaagagtccgggattgcagcgctataggtcaaccttagcgatgggcaaggccgtagatagagcccctaaactgctaaaacattaaggtcaggaccgaag

SEQ ID NO: 7071 - DNA, 523 bp, Glycine max
  Clone ID: jC-gmfl02220083b08d1
gactgccgggcgatttgccgtgctacatgtgtagtagtagcaccttcttgggggtggggggggggggggccagacaaagagtaattggtagggtacaaaaaacactagagttgaagcgcgaagggggaaaaatcgcgagagagaagtatcaggggaaattatacaagagcaaaagagaaggctaggatagcggattactggccgcgccgaagattagaagagaaacttaaagccatagaagcggggaacgcgacggccactaattcggttattggatgagagccactaaaggggtccacctagcataggggttaccaaatgcatggctatcttgtacttggtggtgctgtgggtctaccgggtgtggtggtgtctgggggactactagcggattgggctgcatcgaggacactgaaatcggtgaaagttggtgggctggcgatgcggaggttggctgtggctacttgcagagactctgtagccctgtgagccggcgcgagtgatgagtgcgtatcttggcaaa

SEQ ID NO: 7072 - DNA, 545 bp, Glycine max
  Clone ID: jC-gmfl02220083b09a1
ggagtgactaggactagcgtcgatgtatcaggtaggacaactgtacccaggtgcctgtgcactgctgacgtctcacacgggtttaggttgccgggttgtatttgtcgcgtcagtcggtgacccggacccggaccgtttgaggtaaggtctggtaagggtgctaacacatctgttgtttcacacatcttagcccaccgcatacgcttcggcaccaagttcaaccccgtaatcgtaatagtaatcggtctgctgttaatccggttaacggggttcggtacaggcttcgtcaggttattcgtacggttggtaaacagcttcttctggctactgctcatagtttgcttcactaataatcttgtagagataacccgtctagtggcaaacagcagtaaatttgttcaactgatccgggccacctacagtatatgcgttagggccggtcgcctgtgctgtggcttaagttaatgccgcccatgaagatgacgactattcagattaagattaagattaagagtttaatacagaagctgacacggctgccgctc

SEQ ID NO: 7073 - DNA, 444 bp, Glycine max
  Clone ID: jC-gmfl02220083b09d1
cactgacgagcgagtttaacctactacatcgttgcactaccaccttcttggggggggggggggggggggggggggggggggggggggggggggggggggggggggggggggggggggggggaatagggacaacaaggtaaagggaggaacgacccaccctaacctaaaaacattcccaatatttaaccaccttatacccttaaattacacattacaatttttacaaatagaaaaaatcccccacccaaaatagaaatttaccctatagaaccctcttgcctttctaacccatttccttacaagttttaccctttaacttattgacataaccacaaatacaacagttaaagacacaaacttcaacttacgtgggtatggtttacaagcccaacccccaccccccaaccctaaaattctttttaaagggccccacgcacaattatc

SEQ ID NO: 7074 - DNA, 542 bp, Glycine max
  Clone ID: jC-gmfl02220083b10a1
gagcactgaactagtgatctagctgttgagtgtgtcgggtagcgcaactgtacccaagtacctgtacactcctgtcactgtggtgtgtggtgtgtgtgacccggcttggttggtgtgtgttgggttgttgttggtttcggtcttccttccaagttgaggggttccttagagggttcctgcttgctaaggttttggtattggttcaatgtaagtaagtggggtaaggtcaactgcggctgagtggggctactcagaggccactacacacacccaacagcctaacgtaaactccgcttgtgacaaccacgagggtcgtcgtcatcaccacacttgtgcaagtacccctcttgccaaaagtaagggttgtggtctcattgggcctaggccttccaaactccatgcgcaaagtaggctcatggataaacctttgcatacgattgcaaataataatgcatgagcaactggcttcgtccagctgctttcgaaacggcagctgtgaggctgaatgcaggtgaagctgggctgtgcgccaagttgtatac

SEQ ID NO: 7075 - DNA, 438 bp, Glycine max
  Clone ID: jC-gmfl02220083b10d1
cctcgtatatataaatgtagttgtacaaaatttcagaacataaagatggcaagcagacagtgcgcccctccaaaattgaagctaacttcagcttggcctcttcactggcataactcgtttcttcatttaatcaaactcgcttcaagtacgttaatatgcctaagccagcaacaagtgcagcaccagcagcggcggcactatatgctgaagcccatgcatctgaataagcataacttcctgaacgagaacctttcacattatcacgtggtcctgcgtagtccaaatgcaatttcaaccccttcaaaccagctgtccttgcatgatccacagctgctgcaagatcactgtctgaagccaatacaactttatcatgatcttcgtcttcatacagaatttggggtatgttgttaggatcgatatcatcaccaagtctctgaa

SEQ ID NO: 7076 - DNA, 572 bp, Glycine max
  Clone ID: jC-gmfl02220083b11a1
gatcacaggacagtgtgatctatgtagcaatgtccaggtccgtcatgtggctcgtggcgcggcgcgtttgtggggaactgagggttggtgtggaatataaggccggcgcttaaggcttagacgtattaattaaggaataaaccgagagagagtagtagagtagtattaaagcaaaaagaggcccggcggggggtggcaccgccgcctgatggggcgccgcctacttatactgccgactggggattaacatgggcaaagaatcgccccgccgcactcgcttaaaagtgagcacaagccaaattggtgtatatgtgtttggcatacacttgtgcctgtgcctgggtcggttaaaaaacacgatggcggtccaaaaaggcatagctactgtaactggcgcttgccgaatgtgctgccaatacgaatgcttgaggagggagtggtgtgccccttgatgtagcatcaaagacatgggcacgggggcccgaatggcacgccgcagttggatatgtgttatatcaatcgaggtacttaacccaaacccaatacaccataatacggttagtgagccggtc

SEQ ID NO: 7077 - DNA, 545 bp, Glycine max
  Clone ID: jC-gmfl02220083b11d1
aataaaactccaacaattttattaatgaaaatactttacgatatcagcacatatacactgccatgaatataattttgcacgctataattatctttcgccacaaacaatggagtagtgctcaacaaagcacaaaccaacaataataacagttttagttgcattaatttacacaagaaagtaaattaacgtaataggcaacacatgtgtgtcacgttcatgaggatcattttataatgatatgcaacattgaattaaatattctcatgcaatggagcattctggaggaaggccttgagggaaacgtctgatatcagtgcaataattgtaaatcatgtaattcttttgcacccaacggatctttgcctgccccgtggcgtccagtgattggccagtggaagaagaagttcgggaattgaagtttctgtatgaggctgtgaatggggccttgctccaatccgttttcacaagcccaccccttgtggcccaatccctagcgttccaaagactagagtatattctcatgggtctgctctttgggaatggaa

SEQ ID NO: 7078 - DNA, 668 bp, Glycine max
  unsure (1)..(668): unsure at all n locations
  Clone ID: jC-gmfl02220083b12a1
gtactcgaagtagcganctagctgtggagcgtatcaggtagccaactgtacccaggtacctgtacacgggacacgtggtggcagttggtgggggtgttggcaatgtaaatagcctacagcaccgccggtgctgacagggtgccttaacgttagggcccagcacccgtaccaggctatggctgcaaaacccgagtaaagagcacgataaacaacaccatggcaccaataacacgttgtggtgttgttaaagcaatttccggtataacaacaggttccggtgtagttataagcctaaatttagggcgcaagtttgtaggctgcggtacgataggcaccaccgggccaagcatacaaagtttggcggcttggtgcatttggattacacactgtacctgacaggtgccctgcaggagcggcagaacaaccgatttggtgcgctggtaagctggaggcaggagggtaggcgaaggttgggattaggcaggtgaacggggctggggacgagacaagcagctaagggccggcgggtaggattagcggctgcttgaggaggaaggtggatttgcagggacagctaagtgccaagagcccacagctagaagccgaccaacagccgtattaggaccaggaaagatgtgatgggtgggacagttgggggtttgacagtg

SEQ ID NO: 7079 - DNA, 534 bp, Glycine max
  Clone ID: jC-gmfl02220083b12d1
gaaagcacgaagtttggcacatctaagtgccttttattacacaaatattacttatttgaaaggctaagaacgaccaatggaaaaccactacttcacaatggccattaagctccaacctactcaatgcctaacttctttcttagatccataatgaactcataaaccttttgctgatcaggaagagacttggcaacgctttctttctgaaggcacctcttggcccaagcaataaacttggggcactcactctctatgttgagggtgccaaaagtctcataggctttgaaccaagtgtagaatggaacaagcgctatatccacaaaacctagattgtctcctccaaaataagtcttgtctcccagctgttcctccaacaatttaagggcttctatgaactccttcttggcagcttctttttcttctccttttgatgtccaaatcttccttccaagatcatatatctattcgacattgagaattaacatgcaaatagatcataaagtgtaagactgagatcagggaggattaagagat

SEQ ID NO: 7080 - DNA, 278 bp, Glycine max
  Clone ID: jC-gmfl02220083c01a1
gttggtgtgcaactctccgcgataaacaagggaggattaaagtatgtaagaacggttttacaataccgattgtttcttctgtgcttatgtatggttattacatttgtaatactacagttatttagccgttgcatgcatgaatggtgtgtcttctattaatacctttgtgcacagcttgggaggtatctatcaacttagctgtgtaattttgccccaagtgttaaaaagctaataacacaaaacaaaaagagaaatacagaaccacagataagaggcac

SEQ ID NO: 7081 - DNA, 494 bp, Glycine max
  Clone ID: jC-gmfl02220083c01d1
ggcttgccgggcaaaggaggtttccccacgtgtagcagtagcaccttcttggggggggggggggggggggggggggggggggggggggggggggggggggggggggggggggggccatatggcccctaaaagggtttactggacggcagacaggttgtttaactgccctttaaaccggggaagacaatatattttggggagctagctaatcccgaaagaatgctgcgaggataaagccgggaattggttgggactgtaaaccaaataagtccgaggccaaaattccggggatagatgggaagttttttggcgggagtccccaagcggcgttataaattgggccttcaaggttccctggatcgatcccgctggctaaactgagactttggtgaggcccgcattgaaagggaaggtatgccttcgtcggggataatcgacggatgcccaaaatttgccgcggatttaatggaagtcttggccacaataggttttgg

SEQ ID NO: 7082 - DNA, 485 bp, Glycine max
  Clone ID: jC-gmfl02220083c02a1
gaaggctctttttttcttttttgttggtttctcttgtttttgtttttgtaggtactgaggaagaaagaccaaaactttatccgcttgcttcacttagctcaagagcgtacaattcaggcaaaggccttgaagtcggagtgtgggttaaggatctcttaggagctgcttctgtcttgactgaagaaatggaggtatatggcaaatctatggttgcaggtcctgcaaatgttatttttctgtcaagtattttgggccaagaaggtccagttcccggtcacaaatgcgactggaaatgtcaaaatgaacatgtttgtggaaacatgtatcgctgcaagctaactgggctgactcacatctgtgataaaaactgtaaccagagaattctgtatgacaaccatagctccctttgtcgagctagtggtcaaattttccccctttcacctgcagaggaacaggcagtgagaggcgtacgaaggaagcttgat

SEQ ID NO: 7083 - DNA, 417 bp, Glycine max
  Clone ID: jC-gmfl02220083c02d1
aggctgcgggaatttgccgctctacacgtgtagtactagcaccttcactcgtcggtgggggggggggggggggggggggggggggggggggggggggggggggggggggcccggccctggggggggaaaaaaaaatcaatttcccacaggggggtttaccggataaatttttccccggggaataaaaggatagtccctggccagttaaaaccaaaaaatccccaaaaaaattggggtaacccggaccaaaggggttgggaaccccaaaattagggggaaatttttaaggaacacccaaagcgggtttcctcccaagtaggcataagccgcaaaaacctttttccccaagggtttcccaaaccctatggggagcgccataaaaggccttaggcgttaaccctgggaatcccccaaaaa

SEQ ID NO: 7084 - DNA, 461 bp, Glycine max
  Clone ID: jC-gmfl02220083c03a1
ggtgtttctcttttactccctcaactcaactcaaccacctctccccttttgcaattccaactctttaacatggcacaacaccaattacgttgtgcaatcaactatgtttcaagggtttttcttcaattctcaaactaaaaagtaaaagtaggtcatttttctggcagaggtccctctcgctgcttctttgaactccgacacagattagtgggcatatatgatggctgcgagctgggatggaagtagtgaccctggcagtcagtcagatgatagctttcttgagaggttgcacattgagcctctttatgatgcctttgcatgtccgctgacgaagcaagttatgcgtgatcctgttactttagaaaatgggcagacttttgaacgtgaagcacttgaaaaatggatcaaggaatgtagagagagcggtcggagactgctatgccctttgactcttcaagaac

SEQ ID NO: 7085 - DNA, 358 bp, Glycine max
  Clone ID: jC-gmfl02220083c03d1
cgtcggcttccagagcagatttaccctaactgcatgtgtgcacgtccaccttctttgggggggggggggggggaagtgggggggggtggtgaagtgagaaagaagatcgaacaaaccccataacgaaaccagaataaaacaacaggtttaatgataaactcaacccacaatacaattaactactatagtaaatcaaattctaaaggctaaatgcggagaaaattagagttggtgcacgatagttaagccaacagctttgaatccaatattcaaatcaataaagtattctggacataactaacctaaattaacacgtagcattccgatgaatgcaataaatctccttttagatgagcca

SEQ ID NO: 7086 - DNA, 362 bp, Glycine max
  unsure (1)..(362): unsure at all n locations
  Clone ID: jC-gmfl02220083c04a1
catgacagctatcaagtgtcggtctacagctacnaatgtaccagagtcctgtcaccaaacacggtatgcgtggcagtaccccacttgagattgacaatagctgttgaaatgcttgtctgagctcaagcatcgagcaatgcatgcattactagatagttcgttagtatctgctaagttagcgctgatgtatatcctgctagatactcacttaacaacacaaactgtttgtgccacatatgggatgcgaatgcttaaaggtaatgcagcctagctgagttctaatgctaaaaaggccgtttggcaatcttgttgaggctaagcctaaatagctgtgtgaacctgcaccaccgcgataaatcata

SEQ ID NO: 7087 - DNA, 332 bp, Glycine max
  Clone ID: jC-gmfl02220083c04d1
atatcacttcctgagccaatttaccctactatcatgtctgcacttcctccttcttgggggggggggggggtgggggggggggtgggggggcgtgccctagtgaataatcgcccccttatggacgatttggaaacagccgttaatagatctattctcaaagtaaccttttattttaattttccctaaaattcctattctgtttcctcctttaaaaaattattctccatcttttaatttggaacctttcctaaaatttcagcatttacttaattttttgcccccctccttttttttttttttccccaatattccccaaattttttcctattttt

SEQ ID NO: 7088 - DNA, 292 bp, Glycine max
  Clone ID: jC-gmfl02220083c05a1
aaatgaccagctatcgatctatagcttagtggatgtcccatagtacctgtgcactcgtacactgttcatgtaaccaacgtgaactcggggagtgagttgcgtatacacacaaatggtaatatcccccctaccagggaaagtattcgtgtatgctaagcgcagcgcagctacagtcgtcgcgcaacattgcgattgataggggtgcgaaagccaagtttgcacaggcagactcacgtagcaagaggcgttgaacacaggctaacagtaagattgcctgatggcagactcacaa

SEQ ID NO: 7089 - DNA, 589 bp, Glycine max
  Clone ID: jC-gmfl02220083c05d1
agcggctgcccgagggatttgccgtgctacatgtgtggagtgccgcctgcttggggggggggggggggagaggaaataggttaggggactaaaattaggcgaaattagtagtcgggagaggcgggccactaggatgtttaaacacccgcgtatgggaagagttggggtgctgttgctgattaccatgactgataggttgacacttcacgcaggtaccgcacgtagctaacgggtgtacattaccacaccaattgttgtcagcgataccacagctaatgtcatcgccacggttgatatggctggtatgtttgtgagagcttgtactggttacatggggcctggtggtttgtacaatgctgaattcaagggtaggtgtgtgtacgtcagtggcaacgctagggagactaccatggaaataagaggtaagtaatggctataaccaacttgcagaacggcaacgcgccgcgagcaaacgtacgccagctatgggtttagtttgtggaggggcgaacaacctggcaggagagctagggtctgttgtggtaagacgatagcggctacagtacgcgagcagcagacgcctcaagta

SEQ ID NO: 7090 - DNA, 552 bp, Glycine max
  Clone ID: jC-gmfl02220083c06d1
tggctgccgagggatttgccgtgctacatgtgtagcagtaccgcctgcttggggggggggggggggggggggggggggggggaaaactagtataagggaagtatgggataaacaatcgaagatgataactacgtcaattgtaataaaagtgcgtgataacactataatgctagttagccgcttaagaatcctaaaaagcctacgacgcaaagatacttacccataataaaacgtaagccaggggggggggttaaagaacagagaatatattgcgttaccagagggagtaaagaggtgaataaaaataagagagaaataaaaatgaaaacaaaaaataaaagggaaaatataggaatttagcacaacacgtgtaagcctggtcaacaaaacgctacatagggtaccctggccacgtggcaggctatagggcatcttacccgggttacgtaatcgccgaacggtaaggaacaagccgagtttgtgacccacgggactgcacaacgaaaatatcgttgccgggctaggtggctctgggctaagaaacaatagcgg

SEQ ID NO: 7091 - DNA, 580 bp, Glycine max
  Clone ID: jC-gmfl02220083c07d1
tggatgagcctgccgggagatttgtcgatgtatgtagtagcacgttctttgtcgttgggggggggagtagagggggcgcagtgtgggggatgccacaacctgagaatgccaggggtagtgagtaaaattaaagacagacctagacgcgcttgcctgtggagccctagtgtagtcaggaagtttagatagctagcaaaagcaatcagcttgtaacaatgagatatggatgcttgtctccgataaggaagggtgcgggacgcaagagtatgggactgggccgataccaacctggagaacgagaggttgaatttaaatgtggggccaggtcgggtaattagttagccgcattgcggtaggagaaacgcaaaccggtttgcctgactatcaggcacaacaagcgtgtggctggtaaggccaaggttggcacgtgcaaacgacaaggtcagcaaaggaggagaggctaacaactaaaagggcgggctttaaagccgcaagagcatttgggcaaagctagaataaagaagaagcacaagtcaagatctggagagacgcacgtgtggttatagtcgacctgggtttg

SEQ ID NO: 7092 - DNA, 593 bp, Glycine max
  Clone ID: jC-gmfl02220083c08d1
tacttgcgggaatttgcgtggtacatgtgtaggagtgctacctgcttgggggggggggggggggggggggaagttattgagttaataaccaggatggagggagaacggccacgaaattttcatgaccgaaaacccacaaacgaaattcgagcgagagtatgccggagagaaatatcagaatatgaatatacagctaaattatgacatatggcgatggaactagctggtataaacgtaggagtagagtttaggagttaatgagacatcactctggtagattgattaagtggtttaatgacgtgcaactgggcaccgacgaaaaaaacccctgactagtagcgagtattactactgacaacatccgaataaaggtggatacctctagcctctagcctctattaggagcatagggttatgacacaacgcaataaattagacggagattattaaggttacaacagatagataactgttaacagcatgccaggggagggagtatttgtgcgttattagaaacagctggcgggagtggtaagtaattacatggcacactgtactaaaggtgggcgacgactaattggtagtaagaggtg

SEQ ID NO: 7093 - DNA, 470 bp, Glycine max
  Clone ID: jC-gmfl02220083c09a1
gagactcacgagtgatctagctgtggagcgtagtcgggtagcgcaactgtacccaggtacctgtacacacagcaagggcaagtgcacgagcgccaggccgcaaaagcacacgtaaggtaactagcgcccacaccagcggcaagtgcaatagctggtatgtacggtgaggcggcataagcagcagcgaaagctgcaacatagtaggattccacgggtgccctaataccaaaagcatgtagcgatagtggggcaactagtagggagccagctgcagacagtgggctagcgtatgattgtaatgcaggtgatgaggccgtaacagcaacaaagcagcaagaataggaacctgcaaaagcgccacggaaagctgcagaggctagcgagcacgaagcctggctttgtaactatgatgcccgccagcttggggtaccagacgtaaaggagcggactgcagaagccggagttagtag

SEQ ID NO: 7094 - DNA, 483 bp, Glycine max
  Clone ID: jC-gmfl02220083c09d1
cacttgccagagaatttaccgtactacacgtgtagcagtagcaccttgcttgggggggggggggggggttacgaagacgagggaagaggagaactacacaggtagaaggcacaggacttcaatgggagatacaactcattaaggattaaaaaaaaaaaaaaaaaacaaaaaaaacaaaaaacaaaaaaaaaaaaatgaaaaaaaaccgcctcacttcaagtcaacaagtggaaacatctgaaactatcgaagaattcgactgagatgcgatcatcgactagcataaacgataagactatgtcgagacccaaattgaaaggcaagttaggccatcaagggaaataatcgccgaaagcccaaaatttgccccggattaaatggaagccttggccactaaagtttttgggacctacagcctccaagactcaaaacctttcaatccagactttggataaaaacggcaatacttgcaagcctcaagcc

SEQ ID NO: 7095 - DNA, 547 bp, Glycine max
  unsure (1)..(547): unsure at all n locations
  Clone ID: jC-gmfl02220083c10a1
gagcactcgaactagtganctagctgtcggagtgtagtggataagacaactgtacccaggtacctgtacaccggagcggcgcactgagaactgacgggagtcgcaccacaagagcaacggcgggcggggtgggcggctgctacgacggggccgactagccttagcttagcctctacctgattaaaccggtttgtgttcaagcaaaatgcctgagccgcactcggtggtccaccgaaaagctctaacggggacctggctgcgccaactatataatagttcacttgggaaaattaggttgcaacacgctcggcaattaataaaccatgataggaagcctcaataagggacagtacatgtgaaaatacggaattaataactgggtggggagctgacgcaatctcaacgttagtataatcatagagggagaggtcctagacagaatattcgatgtgtgaagagtttagatgagcaaaaatagccagagccccgccaccaagggaagcaaattggagagcagcaagcccggaataaccctcatctattccta

SEQ ID NO: 7096 - DNA, 453 bp, Glycine max
  Clone ID: jC-gmfl02220083c10d1
atggaacaagggcagaagatttattaaagccgcgtaagagacaacaagtaggtacgtggagtgtcttaggtgacttacccacataacataaagtgacattaacaaacatagctaatgctcctatttgaatagtgcatatcagcataccttattacatatagataggagcaaactctagctagattgttgagagaggtgaaggtactactcaatgtagtacatgggattaggaagcttaaaggtcctgctttcgcctctgtggtctccaagcaaatcgctccattggtctccaatgattccaacaattctgtatccctgccttaacagattctctctcattgctgatttgtatgaaagtgcatttggagtgatacgatgtggatccttgagaattaactggtaccatgtgtggaagccaaccttctttaggcttgcttctgatacgggcatttt

SEQ ID NO: 7097 - DNA, 598 bp, Glycine max
  unsure (1)..(598): unsure at all n locations
  Clone ID: jC-gmfl02220083c11a1
ggactcactaggactagctgtcgacgtgtgggtagcaactgtccaggtcctgtcaccaacaggcgcatagcctgaagggctgtataagcggggggcggagccaaagcagaagacgcacgccgtgtacgggtccactaacgccttgcaatagcaaggatgatggcggcacggcgttggggcggcaattgcggcggaacaatatgcgtaatacactgtgctaccagcagtttatttgactgctaccgtggcggacaagctatggttagcatgcgggtagacacccagcgcagccggtacggtgcaggcatgttatgaaccataatatactacaaaaccaggtattactaaagggcactggcacacctgagcaacgtagtcagcatagtaaccaacactggcaaaagtaagctttcccacgccgggtagctctgcagaggcggcttagccttctgacacagctacggggtgggctacccccgttgcgagagcatagattaaaaccgaccaaccagccaataaccgttaaaaggcaacagatgagtaagtgcttgctttttgggngtaagctggtgcactgtaggtacagcggtccctaatc

SEQ ID NO: 7098 - DNA, 507 bp, Glycine max
  Clone ID: jC-gmfl02220083c11d1
ctcaataataataataatatataaatttcatgggaacaattatgtagagttagttaaccagacatattatctatgattatgacatacacaccatgtgctttcatctaatggcaagtggcaacttttaagagtttcctcccccactccatacaatcacaaacccacaatagttcaatttattttatggcaatttttccgtacttcccccttgaacccttctttgacgtcgagcatgctcatcttcaccattgcttgttggaaatccaagaaaaacaaggcttggttcattgcataagcattcacaatgttcctcgtttgtgggctgttgtacaacgtttggtccgatgtaagaaccccgttgtttgagaccaaatcgttgaagtattcgctgtcaaaatcgttcctcgtggagtcaaagggttgctcagcagtgtcacccgcactgcatgtcttggagagtgtctttgcaaattctgagtccaaaagtgggtccacttgggtcagtct

SEQ ID NO: 7099 - DNA, 572 bp, Glycine max
  Clone ID: jC-gmfl02220083c12a1
agagtcaactgtgactagctgtcgatctgtggctagcaatgtaccaggtacctgtcacgactaagtattagtgggccagtaatttgttaagggcgggataagagccaatacatttgtgttgggcaagggcactagcaagggcggtaaaatatcctaacacgcaaagtgcggcagagctagttaatgcacttagccaggtgatgcccgggcgaggtaccaatgagggtgagggccaatgagtacataaacatgcaacacaacgtgggaaaaagtactcaagtgttacgcacagtactaaacggtaggctgtcccaaaatgccaggcggctactgatccagcataaaaataggtatcgtgataaggagcataaaagccaaaacagacgacaagggctccaatagaaacaggagagtaccacgggactgcggtagttgcgttgcttagagcgaagagtactggtacagcagtaccggtgaaaaggcgccaaggccaacaaaccggccgtggcagagcacaatgggcaaccctatgtataggagcgcagctaacgcctaggtaatttgaacagtta

SEQ ID NO: 7100 - DNA, 526 bp, Glycine max
  Clone ID: jC-gmfl02220083c12d1
aaaaaaatatattatatatatcactcaaatggcaacacattaatccgaacacacaggtacatacaccaatatattacataaggtaatatgtagattctaaattaatttattctagtaactagtaacaactcagaaataaacaaccaacggcagaatatgatgttctctgggcagttaagctcatcataactagtcatctggctaccagatgttggcttattggggtcttccttctgaaatcttaacaattagaaatccttggtcacaaccaaatgcaagctgagatgatcctttcttgtatccaatactccatactctcttgagaccaaagttcaacgtggtttgaagcctgtaagtgacagcatcccatattttaacagtagaatcctctgaagctgttattattataggaagctcaggatgagcacatattgctgtaacattgttttcatgtccttcaagcgtctgtacacagtttctagaatgataatcccataccttggcagtgtatcatcagaaccactta

SEQ ID NO: 7101 - DNA, 391 bp, Glycine max
  Clone ID: jC-gmfl02220083d01a1
aaaaaaaaagaaagcaaagggtaggcattgacccctttgcacaaaggaaaagaggggtggtgttgtgttaaaaaaatattgaacttggttggttctaagtagaaacaaaaattgtcattttcccatttctgcatttttggtttgggagaggagaaaccaagaattaagaaatgggttgctccgtaagagtttgttgtgtcttatttttggtgttgttggtggcatgtgttagaggggaggacccttatagatcctacacttggaatgtcacatatggagacatttatccacttggtgttaaacaacagggtattttaataaactgggcattttcagggccacaaattgaggctgtgaccaatgacaacttgattatcaatgtatacaacag

SEQ ID NO: 7102 - DNA, 566 bp, Glycine max
  Clone ID: jC-gmfl02220083d01d1
acttgcgggggtttgcctgctacatgtgtagcagtaccacctgcttgggggggggggggggatggatattcataataaataataagaagaagaataagtgtaggagggttagcctataggaatagtaccgtttggcaattgagggaaagaaagaaagacgggaaagaacaacaagagtagaagttaaatatacagcagtggagagagactgcaagggccatagaatatcaacagcacaccaccaacaccataccacaaagtaagaatgtgagaagaagtgagcctagtagaatagcaagaagccgataacacaataacacaacacctggcacggaacttagcaagccaaagcaagcatatgcggtaaagaaaaagtttaagcggccgggccgccacctaggacgacgcgtttatacttggcttatattcaagactaggctggccaaggcccgatgtagtgtgttagcaagggctaccccaagatatgtgaacagaaaaggctgcctttaaagatgcagcaatttaaggtgtacattgcataggttataggtttataggagttaaac

SEQ ID NO: 7103 - DNA, 540 bp, Glycine max
  unsure (1)..(540): unsure at all n locations
  Clone ID: jC-gmfl02220083d02a1
tcagcttaatacttatgataaggctagaaatgctgtggctcttgcactcagtccagttgtcaaagctcttgttgatccagatggtgcactgagggacataaggaatttggatagtattagcttttcagactggtttttatccaaaggtggcacacgcatgagtattacaaaaatgtgggatccagttgcctatgcccttgggtttattgactgtgataatatcagtgcccgctgcatgctcaccatatttgcattgtttgccacaaagaccgaggcttcccttttgcgaatgctgaagggttcaccagatgtttatctgagtggccccatccgaaagtacatcacagacagagggggcaggttccatcttaggtggggatgtagagaagtacttcatgacaaatctgctgatgggagtatttatgttacaggactttccatgtcaaaggctactgccaagacaattgtgaaagctgatgcttatgtagctgcttgtgatgtcccttgaattaagagtatacttncatcaaagtgagggaa

SEQ ID NO: 7104 - DNA, 460 bp, Glycine max
  Clone ID: jC-gmfl02220083d02d1
catgacggcggaggtggcgtctacatgtgtgtgtttgcagttccgccgtgcttggggggggggggggggggggtgaggggtaggtcaaggtaggatagggagaagtaagaggagggctggagcaatagagtaccaggggaagacaggtgccggggaacaagttcacacgcaacggagaacccgaggaaatcagcaagtaagggggggtgattgctgttgcgccgaaaaacacggttagtgctgtggcaagactggatggtaaaaccatggtgctggttttacgcaagcgtggccgacaacagagcagggtggtcaaggcaccggtaggtcacggtaacgagctgtcgaatgtactagcaaaggtttggattgctttaatagctaagcaagcaacagtattaggtccgttaagttaaagacaaagaaatgcggtgggtatccgggcaccattgcatgcgca

SEQ ID NO: 7105 - DNA, 510 bp, Glycine max
  unsure (1)..(510): unsure at all n locations
  Clone ID: jC-gmfl02220083d03a1
gaaggcaagatgtcgaagagaggacgcggtggttcggcggggaacaagttccggatgtcgctgggtctgccggtggcggcgacggtgaactgcgccgacaatacgggggcgaagaacctctacatcatatcggtgaaagggatcaaagggcgtttgaaccgtctcccctcggcttgcgttggcgacatggtgatggccaccgtgaagaaggggaaacccgatctgaggaagaaggttttgccagctgtcattgttcgccagcgcaagccatggcgccgaaaggacggcgtctacatgtatttcgaagataatgctggtgttattgtcaatcccaaaggagaaatgaaaggttctgctatcactggtcccattggaaaagagtgtgctgatctgtggccaaggattgcangtgcagccaatgctatcgtttgagtgggaattctggttaaatgagttctatgcttaagcttgtaggactgaaatttgtctcaggtttttttcaagcttgaa

SEQ ID NO: 7106 - DNA, 559 bp, Glycine max
  Clone ID: jC-gmfl02220083d03d1
tgctagacttgccaacagatttaccctactacatgtgtgcacgtcctccttcttgggggggggggggggggggggggggggggggggggggggggggggggggggggggggggggggggggggggggggggggggggggggggtggggggggtaattttaaagccccaacgggggggccctttaaaagggtttcccccaaattttttcccccctttttaagggcccccaaatttttttattttaaacccttttttttaaacaaaaaaagttttttatagccccccccggtttattaagggtaaaaaaaatttttttgaaaacaattttagttttaaactagaaaattaaaaaaactttaacttggggccttttttaaaataccgtgtttccccccttttttttaaacctttaaggggcccccccatttttttaaaagatttttccaattccaaaaaaaggccctaaaaaatttaccccctaaaaggggggtttttttttaaaaaaccccccagtattttccgaaaaaaggtggcccccatttttttaaaagatttctcc

SEQ ID NO: 7107 - DNA, 513 bp, Glycine max
  Clone ID: jC-gmfl02220083d04d1
cacttgaccttagccagcagatttaccctactacatgtgtgcacgtccaccttctttggggggggggggggggggggggggggggggggggggggggggggggggggggggggggggggggggggggggggggggggggggggggggggggggaaaaatttaaagccccaacgggaaggccctttaaaagggtttcccccaaataatttcccccccttttaatgccccccaaaatttttaaatttaacccctttttttgaaaccaaaaaaattggaaataaccccccccggaaaaaaaagggtaaaaaaaagtttttaaaaaccaatttaaatttaaaacgaaaaaattagaaaaaacttaacctagggcctttttaaaaaaacccaatttccccccctttttttaaccattaaaaggccccccccatttttttaaaaaattttgccaattccaaaaaaaggccctaaaaaattacccccctaaaaggggggtttgtttttaaaaaaccccca

SEQ ID NO: 7108 - DNA, 150 bp, Glycine max
  Clone ID: jC-gmfl02220083d05a1
tcgcattacatggacactataggtactaactgtccaagtcctgtcactgtaagtgtggtggagaacagagtgtaatgtaaccgaatcgcttaggcgctcagggtcgtgaaggaatatgcaagtaatagtttggattcaggttgagacatg

SEQ ID NO: 7109 - DNA, 231 bp, Glycine max
  Clone ID: jC-gmfl02220083d05d1
gtacgtgccagggggatttaccgtactatcatgtgagaagtagctaccttcttgtgctttgggggggggggggggccgaatagctagcaatagccgaggaacaggcagcacaacgcatgttatggaggaaatgcatagaagaggctataaaattggcaaaccttgactgttggacactactaaatgaggtggggcgagaaggaggggccgctatcgtccgctggaagatgc

SEQ ID NO: 7110 - DNA, 534 bp, Glycine max
  Clone ID: jC-gmfl02220083d06d1
tcttgccgaggggtttgccgtgctacatcgttgcagtaccgcctgcttggggggggggggggggggggggggaggggggggggggggggggggggggggggggggggggggggggggggctggaatgcaaaaggtaggtagcccggatgagggtgttaaggttaaataaaccagaaccatggtaagatgacaaagcaatgtaggaggcccccctacgataattctggttaaactaaaacggggaaatatgcggcccgtaagaattcacctactatggcgctagtataaaatactatccaaagtataagcgggagccccgggtaggtataggggatagagggaccgccacaagtatgcaaaggcctgaggtacgggtgaaacaacggacccttggaactgtgtaatgggcgaactactagataacgttagccacgaaggcagcctagtaagcctactggtacttccgacaaacgtggtaatagtaatgaggggccgtgtaggtggtggccacgttttaaacaagtggtgcagggt

SEQ ID NO: 7111 - DNA, 524 bp, Glycine max
  Clone ID: jC-gmfl02220083d07d1
actgaccagagaatttgccgctactacatgtgtagcactaccaccttcttgggggtgggggggggggggggggggggggggggggggggggggggggggggggggggggcgggggggggggggggggggggggggggggggggggggttttaaaaaaaacccccgaagggccttcccctaaaaaaggtttaccctttgggtaaccaaaaacccccccgggggaattttaccccgaggttttccctaaaaagggggtttaaaaaaaataccccattaaaaaccctaagggtttaaaaaacaccgcccccttctgaaattttggggcctaaaactgggctttaacccccccaaccttaatttccaaacccccggtggtaggccaaaacccctcccccctttttggaaaaaccccctccaaattttaaacccctaaaatttttttaaaaattttgcccaaaaaaaacccccccaattaccaaggtttggaaaaaaaatcccctgggagctttttccccctgggcaac

SEQ ID NO: 7112 - DNA, 333 bp, Glycine max
  Clone ID: jC-gmfl02220083d08d1
acttgccaagcaagtttgcgctgctacatgtgtgtagtaccaccttcttgggggggggggggggggggggggggggggggagagagagaggaaagaggtgggaaggaaaataatagcgtaaccggaataaacccacaggcgtaacgaccaagtagacgcacaataggatttacccccttggtgtataaaatagtaaagggttaacgctgggaaagttcgagttgatgccctctgttatagctagaggccatgaatcccattccagaatttatacaggattttgagcataaacaccctaatgggacagcaagcgttgctagatgtctaataaat

SEQ ID NO: 7113 - DNA, 436 bp, Glycine max
  Clone ID: jC-gmfl02220083d09a1
gagatcactaggactagctgtcgacgtgtgggtagcaatgtaccaggtcctgtcacccgcaaccaagtgtgccaaggggtgggccttgaagaaagagatcgggtggcggggttaaccttgcgcaagtccaaggcccagggaaagggaagtaggagcgtgcgggtggtaagtccaagtatcaataatagccaacgcacaaggccctaaacccgggtgtctccaagctgtttgagttgtctgtgttatattggtactcacgaggattctgttcattataaattgttccgtattcttctttgtagtcttcctaatatttgtagtgatggtccttttgttggttgtcatttttgtaggttttttagtcaataacgtgccggtaatttgtattgtagttgtaacaataaccatggcaaatctggtggctgcgtattcgggg

SEQ ID NO: 7114 - DNA, 528 bp, Glycine max
  Clone ID: jC-gmfl02220083d09d1
attgccgggaatttgcgtggtacatgtgtagcagtaccgcctgcttggggggggggggggggggggaaggaaaagtggggggatgagggaatgacacccggaaaaaaagaagatgcaaacacaaaataaatgttaatgtaaaacaggttagttgctaatcaggcagatgtagctgaatggcaagatgatgctggtaattgtagtcgtttgggccaggtggacgtgtacacaaaatagtagttccgagtaatataaaacaggttagttgcttagactgattagtgttagtatggcgtcgctgtaagttacgcggtgtatgataagtgcacccatccgatattcactggatggatctggctagctgatcgtagactgtggtgagactcgtattgaaaggtaaggtatgccttcgccagggataatcgtcgcatgcccaaaatttgcctcggatttaatggaagtcttggctactatagattttgggtcttactgcctcgaagactcaacagctttcaattcagtcattgg

SEQ ID NO: 7115 - DNA, 552 bp, Glycine max
  Clone ID: jC-gmfl02220083d10a1
gagatcactaggactagtgtcgatgtgtggctagcaatgtaccagagtcctgtcacacaaactcagccaaactctggtctcagctatcaaacacaacaaagccaactaaacgggttctcggggcgtgggtagaaaaaaaagcggaaaggaggaggggtgagcagaccaggccgggtggcgtggggggtgtggcgggaacaagggtccgcgaggggaatacggcgaaactatgtgctctgtgtgtgctagcagtagcgataatgataactagctgtgtgcgacggggtaattgctgctctggctaccccggcgaaaatgaagtaagagaaggaaagaaaggataggtgcgtgtgtgtaaaaaaaaaagaaaaaaaaataataaaaaaaaaaaaaaaagaaaaaaaaaaaccctccttcttcatgacgcactgtcgtcatttcccaggaaaggttcctttcgattggctacctcgtttactgggtttgagacccacgtcagggaaattggcctcgaagtagccttagactgcgggttgcgcgcaaaggcggagt

SEQ ID NO: 7116 - DNA, 304 bp, Glycine max
  Clone ID: jC-gmfl02220083d10d1
gagagagaccgaatgtaatgtattaaattatatggattagttttacaacccctgcaagcccatatgggtgaaaactacagagagcttgcttggagttgtacatgatcctgcccagagagcccagagggcttaacaactgagaaaaaactccgaattgcttaaacatgagaaaaaagacgagaaaccgagcctatgattgaaaataagagtttagcattctgtttatgaaagagctaacgcggaaacttggctaccatgtcttccttttcgtgcaactggaaacggtttacatcgatttgtttga

SEQ ID NO: 7117 - DNA, 551 bp, Glycine max
  unsure (1)..(551): unsure at all n locations
  Clone ID: jC-gmfl02220083d11a1
ggactcactagcgacagctcgatcttcgctgaatgtccaggtccgtcactgcccggataggtaaaaaatgatacatgcagtctaggggtgggcttaataagatagagtggttaactcacatattactgttatggggcaacgatacacaacaacaaggcaacaagcgaacaccccagccaatgccacactctaaccaagcccagaccagtgagcaggagcagcgtgataagcatggccctaatttccagactccgcagaaagagctatcttttcggtggccgccggtacttggattggatttgtctacaccaacaattccaacaccaaaaatgacaaaacagtttaatacgcacaacttcactcaggggcgggattggttaacacagcaactagggccgtatggcaacgtagtacaggggtgtctggggccaagtaaagtgcgagtttaacagcgtggcttgcgtggcatgcagctaggtcagccaaagaggggcacttggcacgggcagaaggngctgcaacgctctaaatgtgagcaaacccacggatat

SEQ ID NO: 7118 - DNA, 490 bp, Glycine max
  Clone ID: jC-gmfl02220083d11d1
cattgttgaaacatgcgtgattgcctttattgctttctcttcgatctgttataaaaacagaatacagcaaacacgagaacattcaaccaccccaaatgtaacttgaccatacgtaggtagatgaaggaatcatattcctcctatttcacattattgaaaaacaggcagagtagtacagcaacctcaatgagagagcccttagatagagatactgttgggaattcctctgaaagtcaatccctcctcactagaaggatagagcagagtgtaaggcattttagctggcccagtgcggtttctcaacgtctcatccttgttcttctgtataagcttatgttcaatctcttgaagcttctttccaaacctcttgaaggcctctagtggaccagcatcagaagtccagaagtcaccaccatctctctccccaaggtagaactcatcagatgcgtgccttgcaggatttctataattgaaggtcaatgagggtctc

SEQ ID NO: 7119 - DNA, 605 bp, Glycine max
  unsure (1)..(605): unsure at all n locations
  Clone ID: jC-gmfl02220083d12a1
gagatcactaggactagctgtcgacgtgtgggtagcaatgtaccagagtcctgtcacgggcacgtggtggcagttggtgggggtgttggcaatgtaaatagcctacagcaccgccggtgctgacagggtgccttaacgttagggcccagcacccgtaccaggctatggctgcaaaacccgagtaaagagcacgataaacaacaccatggcaccaataacacgttgtggtgttgttaaagcaatttccggtataacaacaggttccggtgtagttataagcctaaatttagggcgcaagtttgtaggctgcggtacgataggcaccaccgggccaagcatacaaagtttggcggcttggtgcatttggattacacactgtacctgacaggtgccctgcaggagcggcagaacaaccgatttggtgcgctggtaagctggaggcaggagggtaggcgaaggttgggattaggcaggggaacggggctggggacgagacaagcagctaagggccggcaggtaggattagcggctgcttgaggaggaaggtggatttggagggacagctaagtgccaagagcccacagctagaagcgnaccaacagccg

SEQ ID NO: 7120 - DNA, 584 bp, Glycine max
  unsure (1)..(584): unsure at all n locations
  Clone ID: jC-gmfl02220083d12d1
gaaagcacgaagtttggcacatctaagtgccttttattacacaaatattacttatttgaaaggctaagaacgaccaatggaaaaccactacttcacaatggccattaagctccaacctactcaatgcctaacttctttcttagatccataatgaactcataaaccttttgctgatcaggaagagacttggcaacgctttctttctgaaggcacctcttggcccaagcaataaacttggggcactcactctctatgttgagggtgccaaaagtctcataggctttgaaccaagtgtagaatggaacaagcgctatatccacaaaacctagattgtctcctccaaaataagtcttgtctcccagctgttcctccaacaatttaagggcttctatgaactccttcttggcagcttctttttcttctccttttgatgtccaaatcttccttccaagatcatatatctattcgacattgagaattaacatgcanatagatcataaagtgtaagaatgagaaaagggaggattaagagataacatatacattttgttaacatagatccactataagatatctatactcat

SEQ ID NO: 7121 - DNA, 559 bp, Glycine max
  Clone ID: jC-gmfl02220083e01d1
tcggttgaccttgccggtcaatttaccgttctacatgtgagcagtccccccgtctttgggggggggggggggggggggggggggtctgggaggtaataaatagggaaggaagaataaccataacgggatagggggggggttattggatagagcgataaggctaactaagtctatcctggcacacgtagagaggtattttgttaggtggtggtagctgataaaggagaggagagggaaggtttatagggggcggggttggggggggtgaggcttatgcggatcgatatgggctaagaaaaccaataataagaaggagcaaacttgacacttaaggaacaggcagggggtgtgaatgactttaaactagagcgggaagtggaagtatggctacttattactattaaatttaaggtggttattattaatagtagatataattgtgaggcggggtgctgctatcggtttagagagacgaatagtatgagtcgtattagggctactaaaacttaactaaatggctggcctatgccttatcgacacgagtttggctcctccaact

SEQ ID NO: 7122 - DNA, 511 bp, Glycine max
  Clone ID: jC-gmfl02220083e02a1
ctggtctccaagatggttttcaacaaagagtagacctggtgggtgggtactatgatgcaggagatcatgtgaagtttgggttgccaatggcctacagtgtcacaatgcttgcatggggggccattgagttcaacaaggaaatcacggacttgaaccaaatgggacacgcattatgggcaattaaatggggaactgactactttatcaaagcacacactcagcctaatgttctttggggacaggtgggagatggagtttctgatcattactgctgggagcgtgctgaagacatgacaacttcaagaggtgcctacaaaattgatgaacaacaccctggctcagatctggcaggtgaaactgcagctgcattggctgctgcagctatagctttcaggccctacaactcttcttactctaatctcctcctagttcatgcaaaacagctcttcacattcgcagataggttcagaggtctctatgataactccatatcaagtgctcagcaattcta

SEQ ID NO: 7123 - DNA, 429 bp, Glycine max
  unsure (1)..(429): unsure at all n locations
  Clone ID: jC-gmfl02220083e02d1
ctgcctagaccgtngcgagtttagccgctgctagcacgtgtgcgcgagcacgttcgccgtctttggggggggggggggggggatttgggaatggagctaagggacaatgcaggcagatgtcataaggcgtaaagaacggttacgtcatagaagaaatggggtagaaaactcgtaagttacacaagggataaggaactgcatggcggtataggccgtaaggggaccaacgatgaggtacagccggattacgtatccaggagggtacaatataactttgaagcgcggtgtgttatgcgaacgtagcgagacaaagttagtggtagctggcggggttgtagaaaggctacatagcaggcttctacggccgcctaaaagaggcggaatgcaaagcaacagccctggtgtcccatgtactggcaggcgtggttc

SEQ ID NO: 7124 - DNA, 378 bp, Glycine max
  Clone ID: jC-gmfl02220083e03a1
gcaagggccttataccaaaactatcggtctgcttaacagagctaatacagatagcgactagaccttataagatttgatctatatccataatactggaaggctacttccagttttatggggtatgcctaaaacatttgattgcatcaacccatgcttaacatgggctggcgccgactaccgagctcttccaccccgctattcatttcggaccgaaacctgcacgcgtacctactctccctactgcgagactaactacagcatggcgtagacatcgctatcactactgcctgtgaaagagaggtatacgatcacaatcttccaaactatacaagccgtaagcataaagagaaagcgcctgcagagcctacagagtgaggt

SEQ ID NO: 7125 - DNA, 463 bp, Glycine max
  Clone ID: jC-gmfl02220083e03d1
gcttgccttgccggcagatttgccgtgctacatgtgtgcacgtccgccttctttgggggggggggggggggggggggggggggggggggggggggggggggggggggggggggggggggggggggaggaacaaagaaagggtggacaccattaacccgtttaaacccaaagaaaactgggggggataatgggcaagtttcctaggttttttaaaaccaaaactgggtgggtttgaattaaggggggtacggtttggtttggttttaataagggtggcccaaggggggggagtaatttaaagggcagcattacccccagcgggtttttaaaagtgtaacccctgtggtaccaaagaaggtgggcccaataggttagcgggtaatagcccgtttttccaatgggctaatgccgggacgaattccacagggtttcccccagcctgttttatgcaattcactaacgg

SEQ ID NO: 7126 - DNA, 199 bp, Glycine max
  Clone ID: jC-gmfl02220083e04a1
agagagatgacgagtgactacgtagtaggtggtaactgtaccaaggtcctgtcaccggacagtgcagtagaaaccctagttctatataacagaacaggtgcatagattaagatcgtagtgggaagccgaaagactgaaaggagtctataactaacatatgggaacttgaagtggacagcaatcccaaatagttagtagc

SEQ ID NO: 7127 - DNA, 583 bp, Glycine max
  Clone ID: jC-gmfl02220083e04d1
cgctatgcttgaccaggagatttgccgtgctacatgtgaggacgtcctcctgcttgggggggggggggggggggggggggggggaagaaaacaggggaaaaaaaaaataataatagagacgctatttaagctaactttccttagtttttaggagaaaagcccagccaacatgatacaaaccttgaaaagactatgaatggaacaggaaggcttcggcaccttattgtggtacgtgtgaagagcagagtcgttagcgtctgcaaccaggcactaatgggttgaaggatgatacgaaagtcgtgatgtgcagggggctgggcaggggtggctatggcagctgtcacaatggcgatattgttttataaagggtacaagtgtcgtaaggacaagcattccaacgctaataattaaaattaaaacttatgtcggcaactgtacccctataagattaaagatggcgctgaacaagcctatcgataacagtaaaaacgctacattaaagcatatgcataggcttaaaacaacttaacccggcatttaaccccctaggcgtaaaacctggttagttgtacataccctaggc

SEQ ID NO: 7128 - DNA, 193 bp, Glycine max
  Clone ID: jC-gmfl02220083e05a1
agatgacgagtgactacgtataggtacgaactgtccaagtcctgtcactcgagagtgtgctggagcacagagtgcaatgtaacccaatcgctacgacgcatagagtcctgaaccaatatgccagtgatccattggactcagattaatacccaacagaccttgtgcaggaacatgattagcatttggtggtact

SEQ ID NO: 7129 - DNA, 334 bp, Glycine max
  Clone ID: jC-gmfl02220083e05d1
ccgctttcccaggaagtttaccgttgttcatgtgtgtagtacgctacgcttcattgtctttggggggggggggagggctggggaaggggaggggccgaggaccaggtataacagcccccataggagtgcaacgatggaattaagtataaagtgaaagatgtgtaaaaggtagggttggtggccgtctgtaaggggtccgagtcatggggggttaagcctaaaaactccccaaaaatttggggtaaccgggcccaaacgtgatgggtcacccaaaaattggggtaagtatttgcgggacaaccaacaacttttatcgacacagtagccataaggc

SEQ ID NO: 7130 - DNA, 552 bp, Glycine max
  Clone ID: jC-gmfl02220083e06a1
acacatgactagcatcgatctatagctagcgaatgtaccagagtcctgtcactgacacgtgtgtgtgaaaatggcagagactacgaactgagtaatgtagggcacctgtgctcacaaggcacaaagcctgaatcagcggcaccggtaacactaaccaccacacgatgtgcttaaacatgattagcatttgctggtactattgggcggtcatttacaccactgtatatacaccgttggtgagacactttgtagtctgcacggtagactaatttggtgtggttgggagcgtatgcgctgtattaggaggcctgataaaacctacatgcagataatcccaccgcctattcatgcgcagccccggcctaggggccctagtctggcccttgagccgcctagcagtggcagttggctggatgctattcttccgagggtagcatcatatagaagtttcctacgcataggtcccggcagttgaacatctagccgcgacggcagaaccctcggccgcgatagccgccaataagcgcttccgctgagtgcgccgatgccagg

SEQ ID NO: 7131 - DNA, 297 bp, Glycine max
  Clone ID: jC-gmfl02220083e06d1
tgctagcgggggtttgcgtgctatgatgtgtgtgtttgctacgcttctccgtctttgggggggggcgggggcctgtggattgggaaggcccaggtccaggtagtaacaccgctataggagggaatgtggtattaagttataggaagatgtgcaaagtagggtagggcattgatggtccacatagggccccaggctttactcggcgcgccataccgtataaccgcagtcctcaacagtgctaagccatttgggaatcgcataagccttgcaatggccaactttgatagacacaatagc

SEQ ID NO: 7132 - DNA, 392 bp, Glycine max
  Clone ID: jC-gmfl02220083e07a1
gttctgtggtggaccccgcgtatggcctctttgagcgtagtgcggtgcacaactgtacctaggtcctcgtacaactgcgactggtacaacagcgccgcagtgcgaacctaaccgctgttgcgcaagagagcgactgcgccagccagagaaagctgtcggagttgggaggcatccaataggatgctgtcaataatagtccctgcaggtataggggtaggcgagctgctacaggtagcagtggagctgcaaatgggatggatggtatagaactggaggtacatcccacgtagtttaagttgatgtgtggatgtggcctagtacctaactagcaagtaggcaatatcgcatatgtatgtgtcagatgaatgatggatgacaattagggatgcaag

SEQ ID NO: 7133 - DNA, 471 bp, Glycine max
  Clone ID: jC-gmfl02220083e07d1
agctgaccaaccaatttgccgtactacacgtgtagcactaccaccttcttggggggggggggggggggggggggggggggggggggggggggggggggggggggggggggggggcgcggaataaaaagttttaacccccccccccaaaacctagagacccaataagaattagcagaatggtaagttaaaatccagccccttaacagaaagggatttataaagggggcccagtagtaaagccatacccaactaggcctaataaaaaatgaaaaacggaaggggagtttagccacccaaaaaggttacacaacgtcccaagtggagtaataactggccccctatttgaaccgcgagctttacggtcagacttattagctcccaaactggttataaccctcccatgaaaaggggcccttttccaaatggtagccccgggaataatcccatgtaaggcttcggttatgccttaaa

SEQ ID NO: 7134 - DNA, 514 bp, Glycine max
  unsure (1)..(514): unsure at all n locations
  Clone ID: jC-gmfl02220083e08a1
tggagtgactagtatcgatctatcgctagnaatgtaccagagtcctgtcacccaagactgccgcgaagtatgctgggtaatgggttagctctgctgtgaccagccaagctgtctaggctgggacgtgcaccgaatgcacggcgcgccaacccgctgttaataatgttgggcagaatgaggctgctcataaactgacgactgcaacggtggcacaccaataaaggattgccgctaagaggtattgtgcgtgcgccaccgctgcataggccgtacctaagactgaaacatatttctaggttttgccagctagggatgccaacggtaaaccggcctgacagccgttactaaatacggaagcacacagggcctaaagctggctggcacggaacgccgaataagctaagaagacgtagccagcagctacagagtagaggcctgcgatcagtgaggcgcaggctactgcacccgatgctgccgtactccgcgataatggcttcgacatgcgggtgctagc

SEQ ID NO: 7135 - DNA, 439 bp, Glycine max
  Clone ID: jC-gmfl02220083e09a1
tagcagtgaccagtgatctagtgttgagcgtggtcgggtagcgcaactgtacccaaggtcctgtacactcggcagtgagcaagacaccaggcagaaagtctgcgagctacaccataacgatctaacccatcaacaacatgacgaagacagctttgcgtagtgcagcccagctagtagtatagcgcagcagtgcgtgtgtgagtgacgcgtaagacagctttgcgtagacccgctcatgcagaactagcttttgaaaaccagcaagcattaacagtgcccgatgtcaaactacataagctgcaatgccatatgcctcagttagcatttcggcaacctacgaaccagcccccgacagttcatgactctgcggcagcaactgatctgaatgttgcagctggaactacacagcagatgccatcacatgcttagcctcatgagg

SEQ ID NO: 7136 - DNA, 582 bp, Glycine max
  Clone ID: jC-gmfl02220083e09d1
aactgccggggatttgcgtgctacatcgttgtagtagcaccttcttgggggggggggggggggggggggggccttacaaactgcatataaaggggttagagacaaatgaaagatatgatgaagttaccaaatcctattgaatgacttaataggttaaaagggtcaaaaggtaaaatagaaatagacgaaaacatgcggttttaagtaggcgggtgaaaaatataaacctaaagtaagaaggaacggacagggaagtaatggtggttagtggctgatttgtactagtcctagtactagtcctcgttgtcacaccacctagcgtactagtgctggtattactagtggtagtaagctgtacgttaactggtactagttgcgcaagttgcggattcaaacgcggcccagtagtaacctgcaatttacaacggacaacactacgtgtaaacacgaccacaatcacagttggtatacagggcgtaggtggcgtactagtactgtctggttgtacggtgtcacttcaaggttcactggatcgatctcgctagctcatcgtagactgtggtgagacgcgtattgaaaggt

SEQ ID NO: 7137 - DNA, 508 bp, Glycine max
  Clone ID: jC-gmfl02220083e10a1
gagactcaacagcgcactagctgtcggcgtatgggtagcaatgtaccaaggtcctgtcacatacaaaaaacgcaaaaaccaaccgcaggccaaacccggaagacaagttagaagaaacaccacaataataacaccctaaccggatcgcatggccatcagactagtgccctgggcttgcagcatagtagtcagttggcctcaccatttggataggcatgatatagccaatcgcattgatcccattagacttttagaccagcgcttttaatacccgagttgtagtaagccatactggtctccttttcaaagtaatggtattactgataataatcgctatagtaagcgcggtaataattgtcagcacttgtgtggcgcgatatcctagccgcggtaatactacaacaatgcgacctaacagcctataggcccgcttatacctttgagtcgctaagctattaatgatattcattcagggtaccggaaacagtaaaggccaatggatggtgat

SEQ ID NO: 7138 - DNA, 454 bp, Glycine max
  Clone ID: jC-gmfl02220083e10d1
atgtgatattgatataaaaaatgactaggaaagggttgtacatcagtgaccacgcatgaaacatgagaaatgaactacagcctattgatgaacccctcacatcaatctcatgatggaacaatgctggagctacaacatggtggcactgatgatgatcgcagactaaaaatcttttaactggagtcaggtggaggcttacgcatatccttgacgattcctcctacaggctggctctctgggaggatgtgctcatccctaatgggacctgttgggatacaagacactcacgtccaatagctgacccacgtaacgaatctctgccatgttcctcctcgagttccacattccagcgatgtctgggctaacatgattgcagcccaagactttgggaacacttggatggtgtgcctgctgaccgcatcgatacagttgctgcacttgctcttctctgggc

SEQ ID NO: 7139 - DNA, 585 bp, Glycine max
  Clone ID: jC-gmfl02220083e11a1
ggaatgactaggactactgcgatcttcgtagaatgtccaggtccgtcatacaggaaaattaaatatgatttgcggctgggccgcagactggaaaatgtaataacgaaagcaggacatgaaagcgtgatgcggtctgaaggttaacgctaacataacttacattgcctactactgagcctgttggcagtagttagaagtataaactggtaaaaggggtgtagtccagggttagtaacctgaaccttagaaaacagcacagccatccacaaataactccagtggtaccatcgactgcccagttgcccggccaaaggcaccgtttggggcactacaccttccgcaagcacgatgtagtgtgaaaccagccaagtggcgaggtcgccccgcaatgaccgttcccagtcggtggttggtcttggccaacgtgtgcctgcctacgagggatacggtggccccccttaaggctactgctaactgggaagttggtaaaacgaaccaataaggggaaaaagcgctagaaggaggcaaatagtgaagtaatgaagtaatgagctagatatatcaagatcgcttactgctatataa

SEQ ID NO: 7140 - DNA, 493 bp, Glycine max
  Clone ID: jC-gmfl02220083e11d1
gacttaaaacaattttctcaactaatagaatatggccttgggccagagtctccacaaattgcaaactgcttttactaaatgaaattgactacatatgctgcctcttttttatcctttatttgagcagatcttcccatttgcagtactgccctcctgctaatgctcgataatacctatccctacagtagacaggtcttccatcagcagcctcagcagcagcagctgctagatcatcatcagttatcacctcgactggtaatttaagcagctcctcttttcttaagagctttgtgttaaccttgggagcttgaacagttgatttaatttcttctttggtaaaggtagttcgaaaaaaattctccaatggtgtagcaaagataaatagcataactcctgtaacaagcaatgctcctgtcccaactagagtttgtttcagcaatttaacgactggtttaaccttgtaagagcccaacaatctatcacgagctaggat

SEQ ID NO: 7141 - DNA, 507 bp, Glycine max
  Clone ID: jC-gmfl02220083e12a1
acacaggactagcgatcgagtctatacgtagcggatgcgcactggtccagttcactgtcactaaaaaacaaaacagctgtccacactattagacactcaagttaatccggtaccgcttgttcgccttagtttatcatgagttaatccttcacagcggtgttctcgggggaataaatcatcgtaagctgccgcacgatgtgatcgatgagtggtaagaactatagaatcctagtgcgtactcaggaggtgcattcggtgaagtcagaatccgatcgtgcagtgtagcatatcgcaccatgtaagtttcatcgtcctccgcgcatctccgatgtcgcgtcatgtagggagtctagctgatcacaggtaaccagttcctcagctatatcgccgaacgtatatcatgccatccacgcgatcgatctgtagattcgtcacaacctgtcatcttcccatttcacaaacggttatgatgttcctctgctagcattccacgggtctaacccaaat

SEQ ID NO: 7142 - DNA, 481 bp, Glycine max
  Clone ID: jC-gmfl02220083e12d1
ttttgtgcttttttttttaggataaaaattttcattaacataaataatttgaataacaagattcctcttggatcctacatatttatacatttgtacatcaatgagatgagattagcatggaagtggaaatgacagacacgatagagttaattaagggacatagcacatgatggtaataacagctattcgtagtgccagcaatagggagctaactgtacaaaaggcttcggatactttcaattgcccaaatcagtagagcgatgttgatgaatttccaagacaaactccccgaaaaagagatccttcacttcttctgttcagtctttacccaaataccataccataacataccacgagatagaataaaaaatatttacacagactcgcatctcccaaaataaatctgcattgttagatattaataataatatcagttaaccaggtacgagacccaccccacatccggaggaccactttcttg

SEQ ID NO: 7143 - DNA, 477 bp, Glycine max
  unsure (1)..(477): unsure at all n locations
  Clone ID: jC-gmfl02220083f01a1
cacaaggcagaaagcaagctcattctagagttttaaaaatggcagcagcctcctccatggctctctcttccccatccttggctggcaaggccgtgaagctgggcccatcagcccccgaagtcgggagggtcagcatgaggaagaccgtcaccaagcaggcctcctccggaagcccatggtacggcccagaccgcgtcaagtacttgggcccattctctggcgagcccccgtcctacctcactggcgagttcccaggtgactacggctgggacactgctgggctttcggccgacccagaaaccttcgccagaaaccgtgagctcgaagtgatccactccaggtgggccatgctcggggccttgggctgcgtcttccccgaactgttgtcccgcaacggngtcaagtttggagaagctgtgtggttcaaggccgggtcccagatcttcagcgagggtgggcttggactactgggcaacc

SEQ ID NO: 7144 - DNA, 590 bp, Glycine max
  Clone ID: jC-gmfl02220083f01d1
gctgccaggcaggcaatttgccgtgctacatgtgagcacgtccgccgtctttggggggggggggggggggggcccgctaaaataaaacagacaagggaagaggaaaacaaagcgggcaaataagcatagacgggtatatcactcaagcgtaagacaatagagaagggaacgaagcatgaaaatctgacggcgccataaaaaaaggtagtacgttatggatgtaaagggccccctaaaaggggaaggttacagggccaagggtacaggggaacggggccaattgtcctacggaatagcataatgagagagccagcgagtataacgttccccggtttttaattccgggggaacaaaggattagaatgggagaacaaaggattataatgagagggcttggtcaaggtagggcattagttattaggttagcttatcctgatatgcgggcgggtgggggtgggggacaccagagtaggggagctactagccagagggtaaaagtgggggcgcgtaatgcgggttgtaagcaggtaagtattagggcatgggctggtaaggccgcaggcacgctggcaaggtggggtcagccctag

SEQ ID NO: 7145 - DNA, 513 bp, Glycine max
  Clone ID: jC-gmfl02220083f02a1
ctggtctccaagatggttttcaacaaagagtagacctggtgggtgggtactatgatgcaggagatcatgtgaagtttgggttgccaatggcctacagtgtcacaatgcttgcatggggggccattgagttcaacaaggaaatcacggacttgaaccaaatgggacacgcattatgggcaattaaatggggaactgactactttatcaaagcacacactcagcctaatgttctttggggacaggtgggagatggagtttctgatcattactgctgggagcgtgctgaagacatgacaacttcaagaggtgcctacaaaattgatgaacaacaccctggctcagatctggcaggtgaaactgcagctgcattggctgctgcagctatagctttcaggccctacaactcttcttactctaatctcctcctagttcatgcaaaacagctcttcacattcgcagataggttcagaggtctctatgataactccatatcaagtgctcagcaattctata

SEQ ID NO: 7146 - DNA, 375 bp, Glycine max
  Clone ID: jC-gmfl02220083f02d1
cagactatgccaagttaatttgctcgtatctacatgtgtgcacgtccacctgtctttggggggggggggggggggggggggggggggtcgtgaattagaataacagagttagctaaacgaataacgaaaacggattttagcaatctacgaaccaatgaagtaaaattacaagagaattaaacgctatgatataccaggccgtaaaggcttattgggtggatagttggccttgatgtcgggtaatgcaagccaacacttctgatgccgaaggttggattagtacaccagagtggtaaccaattgtcagcacttgcaggttgcgatcagccatgcgctagacatttcctttacggagatacactatgggtagtaggt

SEQ ID NO: 7147 - DNA, 537 bp, Glycine max
  Clone ID: jC-gmfl02220083f03a1
gaaattgcctctttcaagaagcatctgagtgcttattatttgtaatatatatagtcactcaagcttctaggatttgtgccagctacatgaaaatgggaagcaacttcaggcttttgagtctttgcctcttggcattgattgcatcaacccatgctcaacttcagcttggtttttatgccaagagttgcccaaacgctgagcagatcgttttgaaatttgtccatgaccatatccacaatgctccatcactagcagctgcattgataagaatgcacttccatgactgttttgtaaggggatgtgatgcatcagtccttctgaactcaacaaccaatcaagctgaaaagaatgctcctccaaatctcacagtaagaggctttgacttcattgacagaataaagagccttgttgaggcagaatgccctgctgtggtctcttgtgctgatatcctcactttgtctgccagagacactattgtagccacaggtggaccatcttggaaagttccaacaggtccaacagatggggtcatctcta

SEQ ID NO: 7148 - DNA, 412 bp, Glycine max
  Clone ID: jC-gmfl02220083f03d1
tgcctgaccttgccggccaatttgccgtgctacacgtgagcacgtccgccgtgcttgggggggggggggggggggggggggggggccaaggccggccaaaaaaaaaaggagtagctgtaggctcctaggaattcaccataaatacggtcctagtatgcgaatgtaaaggaggcagcattaacggatacatagcagtacagctacgcggcctaaagccgccttagccaccaaacctcgcctcaagggggcaaaaaagcttattcaagactccgcctcgcatcccggctaaagccacctcgtagcctccgtagccgcctagcctccaaaagactcccggagacccgattgggggtctccgtagccacctggccactatgttgattataagccataccatagaatctactttatg

SEQ ID NO: 7149 - DNA, 281 bp, Glycine max
  Clone ID: jC-gmfl02220083f04a1
cacagcgactagtatcgatctatggctagccaacgtacccaagtacctgtacactcagggctagcgctggggtcagacccagagcgtgaaaagtacactgtggtttcggaggctaagatcgtagagggaatccgaggcagatcttcgagtggggttcgcacgtatgggggcttaaagacgtcagctagcccaaaaagtgagtgctggctgctctaggcatgaaatcggtcctgagatgcgcctggcaaatttggagcccaaggcactctgcataaccttga

SEQ ID NO: 7150 - DNA, 517 bp, Glycine max
  Clone ID: jC-gmfl02220083f04d1
cagaccttggccaagggatttgccgtgctacatgtgtgcacgtccgccttcttgggggggggggggggagctaccccaaggagatgcgtatgcccgacgaaaagcattacgtatagacagaggactaagctgatggacaatatctgtacggtgttaaaacaaacaagcaaacagcagagaataggaccagctagttcaatgggtatttgtatgttattaaaactgaatgcaaaaatgccgacgtaaacactctatagacgcttattaggggcctcccagagagaatagggtcttggttgtgaaaagatacgtgataaaggttaacgtggctattggtccaaatggcggggtagtgagcgtagtgaaagtaattgcctgccaaggcgccactagccgattacacgccccccaaacggttgtacataaacagcaacacgaaacttgaagcgagggtgggttaataattgcactgacgagcggagcagcgccagtagccgcgaatccgcgtatgcggttg

SEQ ID NO: 7151 - DNA, 468 bp, Glycine max
  Clone ID: jC-gmfl02220083f05d1
gctgcagccaaagacacctcccccatagtgcgcgcctgcacctcctccgtgcttggggggggggggggggggggtaggggggaccacccggcaggatgacgggagaacaaacccccaagtgggacaaataaatattcacagattttagagcctatcaaaagctcccctaaaaacccgggaacagaaaagattataggaagccggctaaacccggaagtttccccccaatgctaggcgatgacctgtggggagttgtatcccaaataagacccgaccgtagattccgttcgtaaaccccagattggttgcggggagtttcccctggtttttttgaaatgccgtttcaatgtaccctggatccgttttgctgggttaacggagagtgttggtaggcccgttttgaaatgcaaggaattcctttggcgggggtaattcatgcctgcccaaaatttgccgcggttttaatgg

SEQ ID NO: 7152 - DNA, 465 bp, Glycine max
  Clone ID: jC-gmfl02220083f06d1
agcttgccgaggaatggacctttgccctcgtgcatgtgtgcacgtcctccgtctttgggggggggggggggggggggggggggggggggggggtggagggggggggggagcgagccacaatagcgcccccaaaatatatccacagacgtcacgataaatttttaactccccattaaacccgggaatagtaaatatattggtaagctctctaagcccggaaaaatcccccaggtgtaaagctggtaaatttgtttggtttgttacccaattaagaccctgggcaaaattccggggatagatggccaatttttaggccgaagtctccccacagctttaataaatgtcccttcaaggttcccatgatcggttcttggagcctaactgaggccttgggtgctcacgcctttaataggaccaattgcccttgcccaggctaatgctgccaagcccaaaatatgccccggt

SEQ ID NO: 7153 - DNA, 273 bp, Glycine max
  Clone ID: jC-gmfl02220083f07d1
cagctgacggccaatttggcgtgctacatgtgtagcactaccaccttcttgggggggggggggggggaggtggggggggggggggagagagcaagaagatcggaggactacaatcccattaccggaataaaccaacatgcatcccgacaaagtcaacccacaatacgaattaccgacatagtgaaccaaatgctaacggctataccctgagaaagttcgattagctgcacgcagatatagccaaagcccgggtataccatgtacaaatcaata

SEQ ID NO: 7154 - DNA, 544 bp, Glycine max
  unsure (1)..(544): unsure at all n locations
  Clone ID: jC-gmfl02220083f08a1
cgttagtgttactagtgtcgagtatcgatgtatggttaagnaactgtacccaggtacctgtacacccaagacggccgcgaagtatgctgggtaatgggttagctctgcggtgaccagccaagctggctaggctgggacgtgcgccgaatgcgcggcgcgccaacccgctgttaataatgttgggcagaatgaggctgcgcataaactgacgactgcaacggtggcacaccaataaaggattgccgctaagaggtattgtgggtgcgccaccgctgcataggccgtacctaagactaaaacatatttctaggttttgccgggtagggatgccaacggtaaaccggcctggcagccgttactaaatacggaagcacacagggcctaaagctggctggcacggaacgccgaataagctaagaagacgtagccagcagctacagagtaaaggcctgcgatcagtgaggggcgggctactgcgcccgatgctgcgtatatcgcgataatgcttcgacatgcgggtgctagcaaacgagggatctacagc

SEQ ID NO: 7155 - DNA, 511 bp, Glycine max
  Clone ID: jC-gmfl02220083f08d1
ggagttagccgcttggtttttttgtgcactatgccagatcaaatggcagagtcaggttgctactttcccccagttatgacggtgacactccttcttattctccgccactgttactggggcggtttgggacgcacccggaaggctctctggcctcgaagtagccgtagactgcgggttgcgcgcaaaggcggagttctgtataaggttatataatagatcacttccaactagaaacgcgaaacttgccccgcttgaagcacgcactgaatgtataggaaggctcggctctgtatgctttctgggttacgtcccaaattgcgtcgcttactgctaggaagcaagtccttaatctctccccacacctccgggctcgaggccctctgtggttctggttgtctgtatgcatgtctgctctgtccgtcggtcctgctcctcactccgagtactgtatgtaaacctccgaagatccggagttatacaagtaccccagaatctagcagacaatagcgca

SEQ ID NO: 7156 - DNA, 564 bp, Glycine max
  unsure (1)..(564): unsure at all n locations
  Clone ID: jC-gmfl02220083f09a1
agacaggacggtgtgatcttcgtagcaatgtccaggtccgtcactggcagtgccagggaggcccggcaggggggttgcggatacgcaacagcgaaataaccgaccaacaaggtaacgaaggctgggttacgtagtgcagcccaactagaagtatagcgtaacattgcgattgtgagtgttgcgaaagacaactttgcggaggcagaggcaggtagtattaacggttgtacacaagcgagtaataacattgccggatggtaaactacacaagctgcactaccatatgcctcaggtaacaacgcggcggcgtacgaaccagcccccgcacagtacatggccccaagggtggtctgaagctgcagcttaatgagtgacccacacagaaaacgccaccaaatgattagtttaataaggtgcatattaatagacggcagcggcagcttagccagagcgtacaaacgagctanncactgagctagtcggttaagggccatagcacgccgctaaacggtncgacaaaacaaaggttttgagagcggggcttacttgggcgtggaagtaata

SEQ ID NO: 7157 - DNA, 480 bp, Glycine max
  Clone ID: jC-gmfl02220083f09d1
aggatgaggcaatggccgtactacatgttagcagtaccaccttcttgggcgggggggggggggggaaacggggggggcggtaaccccgctgacaatagaagaagtaatccgccgatagccgcaaacgactaggaacgtccaaatacgcgcagtagcgtagacagtatggagagcgtagcgcttgattatactatagtcgtgattaggaatgtgcacattaacgcagagaagcataagctatcttgagccggaagattagcgcgccaatagctgcattcaacaccacagcaattgactcgattacggctggctaggctagttaggccgacagcgcgatgatacagaaacataggcaccggagggatgtccatttcagcattaaccggcaggagcttaatctacacaggctacattgcggcaacaaccatatacgtctaggcacagacatcgctatgaccgacctaccacacctaaacgatc

SEQ ID NO: 7158 - DNA, 582 bp, Glycine max
  unsure (1)..(582): unsure at all n locations
  Clone ID: jC-gmfl02220083f10a1
gatcacaggatagttcgatctatggctagcaatgtaccaaggtcctgtcactctccattaacggcgccgctggttgtgtgtgttcccgacgccaaacgaaatctctagtagcccggcttggcgccagtctcagtgtatgctaggcttggtgctgatgccgtcggctagcagcccactctacaatgggcgagcgcaagcctagttaccatggcgtggttatcttctgtagtcacctgaactgcagcatcacccccggtattaatttagtctgaatacccaaacttagtcgtatgggcaaaagcacagatagccatgcgtggcatctctatacgtgcctccctaagattacatagggcctgcttaccgcaagctgccccgagagagaactagtagatcctagcgctatgtacttgcgtctgtcaggagactgtagagagcctgcccgtgacgctagtgctgccgcacatatgctgcgcagatgtaggctagtcgcatagggcttataggaaactagtcattgatgctgccaagattggctagtagcggtgntagcctgcatactaggactcttttagccagcct

SEQ ID NO: 7159 - DNA, 426 bp, Glycine max
  Clone ID: jC-gmfl02220083f10d1
catccttaatcaatctgtttctagagatcactttgaacacaatggttaatagtcactctttggcaccacatgattgactaatgggggcaccctcacacccgaaagagcatcagggatcggctaggatgaatgagactgatatctacactcatgaattcctgaactagctattattttaaccaacgagcatatgctacccttgacagcaatttacatactcaatggcatccattctaggaggatgtgccccaatatcttcatcccatagcgatgaactgatcccatagtcttgatcctggatccgactgtgatgtattaggtgctactgcttgagactttagcgctatttggacctggtctgaccatgagccgagggataaaggctgcaatggtacattacataaccggttctaccacctgatccaa

SEQ ID NO: 7160 - DNA, 369 bp, Glycine max
  Clone ID: jC-gmfl02220083f11a1
atacaggacgcttgatctacgctcaacgtccaggtccgtcaccgtagggggaaggggcgactgataacgccaatacaaccgactggtacctgtactaacctgagagcataaccaaagcgtgatgctgtctgaaggttaacgctgacataacttgcattgcctgctactgagcctgttggcagtagttagaagtatagactggtccaaggggtgtagtccagggttagtcacctgaatcttagaaagcatcacagccatcctcaaataactccagtggtaacatctactgcccagttgcccagccaaaggctccgtctggggcactacagcctccacaaacacgatgtagtgcgaagccagccaagtggc

SEQ ID NO: 7161 - DNA, 305 bp, Glycine max
  Clone ID: jC-gmfl02220083f11d1
atcacccttctcttttgttttcttttatatagaaaccctctatgacatggatgttttcttttcctgtagctacaagtggtggctacatctgctgcctgtgttccattcactattcgggcagcacgttctcttagtcgcactgcctgctaggtcacgcttctggatgccggactcaaccgtatcctaggacgatacgacactggtccgatgcagcttgggaattcacatgattagacattacttgaactggcagtcacagcggctgctcttttctataccagctgtgggttaacctggcgagcttg

SEQ ID NO: 7162 - DNA, 568 bp, Glycine max
  unsure (1)..(568): unsure at all n locations
  Clone ID: jC-gmfl02220083f12a1
attcaacagcgancgagtgtcgatgtagtaggtagcaatgtacccaggtacctgtacacccactagactgtagtggcactacggctgaaagggatgccagcggagtaggcagacgctgccaactaacgtgacggtagcgtagaaagtgtacagagtgatgcacctacgacgcccgttataaagggtgctaagccaccgacagcgcaagaggcaggtacggatagtggtgctgtggcatctagtgttgtagcgttagcaagttgttaaatttatattgtttacgaagaaccaagctttcctgtactaacgaggcgcgcagtgcttctacctgcaatggtactgttgtgctgtatgctggctgtaacaaccgggcgttcagaagctagagccgtggcggctccaccgaagcaaaaaatgccgccgtaggctgttaaggtatgcgtactgggggcgtatgtagtgcctacaactacggtcaaatggcatggtagtgctaagccagcacggatctatgcggacgcaactaagcaaactgtggagtacgataatagtggtgcagcctctgcta

SEQ ID NO: 7163 - DNA, 463 bp, Glycine max
  Clone ID: jC-gmfl02220083f12d1
actgaaaaaccgccgaaggcatttcccattgaaaatatatctgtacaacatattaacatgatatactgttaaatcttgtcaaccccagtaaaagctttcaaatagcttctaacctaaaaatgtaatacagtttgtttcctccccaacccccccaaaaaaaaaagaaaaaaaaacttgtcaaccaaatccgaatccttcatttgcttcatgaatggcaagcagtaaccttttttccaaatgttgcttagatggatactctggcaaatctaattgattgaaacaggtatgagcagaaggcaagtgatcagaactcccatatgccttatgtatctgaaacctctgggcacctgaaattccttgaagagcactaaaaccctccaaaggaaccttggatgtgccagtcacaaactgcagcagtctagctttgtcttctttgctgaaaccttgaacaaccttccaaaac

SEQ ID NO: 7164 - DNA, 454 bp, Glycine max
  Clone ID: jC-gmfl02220083g01a1
gctctttgtgcttataactattaaatagtggtcgaaatgcaaatgctcctcagagagttgctcttccaacaccatcatatggttcagcatctatgggcatttcaaaaccttatggctcatcatcttttggcgcttcataaaccctatggttcagcatcctttgatgccccaaaaccttatggttcagcatcttttatcaagttcaaaaccttctcatgctgctagctttgagcacagtgccccttcttattatgacaacacggaccctgttggcacagctcctcctgccccaagttcctcatatgacaatcaggtacaaccccacaaagtccaaagtacttctgatagaaatctgagtcatgtttttttattttttaatcggtaaattgttagtggtacaacgttctagttttttgttagctacaggaatcgaacccctgaccttatctaccct

SEQ ID NO: 7165 - DNA, 341 bp, Glycine max
  Clone ID: jC-gmfl02220083g01d1
tgctagacttgcgacaatttgcgtgactacatgtgagcacgtcctccttcttgggggggggggggggggggggggggggggggggggagagagaaagggaggtcggagaaagataatgtcaaaaccggaataaacccacaggcataccgaccaactcgacccataatacgatttactcccttagtgaaccaaacggtaacggcttagcgctgggaaagttcgacttgatgcccgcaaataaagccatcacctgtgaatcccattcataaatcaataaaggatccgtgagcaataacccccaaattggacagcatagcgttcctagatctgcaataaatcgt

SEQ ID NO: 7166 - DNA, 603 bp, Glycine max
  Clone ID: jC-gmfl02220083g02a1
gaccgcgtcggtgacgcaataccgcgtcacccacaataacggtgacgtacaattgcgtaactggcgttgacgttacagtccccactcttcccccttatttatattttcacctctatcctccactaatcctctcctcccccacacacgtctttctctctccaccatgcaccaagccattccctaccgaacctccatcctgaccggaacatgtgacatggcacacgccggaggaatcaaagaattcaacctcgccaatccatccaacgttgccgcaatggtttcggagagcgcagtggtaatcattgggaaacgggggtgctgcatgtgccacgtggtcaaaaggttgttgcaaggtctgggagtgaaccctcccgtgtacgaggtcgacgaggaccacgaagccgccgttgctcgccacctgttcccgcagggcgccgaaacggtgcagtttccggcggtgttcctcgccggcaagttgtctcgagggttggaaagagttatggcaactcatatctcacgtgagttgattcccatcttgaaggatgcctgtgctttgtggctctgactctcactttagctacctacatctgctctttctttctt

SEQ ID NO: 7167 - DNA, 381 bp, Glycine max
  Clone ID: jC-gmfl02220083g02d1
cgactcgacatgccaagcaagtttgccgtgctacatgtgtgcacgtccgccttctttgggggggggggggggggggggggggggggggggggggggggaaggggaggggggagcaagacaatgcgaggtaccgattaaacgaacaggcgtaacgaaaaagtagacgcacaaaacgatttaagcccttagtgagtcaagattgtagcggttaaacgcagccatcgttagatgtggtgcccggtagtgcagctaaaagccatgaaccccagtcgataatcggtacaggataatcgcacataaagatcctaaatgggcacgtagcattcccagatatgtaataaatgtcattaccgaagtaccatcaaccatccaaggcaattg

SEQ ID NO: 7168 - DNA, 544 bp, Glycine max
  unsure (1)..(544): unsure at all n locations
  Clone ID: jC-gmfl02220083g03a1
tacattgcaacaccgcgatatgaacgatgcaaaatagtttcagatacgtcgcgttgattgattgatatgaagtggttgactttctggaactgcatatctatcctcgtgttgtcttttgctttcttcttcttctattgtcacacatacacatctactccttccctcatggctgagcaatcttccaagtccatttacgatttcacagtcaaggttcgtttttttgcttctaaaattgttgcctgctcatacccaactgttgtttctctatagttacgtgaaaagattgtggcttgctcatgcccaattgtgtttacactcgaattgtttgatgggtgagtgaagattatctaggaaatatcagggcacactatgatgacaattatatttagtaggttctgattttgtattttttgtatttcaacttttatggagatcaatgaagctctctgatctagttntcttttcaattgattgatgattctgctgattgcagtatttagatttattttccctaacacttttnatgtggtattcatggaaaatg

SEQ ID NO: 7169 - DNA, 244 bp, Glycine max
  Clone ID: jC-gmfl02220083g03d1
tgctagacttggcgacagatttgcgtgactacatgtgtgcacgtcctccttcttgggggggggggggggggggggggggggggtgggggggaagaagagagatcgaagcaagacaataacattaccggaatataccaacaggcgtacccacaaactcgacccaccatacgatttacaccaatggtgaacaaaaatgtaaccgcttagcgctgggaaaattagagttgatgccccctaattaagc

SEQ ID NO: 7170 - DNA, 546 bp, Glycine max
  unsure (1)..(546): unsure at all n locations
  Clone ID: jC-gmfl02220083g04a1
tcacagtgactagcgtcgatctatcgctagnaatgtaccagagtccgtcaactttgccaacataaacacaatgcccggggataggtgtaggtttacgcacctaaatagtcaggctagtgcccatgtgaagaaacgccatgaaaccgggtaagaggcaacagctccggccgcaacagcgccgcccacaatgaattaacgttagccaaaaaaggccttgccagagctctcggctgctgtgacggaagcagattaggccaataggactgccacctacaggtgataagtaccagcgtaggctgctgcgcaggtggccgatgcccataaagctactagagcgacaatcactatagctgaggttaaaagcctagccctggagattaaaagtaccacagagccggagaaatagccacgccccgaagggttcagtagcatagtggttgtgaatacaagagcagtgactgtgccagctgtacactggaaatttgccacaatacagggggcacaaaggcagggtgcctagcgagggcccccacgggcgaccacact

SEQ ID NO: 7171 - DNA, 496 bp, Glycine max
  Clone ID: jC-gmfl02220083g04d1
cggtagcttgccgggcaatttgccgtgctagcatgtgagcacgtccgccttctttgggggggggggggggaaactataaaaagtaaggtagggcaaagagggaacagtgctgctcgtgaaaatgacgggtaagggaacgagcgatagcaacaaaacgccattaggacaacaaataagtatacgttaagcgagagaattgatattagggtactgtgcattatgagaagggccatacagggtgcaggggagggaagaggtaataacctatggcaatattatgcagggtagacgcattaattcgccaaagtcatacaacacaatggcttaataggcgttctgatgcattacacggttttaagacttcggtaatgctcctagcaataggattgcaacgcctaagaaccctgtgaagcggtgtggcgcaagtaaacaagtttagtgtggccaacagcgcaaacggcccaactagatactgctgatccgcctgtagggcagt

SEQ ID NO: 7172 - DNA, 512 bp, Glycine max
  unsure (1)..(512): unsure at all n locations
  Clone ID: jC-gmfl02220083g05a1
acatgacagctcgactatcgtagcaatgtaccaagtccgtcacagacgtaatcttctatgcggtgtttgttaaaacaaggaaccgataacaaataggttaggggatgtttagtgggtgggttgactaggaatgataacaatagtgatgggcctagtggtacagatagcgcaaagggcctaccgaagccagagcggcggcagaggagcgcggtgtggccggctaggcttaaattgcctgcgacgacacacgtctaccctgttgcggtgccatgatgggcacgaggcgctgagcactgctacactggatacgcttgtaggccaacaagggccaccccggccgcagccaataatgggcaatataaaactggggtacctacttagacagtagtgcacgtacgagctagtaacgccgccggtgcaatgngagcggtttttaccaaaagccggaatgcctacgggtaagtgtattacttagggtatgggaggttgatataaccagctgcgcaggtggc

SEQ ID NO: 7173 - DNA, 532 bp, Glycine max
  Clone ID: jC-gmfl02220083g05d1
cgcttagccgggcggtttagcgtgagctacatgtgtgtgttagcacgtccacctgtgcttgggggggggggggggggggggggggggggggggggggggggggggggggggggggggggaacaatttaagggggggaaagataagggggcaaccaggataggctgggccaggcggtttggaaatgcccctaggttggggataggtagaaaggttggtgcgaacgctatcgggcaattggcagagtggtcagccctaaatgggtggggcccaaccgatagcttttaagtgggggggtgtttgccgtgcctaatacattataacccctaccacgtatagtatggcaaaggttactaagggtaccctaacgttagccaatgggtggacttggtgggcttacggcaagcccgataggccagagctacaggttacgcaaacccgtattacaggggtttggtaattggctgcttagacccataggtgtactaattagggtttcagaaggaagccgtccaagtataccaacccttggga

SEQ ID NO: 7174 - DNA, 612 bp, Glycine max
  unsure (1)..(612): unsure at all n locations
  Clone ID: jC-gmfl02220083g06a1
cactatgatagtatgatctatcgtagcaatgtccaagtccgtcacagggacggatcaccaaagagtagcaagttaaggagggtgctgctggtgcggaggctgctgcccggccttcgaccctggctggtgaggccattgccccggccgtaacctatgctgctaccctaactgcgacaacccaggctatcataattccacctacacccaaaaagatcaccgatgggaggctggacgggcctggggagccaactgggaataagggagccatgccggcgactaggactatggggagggctgaagttggggcgggaagttgaaaaaaagacaaagatagagttggggggttcgccatggctgggattccgtggctgggggtcaaggtgagggagaggaagagggtatgttgagaaggtgggagttcggtccataacaatataccccaaccatgaaggcaaaccgcaacaaggtatagatgcaggtctttgtgggtggtgtggggggacgttaagcatttttttggggggggaacagaaggnggtgtacgcggaaaatggcacacaggggctaagccagagaancatgcccgagtgaaggtcagaacgagtaggtggg

SEQ ID NO: 7175 - DNA, 584 bp, Glycine max
  Clone ID: jC-gmfl02220083g06d1
agatgacgggcgagaggggtttgccgtggtacatgtgtgcagtgccaccgtgcttggggggggggggggggggggtgaggggtaggtcaaggtaggggagggagagaggaagaggagaggtaaagcaaagaaaaacagaggaaaacagatgaaggagaacaagggcaaacgcaaaggagaaacggaggaaagcaggaagtaagggggggtgattgcggttgcgacgaaaaacacggttagtgcggtggcaagactggttggtaaaaccatggtgctggttttacgcaagcgtggccgacaacagagcagtgtgggcaaggcaccgggaggtcgcgggaacgaactatcgaatgtaatagcaaagggttggattgcgttaagggtgaagcaagtaccagaattaggtcgtttacgagaaagacgaagaagtgcgttggttatccgaacaccatggcaagcccaggcgggaactaatgtctctaagtcggcattgtggctgaaggcaggggcacgactgggagtcccagtacaactcaaggccctaaaactggtgaaggtgctcagggcgctgaaggttaagggga

SEQ ID NO: 7176 - DNA, 614 bp, Glycine max
  Clone ID: jC-gmfl02220083g07a1
tcataggactagcatcgatctatagctagccaatgtacccaggtacctgtacacgtagctgtgcaacagatgtataaacacccacaggcaaccacccagagtacagtttgagggcgagggccccggcgtgggtgcaataattttagtagagagtaggaacaccccgagtaacagtaagttggcaggactaacagtagaaaggggtaggtagagatataagggatagagtcgaataacagtatagggcggggcggggcacggcgagcacggcggcggcacggcggcagtgtagaagaataatagccacccgcacaataacaacgatagtatagtgcaccactgcaaccactataagaacttaccccagggcgccagggtaagttaacccaaccgggataagcgggtacaggccctaaaccattatttgccagcacaccggtttggcggcaattggctaccttaccagcgcatgcagctaggtcgactagattagttacctgtactagccaacgagtggcagtttggtggtatacccgattattgaacacagggtaaccgtgtacaccgcgtaaaacaggatacaaactggcccgtgcacgggcgtaaaagcccgt

SEQ ID NO: 7177 - DNA, 290 bp, Glycine max
  Clone ID: jC-gmfl02220083g07d1
cagctagccaagcaatttaccgtgctacatgtgtgtagtaccaccttcttggggggggggggggggggggggggggatgggtggagagaggaagggaaggaaggcaggacaataaacccaaaccctgaatcaactaacacgcattaggattaaggcgagcaccccaaccaacatgacacatgccctgtaagaagctaggaggctaaaagcggcgccacttcgggttagtgcgctcagtttgatacatcggcccagtagccattgcaaacaatcattaatgagtgggggca

SEQ ID NO: 7178 - DNA, 552 bp, Glycine max
  Clone ID: jC-gmfl02220083g08a1
tcacagtcactagcgactagtgttgatctgtgggtagcaactgtccaggtcctgtcacgacatatcaacaatgtataaacacccacaggcaaccacccagagtacagtttgagggcgagggccccggcgtgggtgcaataattttagtagagagtaggaacaccccgagtaacagtaagttggcaggactaacagtagaaaggggtaggtagagatataagggatagagtcgaataacagtatagggcggggcggggcacggcgggcgcggcagcggcgcggcggcagtgtagaagaataatagccacccgcacaataacaacgatagtatagtgcaccactgcaaccactataagaacttaccccagggcgccagggtaagttaacccaaccgggataagcgggtacaggccctaaaccattatttgccagcacaccggtttggcggcaattggctaccttaccagcgcatgcagctaggtcgactagattagttacctgtactagccaacgagtggcagtttggtggtatacccgattattgaacacagg

SEQ ID NO: 7179 - DNA, 542 bp, Glycine max
  Clone ID: jC-gmfl02220083g08d1
tacttgccgagggatttgccgctgctacatcgttagcagtgccgccttcttgggggggggggggggggggggggggggggggggggggggggggggggggggggggggggggggggggggggaataacaattaaagggggaaagaacaaggaagtgccctggggaaaaaactgggccccgcagaataacggtttaacccgaaaaaaaatcccggtatggccaaggtaagggtaactggcaaaaaaattgcccataaagggtaccttgataactggaaattgaaaatgtagggaataacaaggtttatgtaaatcagactaggcccgctatggctaagttggccttatacagtactatatggggggttaagcccattacccgggctaaaattgggtagggttttgggcccaggcataaggatttttctaggggtggccaaagatagcggcattttcgttgggtccccttagcccggctctgccccaataagcattccgcccaaaattggcggttgaaaagtcccgggttttgggggtatcccc

SEQ ID NO: 7180 - DNA, 573 bp, Glycine max
  unsure (1)..(573): unsure at all n locations
  Clone ID: jC-gmfl02220083g09a1
cagtagtactagcgactagtgtcgatgtgtgggtagnaatgtaccagagtcctgtcacaacaaaccctgaggggacatcgaaaggtatttaggggttgtaagggatctgaccgatgacggcataagtaggcagctattattaaagcacacgcacatgctggtgcggggagagtatttaagctaatatgtgtggtgaaggtttagtgatacggacttttaaagtgccccggacccgggttgtgctcgtcagcctggtcaaggtcagtcatcctcatcttcggatccccgtcccatgcgctagaaatcatcgcggaacccatcatcactgctcggttaggtgcccctcacgccacactcacaaccataaccaaatcggtcccggccgtgctaactcagcctggtccggctacactatccaaaccaacaaatgtcttctatcgctcccgttttatagctgttcaaaaagccttcagaccggtatatctggacgtcaatgccattgtctgtacgttcgtgtgtcggttggtgagtttcctcgtattcaggttcagtgtcttcgtagtcttatgcttg

SEQ ID NO: 7181 - DNA, 448 bp, Glycine max
  Clone ID: jC-gmfl02220083g09d1
catcaaatatacaaaggcacgccttatcaataaagtttatataggaacatttaactatgaagccaatcttttaaaataattagagtatcaaagaagcacaacaggctcattaacgctaccataaaaattaatcttgcagcattcaggaaaatggaaaccagcctcatctaggccagcctttgtaatatgcgggcatgacctcacatccaagtattgcagagacgtgcatttacccacaatgatgcctatacctgccactgtgatctttggacaattactaatcttcaaaatcttcaaactcaatccaggctcctcattgcttaatagctgaaaagcagcatcagtcaactcttcacagcaaccaatgtccagtgcctcaaggtttctgcattgacttaaaacacagctcactgaagaatcagaaatgtttaaacaccaatccatcctc

SEQ ID NO: 7182 - DNA, 546 bp, Glycine max
  Clone ID: jC-gmfl02220083g10a1
gaatgactaggactagtatcgatctatggataggcaactgtccagagtcctgtcacgactatataaatggctgagactacgaactgagaatgtagggcacctgtgcgcacaaggcacaaagcctgaaacagcggcaccggtaacactaaccaccacacgatgtgcttaaacatgattagcatttgttgttactattgggcggtcatttacaccactgtatatacgccgttggtgagacactttgtagtctgcacggtagactaatttggtgtggttgggagcgtatgcgctgtattaggaggcctgataaaacctacatgcagataatccgaccgcctattcatgcgcagccccggcctaggggccctagtctggcccttgggccgcctagcagtggtagttggcgggatgctattcttccgagggtaccaccatatagaaatttcctccgcataggtcccggcggttgaccatctaaccgcgtcggcagaaccctcggcagcgatagccgcctatacgcgcttccgctgagtgcgccgatgccag

SEQ ID NO: 7183 - DNA, 516 bp, Glycine max
  Clone ID: jC-gmfl02220083g10d1
aacaagagaagatgagtacttaattatgaagagtaaaatgagaaatgactaaggatgcacaagacagaaaaggaacactcaaggaatacatacatggaaattaaaaaaaagaaaaagaaaaagaaaagacacaaaagggatacaaaatacacccttggacacaagcatgcttatctacaattcgatgcatgcccccatggttttggccttctcttccaaacacccccaacaactgtagctgatgagaggaaaagacgaaaaagcctaaattagggaactgcatagacagatcactagcactcctcaacatagaaattattattcttcgggggaaacaccatgcatagcccttgttggcaaattaatcaaggtagctagcttaattgattaattaattaagcgttgctcctgaaggatccaagagccttgatagctgctgctctaaggatgtattggtggtaaaatgcagccactgctgctccaacaattggtccaacccagaatatccactgatca

SEQ ID NO: 7184 - DNA, 572 bp, Glycine max
  Clone ID: jC-gmfl02220083g11a1
cacagtgactagcactagcgtcgacgtatcgggtagacaatgtacccaggtacctgtacacaactgatttgtggatgtggtaacacgcgcgacgccaagaatgaacggggataactcgcttgctaatgcgcctgggaatagacgcgccgggcgaagggcgggggccgcgctagatgcgccgggcgacggggcctgaagcaaagaagtatagccgggggggggaaaaaaaaaaaaaaaaaaaaaaaaaaaaaaaaaaaaaaaaaaaaaaaaaaaaaaaaaccctccttcttcatgacgcactgtcgtcatttcccaaggaaggttccattccgattgctacctcgattactgggtttgagacgcacgtcgaggaaactggcctcgaagtagccgtagactgcgggttgcgcgcaaaggcggagttcggtataaggttatataatagatcacttccaactagaaacgcgaaacttgccccgcttgaagcacgcactgaatgtataggaaggctcggctctgtatgctttctgggttacgtcccaaattgcgtcgcttactgctaggaagcaagt

SEQ ID NO: 7185 - DNA, 162 bp, Glycine max
  Clone ID: jC-gmfl02220083g11d1
aaaaaaaaaccatgggattatttcattagccaaaacttcaaaccacagtttgcccaccaaaaacaaattacaaaccccactttgttaaagccccagttgcaggcacacttgtaaaacttagttattccactacccactcttgaaaagtaagggggtagcttt

SEQ ID NO: 7186 - DNA, 558 bp, Glycine max
  Clone ID: jC-gmfl02220083g12a1
atagtgatagttcgactagatcttcgctgcaatgtccaggtcctgtccggcgcgcggcggggtggcgcagaaacggggcggggaggcccgcagtgttgtgctgcgttcagatagacagcataaggggaagggcaggccgcggggcaaggcgggcagttatatttatgggggtagggttcggcaggtaggaggggcaggcggtagtcaagggtaagagtgcgactgcccaacaccccggaacagacccagtcagagcaagagcagccggcccagggcaaaggcaaagccgtgaacgcggggtcaggagcgatatgtgccaaggtagaaggatgctcttaggggataggggtaggccggaataagtttgggggggggggccctgatgcgagaggaataccaccaaggcttaattaaaagattttggggagctatcggcagggcagtgtggaaaacagggagcagaacacagaaaggaatgagaaaatcctcagaagagacgtgcggaggcgaggcgtgggcggtgataagggtggctacagcgcggtagtgtatcgctaa

SEQ ID NO: 7187 - DNA, 385 bp, Glycine max
  Clone ID: jC-gmfl02220083g12d1
caaccttattttttttttaaagggggaaacctaaattgggggaaaacaaacccctaactttgaaaagacgagcccaaggggaccctttaaaagcccaccaaaattaagacccggtcaaaaaattcgccccccccccacgcggtgtcacaaaaatgggaggccccctgacccaatatcaactttaaaaaacccaaccaaagaccccccccccccccctttaaaagaaaacccccccccgggggggggaacaacccccatctgatttcgggacaaaaaccccttttaagagggcccccctctaggcttcgggggctccaaaaaagggtcttgcctcttgctcccaaaggccctaaaaacattggccccaccaatacaaggatgcccc

SEQ ID NO: 7188 - DNA, 517 bp, Glycine max
  Clone ID: jC-gmfl02220083h01a1
gtatattcagtcataggagactttcagtatctgttggaattgcaacagctgcttttgcacttgcaattcttgaaggaagcacgcagcccggagtttggtttcctgaagaggtatgtgttgagtacaagtgtgaggtaaagtctcacatcggataaaagtggaaaggttgagcaccatataagtgaggagaagacccataaacctgagccttaaggttttgggttagagtgtggtgtcaggtctcctcatgtggtgactcgtggtccacaggtgtacccctcgaatctgcccaacaattggtatcagagccgatggttcaagttggtgaccggctcagacgagtatgcaaagacttctccttggggggaaggctagcgggcatggcaagaaccgcaggtggacatggctatactcgtggatgataaagacttccccttgagggaaagactacgatgtggaagagactcactatataagcgtattcaattctcaatattattctttatgcaattaaaag

SEQ ID NO: 7189 - DNA, 323 bp, Glycine max
  Clone ID: jC-gmfl02220083h01d1
cgctagacttggcaagcaggtttggcgtactacatgtgtgcacgtccaccttctttgggggggggggggggggggggggggggggggggggagtgagaagggaggacggagaaagataatgaacgaaaccggaataaacccacagacgcactcaccaactgaacccataatacgatttaaacccttggtgaatcaaaaagtaaaggctcttcgcggagaaagctcgagatgctgcccaaagataaagctagcgcctaagatcaccattctagaatcaatacagtatcgtgatcaagaacacccaaattaagcagcgtagtgtt

SEQ ID NO: 7190 - DNA, 417 bp, Glycine max
  Clone ID: jC-gmfl02220083h02a1
gaaacttccacgaggttttcggtgaaaaccaaatttggggctttgcatcgcaagatttaccctttccaatcaaaattcttctgccttcccctaccaattctttctctcaaccgatttatctgagtgaggggtttggccaatgacgagtggttttggtgaatcaacgagagcgtctgcaccgagcccatcatgctcggggaacagttcaaacgatgccggtgattttgaatgcaacatatgcttcgatttggcgcaagaccctgtgatcacactctgtggtcacctattctgttggccatgcctttataggtggctccaccatcactcccattctcaggaatgccctgtttgcaaggcccttgtgcaggatgagaaattggctcctctttatggaaggggcaaaacacagactgatcc

SEQ ID NO: 7191 - DNA, 359 bp, Glycine max
  Clone ID: jC-gmfl02220083h02d1
ggcgtgacttgcccagcaagtttgaccgtactacatgtgtgcacgtcctccttcttgggggggggggggggggggggggggggggggggggagagagaaggaggggggagaaagacaatatcataaccagaataaaacaacagacataacgacaaactagacgctacaaacgatttactgcattagtaaataaaaatgtaaagggttaatgctgggaaagttcgacttgatgcccggaaataaagccatatgctgtgtatcccatcttacaatcaataaaggattgtgatcataaacccctcaaaatgtacagcgtagcattccgagaagtgcaataaatcgccttctaaaacacccat

SEQ ID NO: 7192 - DNA, 159 bp, Glycine max
  Clone ID: jC-gmfl02220083h03a1
gttctagatcgcgagcggccgccctttttttttttttttttttttttttttttttttttttttttttttttttttttttgggaattggccccttctggataaagttcggctaatctgaattatgaatccctgcttataatattaaatacctttacccgg

SEQ ID NO: 7193 - DNA, 347 bp, Glycine max
  Clone ID: jC-gmfl02220083h03d1
cactagacttggcagagcaatttaccctactacatgtgtgcacgtcctccttcttgggggggggggggggggaggggggggggggggggggagtgagaaggaagacgaacaaagccaataacaaaaccagaataaaccaacaggcatacccacaaaaaaaacccacaaaacaatttacaaccataataaaccaaaaggtaacccctaaacgctgggaaagttagacctggtgcccgcaaataaagccatatcctgtgtttcccatgcaacaatctataaaggatcgtgatcataaacccccaaattgaacacgtagcattcctagatgtgtaataaatcgtccccct

SEQ ID NO: 7194 - DNA, 527 bp, Glycine max
  Clone ID: jC-gmfl02220083h04a1
actatgacagttcgactatcgctagtaatgtcccaggtacctgtcacccactcggccggctcaggcaatccgatcagcccaacaccaaaaggtaacactaactttattccgtcttcttacggtgttattttccaacagagctggctgccaattgtgaattcgatgtcaatgggcacatacatacaactgcactagcaacaccacttgcaccaacgagtgccccagcaagtgccacaacaagtacaacaccaaatggtgaacaaaaaaccaatataaccacggaggcacaggcaaaagttgaatggccgaaacttaaacactggcaaactgacacagcggcagcggccaaaaataatacaatgggtaacctcgcaaacacaccacagacacaaatacacactttagcactctgagagcacctgctaacactaaccaaaaatacagtaactaaacaaccagggacaatcgggactgtggagatcgtactaaacccaacagctgctgaaaaactcacaacaacacaaact

SEQ ID NO: 7195 - DNA, 515 bp, Glycine max
  Clone ID: jC-gmfl02220083h04d1
tgcttgaccttgccagcagatttgccgtgctagcatgtgtgcacgtcctccttcttgggggggggggggggggggggggggggggggggggggggggggggggaaactaaaaagggtgaggggagggataagcaaaacaataagttagaaaaaagggtgagcccctgagagagctgatgctgtgtgatagttgataaacagcgcacaggaaatgaaaagggttaccgtaaacaagcaaatagtgtaggtgacttttagggaaatagggtagagaagtgcaagcgtaaaacgtaaagctaattggcggattatggttaagttgggcggacaaaagcggtgcgggtgcgggtgccggtgggtgcgggtacggttagttgttttaaagctacagctaattagtccgtgtggtggggctgctaaagtgaccagatcagtggtaatgcgagtgtgtatccggaattcgaaaatacgtataccatcacgtgctttaaggtcagcgctgtgagtgaggctgg

SEQ ID NO: 7196 - DNA, 595 bp, Glycine max
  Clone ID: jC-gmfl02220083h05a1
tacatgacagttcgatcttgtgtatgtccaggtccgtcactccgtcacgtggattgtggcctagccttaggtaaagcgtggtggggcgtgggcgggtgtggataaggggaggggctggtgtggttggccacaacacggggcttgggtaaataataaaccaccatatacaaactactaagtggtagtaagagatgtagtggccgtattgtactgtatgttggttggtagtgggtgctactgtggtgcttaaaccgtttaaaacaaaactagtaggacaacgccgatataaatagcccttagctgtttaatgcaagaagtagcagcctaaactaaacgtgaaaatattatatacgcacaggtgcaattaacataaacaaacccagaacgataggaatgcaaccagtgtaaacaatggcccttaacagacgacgcgcacgcaaggccatgtacggatatgattacttaacgtgccgacttggaggcccgagcccaaggatgggcgccgacggccatggccaatatttaacagccatggcgtatgtagtgagcatatgcctacgcagtgtatggccatgtacgcacaattagcgctgtc

SEQ ID NO: 7197 - DNA, 482 bp, Glycine max
  Clone ID: jC-gmfl02220083h05d1
actgaccgaggaatttaacgctactacatgtgtgtactactacttacttggggggggggggggggggggggggggggggggggggggggggggggggggggggggggccggggggggggaggggagaagatgggggatttgggataaagaaaggaagggaagaaaaaaaaaaataaccccccaaaaaaagattttagataaataaaactagatgatgaatttttttcttaaaaaaaaaatagggaattttttttataaaaaaaaaaaatttttaaaactttttttaataaaactaaaatccccccctaaaaaaaacccatttttaaaaaaacaatttaaaaccccttaaaaaaaaaccccaaatttttcccctaaaaaaaacctgccccaaaaattaaatttcccccttttttatgtgaaaacccaaaaaaaaggaatttctttccacaaaaaaaatctttttttacaaaaacccttttttt

SEQ ID NO: 7198 - DNA, 576 bp, Glycine max
  Clone ID: jC-gmfl02220083h06a1
cacatgactagctatcgatctatcgctaggaatgtaccagagtccgtacactgtggggtgtgtggtgccaaggaggcgtagcctgaacactgtaggtaacagccaatatttatggcacaccacctacctgcaactagtgtccagtacccacaacgagtttcaaacaaggttactgaggctgcaaaccctacataacacgcatcggttgcaaaggcagaacaaaaacgtgtgccgtttgctgcaggacatgcggccttacgaagcgcgagcgccgctccaacacaagtaactgcacgtttcacaaccttagtggtagggagccgaacaagaggggcttattaatgctcctaagcagcgtgctaaggcagcaccaaaatatccagcaacagccagtgtgagatagcatggatacgccacacaatatagggccctggctcggtgcaaagaagctcgcatgccgaattagtgcaagacgatggttgaaaagtcattaagcgcaacaagctactgcaagtcgaaaggtgtgccagtcagctgctgagcgcaacgccagcatcgtgatgcgcatggagggca

SEQ ID NO: 7199 - DNA, 591 bp, Glycine max
  unsure (1)..(591): unsure at all n locations
  Clone ID: jC-gmfl02220083h07a1
acactagaganctagctgtcgagcgtatcgggtagccaatgtacccaggtgcctgtgcacctgtaggcttaaagtagacgagagggatgaaaatcgccgacggtagtacaaaactatgggcacaaaggcagtaataggggccaataagaggagtagtttgtaaagcccccgtccgccattgagctaggccactccgggggcgggtagggccgcgggtaagggtaaaactcgtgatacaagcaatacggccctagaaagaagactacatttattcaatactagtggccccaaggacacacccggggtgggcggaaggtacgctgaaacggaaggcattcgccgtaagatactaacaagcaatagtgtgtgcacatacggctgctactaatggtgagatgcgttgagcgacaatttgtaggccggtgcttagggcgcctagtgtccgggtcaagcctttggcacatcagcatgcttatgtattacggcaaaaggcttcggagcgtacgcctagggcgtccctcggtatgaggggagatagtgcgagtactggttgttagcaaatctaagcagtgggcagcgccgcagcaaata

SEQ ID NO: 7200 - DNA, 489 bp, Glycine max
  Clone ID: jC-gmfl02220083h07d1
gcttgccagaggatttgccgctggtagcatgtgtagtagtaccaccttctttgggggggggggggggggggggggggttggatggaaagaggcaagggggtggcagggcaatagaagcaagaccaaaaccaaagagcgcctatctaggataagtgaagcactaaaatgtaaataagacatgagcattgggaaggtaggggctatgcaaggctgcatataggtacagggctatccagataggccatcggcttaagtcagtaagcccaaaatcgggtggtggtggggggggtaacacacacattggagttggctcagtgatagtaaatagggtaagttaggggttgcagggaaattatgctaccctagtgaaaagactagcgaggcataagctatactcacaaatgttgaggcactcctgatgattgtgccaacgcagcagcttgaagtgtgtaactggatcgcgttaatcgttgccgtgaggctgagcct

SEQ ID NO: 7201 - DNA, 474 bp, Glycine max
  Clone ID: jC-gmfl02220083h08a1
tggactcaacagtgacgatctatggctagtaggtagcaactgtccaggtcctgtcacccgacacagggagccaatgctcgcagaaaaacctagagtgcacatactagcctccctggggcggggtaaccctgcaattgacctataactaacaaaggcgcacctgctgtaaacaccaaccccaacgccgccttagcatgccccagccgcggaagcagctgttgcttggcaactggctacataggccgaggctaagccctaggctacccatacaccgcctaaaccaactggtacagagccgcggcctacagcagaaggggacggtaaggcggctgctgcggccgcacccgacagtgagtgataagaagagcaacctggggagtaccgagagcagtgtggttaagaggcctcaccgtctggtgagagggggaatactgctaggaccgaggttgcaagcaggcagattgcgttactggt

SEQ ID NO: 7202 - DNA, 477 bp, Glycine max
  Clone ID: jC-gmfl02220083h08d1
cggcttgccggaggatttgccgtactacatgtgtagtagtaccaccttcttggggggggggggggggggggggaagcaatgcggtaccccagattgtagagcaccccaccgtaatggtgacgcggaagcaggatgagagtgatggggaaacgtgaaaatccgatgcgtggtatgcgcgttaggggagtatggccgtgtcgctgatcctttggcttgtcctacaaggtgactggatcgctttcgctagctcatcgaggatggaggtgagacatagccttgaaaagtaaggtttgccttcgtcggggatagccgatgcaagcccgatatttgtatcgtatctggtggaatgcgtgattaagctataatctgggtgcaacgtgctggagcggcttgcatagcgataggattcagtcttaggggtgatagcgctctgcttgctggcctcaagcacatctcaatgcgtttggtatcaggagg

SEQ ID NO: 7203 - DNA, 385 bp, Glycine max
  Clone ID: jC-gmfl02220083h09a1
gtcacagtgaacaggactagctgtcgatctgtggctagcaatgtaccaaggtcctgtcacgatcatataaatggctgagactacgaactgagaatgtagggcacctgtgcgcacaaggcacaaagcctgaaacagcggcaccggtaacactaaccaccacacgatgtgcttaaacatgattagcatttgttgttactattgggcggtcatttacaccactgtatatacgccgttggtgagacactttgtagtctgcacggtagactaatttggtgtggttgggagcgtatgcgctgtattaggaggcctgataaaacctacatgcagataatccgaccgcctattcatgcgcagccccggcctaggggccctagtctggcctttg

SEQ ID NO: 7204 - DNA, 516 bp, Glycine max
  Clone ID: jC-gmfl02220083h09d1
aacaagagaagatgagtacttaattatgaagagtaaaatgagaaatgactaaggatgcacaagacagaaaaggaacactcaaggaatacatacatggaaattaaaaaaaagaaaaagaaaaagataagacacaaaagggatacaaaatacacccttggacacaagcatgcttatctacaatttgatgcatgcccccatggttttggccttctcttccaaacacccccaacaactgtagctgatgagaggaaaagacgaaaaagcctaaattagggaactgcatagacagatcactagcactcctcaacatagaaattattattcttcgggggaaacaccatgcatagcccttgttggcaaattaatcaaggtagctagcttaattgattaattaattaagcgttgctcctgaaggatccaagagccttgatagctgctgctctaaggatgtattggtggtaaaatgcagccactgctgctccaacaattggtccaacccagaatatccactgatca

SEQ ID NO: 7205 - DNA, 588 bp, Glycine max
  unsure (1)..(588): unsure at all n locations
  Clone ID: jC-gmfl02220083h10a1
attgactgtgactagcgtcgatgtgtggctagcaatgtaccagagtcctgtcacgactatataaatggctgagactacgaactgagaatgtagggcacctgtgcgcacaaggcacaaagcctgaaacagcggcaccggtaacactaaccaccacacgatgtgcttaaacatgattagcatttgttgttactattgggcggtcatttacaccactgtatatacgccgttggtgagacactttgtagtctgcacggtagactaatttggtgtggttgggagcgtatgcgctgtattaggaggcctgataaaacctacatgcagataatccgaccgcctattcatgcgcagccccggcctaggggccctagtctggcccttgggccgcctagcagtggtagttggcgggatgctattcttccgagggtaccaccatatagaaatttcctccgcataggtaccggcggttgaccatctaaccgcgtcggcagaaccctcggcagcgatagccgcctatacgcgcttccgctgagtgcgccgatgccaggccttaacncggttaaaaactagatgataataccgagccacgcc

SEQ ID NO: 7206 - DNA, 404 bp, Glycine max
  Clone ID: jC-gmfl02220083h10d1
aacaagagaagatgacaacttaattatgaagagtaaaatgagaaatgactaaggatgcacaagacagaaaaggaacactcaaggaatacatacatggaaattaaaaaaaagaaatagacagaggatagacacaaaagggatacaaaatacacccttggacacaagcatgcttatctacaatttgatgcatgcccccatggttttggccttctcttccaaacacccacaacaactgtagctgatgagaggaaaagacgaaaaagcctaaattagggaactgcatagacagatcactagcactcctcaacatagaaattattattcttcgggggaaacaccatgcatagcccttgttggcaaattaatcaaggtagctagcttaattgattaattaattaagcgtt

SEQ ID NO: 7207 - DNA, 552 bp, Glycine max
  Clone ID: jC-gmfl02220083h11a1
gattgagtgaccagcttggccttttgatctatagctaccaactgtccaaggtcctgtcactcctcttaatatcatcgtcgtgaccggtgttggtggtaattctgtttgtattatctgttctaatcaattattcttctacaacttcttctactgccattcggtctgtatcaactgtcgtcaagttccctctcctcctcctcctcctcctactcgtcgtaactcttgtgctactggtggtcaagttctaaaattggttgtgttccaaaaataataaaagttaaactgtaaatttgtcaaaggaagtcaaaatgtaaatgttcaggttctcgtcaaagtctgtcaggtcttcctcagttcaggattcccaattcaccagtccagtcgcggcgatggtatgactggctcgccaaggtcaacaattgatcaacaggctgatctccgctccagcagagggtccccagggacccgggcccggcatcactctcatagggtcagccatctcaagcgattcgaccacggcagcactctcggcgggccacacaagaataagaa

SEQ ID NO: 7208 - DNA, 510 bp, Glycine max
  Clone ID: jC-gmfl02220083h11d1
gcaaacttcaagaagagcaacaattaggacaccgaatcaagccattctcattgcactccaaacacctcttcaacaaaaccacacctaaacttgtgcacatcctatatatgcaaaaataaccaccacaaaaacctacacacagttcctcacatgctttcaatgtcattctccaatcaaaattgaagtttcactctgacaacctgcgttgatcttcaatgcaaacctctattacatactggaaccaattctgattagataacagaaccgaatacacacaagaccgaagcttcacaacaataatccatgttgatcttcaatgcaaaccttcaccccacacgtgaaactccaattctgattagataacaacaccaaaaacacacgaaattggagcttcactatgtaatccatgttgatcttcaatgcatagttgcaaaccttcaccccacacgttaaactccaattctgactggacatcaacaccagaaccaaaaggaatcgcatctaagttca

SEQ ID NO: 7209 - DNA, 587 bp, Glycine max
  Clone ID: jC-gmfl02220083h12a1
tggattacaggacgtcttggtgtagtggaatgtccaggtccgtcactgcgaagacattgcgccaaaggcgtgccgaccttatgttggcaagagagcgacggcgccggctagagaaagctggcggggttgggaggcgtgcaataggatgcggcctataatacgccctgcaggaatagggggaggggaggggagggagggaggggtggagcggcgggggggatggttgggaaagggggggagggacaggcggcggtgtttacctagatgtggggaagaaacctaataccaacctaacaagtagggaataaggaatatgtatggggggaatgaatgatgaatgacaactagggaaggaagacccgcgatggaagcggttggaagtaagatttgtcacatatgcaggaataacatttgggagccagactgggagcaagagacacaatagcacacaaacgcataaaatgaaacccacacagagggcagtgcaaactacgactgaaaatggcgagccaaggcaagccagcagttcacagtggaaataagagagagacggacacttagtggggtgatcccgatacagtacacaa

SEQ ID NO: 7210 - DNA, 526 bp, Glycine max
  Clone ID: jC-gmfl02220083h12d1
ataacacaagaacaccaatatataaattgaattatattgaggcactaactgggcatcagctgttataaaataatagatacatcaactgggtatacgtttacagcataaattttaaatagtaaatggcctcttaacagttttcaataataaactgcatcacttgacgaccatgtttcctcggttcacgagatgaccattttaatgcattactttcgatttctaccacccagccaactggcactccatagtataaataatgaaccatgttacagtcttatcaagggaacttccaatatatgaaccaccaatgcagaagtacccaaggccactaactcccaataacgaactgatcggcatgctgcaatgttactaaaaaaacaagcagttgaacttgtttgatccacgaatccctgcttcagtggtcactccattttgaacatagtaaaaccaggggcaaaatgacagttatttgctcattttttaagcctttcatcaatttaagacatctaatcgcatcaataatgat

SEQ ID NO: 7211 - DNA, 529 bp, Glycine max
  Clone ID: jC-gmfl02220084a01a1
ccagcctggtgtgttgatccaggtctttgaaggtgaaagagcaaggactaaagataacaatttgttgggcaatttgaactttctggcattcctcctgcccccaggggtgttcctcagattactgtgtgctttgacattgatgccaatggtattttgaacgtctctgccgaagataagaccactggccagaaaaataagatcactatcaccaatgacaagggtagactgtcaaaggaagatatcgagaagatggttcaagaggctgagaagtacaaatctgaggatgaagagcacaaaaagaaggttgaggccaagaatgctttggaaaactatgcatacaacatgaggaacactgtgaaggatgacaaaattggtgagaaacttgatcctactgacaagaagaagattgaggacgcaattgagcaagctatccagtggctagacagcaaccagctcgcagaagcagatgaatttgaggacaaaatgaaggaatcggaaagcatctgcaatcctatcatttgccagatgt

SEQ ID NO: 7212 - DNA, 357 bp, Glycine max
  Clone ID: jC-gmfl02220084a01d1
gggaaaattgatgatcatgccatttaaaatttcaagacagaataattcctacgaacaaaggggaaaacaatgaggtttcccatctaatgaaataaagccaatgaccttatgcggaaagcaacggtcattttacacgggcaaaacaattagtatcccatccaacaaaaatcataaaaggtaaaattcaataaaaaagcctcaaataaggtttaaaccgataaaggggtgaaagcaactccccatttaggccacttccccaatcttggggcccggaccacttccaccagaaggagcaggataatcatcctcgggtggcccaaaaccaggaccacccatgtgaggaccaggaccaccttg

SEQ ID NO: 7213 - DNA, 517 bp, Glycine max
  unsure (1)..(517): unsure at all n locations
  Clone ID: jC-gmfl02220084a02a1
ccagcctggtgtgttgatccaggtctttgaaggtgaaagagcaaggactaaagataacaatttgttgggcaatttgaactttctggcattcctcctgcccccaggggtgttcctcagattactgtgtgctttgacattgatgccaatggtattttgaacgtctctgccgaagataagaccactggccagaaaaataagatcactatcaccaatgacaagggtagactgtcaaaggaagatatcgagaagatggttcaagaggctgagaagtacaaatctgaggatgaagagcacaaaaagaaggttgaggccaagaatgctttggaaaactatgcatacaacatgaggaacactgtgaaggatgacaaaattggtgagaaacttgatcctactgacaagaagaagattgaggacgcaattgagcaagctatccagtggctagacagcaaccagctcgcagaagcagatgaanttgaggacaaaatgaaggaattgcaaagcatcttgcatcctatca

SEQ ID NO: 7214 - DNA, 356 bp, Glycine max
  Clone ID: jC-gmfl02220084a02d1
ggctaaataattgttcctgccatttaaaatatttagaccgaataattcctacggacaaggggggaaacaatgggtaccctcacgtaatgaaatgccgcaattggcttaatgcgcaaagccacgttcatttttcacgggcaaaaccatttgtatcccatccaacaaaaatcttaaaaggtaaaaccctattaaaaagcttcacataagggttaaaccgacaaaggggtgaaaggaacccccccttgagtgcgcttccttaatcttggggccctgaccagttccaccagaaggggcagcataattatgctggggtgccccaagcccagcaccacccctggcaagacccgccccacctt

SEQ ID NO: 7215 - DNA, 559 bp, Glycine max
  unsure (1)..(559): unsure at all n locations
  Clone ID: jC-gmfl02220084a03a1
aaaggaatggcgttcatttggcggttctgtggtgtgtctctatgcaacttcacagcctctaatgcccagaaaggtccttctccttctctgcccataaccttggacttggagcatcatataacaaccccatctttactttcttccatcgaagaagaagaaggacgcgcggttaataggagacaacttattcttcacacgccagtagctgcagcagctgcatttgcagtcccaaatgcattggcactcaatgatgtgtctgaggatgttcgtgtctacactgacgatgagaacaagttcaagattgagattcccgaagagtggcaagtgggaacaggagacggagaatctagtgggtttaaatccataactgctttctacccaacacaggcatccaattccaatgtgagcgttgtgatcacagggctgggaccggatttcaccaggatggaatcctttggcaaagttgacgagtttgctcagactctagttagtgggcttgacagaagctggcgaaaaccccncgctgtggctgctaaactcatagattgcacatcatcta

SEQ ID NO: 7216 - DNA, 498 bp, Glycine max
  Clone ID: jC-gmfl02220084a03d1
aggccagcccttttttttttttttttttttttttttttttttttttcactgtaaaatgtttaatcaattatgttcaattgtcaattttggccactaagttttttactttcattcaacaatctcgaaggaaatgtcatggtttttatcataccagtccgatctagaatgccatatctagcttaaagaacaatgccaggaaaatccataatgaaatagaatagatgaagtgctgtgataaaaattcttcctcgtcatgaccattttcttcatatgaacctaaatgatgcaactaccttctgaactttggaagcatacttgtctgagtcctcttccacatactgtcctgtcacggtatacagtctgttataccaaccatttgatgccatcccaatagctgaatacaaatacctgcgactctcaccaggattttgcagcaaatactcgatgtaataaatcccattagatgattcacaatctatgagtttagcagccacaccc

SEQ ID NO: 7217 - DNA, 340 bp, Glycine max
  Clone ID: jC-gmfl02220084a04a1
ctcgaccttaaatcctacaccgccattgttccggggaagctgtcgttcgacgtgtgggacgtgaggggggaggaggttaggggtgcgcttaggattctcgcgacggctaaggttccggcgaaggctacttagcgtgcaccaccgtgttgcaggtgtcttccctatgtcacgctggtgaggattgacttgcatgactttggtcccttcaatatgtattcccagggcacccctatctccaactgtgcgcatgtcttttgtgccgccgtctacccgattacccttacgatccctatacattgaaccctaaatgctgttaattattgccctctgtttacccttg

SEQ ID NO: 7218 - DNA, 587 bp, Glycine max
  Clone ID: jC-gmfl02220084a04d1
aaagaaacacccgcacggagagaacataattcaatcctcttgtgaataagttttcaatggtaaaagttttcttcaacctatttaaagacagaatgaaaaatctatattatatacgcaagcattatacaaagatatgtcataaatagaagaaaaaaaggtaaaagaaggggacgggaaagagggaggggaagaagtaaaacacatccaagccaaatttgttcactctatttttatatgttaaggggctcttccctagattgtccattgttgtatccatcataggttttggtggacttgtaaaactttctcttcaacacaacaatccatgtgatcacttccaagaacaaggcaactgcaccaagtgcaataagaactgcagtgtaagttgatttccatttctgatcaggatgcaagatgctaaagcccctgaagatgttgatgattcccaggataactatgctgtatccgacgctgtggtgatatatgttccagatgtacctatacttgtgatccttcactggcctcaggaacaatgcaaaaatctgagtgttgcaaacaaaagaggcaattccatatagcgatgactc

SEQ ID NO: 7219 - DNA, 522 bp, Glycine max
  unsure (1)..(522): unsure at all n locations
  Clone ID: jC-gmfl02220084a05a1
gttatatatatacacacacccctctaattcagctttggagtaacctagttgaagatgccatgggaaacctctttggcaaaaataaaaagcgtgacactgaaagtgccaacaataataaaggaagaggtggaagaatctacactgccgtgaccacaagaggcttaccacctcatttcccaacacaattacctcattcacagcctccaccgctattatatccaactctagaacctccgccaccgccaccgccgccgccgccgccaccggcactaccacaatccatgtccaagaaaccaagttttgcgagagttttcgctaaacaaagctcttcagtcatgaacaacaatcaatctgctgccaagaagtatgctntgattcgtgataacttctctacccttgaacaggtgactacagccctgaggaaagaaggattagaatcatcaaatctcatccttggaatngattttacaaagagcaatgaatggactggcagaatctcattcaataaaagaagcctgcatg

SEQ ID NO: 7220 - DNA, 593 bp, Glycine max
  unsure (1)..(593): unsure at all n locations
  Clone ID: jC-gmfl02220084a05d1
agagaccataaatatattaaacattatgtgcaggtatatagtaatatacaacttcaaacgcatcgacacgaaccatgcatatatatagaaaccttgcacaattcatctccatttttcaatacacttgaaacatcccaaacagagacaagctatcatttttagacttttaacctcaccatatataaaccctattgagaaaggcatgttatgcaaactatgtaattaatgtgcatggttttcattacaatcacccgctgtacaccctgagacgactagtgatcctctctcggcacatgggacaattagttaatttgtgtccacactctctgcaagtcatgtgcccacatccaaaggccaaatctcttgcattggtcaaacaaactgggcaggccgtttggttttggtcatctccggaggatgctgctgtattaatgctgggtgcaggcctagaataaggaacaggaggaggttttggaactattctctttgctcttcctgttacacgtccgagtattccgaattccatggttgctctatattggaaggcgatctncatgagagcagccagagcataagctggctttttttccgac

SEQ ID NO: 7221 - DNA, 529 bp, Glycine max
  unsure (1)..(529): unsure at all n locations
  Clone ID: jC-gmfl02220084a06a1
gagatggcattgtttcgctaggaggtccccatatccctcttaagactggaagaagggatggtagaaggagcagagctgatgtggttgagcagttcctcccagaccacaatgagtccatttctgcagttcttgacaagtttggtgccatgggaattgacacccctggcgtcgttgcactgcttggagcacacagtgttggtcgaacccattgtgtgaagttggtgcaccgtttgtacccagagattgatccagctctgaaccctgaccacgtccctcacattctgaagaagtgccctgatgccattccagaccctaaggcggtgcagtacgtgagaaacgaccgtggcactcccatgattctagacaacaactactacagaaacatattagacagcaagggtctcttgatagtggatcaccaactagccaatgacaagaggaccaagccttatgtgaagaanatggccaagagccaagactatttcttcaggagttctctagagccattaccttgctctcagagaacaac

SEQ ID NO: 7222 - DNA, 434 bp, Glycine max
  Clone ID: jC-gmfl02220084a06d1
aacagtgtataatgcccatgggccatgatttatttatttagaaagaacaacctagctttatgagtatgaatatcataagcattgtcactgccatcataacagcactcacacgcatacataacataattaacaccatgaacatgcccttctacccaactctaagctacttgcatagtactacatatataatatccttattgaaattaaaaaaaaaacaacagtaacatcggaagattaaaaaacatagcctcttaatcctcccatccccatgaacctgcagtggtctcggttcattgaaccagcccatttaaaggaaaagaccttaattattttttgcataatatattacagattttcttcctcgatcatagacaaggggaggaaaattcaagggtcctgatcatggtgcttgttggcaacattgcactgctttc

SEQ ID NO: 7223 - DNA, 483 bp, Glycine max
  unsure (1)..(483): unsure at all n locations
  Clone ID: jC-gmfl02220084a07a1
tctctctcttcattttaggttaggaacccctcttctttttgtctctctctcttttcttttgtttctcatcatcatatctcaattctcaacgagttttaaaggacaaaggaaaccacaaccaacaacaccagacgtaggagaagcttgccaagagagaggaatcatagttccttttctgggaacgacagatcctcctttatgctaccttcaccacctctttcttcataccataccccccctcaagagcttttcttcaaattgaggaggtgcgtggcagacaaagctatgtgatcgatcaccttgatggcttccatgtataatcaatcgtaggtgtttcattgtctagatatgtatacatgtataacagtatatgtgcttgctgttgcacgttttaatagattattaggagatctaatttcttctcagggggggattaatcatagacacactgcttaatcaatattnnntgaggagatatacatc

SEQ ID NO: 7224 - DNA, 532 bp, Glycine max
  Clone ID: jC-gmfl02220084a07d1
attaaatagatttggcaccccattctttcataaatatcaatgaatctcttctcttttcttttctgctctccccatcgatcaactaatgcacgcccgagttatcgtcaagagtcataagtgtaggaatttggccatggttaacaaaatcaattttattcaatcttaagcagcacaacacttcctctggaagttcctcttgcttttgtgcctggatagttaggccaacatcaagtattccatgctttacacggtctcgaagtgaatcaagtcctttccttgatatatagctaaagcgatgtatatccagatctatttcaaagtagttaggtcccttatagaactcgtgttgaggacgtgacaaaactggcttgccattgtaggcatttataagcttcttctcggcagaatacagattaaggtcctctggattaactactccagccaaaatttttagtctctccctatagggaaccaggctttcctttgtataccctttcaccttttctggctcgtcatctggatcatccccata

SEQ ID NO: 7225 - DNA, 408 bp, Glycine max
  unsure (1)..(408): unsure at all n locations
  Clone ID: jC-gmfl02220084a08a1
atgtccttattttatgtttactgaataattggagagtagatagattgatgatttgagcgtgcatgggtgagatgataagcacgcaacgcaattaaaaagaattaatatgcaacgaatggatgtgtttgaagctggcctcatatatcaataatggattagatctgattctggctcaacgttcatgacgatcaccacccactactccattccgggaagctctgggtatctggacatatacccagagaggaaagtctctgcctttcaaaacccttacattatgggcttcactgctgtcgctagcattggaggattgctctttggctacgacactggtgttatatctggagcccttctctatatcaaagatgattntccggatgtcaggcacagtaattttctccaggaaac

SEQ ID NO: 7226 - DNA, 503 bp, Glycine max
  Clone ID: jC-gmfl02220084a08d1
aaacatgaaaataaccctcttttcttcatgttggaatagaaaaagaaaaaatgaatactttacaagattacatttttagcataatgtccgcgttgcaatcttgtcacactccacattcacaatggtctgaaataaaagaggtgtacgccaagtttgagtgcaaacttgtggcagccaaactaataatagtgactaaaaaaaaaaattagtttatatcactttatagcataatatcaatcatagcagaacatgatatagacatgagccgcactaaaatgctttgcattcctaggaatgattttcagtccgaacaagaaggctttgagcatcagggttcttgccccaagctctctccttccataacagctccacttcatcaaatgtcaatcccttggtttcaggaacatagacaaccacaaacataaacgcaagcacggctataatagcaataattaagaaagtagggccagtgcctacagctgcagcaaccgacagaaatgact

SEQ ID NO: 7227 - DNA, 447 bp, Glycine max
  Clone ID: jC-gmfl02220084a09a1
ctctggaccgagtcaagcggcggcgaatcggcatgactcggcgctgctcccactgcaccaacaacggccacaactcccggacatgcccgtcgcggggagggggcggcgtcaagctgttcggggtgaggctgacggatggatcaatcataaagatgatcgctagcatggggaaccttaacctgtcctcctgctcctcctccgccgccgccgcacatctgcaattccgttcatctccttcttcttgcaacctccccgcggcctcatcgcccaatccaagctccccgagctccgacccgccccaaggctacttgtccgatgaccccgcccacgtctccaccttcgctaaccgccgcggagatagaaaaaaaggagtgccatggactgaagaagaacatcggctgttcttaattaggctccagaagctgggcaaaggagactggcgaggga

SEQ ID NO: 7228 - DNA, 571 bp, Glycine max
  Clone ID: jC-gmfl02220084a09d1
ttcgtccttttttttttttttttttttttagccaaaccaagaggaacagaacagaacctcttggtgctatttgattatttaagcttcatttgtttacagttagaaagaataaatattttccaagaattgatctaacctgatctacataccaccatataacttgctactaattggaagattaaatgctagggatcaggaataaaaaaaatgatatataatggtacaaatgaaaagatgagcaaaagaaggcttaattactgctgctgtcttcaccagaccttacaagctcagacagcttgaattgcgttgtccttgccattgtttaaatccgaactaccaaccgggacatttgcatggaatgctgactgccttgagggctctcctaacaactttatggaaagaggggaaggctctctatcacgtacctgtgcttccccaatgcttagatgagacattcccacaagttcgtcaacattaacaggttcctttggaatgactgggattggcttgtggatctgatggtggcatgtctctcctccttaacttcttcaaggggtgaacccaagttgat

SEQ ID NO: 7229 - DNA, 408 bp, Glycine max
  Clone ID: jC-gmfl02220084a10d1
actaatacattttatgaaagaacatgttttataggttcatattgtacaatatatgtgtgctgactgaacccattcgagcacactaacaaaagggggaaattcatgggagtattctgactattataaacagagctgacctacagggatggacccttagagcctattttagctatcctattgcaagaagccataacttaggcacaagtggcttgcccatagtgcagcaaccccttgaaattaaggaggctcattcatcccctggagtggcttcaccgctggacatgtgaagctaagtgcatgcctgacaaaactgccatattcgaacccttgtacaaacgcgacatttccagccctgttgagactaaggatgctggctattatgccagggctggccacaaaattctactt

SEQ ID NO: 7230 - DNA, 448 bp, Glycine max
  Clone ID: jC-gmfl02220084a11a1
caatattccagttgggcacttctaaaactagcacaagaagaagaagcttcaaccccaggaataagcacggtttctaaaatgttttgcaattttcacattattcttctaattgctcttgcacttttggtacaaatatcatctcagctaggctccaaggtagaagtgcttcctggctttgaaagccctcttccttttgaactggaaacagggtacgttggattaggagaaaaagatgatgacatgcaagtgttttactactttgttaagtcagaaaatgatcctcagaaagaccctcttatgcttaggctaactggaggtcctggctgctcttcattttcaagtcttgcctttcaaataggtccacttcgattcaagatagaagagtatgatgggagtgtgccaaattagatcttgaagccacagtcctggacaaaggtttgcaacatta

SEQ ID NO: 7231 - DNA, 393 bp, Glycine max
  Clone ID: jC-gmfl02220084a11d1
cagatagtacaaacagttatttgacactactgctttgctcactttaaaatacaggatctttaaacattgacaattcaaaaaataaaaaatcatagacaaatgagcataacattgataacctagatttctgccaacatagcggctgagttacaaaggcatattagctatccatctactgaacatggcaaaaccttcctcaggcttgtactctggagctgtatgtcctgaacccttcacagttgcaaatgtcatttgattcgagtaaatccttgtgtatcctgcaacttggtcttctagaagccatggcctccaatcttccacaatggagtagtttagagccctaatccatgcttgggttgacatgaaaggaacaactgcatcatgatcttcact

SEQ ID NO: 7232 - DNA, 353 bp, Glycine max
  unsure (1)..(353): unsure at all n locations
  Clone ID: jC-gmfl02220084a12a1
ctctctctctctctctctctctctctctctctgcttcacttgcttgaagcaatggccaaagccttggcatcagtgctgctgtttctcctcgtagctgtgagtaatgtgttgagctgtagagcttgaacttgaaactcttccaccctcttaccctcaccctcaccctgttcactcccccacaccagcacctcttcacccaccagcaaatgctcctcacccacaccaccaccaccaccaccaccaccctccagcaccagcaccagcaccagcacctgttccttcaccttctcaccacaattaccctcctacccctgcccctgctaagcctnctactcaccaccatcaccatcacc

SEQ ID NO: 7233 - DNA, 432 bp, Glycine max
  Clone ID: jC-gmfl02220084a12d1
agtcggcggccgcccttttttttttttttttttcatactagaactatccatttcatacgtactgtcactcattattgtgtatgatcaattcaagcccagagcctacaaacgcaaaaccacaaataaaaatgaagacaaacaaaacaaggccagaaagaaggcaaattagagacaacacagctctatcatataacttaaaataacttgaaatatgatatatccataatttcttgcatttaatggcaattgggctcaaatgcaagaggcccaacagtgtagagcacaaaaggaagcctcttagacaagaaaggcttctcgggcctgagaagagcaccagtgacaccaccatggagatttgaggccttaagcccatagggtgcactaaccaaaaccacgttacacttgtgggccccgtacgtggttatgctcttt

SEQ ID NO: 7234 - DNA, 510 bp, Glycine max
  Clone ID: jC-gmfl02220084b01a1
ctgaaacttcctgatagtttatcatctatgagggtttctaggttaatttatacaaatcagggggttgcgattttggctttggcagcaaatgctgttcacaagctttggaaatggcagagaaatgagcggaacactactgggaaggccactgcaagtattcaaccacaactatggcaaccatctagtggaatactgatgactaatgatataagtgatactaacccagaggatgctgtgtcatgttttgcactgtcaaagaatgactcatatgttatgtctgcttcaggggggaaaatttctctattcaatatgatgacatttaagacaatgacaactttcatgccacctccaccagctgcgacatttcttgcatttcatcctcaagacaataatattattgctattggcatggaagactcttccatacaaatctataatgttagagtggacgaggtcaaaaccaagctaaaaggtcatcagaagagaattactggtcttgccttttctcat

SEQ ID NO: 7235 - DNA, 422 bp, Glycine max
  Clone ID: jC-gmfl02220084b01d1
agctgaaaaaaaaaaatctataacgactagttttctgtatatattaaaaaaatactacacaaataaaggtaggaccaaagaaaaaaaaataataacaatgaccctccactctgcaacgccccagccgaatttacgccagtaatcctatgagggtaataacatactgtgccaatcccacggttaggaagccactaataacaaggtgtgattggttcaatttgattagtcctaacctacaaacacctacgttccgcagcttccctttgcaaaccgaatggaggcaccagggagcgggatcatatgcaatcaaaacacacactcaaagttccttagagaaaagtgctacataatgtgccatccatcatcttaggggttgctctgaaacagcagcacctgaagcagagctaggcccggcaccattc

SEQ ID NO: 7236 - DNA, 494 bp, Glycine max
  unsure (1)..(494): unsure at all n locations
  Clone ID: jC-gmfl02220084b02a1
aacaagatcaacaacaatagactagttcttgaggttgtggtgttggtgaaatttttgtgtggagatgtcaggtggtggatgcagcatagtgtggttcaggagagatctgagggtggaggataaccctgcactggctgcaggagtgagagcaggtgctgtggtttgtgtcttcatttgggctcctgaggaagagggtcaatactaccctggaagggtctctaggtggtggctcaaacaaagcttggctcaccttgattcctatctgagaaaccttggctcccctctaatcaccaaacgttccactaatagtatttcttctctcttggaggttgttaagtccaccggggctacccaactctttttcaaccatttatatgatccgttgtcacttgtgagggatcacanagcaaaggaggttctgacggctcaaggcattaccgtacgttccttcaactcggacttgttgatgagccatgggatgtgaatgatgctca

SEQ ID NO: 7237 - DNA, 443 bp, Glycine max
  unsure (1)..(443): unsure at all n locations
  Clone ID: jC-gmfl02220084b02d1
tcgcgatctagaacctcgagccgctcgtgccggcattgcatcaatagctttgagcccatggtcctgaggttgaatggagaatttgcaccatttgggaagctgcttatggcctgattcctacaagttcctcagctgttgatcttccggaaattatagttgcaaccccactacagcctcccgtgctgtcatggaatttgtacatacccctattgaaggtcctggaatatcttcctcgaggaagcccatcagaggcatgtcttatgaaaatatttgctgctacagaggaagctattcttcagaggacatttccacctgagtccactagagaacaaaacagaaaatcaaaatacctagctggcataggctntggctctgcctcaaaaaacctggccgaggcagaacttcgtacaatggttcattcactcttcttagaatcatgtgca

SEQ ID NO: 7238 - DNA, 546 bp, Glycine max
  Clone ID: jC-gmfl02220084b03a1
ggaagaggaagatgggttggtcttccgcaacagcatgtgcgtcgctctcctcttcgactccgctgcctcgacttccaccgtctcgcactggcactcccattcctggttcgctttcattttcatggctttcttcatttcccactttaactttaagtgcttctcgttctcgctcctccggaataaaccctcccaatccctcacgttccgatgattccttcattcgagctgcctggacccgaagatctcgaggtgaagctgcaaagaaacctaacaggaaatcgtggaagcagaggacagacatgtacatgagaccattcttattaaatgttttcttctccaaaagatttattcatgcaaaagtggtacaccgaggaaccagcaaagtgatatgtgttgctaccacaaacgccaaggatcttcgaaactcccttccatccttgatagatcataacgcttgtagagttgctggaaaccttattgctcaacgatcaatggaagctgatgtatatgcagtagcctatgaacctagaaaggatgaacggattg

SEQ ID NO: 7239 - DNA, 405 bp, Glycine max
  unsure (1)..(405): unsure at all n locations
  Clone ID: jC-gmfl02220084b03d1
aatagcacaaatgaagcataaacaatcaaatagaattcgtaacaacccatgcaaggagactggctacattaaaacaggctaatttgataggaaatgagctcaagcaaaaataatcccgttttccttaatagtatcaagaacgatccctagtctgccttcaatcctttcatcctttctaggttcataggctactgcatatacatcagcttccattgatcgttgagcaataaggtttccaacaactctacaagcgttatgatctatcaaggatggaagggagtttcgaagatcctaggcgttagagagagcaacacatatcactttgctggttcctcggagtaccacttttgcatgaataaatctttaggagaagaaaacattnaataagaatggtctcatgtacat

SEQ ID NO: 7240 - DNA, 499 bp, Glycine max
  Clone ID: jC-gmfl02220084b04a1
attaatgcccctttcattttctctgcatctgtagtatctatcaccaatcaattccactcttcttcccatcaaacaacaaaaaatcaatctgggaaacaaaaacaaaatgccgtcattagaggaggaactcttcccatcaaccccaggaaagttcaagatcgagcggtcccaccacatgaaccgccaactctatcgctgtttcgcctccaccagcaccatgttcctgtgggccctcttcttaatcgccctcaccgcttcctatctcagcttccaaggcttcgtcgattccggcagccgctacctcaccgcctcctggggcgggatccagtgggagaagcaggtccgcacctccgcccagatccaccgtcaaggcggcatgtccgtcctcgtcaccggcgcagccggcttcgtcggctcccacgtctccctcgccttaaaacgacgcggagacggcgtcgtcggactcgacaacttcaacgactactacgatccgtccctc

SEQ ID NO: 7241 - DNA, 521 bp, Glycine max
  Clone ID: jC-gmfl02220084b04d1
cccttcttcttcttgaccaggttctttcttcttctttttttctatctgtgacttaaaacctaccacactaaaaaagaaaaagaaaaaaaaaacccttcccgaataaaaaggaaacaaaacaaaatttattaatttacaggtttgccgtgattgtagccgtaataggaaagataccacttgacgaacttcttcaacccggtttgcaaatcggtcgtgggcttgtacccgagctctctccgggccgaactaatattcgcgtgagtaaaaggaacgtcaccgtttccaggcatgtccacaatattcctcttcgccttcaccttcaaatgccgctccaatatactcacaagagtaggaacagtaaccggcgaagtattccccaggttaaatattctatacggagcgggtccacgcttcttcccacccgacccggtactcttagccgaagtatccaacgacccgacgcaacccttcacaatatcatcaatgaggtgaaatccctagccaggtcgacatgggtttta

SEQ ID NO: 7242 - DNA, 274 bp, Glycine max
  Clone ID: jC-gmfl02220084b05a1
gagatggctttgcacacactcggtggaattcatattcgtattaacactggtggagaggccgtgggaaagctctttggtgatgatgatgagcgtgacactgcaagcgacaacgattacattggtggaggtgttggcatgtacgctgccatgaccacttgaagctttggagctgatgcactgctcggtgacctcattgacagtctaacccgttgtgagatgcagctgtagagcctgcgccaacagctcggtcgacgtctgcgccatgggcactacc

SEQ ID NO: 7243 - DNA, 304 bp, Glycine max
  Clone ID: jC-gmfl02220084b05d1
aaacaccgtatattgcccatggaccatgagcaagtatttaggaatgaacaacttaactcgctgagtctcaatccatgcatctttgtagatgccatgatcactgcatttacattcatacatacccttgttacctccctgaccgtgacctgctaccaaactttgacttactagcttagcatatcttatccctaatgctaaaggcatgttatgcaaactctgcagttacagcgcatggttaacattcctatcacccgatgtccaccatgcgactgatcctgaaccggtctcggcacatgggaccatt

SEQ ID NO: 7244 - DNA, 483 bp, Glycine max
  unsure (1)..(483): unsure at all n locations
  Clone ID: jC-gmfl02220084b06a1
aaagaagttctaaggaagagggaatatgcagaatacaaggtgctagttgtctatttgcaataacaacatcagcgatccaaccttagtattcttcaacccagagagatttgtaataataaattacaacaacttaaacgatggcaggaggagcttatgtagattcgggaaatgcaaagcaatttgatgggaaggtcacggcattcgtattggttacatgctttgtggcagccatgggaggcttactcttcggttatgatcttggaataaccggaggagtgacttctatggaaccatttctcatcaaattctttcccggtgtttataaacaaatgcaagatgatgttggccatagaagccaatattgcaaatttgacaacgagctccttacactcttcacctcttccttgtatcttgctgcattagtagcttctttctttgcttccaccactaccaggatgatggngacgcagggcctcatgttct

SEQ ID NO: 7245 - DNA, 332 bp, Glycine max
  Clone ID: jC-gmfl02220084b06d1
agggggggaaaaaaagcattttttccctaaacaaaaattcaacattttttgggaaacaaaggaattcaaccccctttttttcttcttcctccattttcaccccttaaatatcaagggcattctttattcaactttgggcccccccagggttgggaacatcatcagcatggggaacaatctttgaccaaaacccaggggacccccaaactgggtgcctttcttcaagggggaaggtctttggcccaggcaacaacatggcaatgaaaagggcccttatgaggcccaatgccccaaaaaaaaaaaaagggcccaacttcaaggggcaaagcatg

SEQ ID NO: 7246 - DNA, 397 bp, Glycine max
  Clone ID: jC-gmfl02220084b07a1
gccctgcagagccgccaaagcaagcctgccctaaaaattgaacagggcagagagcaagggcaagcgagtgaacatgggaacctctgcgaacgctgtcgcaagtggtcgtggcggcgcccctgtccccaaagacgtcgactacgctaattacttctgcacctatgctttcctctaccaccagaaggagatgctctccgaccgcgttcgcatggacgcttacttcgacgccatttttcaaaacaaacgccacttcgctggcaagactgtttaggatgtggggactggaagaggcattcttgctatatggtcggcacaagcgggtgcgatgaaagtagatgcagaggaagcaaccaagatgtcagaacatgcgcgtgcacttgtcaaagcgaataatctc

SEQ ID NO: 7247 - DNA, 419 bp, Glycine max
  Clone ID: jC-gmfl02220084b07d1
aaaataaaataaaaatttcaggaatcttataatcaaccaacttttacaaacttcagcataacatattctaaaacaaaaagggccacaagcttcccctaaaactcaggtttagataaccagcacgacggttacccaaccattataactgaaacatgctaaacgtacttgagttgcaaatcataaacccccaaaatgattggaaaaacccgaatgttgcaaggggcggcaactacttttttcctattactacgtaattaaaaacccttcaattccatatgatcacaaaccctgtgagccgttccttggatcttgcagcccccaaaatttgaaatccaaattgttattcaatgtgagccttatttttgaaaggtgccagtagcttgccaaaatgctgatgaatctcacatccaagttcaacc

SEQ ID NO: 7248 - DNA, 391 bp, Glycine max
  Clone ID: jC-gmfl02220084b08a1
tgcatatagagtgatcgtgatggcaccaaaggcagagtagtagccagcggagttgttgcccgcggtggtgaagtagtcgacggagggtgacaaggctccggcggagttgtagccaaaggccggattgtagcttccgaaggatggaagcgccggcggagtatggtagtagttgttgagatacacgaagatcgtggtgacatacaagatctacatcttcaaggttctgaagcaggtccaccctgacattggtatctcatgcaaggccatgggaatcatgaacagcttcatcaacgacatcttcgatatgcttgcccaggtatcttctagacttgcccggtacaacaagaagcccaccatcacttcaagggaaattcagaccgcggtcaggctt

SEQ ID NO: 7249 - DNA, 524 bp, Glycine max
  Clone ID: jC-gmfl02220084b08d1
gataggaataatatacgtctctgtattagcaactaattccatacaaagaaggatcaacaaatcccatattcttcacttacaaattgctttcaccaaaaagaaaaaataaaccaacacttcaacataaaacatattcctaacagagacacctagatcgaagcgaaggggcataatagtcagttcaagagctagtgaacttggtgacagccttggtaccctcagagacggcgtgcttggccaattcaccgggcagcacaagcctgaccgcggtctgaatttcccttgaagtgatggtgggcttcttgatgtaacgggcaagtctagaagattcctgggcaagcttctcgaagatgtcgttgatgaagctgatcatgattcccatggccttgctagagataccaatgtcagggtggacctgcttcagaaccttgaagatgtagatcttgcatgtctgcacgctcttcgtggatctcttcttcttcatcccttgtacgccggcgcctccctccttcggaagctttttt

SEQ ID NO: 7250 - DNA, 383 bp, Glycine max
  unsure (1)..(383): unsure at all n locations
  Clone ID: jC-gmfl02220084b09a1
agcgaagaaaaaaaacacacacacacaaacacaagcacagttgaaaaaggctctgcttaccctctcttcgctgcaatgaagaaacgtttgtttttcttctccgaagaagaaaaaaggctctcggcgacgatgcgcagcaccactctccctcgttcctcgatgcccttctctgcgaagagcgagaaaccttcgaggaagactttgatgagaacggttatgagcgtgagaccgaaaacaacgaaccctctgtgataaagtcgcaatctttgccctaggttttgcacgataatgacctgttctgggaagacgaagagctcgagtcgttaatcgcgaaagatggagagacccatttgngttttcatggagtcgttgctaatggggcc

SEQ ID NO: 7251 - DNA, 472 bp, Glycine max
  Clone ID: jC-gmfl02220084b09d1
gattgcacatattgtcaaatatcagtgtaagatgagtaaaaactgcactgaaagtataactcaggtagaattacaagtttataacttatatttctactcagtaccagatcccttttccaccttaaaccacaaagtggagaagggtatctcagtctctgcctcattaattttcaaattatggctagaaatgtctataactaagaacataatttagtagcatttcaataacataactgccagatttatatgaaagaaagctaccacatttgaagtaaatactaagttcattattagcgagggctattaagaacatcaattgacacacaattgacagaaggcagtcgcatttgctggtcctgagattttctcctcttcaacagcggctccagtgaaagtgagactgatgatgacacggtccatgaatcatttgagctatcacaactgaaagatgcatcagtgacagcacctgggc

SEQ ID NO: 7252 - DNA, 444 bp, Glycine max
  Clone ID: jC-gmfl02220084b10a1
ctttcattttcacactcaaccctttcttcatccttttatctcgtctctgccaaaacgatgccgtttgctctggagaataacggaggagttacgatcggacggtcctccttcgcttactgcgtcgcgatctgcgatcgagattttccggatgatgattccgactccagctccgactcctccatcggaaggaacagcatctcgtcggatgattcctccgaccgggaagacgccgtcgaagttgaggttcagtgttccttcaaaggccctttggataccatcaatgatctagaggaagatttacccgtcaagaaaggcatatctaagttctatagcggcaaatccaagtccttcacaagcttagcagatgctgcagctgcaagttctatggaagagatagtgaagccagaggatccttatgctaagaaacgcaagaacttaatagct

SEQ ID NO: 7253 - DNA, 448 bp, Glycine max
  Clone ID: jC-gmfl02220084b10d1
aaaaataaccaaagctgaaatataataatatacaacactcaagtcaggtgggtccacataggacattgaaaagttcacaaagtactgggccattacaaacaaactcgaatgtgaaccaaactcatgggcactggctatcaactaaaagcttatattggggtcaaaaattcagtgcatttagcttccactacaaatagccaaaccagatttatcatgagccttagcaacagagtgcagatcagtccatgaatatgatctccaagggggatttcgtccagttgaagaaggttgaggcagcgatgaccgattaatagcacgggatgaagaggaggaagagggcatggaggcgatattgaagtggagctactaccctcttcactacagttcaaagtgagacaagatgctcctccacctatgttactgggtcgctttgatattccaccaatgt

SEQ ID NO: 7254 - DNA, 523 bp, Glycine max
  Clone ID: jC-gmfl02220084c01a1
ctcttggcatgaccattcaaatgtcttcttttctcttagcttctcttgctgttttctttttcttctcctccttggagaagagttttgcctttcaagcagcaagaaaggaggacacagaaagcaacaatcttcatcaatatactcatcttgttcacctcagctcactccttccttcatcttcttgcagctcttctaccaaaggtcccaaaacaaaagcatcattagaagtggcacacaaacatgggccatgctcccaactaaatgatcatgatggcaaagctaagtctacaacaccacacagtgacattctgaaccaagacaaagaaagggtgaagtacattaactcaaggctctctaagaacttgggccaagatagtagtgttgaggaattggactcagctaccctaccagccaaatctggtagccttattgggtctggaaattactttgtggttgtgggtcttgggacacccaagagggactcgtcactcatttttgacacttggcaggatctcacttggac

SEQ ID NO: 7255 - DNA, 445 bp, Glycine max
  Clone ID: jC-gmfl02220084c01d1
attcaacaaacctttaattaataacaagaacaagtttacattattttttttcatcttacatatgtacaattgcaagcaatcgcacagcttgagagtcatacatatttcacctcctccattcttttacaacattatattatatgttttccaacaattaatcactatttaatttcccccacattattggtttcccttttctatttccactgttacattatgtcatgacaacaacaatagtaataatgaaagcctagaaccaattaagattcctttgtccctaactagcccaaagcatgtttaatcattaatcacttgcacccaccagcaccaaacccaattctcccacctccaacatcatacacaacctctattgttctctgtagtacgttcccatatatagtaacatcactatcgtcaccatttgcggcaaaagccaaacaaacct

SEQ ID NO: 7256 - DNA, 255 bp, Glycine max
  Clone ID: jC-gmfl02220084c02a1
gaagatgaagaaatggaaagtgagagtgaagatgggttcagtgtgctgaatggtgggaagggtgtaatattcagtgaagaagtgagggtgaaggatggagtttgtagggtgagttttggtgaccaggaagaggttagtagtggtaaagaaatgtatcttgcaaagggacttggtgtagagtgctgtggtgatggcataggtggttgtagaggtggtggtggcaggtggtggtgctcatacttccttggggtttgg

SEQ ID NO: 7257 - DNA, 424 bp, Glycine max
  Clone ID: jC-gmfl02220084c02d1
gtgaattcagttatttataaacattggcttcaacataagaacttcattacatcacaagacactcgcttgtatttgtacgtataaaaacttcatcaccaattcaagcacctgcagtagccacagctccttgatgagaatgaggcgagaaactttgaggttcatagataccatcctcgtcttcctctgagtcccaaaggaaactagcatatgctgcttgtacatggctgtcttcaggagaggctaggactgctctttcaaaatagctggaggcacgttctaggttgagaagtagttcccaaactaacttcccatactgggatagaacctctccatcattagggtctgcaagtatggcacgggaataatactcctctgctccttcacgggcttggttgcactgatacaaaaaataggcataattcct

SEQ ID NO: 7258 - DNA, 506 bp, Glycine max
  Clone ID: jC-gmfl02220084c03a1
cagaagttgaaaaggccaaagaattcacaagggggaagaacaaaagggcggcaatacaatgtctgaagaggaagaggttatatgaacagcaaatagagcagcttggaaatttccagttgcgtattcatgaccagatgataatgttggaaggtgctaaagccaccacagaaacggtagacgcgttaagaactggagcagctgctatgaaggctatgcaaaaagcaacgaatattgatgatgttgacaagactatggatgagatcaatgaacagactgagaatatgaaacagattcaggatgcattgtctgctccaattggtgcggctgctgattttgacgaggatgaattggaagcagaacttgaagaactgcagggtgctgagttggaagaacagcttcttcagccagcaactacagctcctgcggccccagtgcaggtcccagctgggcagcaacctacttcgccagttcccgcaaagcgaacttcggaagaagatgaatggcag

SEQ ID NO: 7259 - DNA, 573 bp, Glycine max
  Clone ID: jC-gmfl02220084c03d1
ccagctgtcggcctttcgtttttttttttaagatataatacattgattaaactgaccacgttaaactcaaccacataaagtataagatagtcaaatgcatcaatatacttgatacgtataatggaaaggaggggttcgaactcatccaaaataaaagtagtacgttttgaagacttttatgataattttttttccacttttatatacatcctctggtcagctcaataatttcaaagataagcgagcaggagagaagcagaattctccacgtaatagtggttacaattcttcattgaagccatgcacaaaaaaaagcctgcaaaattctgctcaaagtgccatctcagcctgcaaagctgccaattcatcttcttccggagttcgctttgcgggaactgggcgagtaggttgctgcccagctgggacctgcactggggccgcaagagctgtagttgctggctgaagaagctgttcttccaactcagcacccttcagttcttcaagttctgcttccaattcatgctcgtcaaaatcagcagccgcaccaattggagcagacaatgcatactgaat

SEQ ID NO: 7260 - DNA, 552 bp, Glycine max
  unsure (1)..(552): unsure at all n locations
  Clone ID: jC-gmfl02220084c04a1
gtttatgatgttactgatgaagcatctttcaacaatattaggaattggattcgcaacattgaacaacatgcttctgacaatgtaaacaagatacttgtgggtaacaaggctgatatggatgaaagtaaaagggctgtgcctacctccaaaggtcaagcccttgctgatgagtatggtatcaagttttttgaaaccagtgcgaagacaaacatgaatgtggaggaggttttcttttcaatagcaagagatatcaagcaaaggcttgcagacacagattctaaggctgaacctcagactatcaagattaaccaacccgaccaggcagccaccgggggtctagctgctcaaaaatcggcttgctgtggttcatgaaacaaataacagatcagaatctgcagttagagggtgcagattcaacacttgccctcatatgggtgctatagttattttgatgacatttaaaagtgggagcatgtatttgtccttgtatttcccaactgcaaagactatgttttgaagatagtgctttaaattttttgcttanaaaaaaaa

SEQ ID NO: 7261 - DNA, 541 bp, Glycine max
  Clone ID: jC-gmfl02220084c04d1
aagcaaaaaatttaaagcactatcttcaaaacatagtctttgcagttgggaaatacaaggacaaatacatgctcccacttttaaatgtcatcaaaataactatagcacccatatgagggcaagtgttgaatctgcaccctctaactgcagattctgatctgttatttgtttcatgaaccacagcaagccgatttttgagcagctagacccccggtggctgcctggtcgggttggttaatcttgatagtctgaggttcagccttagaatctgtgtctgcaagcctttgcttgatatctcttgctattgaaaagaaaacctcctccacattcatgtttgtcttcgcactggtttcaaaaaacttgataccatactcatcagcaagggcttgacctttggaggtaggcacagcccttttactttcatccatatcagccttgttacccacaagtatcttgtttacattgtcagaagcatgttgttcaatgttgcgaatccaattcctaatattgttgaaagatgcttcatcagtaacatcataaa

SEQ ID NO: 7262 - DNA, 527 bp, Glycine max
  Clone ID: jC-gmfl02220084c05a1
ctttagtggtccattaatgcttccaaaccgagcttcagcaaatagtttatcagccccaatcaaatcttctggaggattcagagattccttggatgataagtctaaggctaatctagtgcaaattaaaggacgattttcagtgacatcagaaaatttagatctggtgaaggatattcctgtaagttcagtttcacgccgatcttcacagggatcaccaatgaggaaatctgcgagtgttggtgattggatggtggatttcaaacaaatgcagtcttccaatgattctgccaatatcaatattcctgcatcacttctagtgcctcatcttcacaatctttttcagcagacatctattcaacaggatcttataatgaatctgttgaatagcttgcaaactgccgaggcaattgatacttctcagaatggaaagttaccaccattacctcgcaattcagagaacaatggaagtgctgatacagcagtttcagagagggcaccactactgctgggcagaatttcagaaactc

SEQ ID NO: 7263 - DNA, 403 bp, Glycine max
  Clone ID: jC-gmfl02220084c05d1
acaaaaagccttttcaagtccaaatccgatttagtaaaaaaaaaaaaaccaatttaatggggaggggtggtatttctcccccgggggagtccccacaacttttttatcaggtttccccagaatttgggattggtccggaaacataggggattgcggtttgatacaaccgagaagcttatttacctctgaatctttaaaggaaataaattaggggattaactttgaccgatcattattttggtcatttgcgctaacggggctttatatatagaacggcccaaaagcttattgaacccatgggtggacccaataacctttttttttgacccttatcaggggcgggctttaaacctccaaaaagtggttctcctcaaaaaagagaaaaaattggggttcaaccttt

SEQ ID NO: 7264 - DNA, 78 bp, Glycine max
  Clone ID: jC-gmfl02220084c06a1
ctctgagaggcctcatacgaggtgagtaagatgaataaacactggagcaccttctcccttccggttcgtatgcttaga

SEQ ID NO: 7265 - DNA, 270 bp, Glycine max
  Clone ID: jC-gmfl02220084c06d1
agccaatcattttcttttatgaatgaaaatgatacacactgaaatactatctcactactagcgtgtaaaccaccgacggaaaggagacccacacgattgctcacacttactcacacgaggcgaggcaaaacatcagtgacaaggacaaccttaataggcgatgaacactgtgagtgactccgcgtcaacaatgcgggtaagtacgcgtgtaaattgtcccgatctacattcccctgtaaatgatacttctacctgtcatcgagacatact

SEQ ID NO: 7266 - DNA, 58 bp, Glycine max
  Clone ID: jC-gmfl02220084c07a1
ctcaccgagggctcgttatggctcagtaggctgagtaaactccggcgaacatgatgcc

SEQ ID NO: 7267 - DNA, 402 bp, Glycine max
  Clone ID: jC-gmfl02220084c07d1
gccaggaattttcttctatgattgataagcatccaaactgatacactgtaggattacgagctgccataccatcgactgacagatggccttcaccattacgcatacttactcacacgctgtgacgtaaaacatcttcctcacagagacacttagttcgcgacgaacggtcatagttactaggcctaaagattgtgagcaagtacacggccttattacccttatatacggtgcgcttgtccaggtaatcgtacctgacatgcctgcccgctaggtgaatttcgctgaccgcgatggggggctgacagtcgccacgggcatgcctagaagacatctgggcatgctagctgtcaagatccctgatgcaactgtccaggatgccaatggccctgctagtgattccag

SEQ ID NO: 7268 - DNA, 429 bp, Glycine max
  Clone ID: jC-gmfl02220084c08a1
cgcttcgcttccagacagagcatcagcagcacagcgaagaaccgcttcccgttccgtcactctctgccgctgaagaaaacaaagcaacaacgaagcttcgaaagaagaaagaagacgacgtcgtttccgataaccgcttcaagctccagaacggaagagaggtttttgaagaaaaagcgtacctcgtaggcgttgagcgcaagaacgaagttcaagatttcggcatcgaagagtctctgagcgaatagtcgcagttagctgacactgctggattataggttgtaggctctacttaccagaagcttacttctccaaatcctaggacgtacataggctctggcaaggtttctgaaattaagagagcaattcatgcattgggcgttgaaactgttatctttgatgatgagctgtcagctgggcaattgcgca

SEQ ID NO: 7269 - DNA, 522 bp, Glycine max
  Clone ID: jC-gmfl02220084c08d1
aatccaaatcgaaatcggattggatatgcatggctactaactgtagctacaaaccaatttgcactgccatcccaacgtgtcgaacatgatttcaataattacacatacatatgtacatgttatgctgcaaaattagatatattaaagaaagttaaggttgcgatacgcacagttgcctcatgggtgtaagcattcttgcaaaacgcaggggcacatgtgccttgatatatgttccttgctctgtatattcagttttctcaaccattccaacctggtgtatggtgctgagaaggtccccattttcaaatgggaccagagcttccacccaaaccatggagtcctttagcttgtcttgaactgcattacaaaattcttgcaagccattaccacttaaagcagatatgcatacaacatcatctcttttttcagcttctagcctgagtttctggggatcactaactttgtcaaccttgttccagacaatcaattctggaattggcgatacatctagttctgacagga

SEQ ID NO: 7270 - DNA, 92 bp, Glycine max
  Clone ID: jC-gmfl02220084c09a1
cgctcatcttcacgactgagcatttgttgatccgcgtataacggcttagcgttccggcagtctctggctctggagaataccgggcgacttcc

SEQ ID NO: 7271 - DNA, 482 bp, Glycine max
  Clone ID: jC-gmfl02220084c09d1
aatccaaatcgatatttgattggatttgcatggatactaactgaagctacataccaattggcactgacatcccaacgtgtcaaacatgacctcaataattacacatacatatgtacatgttctgctgcaaaagtaggtataccaaagaaagtgaaagtggcgatacacacaattgcctcatgggtgtaagcattccagcaaaacgcacgggcacatgtgcctggctaaacggaccttgcactggctattcagctctgttacccattccaacctgatgtatggcgctgagaaggatctcatttacaaaagggaccatagcttccacccaaaccatggagtcctctagcttgactagaactgcattgccaaattcttgcaagccattaccacttaaagcagatttgcatacaagatcaagtgtttcttcagctgctatcctgaatttctggggatcactaactatgtcaaccttgttccagaca

SEQ ID NO: 7272 - DNA, 335 bp, Glycine max
  Clone ID: jC-gmfl02220084c10a1
ctcgaaccgtctcacttaaacgtatcttgatccttatagtctcggatatggactagcgacagccggtagctgaggagaagaactgtggagtctcaatcggacgaacctgcctctctatctgcgtctcgatctgtgaacgtgaccttgcataggaagatgccgagtacatgtccaactcctccatcgagaggtccagcatggcgccaaaagattcctgagcccgggatgaccccagcactggtgaggctcaaagatccttacatggccgttgggatcccatctatgctctactggaaggtactcccggcaggaaatgcatatccaagttctatagc

SEQ ID NO: 7273 - DNA, 508 bp, Glycine max
  Clone ID: jC-gmfl02220084c10d1
gccttatcaatggctttaaactatctctcttacagtaacttcaggtttcccggatcgaaattgaaatggcttctcatgcctggttgcaaaatgaacatagatctgagccattacatatatcattctaagaataccaccagggatgaaacgcattattgctggaagtctaccaatggggtaacaaatacaaagccatatgccaacattgacaatactgaaacggagattttaacaggcctgtgatcactggacggcatggtaacatgactctgacctaccaggcgggctacagtgaggcacttaaggcacaggactcacaaacgagacttttcaggctattaatacacttcatatgacatttcctccacatgtgtgcaatcttcaattcaacttaactacctgaataagccttactttcactgtacggagaaagggcactggcatcatggctagtgcaactgctgtcctcattgaatctcataacggaaaatggtatggttgaatcaaa

SEQ ID NO: 7274 - DNA, 341 bp, Glycine max
  Clone ID: jC-gmfl02220084c11a1
agcttacccatctgaaacaaatatatgatgctcctgaaagagcagagagcgtgatgggtagtttgggactttttggccgtaaagttgatactttagatcactatgaaaggagtttgggtgatatagaagataatgagagaatggaacagtcctcactagaagcgaaggaacttcaagctgccttcgtctcatttaagacacgattaggtgctgcaatagctttacacattcatgaaagagtcaatcccacggaatggattactgagaaagctcctgagcctcatgaagtttataggcctttctttaccgtttcatttattaaaagatggatcagcaagctg

SEQ ID NO: 7275 - DNA, 533 bp, Glycine max
  Clone ID: jC-gmfl02220084c11d1
cacaatgaatgctagtgctcacaaacaaggccttgcaatgacttatactaatgttacaagtttccacactcgttacaaacacattatcaattctaacaatttacaagaaaacaacagacatgcttcatcaaggacaaccaaatcagtgcggtcaaagtgaaaatacattgccttatatacagttgcagccaaggccatacaaatgtagctatgaactattcagaactatgaagaagtggagatctgtgactatcagacctttcagaatatttcactcgcatcagagctggatcattgtatgcattggccaacttgtcataaaattcagacatattatgctcgttttggtctgctctgtccttcttaatcaaacactcagcagaataattcttgaatatagggaagaaccgtttctggcaatactcattgaatagaagtgtgagaattggaagaggaagaatcaatatggatgctagaggaagcttctttaaaccaaaaagaccaatggctattatatgcatcagtatcaatga

SEQ ID NO: 7276 - DNA, 436 bp, Glycine max
  Clone ID: jC-gmfl02220084c12a1
cctaacccaagacgagagaatagaggaagcttggggtttgaatcgaatcgaatcgaagcgattcatcgatcgatcgatggctcttgtaggagttgaactgaagcatgcggcggagggcgtaccggatgcgaattgctccgccaagcccaccaagcagggcgagggcctccgccactactattctctcaacatccacgagcatcagctccttcttcgccaaaagactcataacctcaaccgtctcgaggctcagagaaacgacctcaattctagggagaggatgctgcgcgaagaattacagcttctgcaggaacccggctcttatgtcagagaagttgtcaaagtaatgggcaagaacaaagtccttgtcaaggtccacccagaaggaaaatatgttgcagacattgacaaaaatatagacattacaaagattact

SEQ ID NO: 7277 - DNA, 477 bp, Glycine max
  Clone ID: jC-gmfl02220084c12d1
ggtcttgaatataaatcttttaaaaatactctataaatgtagtgtgccgtcctaagacacagacaaggaagaactcgaggaaagaatcatgattgggtaaagttaagcaaaacgaaagccaatgccactgtaaattgaaataaccctaatgtgtgttctctgcccatcttcgcaggacaatgtgcaccacaaacatgaaatgagaatcacttccacaacttccgcaatgacatgtttttttcagtctcctttttcatcaccttcgccacggccatctcaaaatcctcctgagtcacgtgtaccctccgctccctcaaagcaaacattccagcttcagtgcaaacagccttaagttcagcaccagatgctccattcatcttctcggcaatcttcttcaaatcaatgccacgcattaaattcattcttctagaatggattttcaaaatatccagccgagactctttattagggtttgga

SEQ ID NO: 7278 - DNA, 217 bp, Glycine max
  Clone ID: jC-gmfl02220084d01a1
gaagatgaagaaatggaaagtgagagtgaagatgggttcagtgtgctgaatggtgggaagggtgtaatattcagtgaagaagtgagggtgaaggatggagtttgtagggtgagttttggtgaccaggaagaggttagtagtggtaaagaaatgtatcttgcaaagggacttggtgtagagtgctgtggtgatggcataggtggttgtagaggtggtg

SEQ ID NO: 7279 - DNA, 466 bp, Glycine max
  unsure (1)..(466): unsure at all n locations
  Clone ID: jC-gmfl02220084d01d1
aggccagccctttttttttttttttagagtttgagaattcagttatttataaacattggcttcaacataagaacttcattacatcacaagacactcgcttgtatttgtacgtataaaaacttcatcaccaattcaagcacctgcagtagccacagctccttgatgagaatgaggcgagaaactttgaggttcattgataccatcctcgtcttcctctgagtcccaaaggaaactagcatatgctgcttgtacatggctgtcttcaggagaggctaggactgctctttcaaaatagctggaggcacgttctaggttgagatgtagttcccaaactaacttcccatactgagatagaacctctccatcattagggtctgcaagtatggcacgggaataatactcctctgctccttcacggncttgtttgcactgatacaaaaaataggcataattcctcagaaacaaa

SEQ ID NO: 7280 - DNA, 282 bp, Glycine max
  Clone ID: jC-gmfl02220084d02a1
gaagatgaagaaatggaaagtgagagtgaagatgggttcagtgtgctgaatggtgggaagggtgtaatattcagtgaagaagtgagggtgaaggatggagtttgtagggtgagttttggtgaccaggaagaggttagtagtggtaaagaaatgtatcttgcaaagggacttggtgtagagtgctgtggtgatggcataggtggttgtagaggtggtggtggcaggtggtggtgatcataatcccttgggttctggcggaactgatgcagataggcatatact

SEQ ID NO: 7281 - DNA, 470 bp, Glycine max
  Clone ID: jC-gmfl02220084d02d1
gatgctcatctatgtcggaggccagcccttttttttttttttagagtttgtgaattcagttatttataaacattggcttcaacataagaacttcattacatcacaagacactcgcttgtatttgtacgtataaaaacttcatcaccaattcaagcacctgcagtagccacagctccttgatgagaatgaggcgagaaactttgaggttcattgataccatcctcgtcttcctctgagtcccaaaggaaactagcatatgctgcttgtacatggctgtcttcaggagaggctaggactgctctttcaaaatagctggaggcacgttcttggttgtgatgtagttcccaaactaacttcccatactgagatagaacctctccatcatttgggtctgcaagtatggcacgggaataatactcctctgctccttcacgggcttggttgcactgatacaaaaaattggcataatt

SEQ ID NO: 7282 - DNA, 488 bp, Glycine max
  Clone ID: jC-gmfl02220084d03a1
ctcacagaaagcttcctagaactgcttccgaatcatcagttaccaaccccatgaagaagcgtggaggatggaaggccataatctttattttagggaatgaaaccttcgagaggttggcagtgtttgggttatttgccaacttcatggtgtatttgacaagagaatttcacttggaccaagtttatgcttctaacattatcagtttatggtttgggatctcaaactttacccctcttcttggtgcctttatttctgatgcctatgttggtcgcttccgaaccatagcttttgcatcctttggtaccctttcgggtttgatcgtggtgagtttaacatcgtggttaccagaattgcaccctccatcttgtactcctcagcaactagcatctcgtcaatgcgtaagagcaagcagttctcaaataggtgtgcttcttatgggactctgcttcttaaccatcggatctgctggggtaaggccatgcagcata

SEQ ID NO: 7283 - DNA, 293 bp, Glycine max
  Clone ID: jC-gmfl02220084d03d1
aacgggacttaattcgcttttatggaaaaaaaaagggcatactggttatctataaagtttcaggccctatatagacccacaatcttgatacaaattttattaaagtcaggtaccgagagatccagagcgctacctgcagaggctcgtcaaggaggtccacatttccctagctccgacttaatcagggccatattttgccaaaactacgttgggggaagttaacccagctattaggcattaaaaggtgcttatccttcccgctttattaacaccaggctaaccactggcggatg

SEQ ID NO: 7284 - DNA, 533 bp, Glycine max
  Clone ID: jC-gmfl02220084d04a1
tattagtcctctacgatcacctggtagacctgaagttgttgatgaggaagctcaggcctctcaagaactgaaggaagcagagactttaaaccatgtatctcttgaagctgtgcagcccgctgaatcaatccttcagccatgcacctcccatcttggccagccttctcggtcatttattgaaggtgaaaaatgtcatgtaactgatgtttcaaatcctgctttaagttaccaagggactatagagccatctgtatttaaagaaacgcctgattcggggaaaacagatatgcaacttgagagtcagatatttagtgacaaagtagaaagtataaacaaatctgctgctgctgacatgccagagcctgaaaagttgctctcagcttaccagcatgatggtgaagcaaatcatttgctgatggcatctactcctgacaatcagggtgcaactgaaggccatacaggtgcggcaggagtaaaatgcatctctggtaaaaaacgtagctacacagaaagtactctacagtgcagagtat

SEQ ID NO: 7285 - DNA, 370 bp, Glycine max
  Clone ID: jC-gmfl02220084d04d1
atcagtgatcaaactgacctcggtatactaatcctgcacacggagcagatatccaattacatgcccatgagcgaccggcgccatgaagacccacgcctatgagaaagcctaacgcaatcgttactaggagggatgccattgaccgggatacaaattaacctctgcaaattctggaacgggaccttttacaaaaatatgcacatttggacccggaataacccctaggatgaattttatcccgggggcattctaaaacctcaaattgagcagaccaaccctatttccagaaaattcgaaatgaaaaggcctatctggctaaaattggggagaacggatggaaacattatgcgctgcctggagatcccaacca

SEQ ID NO: 7286 - DNA, 80 bp, Glycine max
  Clone ID: jC-gmfl02220084d05a1
ctcagataggccccaatagaggtgagcagcaggaatcaacactggagcaccttgtcccttccggtttccatgcttagagc

SEQ ID NO: 7287 - DNA, 458 bp, Glycine max
  Clone ID: jC-gmfl02220084d05d1
attgccattcattttcttttaaaaatgaaaataatgcacactgaaatactatcttactactagcgtgtaaaccaccgacggaaaggagaaccaaacgattgctgtgacttactcatacgaagtggggcaaaagatcattgacaaggacaaccttaataggggatgaacattgtgagtgactccgcgtcagcaatgcgggtaactacgcgtgtaaatgggcccgatctacattcccctgtaaagggtacttctacctgacgtcgggacatactagatcacatctggtgaccacaaaatgctggagacgatgaccaaagcattgcatatgtcgcattgtaaaatatgagctgtcaagattcctaaaaccacgaatccgactagctattacgggatagggttgcgaacagcttcagggttaccagtgggaccgcgcagctcaggcccgttcagagccagtg

SEQ ID NO: 7288 - DNA, 435 bp, Glycine max
  Clone ID: jC-gmfl02220084d06a1
cgcagagaggacccaatagaggagagtaggaagaataaacactggagaaccttctcccttccggttcggatgcttagagcaatccatctctcaccgatactgcatctgacgggaccacgacccgatcgcacgccaagctatgatcgtcagcctgacacgtcctgcgagtcggcactgatcttcctggcagaacctctccggacgtctctgactgtaccatgaggttcgcgcagggcgaccatcaccgccaccacgaccagtaccaccactaggcgtaggtgtccgggtccgtcgacacctttcgggcgcagatcgccgcggatcgcgtcgagcgattctgcgtcaagcacgagccggctgaactgaatcttatgccgttgcgccgtcatgagtctagtgaagtggatgagcatgtgcacttggctctcgcacatc

SEQ ID NO: 7289 - DNA, 312 bp, Glycine max
  Clone ID: jC-gmfl02220084d06d1
aaaagccaatcattttcttttaagaataacaataatgcacactgagatactatctcactactagcgggtaagccaccgacggaaaggagacccacacgattgctctctcttactcatacggggtggggcaaaacatcatcgacaaggagaacctaaagaggcgatgaacgctctgagtgactccgccgtaacaatgcgggtaagtacgcgtgtaaatagtcccgatctacattggcctgttaagcgtacttctacctgtcatagggacatactaggtcacttccggtgaccacaaaatgatggggacgatga

SEQ ID NO: 7290 - DNA, 337 bp, Glycine max
  Clone ID: jC-gmfl02220084d07a1
cgcagcgaggccccaatagaggagagaaagatgaataaacactcgagaaacttctcacttcaggttaggatgcttagagcaatcctctctctccgacacttcatctcacgcgatctcgttccgatcgcacgccacacaaagatcgtcaactcccacgtcctctgctgcggctccgatcttcctcgcaggacctctccggacctatccgacggtaccatagatctccgagcaaagcgaccttcaccgccaccaccaccactaccaccaccaggcgcagctgaccgggtccatcaacacctctcggccgcagatcaccgcggatcacgtcgagccattc

SEQ ID NO: 7291 - DNA, 357 bp, Glycine max
  Clone ID: jC-gmfl02220084d07d1
aaaagccaatcattttcttttataaataagaataatgcacactgatttactatcttactactaccgggtaatccaccgacggagatgagaccgtcacgattgctctctcttactcatacgtggtgagggaatacatcatcaacaaggagaacctaagtaggccatgaacattctgagtgactacgcctcaacaatgtgggtaactacgcgtgtaaatggtctttatctacattcccgtctaatagctacttctacctgtcatagggacattctagatcatttccagtgacctcaaaatgctgtggacgttgaccagagcaatgcagattccacattttaaaatatgatctgtcaaga

SEQ ID NO: 7292 - DNA, 73 bp, Glycine max
  Clone ID: jC-gmfl02220084d08a1
ctctcagcggccgcactggaggtgagtaggacgactaaacactggagaaccttgtacctgccggtgccgatgc

SEQ ID NO: 7293 - DNA, 356 bp, Glycine max
  Clone ID: jC-gmfl02220084d08d1
aatagcaaatcattttcttttatgaataacaataatgcacactgaaaaactatgtcactacatgcgaataaaccaccgacggaaatgagacctacacaattgctctcacttacgcacacgtgctgaggtaaaacatcatagacaaggacaaactaaacaggcgatgaacgctgtgagttaattggcgtcaacaatgcagctaactacgcgtggaaatactcttgatctacattcccctgtacagggtacttatacctgtcatagagacataccaggtcacttctagcgaccacgaaatgattgagacaatcaccaaacccgtgcagacgacgcattgtaaaatatgagctgtcaag

SEQ ID NO: 7294 - DNA, 333 bp, Glycine max
  Clone ID: jC-gmfl02220084d09a1
ctcgagccgactcaggctaaggtatcttgctcctaatagttctggaaaaggactgtccaactgtgtagctgagtcctagaaactgtggcttctacagcggctgaatctgactatttatatgcttcttgaattatggatcttaccttgcgtggagagatgtcctggacatgctcaagtccacttcagagtggtccggcgtggagccagaagattcatgacctcgggatgtgcccagaactggtgaggcaagacgattctaacatggctgttggggtcccatctttgcactactgggaggaactaccgggaggagaggcagattcaacttgtata

SEQ ID NO: 7295 - DNA, 481 bp, Glycine max
  Clone ID: jC-gmfl02220084d09d1
ctgccttatcaatggctttcactctctttcttacagtagctccaggtttcctggatcgaagttgaaatcgcttctcatgcctggaagcaaaatgcacataaatatgatcaaatacatatatcattctaataatatttccagggataaaatgcattattgctggaagtcaaccaatgtggtaacaaatacagattcaaatgtcaacactgacaatactgaaacggagattttaacaggcatgtgatcactggacggcatggtaacatgactcggacaaaacaggcgggctaaagtgaggcacttagcacacagaactcacaattgagactttttctgttctctgtctacacttgatatgacatttcctccacatgtgtgcaatcttcaattcaacttaactacctgaataagccttcctttcactgcagggagaaagggcactggcatcatggctagtgcaactgctttcctcactgaatct

SEQ ID NO: 7296 - DNA, 184 bp, Glycine max
  Clone ID: jC-gmfl02220084d10a1
gttatttcataatgagctaataggttcatttgactattagagtgtcaatgaataaaagaagccatggagattcataactcagctcgaagcagcattggtccacctgtgagcattggcgttctgcttgctgtaccttcctgagttgccaaagatagaccatcagtacatgtgtaaccatagtact

SEQ ID NO: 7297 - DNA, 424 bp, Glycine max
  Clone ID: jC-gmfl02220084d10d1
aagccataattagaaacatttcatttcaccgaagttttcaagtacttgattacaatcagcaaatgaatggtcaagaatgaaacagatcaaacaattctgctcggaattcttctagtacgaatacatacagtatatatacagagtacatatatccttcacatcataagtctctctagagtacagccttgtttgaggttcccctttatgagacagcttatgatacaaaagcgtgaacagaagtactatggttacacagattctgctggtctatccttggctacagacgaaggttcagcatgcagatcgccaatgctcacaggtggaccaatgctgcatcgagctgtgttatgtatctacatggcatatgacattttctgaaactgagatcttcaaatgaaccattagctgatcatgaaattacctt

SEQ ID NO: 7298 - DNA, 467 bp, Glycine max
  Clone ID: jC-gmfl02220084d11a1
aaacactagtaaagggaaggaaccgtaccttcctcaataaaactttctctccgatttggcttctcagtttcggttgtcatcgtcggggagaaacaaaaaaaaaacccacaaaaagattataacccaaaaaaccaaaaataaaataaaatatgaaagagaaagtactaggatccactgtttctcttatcctagtggagggtgtcgtaattggcgtggttgctgtagttcaaagtccaaagggcgtcaacaacagcaatggaagagaagtgaaaagcaccaacagggcagtgacagcgttgcgccaaagctcagacgacaagaaactgtgccacgaagttctgtcctcttcaaacagcacagacccaaaggaatacatcgcaaccgaggagagaagctcgatggacatgagcatcaaagcattgaatatgagcgacaggctgacggtggaacacggcaacagcagcgcc

SEQ ID NO: 7299 - DNA, 292 bp, Glycine max
  Clone ID: jC-gmfl02220084d11d1
ggcaaagtacgtagtttctattaaataacaaaaagaatttttctattgcttcttctcacatcatcagtctattttacatgcacactgatcaagtggttgatacaaaaagagaccaatcataaaatgaaaagctattcaacgattacaaatcacatcctcaaaccagttgcagggatcgattagctatgtcactgcattgaaattaggtagcagtttaattcccggctcttgagtccatattaacgtaggctaaaaggagattttaccgctcaacatgcccatgcaaattaac

SEQ ID NO: 7300 - DNA, 413 bp, Glycine max
  Clone ID: jC-gmfl02220084d12a1
ctctagctaccttgagacaatggtgagggttagtagtagttgaatgatgctcttaagagcatgtacaatgctgagaaacgggggaagcgccaggtcatgattaggccatcctcaaaagtgattataaaattcctttaggagatgcaaaagcatgggtacataggagagttcgagtacgttgatgatcacagagctggaaaaattgttgttgaattgaatggtagactgaacaaatgtggggttattagtccgcgttttgatgttggtgtcaaagagatagaaggttggactgctaggctgctcccctcaagacagttagggtatattgggttgactacctcagctggcatcatggatcatgaagaagctaggagaaagaatggaggagggaaagtgctgggtttcttttacta

SEQ ID NO: 7301 - DNA, 480 bp, Glycine max
  Clone ID: jC-gmfl02220084d12d1
gaagaaatccgttgaaattatggcgaccaatttggtttagcaaacaaaacaaagcacaccagaaaaacatctcctgctaatgctatacttgataaactacgggtctaacacattgatcattacaaccggtgagtttcaagaactgaaatcagagcaaaatcttcaaaggaaactaattaaactagtaaaagaaacccagcactttcccaccaacattctttctcctagcttcttcatgatccatgatgccagctgaggtagtcaacacaatatacccaaactgtcttgaggggagcagcctagcagtccaaccttcaatctctttgacaccaacatcaaaacgcggactaataaccccacatttgttcagtctaccattcaattcaacaacaatttttccagctctgtgatcatcaacgtactcaaactcttcaatgtacccatgcttttgcatcaccaaaaggaaatttatatcacttt

SEQ ID NO: 7302 - DNA, 513 bp, Glycine max
  Clone ID: jC-gmfl02220084e01a1
aacatgccaaacgacagcgttctgagtcttttcttcttcgttaccctcttcacatgccttctctctgctaattcccacgatgaccatattttcctaccgagtcaactccatgacgatgactcagtgagttgcactgctaccgacccaaaccttaactacaagccggtgatcggaatcctgacccaccccggcgacggtgcctctggccggctcagcaacgccaccggggtttcttacatcgccgcctcctacgttaaattcgtggagtccggtggtgctagagttattccccttatctacaatgagtcacctgagaaccttaacaagaagctcgatttggtcaatggagtgctcttcactggtgggtgggctgtttctggtccatatttggatactcttggaaacatttttaagaaagctttagagaaaaatgatgctggagaccatttcccagtaattgccttcaacttaggtggaaacctcgtaatagggatcgaagcgagcaaactgata

SEQ ID NO: 7303 - DNA, 451 bp, Glycine max
  Clone ID: jC-gmfl02220084e01d1
aggggcaataacaagatataacacattgatatgcagagcattgccctgaaattaagcatcttacaaacatcactgtgcacaaatttttatttcttcaaactacatccccagttcataatttattgtgcataaaatcaaattcaaggacacctcctacagatagaattattcaaagagatacacttgatcatatcctttcccagccgttccaccaaaagtaggtttgtaattgtagatgagattatctcgcactttttgagcatcaagagagttagaggatttcctagcttcacttatgaaaaagttagctgaggactgagtaacccgaattgcatcctctgagagaagggctttcaaagatgtagcccattcaaaagcatttttctctggttgccataagttgacagtcacgggatatttcctaccacgagctgaggaaacgaaagtcttt

SEQ ID NO: 7304 - DNA, 194 bp, Glycine max
  Clone ID: jC-gmfl02220084e02a1
gaggaaaacagcaacagaaaagaatcaacaacttgtgcagttgctaacacactgtttttgccatacattaatgctttatatcatactaggacacaaatttgcttcccctctttgtaatgcatagcttttctacttgggctaataacatttgtacatgttattttgtgtaatgaatttccagatggcttattgat

SEQ ID NO: 7305 - DNA, 194 bp, Glycine max
  Clone ID: jC-gmfl02220084e02d1
atcaataagccatctggaaattcattacacataataacatgtacaaatgttattagcccaagtagaaaagctatgcattacaaagaggggaagcaaatttgagtcctagtatgatataaagcattaatgtatggcaaaaacagtgtgttagcaactgcacaagttgttgattcttttctgttgctgttttcctc

SEQ ID NO: 7306 - DNA, 459 bp, Glycine max
  Clone ID: jC-gmfl02220084e03a1
cccctctctcctcctcggaacgccattcgcatgcagttctcgcacaacacactgcacaattatatttcaaagcgcaacccatttcaacatttcatcatttttctcgtgtaaccatcccctcacccacgaacccatcccatgaatttcccaaaatgccctcaacccagaaccccctcttctccttactcctacattccaccccaccgtacccaactgcaccctcgcatgatctccctctactcttcttcttcttcttccctaaaatatccaaatcccaacaacaaaccccacaacgccaaatgcctcttgttcttcttcgccctcctcttcttcaccgaccccttcctcttctacctcttctccaccgacctacaactctactcctaccccaaattcgccgactcccgcccctactgctttgccctcgccctacgcgccggcccccacgccctacgtctc

SEQ ID NO: 7307 - DNA, 370 bp, Glycine max
  Clone ID: jC-gmfl02220084e03d1
aaaacattaaacccaatttcaatttggcgaatttattaaaaaaaaccaattaacttttaggacaccgggggacttaaatacccgggaaaatttaatccactaccaaatttcccatacccatttaattcctcccccctatagattccaaatatcaaggaaacagccaaatattagggggcaatctttacaaactccaaaaaagggccctttcactggaatttgccacgaaaaattcaatggcgccctggggcttaaaccttcttttgaaatgttctggaagaacctgaaaagcccattaacaggcctgttctgcaaaaatggggaaaattggatctaacaaattcttggaaaagggatcaaagccccttgg

SEQ ID NO: 7308 - DNA, 385 bp, Glycine max
  Clone ID: jC-gmfl02220084e04a1
cattcatgcaaccactgcttccaatgcagcagaaagtagctctggaacatattgtccctgcgagtatcctagccctccgccagactatacatcctgttcggcagactagtacagcgttgctcggatggaagacagtgacagacacactccgcgcacagactctgtgtacccacagtattaattggctaaagagaggactatatctggagatgcatactatggctctcacatgatgcactatggcgatgccaggcttagcagcgatgctctcttccattatccgggtacagatactgctaacgataatttcactcctgtggatgaatactgcttatggtcaccttgcaagccagtcagccaacgtgatgctgatctcatccatttc

SEQ ID NO: 7309 - DNA, 331 bp, Glycine max
  Clone ID: jC-gmfl02220084e04d1
tagccggcggccgccctttttttttttttttttttttgccattctttttctactaaaaataatacgagttgacattgatattcaaccttactactggcatgaaaactaccgtcggaattgtgatccaaacgagaccagggaataaccgatccgccagggggccaatgaataaaaacacggataatattactatgggatgaactccatgccttgctatgcgtgaatattccaaataaataggccccttaatgccccctaaatccttatgccggaaatggctccatctactggacatagggacagcctagttcaaaattggtgactacaaagg

SEQ ID NO: 7310 - DNA, 81 bp, Glycine max
  Clone ID: jC-gmfl02220084e05a1
ctcacatagtatccaataaaggtgacaaggatgaataaacactgtggaaccttgttacttcgggttcatatgcttagtgca

SEQ ID NO: 7311 - DNA, 287 bp, Glycine max
  Clone ID: jC-gmfl02220084e05d1
gccattaattttcttttaaaaataaaaataatgcacactgaaatactatcttactacaaacttataaaccaccgacggaaaggagaacaaaacgattgctgttacttactcacacggagtgaggcaaatcatcatcgacaaggacaaactaaataggcgatgaacattctgagtgactaggcgtcagcaatgcgggtaactacgtgtgcaaatagtcccgaactacattcccctgttaaaggtacttctacctgacgtggggacattccaggtcacacccggtgacc

SEQ ID NO: 7312 - DNA, 73 bp, Glycine max
  Clone ID: jC-gmfl02220084e06a1
ctcacagaggccgcaatagaggagagtaggatgaataaacactggagaaccgtctacctacgggtgcgcatgc

SEQ ID NO: 7313 - DNA, 120 bp, Glycine max
  Clone ID: jC-gmfl02220084e06d1
aatagcaaatcaatttcttttaagaataaaaataatgcacactgaacaactatctcactacatgcgagtaaaccaccgacggaaaggagacccacactattgctgtcacttacccacacg

SEQ ID NO: 7314 - DNA, 456 bp, Glycine max
  unsure (1)..(456): unsure at all n locations
  Clone ID: jC-gmfl02220084e07a1
ctatcaatggaggcgattaggaagagtaggattcttatattcggaggaactggttacatagggaagtatatggtgaaggcaagcgtctcgttaggccatccaacttgtgtgtacactcgccctcttgatgcacaaactccttcctctaaggcacagctntgcaaggagtgcaactctatgggggtcacactcgtccatggagaacttgagcgtgaccagattctggcagtgagtaaacaagtagacattgagatatgctatcttccataccctcaagtgacggagcaactcaaaaccatagatgctatgaaagctgctggtaatataaagagattccttgcatcagatgtcggggaggaagataatcgagtgaaccctcttcctccgttccaagctgtactcgatgagaaaagacaaatgagaagggcaattgaagcagctgggatcccttatacc

SEQ ID NO: 7315 - DNA, 354 bp, Glycine max
  Clone ID: jC-gmfl02220084e07d1
attaagaataaaatcatatttaagtctattaatcatgcataccaaacatttatgccttttcatgttattcaacggccatcgggaggatcacctactttattacaatttattaccaacacgtgcaggggaaaatgtcttcactcaaaagcagcataggcaggggctggaggatcaacatgaaatagttgcaagaagttcatcaatggacgtgtagttataatcaggatatacctgcgaagcttcaaggtcatcttccctaacttggaacctcacaaggccccttttagcaattccacattgatggttcaaaccgcaatattgtgcggagggggcaaggtctgtgataagctgtca

SEQ ID NO: 7316 - DNA, 72 bp, Glycine max
  Clone ID: jC-gmfl02220084e08a1
ctctcagcggccgcacttgaggtgagtaggctgactctacactgcggaaccgtgtacctgcggatgccgatg

SEQ ID NO: 7317 - DNA, 400 bp, Glycine max
  Clone ID: jC-gmfl02220084e08d1
aatagcaaataatttatttttaagaataataataatgcacactgaaaaactatgtcactacatgcgcataaaccaccgacggaaaggagacctacactatttctgtcacttacgcacacgtgctgaggaaaatggccatagacaaggacaacctaaacaggggatgaacgctgagactgaatcagcgtcagcaatgcagctaagtacgcgtgcaaatactccagatctacattcgcctctacaaggtacttatacctgacctagagccataccaggtcacttctagcaaccacgatatgatggagacaatcaccaaaacagtgcagatgtcgcatggtaacatatgggctgtcaagagtccaaacaccaagggcgcgacagctaaaagggctaccactgc

SEQ ID NO: 7318 - DNA, 76 bp, Glycine max
  Clone ID: jC-gmfl02220084e09a1
ctcacatcggcccgactaggggtcagcaggaccactcaacactggagaaccgtgtacaagccgatggccatgcaga

SEQ ID NO: 7319 - DNA, 256 bp, Glycine max
  Clone ID: jC-gmfl02220084e09d1
attggtaattaattttcttttaggattaacaatgatgcatactgaaatttaatgttactacgtgcgcataaacaaccgtcggacatgagacctagacgattgctgttacttacgcacacgtactgacgacaatggacatagacaaggataaattaaataggctatggacgctgagagttaattggcgtcagaaatgcagctaattacgcgtgcaaatactctagatctacattcgcctgtacagggtacttatacc

SEQ ID NO: 7320 - DNA, 430 bp, Glycine max
  Clone ID: jC-gmfl02220084e10a1
cttaatagatggagctctagtatcccctttttcttctgcaagaactacaccaactaaaacctccttcttctttttttttttttggaggctggcatgtgttcttcttttacttcttcttcttcttccaatccttaaggaaaaaaactaaagaaaaaaaagagagccatgtcaggctcgtataatcccaacttatgtcctgctagagcaacttctcctcagattaggagcaatccagaagtggacagtcagtacctatcagagtagctagcagaacatcagaagcttggacccttcatgcaagagcttcccatatagcagccgactcctaaatcaagaaatattaagggtttctagaatgcagtccaatcaaagttcaggagacttcgatagactgcgacatagaagccctagtcctatggcttcttcaaac

SEQ ID NO: 7321 - DNA, 482 bp, Glycine max
  Clone ID: jC-gmfl02220084e10d1
ggcaaaaatcaaataatttgcataaaatttatatgtaccattctatataaacaaataccacatttgttctttaatggtacatggtaagaagtttatctggcatgcatcattccaactacagtgcatagtcctccgaagagaatacaaatgcctgtgacaaacaactaaaaagaatccagcctatgctaacttataataaatattaaaataccatgagactttgacaatgtcacatgccaataaacactgcattgacataggacctaaaactttattaccaccaaccatcatatgtatatattccacacttctcaaaaagtaactgacgcatgaataaatccaatgaatgtattaagtttgcaagggagaaaaaaaaagggttggtttgaacaaacctattctcaataccccaactatataattgctctcttttaaaaattcttcattccagctttgcctcctgtctgttcaaaaagaaaaag

SEQ ID NO: 7322 - DNA, 488 bp, Glycine max
  unsure (1)..(488): unsure at all n locations
  Clone ID: jC-gmfl02220084e11a1
tctcagtctctgagtttagcgagctgatgattccgaacgagtgaccttcttcgtttctcgcaaagtttaagtaatcatgggtaaggaaaaggttcacatcaacattgtcgtcattggacatgtcgactctgggaagtcaactaccactggtcactagatctacaagcttggaggtattgacaagcgtgtgattgagaggttcgagaaggaagctgccgagatgaacaagaagtcattcaagtatgcctgggtgctcgacaagctcaaagctgagcgtgaaagaggaattaccattgatattgctttgaggaagttagaaaccaccaagtactactgcacggtcattgatgctcctggacatcgagactttatcaagaacatgattactggtacctnccaggccgactgagctagccttattatagactccaccactggaggntnagaagctggtatttctaaagatggacagacccgagagcatgctc

SEQ ID NO: 7323 - DNA, 563 bp, Glycine max
  Clone ID: jC-gmfl02220084e11d1
aaacagttaacaaaacttccttataaattaaatgcaaatttaagacatccctcctcagcagcaaaggaaatggactaaaaccctatggctgcttgtgaatttgaaaatctcagacttttaccatcaaaacaaaaaacagtactcatcaaaaacaaacagcaacgaaaatgttaccgccgatcaagaacccagttttgaaggctacggctacatgaaatcggcggacacttcaaaatataactggtaaaacaaacacctaagactctgcaaagataaactactgtaaaggaacaagtttttttgaaaccacgttgatgatcacatgtgctagcaaaattgccaaaatgcaatcacttcttcttggcggcagcctttgtgaccttggctccggtggggtctttcttctcaacactcttgatgactccaacagctacggtctgacgcatgtccctcacagcaaaacgaccaaggggaggatactcagagaaagtttcaaccaccatgggcttggctggaaccatcttaaccataccagcatcaccattcttcaaaaattgggctct

SEQ ID NO: 7324 - DNA, 312 bp, Glycine max
  Clone ID: jC-gmfl02220084e12a1
ctctagctaccttgagacaatggtgagggttagtgtgttgaatgatgctcttaagagcatgtacaatgctgagaaacgggggaagcgccaggtcatgattaggccatcctcaaaagtgatgataaaattccttttggtgatgcaaatgcatgggtacattggagagttagagtacgtggatgatcacagagctggaaaaattgttgttgaattgaatggttgactgaacaaatgtgggggtattagtgcgagttttgatggcggtgtcatagagatagaaggtgggactgctaggctgctgccctgaagaca

SEQ ID NO: 7325 - DNA, 478 bp, Glycine max
  Clone ID: jC-gmfl02220084e12d1
gaagaaatccgttgaaattatggcgaccaatttggtttagcaaacaaaacaaagcacaccagaaaaacatgtcctgctaatgctatacttgataaactacgggtctaacacattgatcattacaaccggtgagtttcaagaactgaaatcagagcaaaatcttcaaaggaaactaattaaactagtaaaagaaacccagcactttcccaccaacattctttctcctagcttcttcatgatccatgatgccagctgaggtagtcaacacaatatacccaaactgtcttgaggggagcagcctatcagtccaaccttcaatctctttgacaccaacatcaaaacgcggactaataaccccacatttgttcagtctaccattcaattcaacaacaatttttccagctctgtgatcatcaacgtactgaaactctccaatgtacccatgcttttgcatcaccaaaaggaattttataatcac

SEQ ID NO: 7326 - DNA, 559 bp, Glycine max
  Clone ID: jC-gmfl02220084f01a1
ctcgtcactccttgctcttagccctcctcctcttcgccgccgtggccaccgccgcgatggcggtggccgcgtccgacgccgacgacatcctgatccgtcaggtggtgccagatgttggcgaagccgaagaggaggacaacctgctgaacgccgagcaccacttcgcgagcttcaaggccaagttcgccaagacctacgccaccaaggaggagcacgatcatcgcttcggcgtcttcaagtccaacctccgcagagccaggctgcacgccaagctcgacccctccgccgtccacggcgtcaccaaattctccgatctaactccggccgagttccgccgccagttcctcggcctcaagccgctccgcttcccggcgcacgcccagaaggcgcccatcctccccacaaggatctccccaggatttcgattggcgagacaaaggagccgtcactaacgtcaaggaccaacgtgcgtgtggttcgtgttggtctttcagtacgacgggagcgttggaaagagctcattatctggccactggtgagctcgtgagccttagcgagc

SEQ ID NO: 7327 - DNA, 426 bp, Glycine max
  Clone ID: jC-gmfl02220084f01d1
aaacgaatcaaaggtacagaagcaacttaaacattttggtatccttttgggtatggcactaccacatccataagaaccaacattgacagtggcacgtatattagtttaattatgcaataactgagacataatcagtggcaagtattcccctgttgcagtttgaaacaaccccaccccgccaatctccatagagagttgcttatcttgcaccatttttaggaccacacatttccttggatttcccacttgtatatgtcaagcatacatacagaaattacatactacataaacaacatggtcttagcagtttcctgatcctatacggagataattttaccagtaccaaatgataaagttcacaacataaatatttatacaaactccccttagtccagtatcacatcacaaccacaatcaggcatatct

SEQ ID NO: 7328 - DNA, 433 bp, Glycine max
  Clone ID: jC-gmfl02220084f02a1
cgcggcataacctaaacttacccttcttctctctgtgtgtgtgcgcatcaaacgcaaccagaagaaagaacagaaatcaagtaaatctaagaagaaatggtttgggaagcaaaaattggagacttcagtctcatactcagaagctcataaagcaccaccaccaccgcgacctattcctccaccagaagcgattaaattaactgatattgaaaatgaaatcagtcatgatcacgactatgttgttgaagttgcaactgccatggatgccgaggaacctgttcctgctgttcagatagaacctgttagggttgaagctgccccaattgctcattatgctggtaaaccaaaggatgaagtggcagctatcaaaattcaaacagcttttcgtggatacttggcaagaagagcattgcgggctttaagggggctggtc

SEQ ID NO: 7329 - DNA, 247 bp, Glycine max
  Clone ID: jC-gmfl02220084f02d1
aaataaactctttttgctttatttcttcagggatttattttcaatcctactttaagggttttccatccttttacttggatgatcaactgtccacacccttggccacaggtaactctgcatttaagctgctgctttctaccttagggggacccgaatggggccttggcctggcaggggaagctgggaaagaaagccggttcttcggactcccaaaggaacctttctctggttttccattttctggggc

SEQ ID NO: 7330 - DNA, 498 bp, Glycine max
  Clone ID: jC-gmfl02220084f03a1
ctttcgcaaaaacgcattgtgtttctctctttccgcggcgtagatctgagcagtttgggaaaccctaactgctctcaccactctctttgctttttttcctctccgatcaacgacctctttcgtcgccctaagtcatggcaggacttgcacccgagggatcacagtttgatgctcgtcaatatgataccaagatgaatgagttgcttacatctgatggacaggattttttcacatcttatgatgaggtttatgacagttttgatgctatgggcttgcaggagaatctcctgagaggcatttatgcatatggttttgagaagccatcagctattcagcagagaggaatagttcctttctgcaagggacttgatgttatacaacaggcccagtctggaactgggaagacagcaactttctgctctggaattctgcagcaacttgactatagtgcgactgaatgccaagccttggttttagcaccaactagggagcttgctc

SEQ ID NO: 7331 - DNA, 515 bp, Glycine max
  Clone ID: jC-gmfl02220084f03d1
gaaaaaaaaccttgcttgttagaaaggtgcaacaactaccaatacatcaattcagaaaataatgtgactccacattgcaagtactcatcacttgggacattcagacgactcatatgtaaattaaattactacacctattaagaaggtcaaacaaggtttaagagcagaaatacaacaaaaggggcaaaatggaacaagagacattacataacacttacctcagaaaccaactttcctctaatatgatggaacaaaaaaactcatcaaaggagttcagcaacatttgaaggcagctcctcaataatcacattgtaaaacttctggatgtcaaacagcattttttcatcatcccttgtgacaaagttaatggcaacacctttcctaccaaaccttccactacgaccaatacgatggagatagctctcgggctgtgttgggagatcataatttataactagagacacttgctggacatcaataccacgggccaaaagatcagtagttattaaaacacg

SEQ ID NO: 7332 - DNA, 308 bp, Glycine max
  Clone ID: jC-gmfl02220084f04a1
ctctccctacctctaccttcggtatgcagctctacttaacgatcctgaccgttatgactatcactcttgatgcggaaagctctgacaccatcgacatccttcaggtcaagatacatgacacggatcgaatgccaccggaccatcatcgtctcacatttgctgtaatgcaacttgatgactgccgtacccttgctgactacaacattcagaaggagcgtactcttcagctcatgctacgtctccgcggcggcatgcaggatatcgctaatacactcaccggcacgaccatgaccctccaagtcgaaagc

SEQ ID NO: 7333 - DNA, 407 bp, Glycine max
  Clone ID: jC-gmfl02220084f04d1
tgctcatcgccgcgccagataagcgacagcaggtacgaatttattcccggggctgccagctcggcggccgcccttttttttttttttttttattgtcattcattttcttttatgaatgataagaatgcacactgagatgctatctgactacgtacgcgtaagccaccgacggaaaggagaaccaatcgattgcaaaaactgacgcagccggagcgaggtaccacatcatagcgcagggacaaactggataggccattgccactgttcatgacatggcgtcatgaatgcgcctgattccgcgtgtaaattgtccctaactacggtgccctgctagaggtaggtataccagacctaaagacatcctagatcactgctggcaaccacaaaaggctgtggacaatgaccaa

SEQ ID NO: 7334 - DNA, 80 bp, Glycine max
  Clone ID: jC-gmfl02220084f05a1
ctaagagaggactcaatagaggagaggaagaggactcaacactggggaaccgtgtaccttccggttcacatgcttagagc

SEQ ID NO: 7335 - DNA, 357 bp, Glycine max
  Clone ID: jC-gmfl02220084f05d1
aaaaggaaataattttctattaagaattaaaataatgcacacagaacagctatctgactacttgctcataaaccaccgacggaaaggagacccaaactattgctgtctcttactcacacgtagtgaggcaatttatcaccgccacggagaacatttacaggggataaacactgcgacttactcagcgtcagggatgcggctaattacgcttggaaataggccctgtctacaatggcctgttatgggtacttatacctgtcgtcgagacagaccagatcacttctggtgaccagaacatgctttggacgatcaccctatcagtgcagataacgtatgtaaacacatgagctgtcaaga

SEQ ID NO: 7336 - DNA, 72 bp, Glycine max
  Clone ID: jC-gmfl02220084f06a1
ctcacagaggccgcaattgaggtgagtaggatgactatacactggggaaccgtctacctgcgggtgcgcatg

SEQ ID NO: 7337 - DNA, 401 bp, Glycine max
  Clone ID: jC-gmfl02220084f06d1
aatagcaattcattttcttttaagaatattaataatgcacactgaacaactatctcactacatgcgcgtaaaccaccgtcggaaaggagacctactctattgctgtctcttactcacacgtgctggggaaaatgatcacagtcaaggacaacctaaacaggggatgaacgctgagactgactcagcgtcagcaatgcgcctaagtacgcgtggaaatagtcccgatctacattcgcctcttcaaggtacttatacctgacatagagacataccaggtcacttctagcgaccacaatatgctggagacgatcacccatacagtgcagatgacgcatggtaaaacatgagctgtcaagagtctcaacaccactgggcgactaacaataagggctagccttgcg

SEQ ID NO: 7338 - DNA, 75 bp, Glycine max
  Clone ID: jC-gmfl02220084f07a1
ctcacataggactcaatagggatgagtaggctgactatacactggagaaccttgtacctacggatttgcatgcat

SEQ ID NO: 7339 - DNA, 453 bp, Glycine max
  Clone ID: jC-gmfl02220084f07d1
tcggcctgtcgtctcttttttttaagatataatacattgattaaactgaccacgttaaactcaaccacataacggataagatagccaaatgcatcaatatactcgatccgcataatggaaaggaggtctatgaccgtctcttactcatacgtagtacgtttagaagactttgacgatgatattttttgcactttaatatacatgctctggacagctcactaatttcacagctatgcgagcctgagagaagcccagttctccacgtaatagtggttgcaattcttcattgaagccatgcacaaccaaaagcctgctaaattctgctcaaagtgccatgtcagcctgcatagctgccaattcatcttcttccggagttcgctctgcgggaactgggcgagtaggttgctgcccagctgggacctgcactggggccgaaggagctgcagttgctgg

SEQ ID NO: 7340 - DNA, 259 bp, Glycine max
  Clone ID: jC-gmfl02220084f08d1
attagtaaataaattactattaagaataaaacttatgcacactgaaaaattatctgactacatgcacataaacaaccgtcgcaaaggagacccagactatttctgtcacttactcacacgtacgaaggcaaatggtcaatgacaaggatataattggaatgctataaacgctgcgacttaatcagcgccaacaatgcgcctatttacgcgtgcaaatactccagatctacatgctcctgttagagaatacttaaacctc

SEQ ID NO: 7341 - DNA, 282 bp, Glycine max
  Clone ID: jC-gmfl02220084f09d1
agaggaattaattttcttttaagaattatacttgtgcacactgaaaagtaatctaattacatgtacataagcaaccgtcgcacatgagacccctactatttctggcacttacgcatacgtacggacgaaaattgccagtggcacggataaaattaaaatgctacaatcgctgcgacttaatcagcgtcaagaatgcgcctatcgacgggtgcaaatactccagatctacaatcgccagttataggtacttatacctgacctctatacagaccagacaatttc

SEQ ID NO: 7342 - DNA, 483 bp, Glycine max
  Clone ID: jC-gmfl02220084f10a1
cgctaacacacagagtgtgtgtgtgtgatatggcatcgacgtcgtcttctagcgaggaagcaccgatcacttagttgtacatgtaggagtgtttaggttggattgtatggttaagtggttggttctatgtggtctacgatatgctctttcagcgcatcatggcgagtcatttgcacaaccccatgcctctccctcccgtcaacgacctcacctgcattgtcaccggctccaccagcggcattggcctcgaaatcgcaaggcaagttagcacagtctggggcccatgttgttatggctgtcaggtacacaaaagctggtcaagtgttgatccagtagtggcaagttgactctgaaagatagagtattcctctcaatgttgaagagatgcaagtagatcttctctcataggattctgtcacgaggttagctgaagcatggaatgcacgctcagcacccttacataggctcatcaataatgctggg

SEQ ID NO: 7343 - DNA, 408 bp, Glycine max
  Clone ID: jC-gmfl02220084f10d1
gcatgataacatacatggtaacattccaaaattgaaagcaacactattgatggaattcacttatttaggtgggtcacatatgacatgtatcaaaagtcaaaaacaactataacaaatagtgcttactaatttaattcttacttctatggtgacatttaaggtcaaagctggctaaattctcccattaggaggagcaggtggcatttgagtacataaatatgatcaaaatggatatacatatcatgtttaaaaaaatataaaagggttcttctcccacatattcagaatgaaaatgctcattactagctataaataatggaagtgcccttacagattaagggagatattgtatattagattactggtcttgtccataacgggatttaactttttccacatctaaaagcc

SEQ ID NO: 7344 - DNA, 366 bp, Glycine max
  Clone ID: jC-gmfl02220084f11a1
gtctcaacttctagctcttccaactcctacaacgcttttctgtgcactcatgggcatagtcaagttcggtttctacggatttggaagtattggccgtttggttgccagagtcgctctgctgtgagacgttgttgaactcgttgccgttaacgaccctttcattaccaccgattacatgacatacatgttgaaatacgactgagttcacagacactggaagcatcacgaagtcaccgttaaggtcgagaagtcccttctcttcggagacatggctgtcactgatgtaggacactgaaaccctgtagagatcccatgggggtcaactggagctgacatcattgctgagtccaccggagtcttcaccga

SEQ ID NO: 7345 - DNA, 326 bp, Glycine max
  Clone ID: jC-gmfl02220084f11d1
ataaaacacgaatctttgcttcaaagcaaaaaaggaaggggggttcaaacactctggacccatggcttaaaaatggagggaaaatggctgctatcagaatcaatccagcccgagtacatctgcaagtctttaagaacccacaaaactccatccgctacccacaataggcaacccaaaagagcttactgctcgtaccagggttacaacactggttccggaaaccgatgtattcatactctccaattactgcgcgagcatgaccctctgtcgcagctcgaccatcacataatgctcgaaccaccttaaatgaaaagacttcttggcca

SEQ ID NO: 7346 - DNA, 428 bp, Glycine max
  Clone ID: jC-gmfl02220084f12a1
aagaaattctaattaaaaagcaaagtccgatatctttctaactatatatatatatataggcgacaccaacctttctgcctctataccttaatatttcaaatacccagagggagtaacccctccaagcttcaattatctacattatccacattcctagctagctttatccacatctacaaaatagtccttagatttccctctctctttcttttgtataactgagtcatcttagatctcctttcacttccttcaaacaacaaaatcatgggtctgagagacattggtgcttcactgcctcctgagtttcggttttatccgagagatgaggaataggtctgccattacctctacaaaaagatcgcaaatgaggaagttctgaaaggtaccttggtcgaaatagacctccacatatgcgaaccttggcaact

SEQ ID NO: 7347 - DNA, 493 bp, Glycine max
  Clone ID: jC-gmfl02220084f12d1
atcaccaattctaattacatatggacaaactgtatacaaaggaatagttcccaataatagaagtaaataatggtaattacgaaaagcctaatggaccataacatgattaccctactacgtacttgaacattataccacacaaacttgtaagaactaatcccaatatctatcatgtgacttgcctcacataacgaaacaccataaatgcaccacaaataaacgaatcttgatggcataatttacgagatatgaaccacatatatgtgtatatatgtacacacataacacatctttaattatagcaataccatattattgttattattatcaacctcgaatcttattgcgtccaagtttgaagccacgccatcctctaggctattttcggttagatccatgtcccataagaaaccatatccgtcatcacctttggcaccaatttgagtaagaaaggtattgttggtgttggtttcgcgagagaagtggaggagat

SEQ ID NO: 7348 - DNA, 555 bp, Glycine max
  unsure (1)..(555): unsure at all n locations
  Clone ID: jC-gmfl02220084g01a1
gtgaagcaggcagagaagagccatggtgcacgtttccttctaccgaaactatgggaaaaccttcaagaagcctcgtcgtccgtacgagaaggagcgtttggacgccgagttgaagctggtcggtgagtacggacttcgctgcaagagggagttgtggagggttcagtacgctctcagccgcatccgtaacaacgccagaaatcttttgaccctcgacgagaagaacccgcgccgtatcttcgagggagaagcccttctccgaagaatgttccgttacggacttctcgatgagactcagaacaagcttgattacgtgttggctctcaccgtcgagaactttctcgaacgccgcctccaaaccctcgttttcaagtctggcatggccaagtccatccaccacgccagagtcctcatcaggcagaggcacatcagggttgggagacaggtggtgaacatcccatcattcatggntagggttgattcgcagaagcacattgacttctcacttgccagtccacttggtggtggtcgtccagacgtgtgaagagaaagaac

SEQ ID NO: 7349 - DNA, 432 bp, Glycine max
  Clone ID: jC-gmfl02220084g01d1
agaaagaacagttcaaaaccatgatatctcaagcacagctttacctcaaaacaagaaacaaggatggcaaaattataacaagtcagaccatttcaaaaatctaaaatgtctaccaacacagataatataaaaaaaataacaaccgcaaggcctaaatatcagtagccattaataatttaatcttcgtcctcctcatctccatctccaccagcagccttcttagcagcagccctttggttctttctcttcacacgtcctggacgaccaccaccaagaggactggtcagtgagaagtcaatgtgcttctgcgaatcaaccctaaccatgaatgatgggatgttcaccacctgtctcccaaccctgatgagcctctgcctgatgaggactctggcgtggaggatggacttggccatgccagactagaaaacgagg

SEQ ID NO: 7350 - DNA, 481 bp, Glycine max
  Clone ID: jC-gmfl02220084g02a1
gtacaaaaaagggttacttcagcttccacatatcttgaagaattgatcaatgggcaagtctgtagttgagaagctactttggatggcaattgtgtgcttggtgctgggtgtaatttccattactcccaaggcccaagcagcagtgacatgcaaccaggtggtgagcaacctcaccccatgcatttcttatgtgctcaatggtggcaaaaccgtgcctggcccttgctgcaatgggatcaagaccctctttaacctcgctcactccacaccagaccgccaaaccgtttgcaagtgcataaagaacgctgttagtgcgttccattatggcaagtccaatgtggaccgtgctgctgctcttcctaagcagtgtggggttaacattccttaccagatcagcccttccaccgactgtaccagagtgcagtgaggttaatgatatatggagcggtaactcgagaagagaaggatatacaatatatag

SEQ ID NO: 7351 - DNA, 435 bp, Glycine max
  Clone ID: jC-gmfl02220084g02d1
aggccagccctttttttttttttttttttttacatgacttaaaagggtgtttaatggaattggttgaataaaatacataaattattataaatctttaatattatttttgattcttacaaataaaaaaaatacaataactcaataacaagactagtagatggatgtaataataagcagccaccagtcattaatgtaatgtgtggcctacgtatagccagccacttattcacacactagctatatattgtatatccttctcttctcaagttaccgctccatatatcattaacctcactgcactctggtacagtcggaggaagggctgatctggtaaggaatgttaaccccacactgcttaagaagagcagcagcacggtccacattggacttgccataaaggaacgcactaacagcgttctttatgcacttgcaaac

SEQ ID NO: 7352 - DNA, 548 bp, Glycine max
  unsure (1)..(548): unsure at all n locations
  Clone ID: jC-gmfl02220084g03a1
ctggaagttataagttatggagagaattcttgcacattgttcagagaaatttctccagatttaaggtttcagaggttaggaagatgtatgcacatgcaattgaagctctatctgcttcatgcagcaagcactctaggcaggttcttcaagctgccaatccttcttcaccagatcctgtatttgttcagttagaacttggtcttgtggatatatttcttagtctttgcagatttgagtggcagactggttatagagaattggccactgctttatttcaggctgaaatagagtttagtttattttgtcctcctttgctgctcactgagcagagtaaacacagactgtttgagcatttttggaacagtggtggtgctagnagttggngaagaaggggctcttgcttggtccacatggttggagaaagaggaggaaactaggcaacgggttatgaatgaggagctctcacgtgaaaatgaaggtggtggttgggactgttggtcagaaccatggtctaaagataatgagggtatttgcaatgttgaacatga

SEQ ID NO: 7353 - DNA, 443 bp, Glycine max
  Clone ID: jC-gmfl02220084g03d1
gcagtaatcatactaatcgaaaagatgagtgacaaaatttctatatcaagaatcttttttctcacaaagggtatatggaagcacaatatacatcatgtaactatcttacatacaagtccaatactatgagtactgcatcatggacctgtcttacatacagtcggattctagcagtagtgggagggcgaatgtcacgactgttgcaaaaggatctcataaatgtcagttctcaaattcagttccttatcacgcatgacttcctgtagatcagatagctcttttgcagtaaggacagagttcagcttgagaaagccatccaaccatagcctttttgaccaggggcaggaatggatagcccggaagaaagcacgtcgagctgcaaaaggatcatgtgcaatttccatctcaaacataatatagcaacgccacagcaaaactgagct

SEQ ID NO: 7354 - DNA, 509 bp, Glycine max
  unsure (1)..(509): unsure at all n locations
  Clone ID: jC-gmfl02220084g04a1
atcgataaaagcaaagggcatctgtccatagaatagaattgcaagtattctaccaagaagtaagaagcacacccatccaccgttcaacgccttctactaatacttctcctttctctttcccaaacacaaatcactcttctcttctaattcttatcacaccactcccctctttaatcatgcaacgctctcactctttccctctctagagacctcgccctgccatgtcatcacaaaccgcgcccacggaggcgccggagccttatacgccgcttctccgctcccgcaccgatgccggccgaggtcccgccccgacgctggcgctccttctcggccgcgccggccgccgtggcccatccatgctggtacgtgagacggcggcgcgtgagctcgaggagcgccgcgctgactggggctactccaagccggtggtggcgctcgacatgtcgtggaacatggccttcgtggtcgtctcggcggctatgctcgcatgcaccacctncgagcacccg

SEQ ID NO: 7355 - DNA, 471 bp, Glycine max
  Clone ID: jC-gmfl02220084g04d1
aacacaatcaacttaataaagcctacgattactcaaccagtagcaaatgaaacaatccagtttccgtcagaaaagaaatgaacaacctacaaattggacatctctgaatctaacaaaggacgaaataattctaagtagactacagttgctaacttattcgtcaataaatgctctatatatcttttctctacagaaacagctaaacgaaacaaccatcaaaacccagcgagtagggaagtaaactctttcttggcttgaaattatatatacatattacacaacagttgttgaaacacccagttgggacttggtaggttcttcgttttctgtcacacttggtcgtttcccttgagaatattgtacttgcagagaggacaagttgcattcatcttcagccatttcacaatgcacgacgaatggaaatgatggttgcagggaagagcatgcagctctgctccatcctcgtatgaa

SEQ ID NO: 7356 - DNA, 485 bp, Glycine max
  Clone ID: jC-gmfl02220084g05d1
aaaaattaattctttattatacaatgaaattctctgcacaactgccaaacccattgtctagttttatgaggggcgaaaacaagatgaaactgtctatgctgaacaactaacgtatttgcttaactatgattcgatcctataaagcccacttatttctcaaagagttgaccagatgcaactaactcgacactatactgatgaacccacataatcgcagggttcacatgcaatctaaatttgcagttactgcaagtatgatatcctttgagaattcattcctgcatgatacaccttgaggtggattattgccctggagaccaattcctttatatgcggaggaagaactgctctgtttgctccctttagaactgtcaacacccttgcttgttccacggactcactgttgccggcatgcagcgtcaggttgcattgaagcgttatcccgcgatgcatttgtgtaacttcattacttcttagcagtctca

SEQ ID NO: 7357 - DNA, 465 bp, Glycine max
  Clone ID: jC-gmfl02220084g06d1
aataggacataatttgctattaagaattataattatgcacactgaaaagtaatctgactacttgtgcataaaccaccgtcggacttgagacccacactatgtctgtcacttactcatacgtgcggacgcaaatggccagtgccagggacaacattaataggggatgaacagctgcgactgaatcagcgtcagcaatgtgcctatctacgggtggaaataatgccagatctacattcgcctctgaaaggtacttatacctgacatcgatacagaccaggtaacttctggcgactacgagatgcgtgagacgatcacccttacagtgcatctgtcgtattgtaaaacatagtctgtcaagagtctgagaaccacttgtgagactaaaataacgggctacccttgcgaagtgctctacggtgattagtgtactctcttagcttagggcattccagagtcagcgacact

SEQ ID NO: 7358 - DNA, 275 bp, Glycine max
  Clone ID: jC-gmfl02220084g07d1
aatgggacataatttgctattaagatttataattatgcacactgaacagtaatctgactacatgtacataaaccaccgtcggacttgagacccacacaattactgtcacttactcatacgtacggacgaaaatggccagtgccagggacaaaagtaaaagggtacagatagctgcaactgaatcagcgtcagcaatgtgcctaactacgggtggaaataatcccgatctacaattcgctgtgaaaggtacttatacctgacctttagacagacca

SEQ ID NO: 7359 - DNA, 74 bp, Glycine max
  Clone ID: jC-gmfl02220084g08a1
ctctgatacgactcaatagggttcatgagcctgacgcttcactggggaaccttgtaacagcctattagcatgca

SEQ ID NO: 7360 - DNA, 294 bp, Glycine max
  Clone ID: jC-gmfl02220084g08d1
tagctggctgtcgccctttcgtccttttttttttttttttttaggggccctaattcggtattaagatttatacttgtgcacactgagaggtaatctgattacatgtccataagctaccgtcgcatttgagaccccttctatgtctggcacttactcatacatacggacgcaaattgccagtggcacggataaaagtaaaatggtgcaataactgcgactgagtcagcggcaagaatttgcctatctgaggttggaaaaactccaggactacaattcgctatgagaggtgcttat

SEQ ID NO: 7361 - DNA, 197 bp, Glycine max
  Clone ID: jC-gmfl02220084g09a1
ctctgacccaactgaatatggatcatgtgcctgacgctgcactggtgagccgtgtaacagcgcatttgcttgcatactgcaggctggtggaatacaggaagaaaaggactatccatagcaccgggagacatggcacgctcaaagctgtcaagaccaaaggctgagctactgcatctaattacagagaaggatccctt

SEQ ID NO: 7362 - DNA, 317 bp, Glycine max
  Clone ID: jC-gmfl02220084g09d1
agaggtcctaagtccatataaatatttatacttgcgcacactgaaaggtaatcgaattacaggtacataagcaaccgacacatttgggactccttctgggtctggcacttacacatccataagaacgaacattgacagtggcacggatattagtagaatgatgcaataactgagacttaatcagcggcaagaattcgcctgtcgcaggttggaacaactccaggtctccaatctccattgagaggtgcttatattgcaccatttgtaggaccagacatttacttggatctccgacttgtatatgacaagcatacata

SEQ ID NO: 7363 - DNA, 180 bp, Glycine max
  Clone ID: jC-gmfl02220084g10a1
cgccgagacacaagaagagggagcgtgtgactgaggctgcgacagcgtgatggtgagcaacaccttccattacatactccaggctgcaggagtacaggaagatcaggaccatacatacgccgggagatagggcaccggcaaagctgtcaggaccacagtggcagatacttgctctaatga

SEQ ID NO: 7364 - DNA, 237 bp, Glycine max
  Clone ID: jC-gmfl02220084g10d1
agaagtcctcagtccatataactttttatacatgcacacactgctaggtacacgaatcactggtacaggagctactcaaacattttggaccccttcgggatatggcacttacacattcatgtgaaccaccttagacagtggcacggatatcatttaaatgatgcagtaacggaaacttacccagggcaaggattaccccggtttaggatggaacaagtccagcaagccgatttccct

SEQ ID NO: 7365 - DNA, 374 bp, Glycine max
  unsure (1)..(374): unsure at all n locations
  Clone ID: jC-gmfl02220084g11a1
accacattcacctgagagcttccaaagcaaaggcttcccttgcagcatccactagctgctgcttcccttggcatgtcagaaatgctaggaaaccccatcaacttcagtggagccacaaggccagctccatctgcttctagtcctgcctccttcaagactgaggctcttttctccaaaaagaaggctacaccaacacctccaaaaaaagctgctgctgctgctcctgccaatgatgagcttgccaagaggtatggtcctgacagaaggatcttcttgcctgaaggtctcttggaccgatccgaaatcccagagtactagaccggagaagtccctggagactatggntatgacccattaggtcttagcaagaagcc

SEQ ID NO: 7366 - DNA, 275 bp, Glycine max
  Clone ID: jC-gmfl02220084g11d1
ccaaggaacaaagcaaaatgccttaataatatctcagtgatatgtattgtacattaagattggagaaaaacatgaagatgaatgatttagagagttggagctctctcagcagacccggcaatgacagtgagcaagttgttgccaaaagggtcactgagatgttttgctaggttctcaacaggaccttctccggtgacatatgcttggaagtagaaaccaagcatggcaaacatagcaagtctgccattcttaattcccttcacctttagcagtgc

SEQ ID NO: 7367 - DNA, 482 bp, Glycine max
  Clone ID: jC-gmfl02220084g12a1
accacattcacctgaagcttccaaagcaaaggcttcccttgcagcatccactagctgctgcttcccttaggcatgtcagaaatgcttggaaaccccatcaacttcagtggtgccacaaggccagctccatctgcttctagtcctgcctacttcaagactgaggctcttttctccaaaaagaaggctacaccaacacctccaaaaaaagctgctgctgctgctcctgccaatgatgagcttgccaagtggtatggtcctgacagaaagatcttcttgcctgaaggtctcttggaccgatccgaaatcccagagtacttgaccggagaagtccctggagactatggttatgacccattaggtcttagcaagaagccagaagactttgccaaatatcaagcattagagttgattcatgccagatgggcaatgctaggagctgctggattcatcattcctgaagccttcaacaaatatggagcaaa

SEQ ID NO: 7368 - DNA, 416 bp, Glycine max
  Clone ID: jC-gmfl02220084g12d1
ccaaggaacaaagcaaaatgccttaataatatctcagggatatgtattgtacattaagattggagaaaaacatgaagatgaatgatttagagagttggagctctctcagcagacccggcaatgacagtgagcaagttgttgccaaaagggtcactgagatgttttgctaggttctcaacaggaccttctccggtgacatatgcttggaagtagaaaccaagcatggcaaacatagcaggtctgccattcttaatttccttcacctttagcagtgcagcttggtctggatcatttgcaagccccaatgggtcaaatggaccacctggatgaagattgtcttcgaagttcaggccattaataattgtgtagtcctctgcacctcccacaagaacaatctcagcaatgacagccacaat

SEQ ID NO: 7369 - DNA, 471 bp, Glycine max
  Clone ID: jC-gmfl02220084h01a1
gcagtgccggcgcgcgctgaagtttgctaggttcatgagcaggttcgggaagagttaccgaagcgaggaagagatgagggagaggtacgagatattctcgcaaaacctcaggttcatccgctcccacaacaagaaccgcttgccctacactctctctgttaatcattttgctgattggacttgggaggagttcaaaagacacagactaggcgctgcccaaaattgctctgccactcttaacggcaaccacaagctcactgatgctgttcttcctcccacgaaagactggaggaaagaaggaatagtgagtgatgttaaagatcaaggcagctgcggatcatgctggacattcagcacaactggggctttagaagcagcctatgcaccagcatttgggaagagtatctctctttctgagcagcagctagtggattgtgctggccgtttcaacaactttgggctgtatggtgg

SEQ ID NO: 7370 - DNA, 474 bp, Glycine max
  unsure (1)..(474): unsure at all n locations
  Clone ID: jC-gmfl02220084h01d1
agccagcccttttttttttttttttttttagtgcaaagtagcaaagacatgctatcttaattcttataactgataattaaagcggggcgcatcaatacaatacaatacaatatgtaactatgaactatcaatatatgatcgttatttatgtctgtgatacacacaattcaagccatgatattcttacgtgatttacagcaacttctaacttatttaatacatcataccaacccaactaggagcaattttcattatacaatgacacttatctttaaactctgaagcatgacaaggaggtaggcaccagggaccatattcttatgcaatttatgccacaactggataagacgcacaagttgcaacaccacacatgttcttccccaattccatttagaagtagccattctcaccccaactttctccccatgaattntntatgagccaatatgggacgccattttcaactccataccc

SEQ ID NO: 7371 - DNA, 571 bp, Glycine max
  unsure (1)..(571): unsure at all n locations
  Clone ID: jC-gmfl02220084h02a1
taggcagcatggaatagaaatacgtgttgcaagaatctttaacacatatgggccgcgcatgaatattgatgatggacgtgttgtcagcaacttcattgctcaagcaattcgtggtgaacccttgacagtccagtctccaggaacacaaactcgcagtttctgctatgtctctgatctggttgatggacttatccgtctcatggaaggatccgacactggaccaatcaaccttggaaatccaggtgaatttacaatgctagaacttgctgagacagtgaaggagcttattaatccagatgtggagataaaggtagtggagaacactcctgatgatccgcgacagagaaaaccaatcataacaaaagcaatggaattgcttggctgggaaccaaaggttaagctgcgagatgggcttcctcttatggaagaggattttcgtttgaggcttggatctgacaaaaaaaattaacttattttcgctccttttatatctagtcaaaatattcagataataagtgggatggattattctattaagttctcctatntttccttttcataattatgatac

SEQ ID NO: 7372 - DNA, 444 bp, Glycine max
  Clone ID: jC-gmfl02220084h02d1
aggccagcccttttttttttttttttttttttttttttttttttttttttttttttttttttttttttttttttttttttttttttttgggaaaccagagccccaacccgatgggggaaacccaaaacccgggccccccacctcctaaggatcaaaaatatgaaaagggaaaatgggaaaacccaaaagaaaaaccccccccacttattaacggaaaattttgaccagattaaaaaggggcgaaaataaggcaaactttctgggcaaaccccagccccaaaggaaaaaccccctccaaaaaaggaagcccctttcggaagttaacccttgggacccaagcaaggaattccaatggcttaggaaaaagggagtcccctggcggggatccccaggagggggccccactacccttatccccccatggggagaaaaaaaccccctcac

SEQ ID NO: 7373 - DNA, 448 bp, Glycine max
  Clone ID: jC-gmfl02220084h03a1
agacaataccacagaggtgttaatggggatttctaaaggtataatgggacgccttcaagtaactgagttcaacctcaatggttctatgcaacgagaaaatgagctgagatcaaaagttcaaattttgatagatcaactcaaggctaaagatgctgctttagagaagcttgagaaatgtaatgttgagagtgttaaggaaaaatctgaggtgttggctttaagggaaaaggtgaaatttcttgaggaagagcaaaaagaatttgagcttcagataaataatgtgactgcagagaatgaagcatgtcacgaacacctaattgaaatggaaaattttggtgactctttgaaagaaagcattgacatagcagaaaatcgggctgagagtgcagaacaaaggttacacagttaactgagaccaactgggaacttactgaagaggtgagttttc

SEQ ID NO: 7374 - DNA, 602 bp, Glycine max
  Clone ID: jC-gmfl02220084h03d1
gcacatcttaagcatatatcttcatcatttgcacctttatcaaacacaaaactctacatttgttcagcactcatgatagaaacacacctccaattcaattataatattagcttacaaccacctaagatcacatgaatatacaataacaatacataagctaaggacttgagggaagcacaactgcacaaacagcaaatttttctatatgctaggtcataacttagcaatcaaaagcttttggaaagaaaaatgtttcctttgtcaaaccaccagaaggctagcacagaaatcagtgggacaaacattgctactgaaagaaatgtcaagtttctccaatttgcaggcttatctgctgaaatagatgatgttactcgagttacggagcttgcaccttcttcatccacctgaaatgtcttattaaagtgatctattccttcttcatctgatgatttagcagagttatcattgctcgagtcattgctggaagctcgatcttcatttctgttatttagtccattgttggatgcatctaaagaggcatcaattttagtattctttaacttttctaccaaatgtttaatttcctggtttaaagcatgtaa

SEQ ID NO: 7375 - DNA, 500 bp, Glycine max
  Clone ID: jC-gmfl02220084h04a1
atttcccgaaaggctaaaatatccattgcacctttctcttcctccgatggctaatctctcactcttgttcttcggtctcctcctattctccgctgccgtagccaccgtcgaacgaatcgacgatgaagacaaccttctgatccgtcaagtggtgccggacgcggaggaccaccacctgctcaacgcggagcaccacttctccgccttcaagacaaagttcgccaagacctacgccacgcaggaggagcacgaccaccgcttccgtatcttcaagaacaacttgctccgcgccaagtcgcaccagaaattggacccctccgccgtccacggcgtcaccaggttctccgatctcactccgtctgagtttcgcggccagttcctcggcctgaagccgctccgccttccctccgacgctcagaaggctccgatccttccgaccagcgaccttcctaccgatttcgattggcgcgaccatggagctgttaccggcgtcaagaatc

SEQ ID NO: 7376 - DNA, 395 bp, Glycine max
  Clone ID: jC-gmfl02220084h04d1
gggggaacccaaaataattttatttagggtacttgcaaaaactattgaaaaccggggggaaaatttggagctaaactaacttgcataaaaaattaccgcataaaagcctaaacaagggcttaacaggttccccccccataaaattttaccacagggaaattatttacatacaccctatactggggcccctaccctggttaggcatccctccctaaatttaaagggtaaaaacaagttttggcgctcccgttgaaaccattggggcccccccaaaaacattgggacccctggaaaaattggaaaaacctttttttgcccaagatttcccccaagaattttttaagaaccaaaaagggttttccttaaaaccaaatggggcataaggcccaaatcca

SEQ ID NO: 7377 - DNA, 506 bp, Glycine max
  unsure (1)..(506): unsure at all n locations
  Clone ID: jC-gmfl02220084h05a1
catcttttggtttggggcgaaagttcagccttttcagatttgcatcaatttcaacagagaacaacgtgatttgtggattgctgtaaagtgcattatttggccattagctaatggacaagggggtgcctcctagcctcttcgtcaatgatggttctttcatggagaggttcaagcaacttcaacaagagcaggataaagggaagaatgtcaaattggaggattctaaaccaattaaggttatttcagggtctttgtctcccaatccttcctttaccaaaacgcctgtggacttgaaggttaatgacacaaggaaaatatcccagggtggttccagtggaaagctagctttcagtttaaaacaaaagtcaaagctggtgccaccccctgttaagttgagtgctgatgaggatgaagaagtaacagaagctgggtatgtttcaaacgatgcaccactaanacggcataagttaggccaggaggaaggcattgaccaatcatcaagacaa

SEQ ID NO: 7378 - DNA, 531 bp, Glycine max
  Clone ID: jC-gmfl02220084h05d1
aaagccaagttccccatttattatcaatatccaagactaggtttcccggattaaacaaaccatatacaccataatatccctgtaccacttcataatatgcttgcgatacaaaaaacatgttccaaaagctctgacaagtaaaaataaccaaaaacccattattctttggcggataaaaatgcgattgaagtgaacattaccccttccccctcttttctcccccaaatcttagtttcaaaagactacaagcactgcagcacacaataaaaaccctactatcaacacaccagttcatcccactttgtaaaagttaacttttcctgaagagttgcacaaagcacccaatgtcaagttcagtaataagccttgcgaggattgttcaggggattgggtctgtaacggtagccaagcatcatccgctttttgtactgctcatatatgtcatcctcagcactcacctctccaggttcctgagccccaacccccaggttattcttcttaacattaccggccatgataggatccgcaata

SEQ ID NO: 7379 - DNA, 373 bp, Glycine max
  Clone ID: jC-gmfl02220084h06a1
ctcaaaaactcccgatttctctctctgttcttccatggccatctgatcaaacttttctagattctctctctcagtacttgctattctgagagaagggtatgccctgccgctaggcccacacctcccacatgactgaaatcatcatcaccagctccttccggcacaagtctgaaactacaacaattgacctcaactactcatcaaccaaccaccttaatagccttctgcagaggatactcatagatccaactgagagctgtgcaaacatggcggcttgaggaagttcctttgccaacatcactagcttccttcgcgaccaacaaccctcttaccaacctctcgattcttctatcttgctctatgctccttcaat

SEQ ID NO: 7380 - DNA, 346 bp, Glycine max
  Clone ID: jC-gmfl02220084h06d1
acttacgcacactgaaatgtaatcttactacgggttcataatccaccgacggatttaagacccaatggaggacaagaaaaaacacatacgtaagggggaaaaaggccagaggcagggacaatattagcagggaaaaaaactgagactgacccagcgcagggacatgcaaagacgagggagaaaaaccccaagaatccaggaaaaaaaaaaaggtgctcctagctaacagggggccagaccagataaaaaattggaattagaaaatgattatgggaggcaccgatacagtgcctatatacgtacagagagaacaagggctgacaagggcagaaaacctctgcgggga

SEQ ID NO: 7381 - DNA, 353 bp, Glycine max
  Clone ID: jC-gmfl02220084h07a1
ggatagagcttgtatatatccatcacccgttcattcatgagagcagattcatagtctagtcgatcatatgaagagaatacttgcggatggttgtaacagtgtaaatcaacatattgaaccataatccgcttctgtagctgggcaataggataccatttcatcatcaaattcatatacttcgatgcctcttcaatttcagtctgagactctgggagtctccttgctctgttgaatttcccagagccaggtattataatatgaaggtagaaataaatatattgcatgcaattcacaacgaaagattcaaagcatctgcagaagttgccattacattaaaaaaatgcagagattca

SEQ ID NO: 7382 - DNA, 462 bp, Glycine max
  Clone ID: jC-gmfl02220084h07d1
gccgccgccctttttttttttttttttttttttttttttgttttttttattttttttacttgcgcactcggaaaaaaagaatccctggattttccaaagcgactggcacccttgggacacgctctgaatcccccctttgcacatgcatgcgaacgatcaattcctaccccacgtataaaaatcccggccccgggaaatcaacctgcctgggggaatcaccgagccccccaccggaattgcaaaggccacccagcctatgaacttggacaggaaatgatagccaactgcccagcctaccaagcggcttatgggaccatgggcccagtatcagcgatccacccttgcacaagtaacctctacatatgaaccaccggccctcgaatccgcctttttgaaatgcggggtgacggatttttccaagctgacaaccttcacccgagtgccaagcgtactcacgcgggc

SEQ ID NO: 7383 - DNA, 73 bp, Glycine max
  Clone ID: jC-gmfl02220084h08a1
gtctgttcctctggactttggtctatgtgtctctggctgccatgacactcggagtatcatcgcacatgattgc

SEQ ID NO: 7384 - DNA, 200 bp, Glycine max
  Clone ID: jC-gmfl02220084h08d1
gccgtgtcgtctctttttttttttttttttaagaaactttaattctaaattaatgtatatacatgcgcactctaacaagtaaactaattgaaaggacaacaacaactaaaacctttgggtcacaatctggatatcgcagttccacatccatacgagccaacagtgccagtggcatgtataaacgctaaatattgcaacaa

SEQ ID NO: 7385 - DNA, 300 bp, Glycine max
  Clone ID: jC-gmfl02220084h09a1
gtgtgatcctatagaatttggatcatgtgtctcaggctgtaatgatagtccgagtaacatcgcatttgagtgcatactacaggctagtgtaatacagaaagaaaaggactatgcatgcacgggaaaagatggcacctggaaatctgagatgaccatgattgcagctactgcatgtaactacagggaggtagccctagaggatgaactgatggctgcatacgtagtgtagaaagggactcttgcagctgctatcaatgctgttagtatgcagacatatggaggaggcgtgtcatgcccata

SEQ ID NO: 7386 - DNA, 461 bp, Glycine max
  Clone ID: jC-gmfl02220084h09d1
agaggtcctaagtccatataaatttttatacatgcgcacactgaaaggtaaactaattaaaggtacagaagcaactgacacatttgggtctccttctgggtctggcacttccacatccataagaaccaacattgacagtggcacggataaaagttaaataatgcaataactgagacttaatcagtggcaagtattcgcctgtcgcaggttgaaacaactccatatggccaatctccatagagagttgcttatagtgcaccatttttaggaccacacatttacttgcatttccgacttgcatatgtcaggcatacatacagaatttacatactacatatacaacatggtcttagcaggttcctgatcctatacggagactattttaccagtgccacatgatgaagtgcacaacgtagatattggtactaactggccttaggccagtactacgtcacagacac

SEQ ID NO: 7387 - DNA, 131 bp, Glycine max
  Clone ID: jC-gmfl02220084h10a1
aggctctgcattaggtgagcgtacacttctgtctagctttaatgttgccactcataggaccacatgagactggggtcttacgtgtgtacttgcaccctaggatcatgcttacacatgtcctactgcagctg

SEQ ID NO: 7388 - DNA, 195 bp, Glycine max
  Clone ID: jC-gmfl02220084h10d1
aattgaataaaatttttattacatgaacaaacttactagtaaacttatcaaacgtacagcatcacgcaaatgattggggtcacactttgggtctggctcatccaaatgcatccgaactcacagtgccaggggcacgcataatactctgaaccccttataattgacacagtgaaaacttctccttttaaaaagggg

SEQ ID NO: 7389 - DNA, 147 bp, Glycine max
  Clone ID: jC-gmfl02220084h11a1
aggctctgcattaggggagcacacacacctggctagcactaatcaaaccactcacaagaccacaggagactagggtcatacgaaacaacttgcaacctaggctaatcgttacacatgaccaactactgctgatgcgacgaagcccga

SEQ ID NO: 7390 - DNA, 293 bp, Glycine max
  Clone ID: jC-gmfl02220084h11d1
catagaataatatttttattaccttaaacactttactaatgaacttaacaaacgaagagccgcgcgcaattgactgggttcacactttggggctgttttacccaaatgtgccctgtctgaaagcgctgtgttatcacacaaacaaggggaactgtgctacactgacctagagtgaacattcccctataaaaagggggattttgaaaaatctcggggaggattatttccacggtgcacctttttaaatgccccctgagaaaaagacctcggaatgttccatctactatgggctt

SEQ ID NO: 7391 - DNA, 459 bp, Glycine max
  Clone ID: jC-gmfl02220084h12a1
aggtactgcgttaagggagcagactcagatggctcgtacgaagcaaaccgctcgcaagtccacaggaggctaggctcctacgaagcaacttgcaaccaaggctgctcgtaagactggaccaactactggtggtgtgacgaagcccgaccgttatcgtgctggtaccgtagctcttcgagagagtaggatataccagaagagtaccgagcttatgatccggacactgcccttacagaagctggttcgagaaagggctcaagactcgacgactgagctgcgagtgcagagccacaccgtgcttgcattgcaagaagcggctgaggcgtaccttgaagaactctgtgaagacactagcccgcgggccattgacgccaagcatgtgaccattatgccgaatgatattcagctgacaggaaagattcgaggcgagcgtgctagagatggaagctggaaagatga

SEQ ID NO: 7392 - DNA, 251 bp, Glycine max
  Clone ID: jC-gmfl02220084h12d1
aattgtatatgtttttcttaccttaaacagtcgattgcgagtccatgtaaacgctgtgaaacgcgctaatgactgggttcacactttggactgggttcacccaatgcgaccggaacggcatgaaatgcattttcaaccggatcactggattcatgatggctgggcaataactcacctgtccctttactacaggtctgaacttactatccaaacaaaaacgcttttcagagcatagactttaataggcaacc

SEQ ID NO: 7393 - DNA, 427 bp, Glycine max
  Clone ID: jC-gmfl02220085a03a1
aagagaggttagagaaggcattatctgaggagactgtcatctctcaaaggaaggatacatgtggcaaatcaattccttttgatgagaacgaagaaagtgatactgctctatctcagctgcaatcttcaactcatccacagtccgtggtgtcattttgatgtctattgtccctctctgctcttttgtctggttaaagagatattgtggcatttctcgaaactaagtctgaatcctcctcgttcaaaatgctgattggttggaacaaacattggtttattcgaattttgtggtaatatagaactatcaagctgtgtcacacggcttgtattgtatataaattatgggaattattgcgtaaaataatgggtattgggacttgggagtttagtaatgtgtttttttttcccgttaaaaattgaagtagttc

SEQ ID NO: 7394 - DNA, 427 bp, Glycine max
  Clone ID: jC-gmfl02220085a03d1
gaactacttcaatttttaacgggaaaaaaaaacacattactaaactcccaagtcccaatacccattattttacgcaataattcccataatttatatacaatacaagccgtgtgacacagcttgatagttctatattaccacaaaattcgaataaaccaatgtttgttccaaccaatcagcattttgaacgaggaggattcagacttagtttcgagaaatgccacaatatctctttaaccagacaaaagagcagagagggacaatagacatcaaaatgacaccacggactgtggatgagttgaagattgcagctgagatagagcagtatcactttcttcgttctcatcaaaaggaattgatttgccacatgtatccttcctttgagagatgacagtctcctcagataatggcctttctaacctctctt

SEQ ID NO: 7395 - DNA, 374 bp, Glycine max
  Clone ID: jC-gmfl02220085a04a1
ctagttctaagatcgcgagcggccgccctttttttttttttttatagtaaaaaaaattcttgctgttcatttgaagtacaaatgtgattcatgtggctgagtaagggcttgtgtgggccgaaaactacgtcgtaacaaattaaaatggtcccgtcattgctttatctcgtggattggttcattgaacgtttgtataccctacatctttagctgaaaatgaggaccaaaattttcaccttcttcttcttcttcttcttcccttttctaaaggattaatctaaaacccccacgagttaagcccaaagaatcccccacctatttaccgatttaaaagattactactattattaatcgataacagggttcaattcctg

SEQ ID NO: 7396 - DNA, 529 bp, Glycine max
  Clone ID: jC-gmfl02220085a04d1
ggagaaattaaatgatggatgattaaataaacatgatgctacattattcacctgtttgacgatcaaatcaatacttatacggctagtgtgatacaaaatactctttaaaaataaaaataaaagaaaaggaaacattaatctataactgacattagaacaccttggggcgtcaccatggagccagggggtgtgaagaaaaaccatctggaaatttagggcaaacagacagacaaaacaccgttcttcatattacagatattggttgaaaaacaatctgctaaaatttctgatcttttcctgaaaactaccttcattaacagcttttaataacagtcgatgtgaaagctgcagacacagcaagaaaattgtagaagcacatagaatcaaaaaccctgcacctgaaatctagagatggcagtagtctgtgtacattgatacgaggaccagcaatcactactgcaagatgctaatcacacgaaaattttccaaaatcagcaaaaagaaatctgtagcttttttaacctagtct

SEQ ID NO: 7397 - DNA, 525 bp, Glycine max
  Clone ID: jC-gmfl02220085a05a1
tttttcctctcttcactttcactctctctctctctctcagccatcatcatgggagcagtgattctcccagatctcggcaccgagattttgattccggtctgcgccatcattggaatagggttcgccctcttccagtgggtcctcgtctccaaggttaagctctccgctgccagagacgcttcccctaacgccgccggcaaaaatggctacaacgattacctcatcgaagaagaggaaggcctcaacgatcacaacgttgtcctcaaatgcgccgaaatccaaaacgccatttccgaaggagcaacctctttccttttcactgaatacaagtatgtgggaatcttcatggtggcttttgccattttgatattcctattccttggctctgtggaaggattcagcacgagctaccagccttgcacctatgatcaaactaaaatgtgtaagccagctcttgctactgctgttttcagcaccatatctttccttgcttggggtgtcacatcgcttatttctggattcctt

SEQ ID NO: 7398 - DNA, 453 bp, Glycine max
  Clone ID: jC-gmfl02220085a05d1
agaaaattgaccacgcggaagagatggtaaacatcatcgtcatcatacaaggaaaattttcgcaacagactcagcctaatcaagttgtcttaaaactacatgagacaaaatatactttgtttcaaggtgggggaggaaaaggtttcaaaaacaatggaattgacatgacagatgagttaaagactaacacaaaaacgagaaggcattggtaaagggacggcttttccttgttctgtcgttgtagaaaaatgatggacgatactctttttctatcaaatcctttagatcttgaagagtaggccaccatgtgtagcaaagaagggagcaaacacaagagactcaaccgccatgagcttaataaggatgttaagtgaaggtccagatgtatcctttagagggtctccaatggtgtcaccaataacagctgccttgtgacaatctgacccttttgga

SEQ ID NO: 7399 - DNA, 400 bp, Glycine max
  Clone ID: jC-gmfl02220085a06a1
atgtgtttgcctcttgttctatgctgtcgagtacggcacaaaggcaactaggggggagtgttcaagaatttgttcattgcaaccgtgagaaatcaaccccctacacatgtatggatctagctagccaatttattaataaggcacatattgggaagcccaaaatgcaatatgtcactcggatttaggttccacccaaccgatgaggagctgattcttcactaccttattgaagaggtagcattcatacccttgagcgataccattattggtgaggatgatatctacaacgttgatccatgggacttaccacctaaggccacctttggggagaaagaaaggtatcttttcagacctagagaccgacagtacccagatggtgcaaggatcaacagggcatttt

SEQ ID NO: 7400 - DNA, 433 bp, Glycine max
  Clone ID: jC-gmfl02220085a06d1
ttttaggctttttttgaaggacaataccggatctacaaagcatgtcatggaacgaaccttggaagagaacgaaacaacatgttcaaattagcactgttggacactaagggggtctaatttgtcatacaaactcggatatgtcgttttagcagtgcatggagccttgaatgggagaatttttgttcgaggccctaccaaagagagcttgcatccaggctagacaggtctaggctaaagtctcacccacagcttacttcaacagaaatggggtatgaaaacactatcacagctatgtgctaaacccggaggtactattggttgattaaagattagattggtgtgattgtttggaacgcgtatcttttgaacatgacacaataagtatgctatagaatttaatgtgccgatattggcggaagatccctgaaattga

SEQ ID NO: 7401 - DNA, 486 bp, Glycine max
  unsure (1)..(486): unsure at all n locations
  Clone ID: jC-gmfl02220085a07a1
atgagttccatcaggacaaatccatggtggcatgctctttcaattctcaattgaaattcccccaaagccaccttcttttgattcaataaatcaacacccaattttcaaaattccaacttgtaatcaatttttctttccatttgacacaccataccaatcaaccaaccttgttgcttcttgtgatcactcctgaaccacactaatggatattgatgagtgggagtttctctctgatgatggctaccttgatttcaatgaagagggtgggaagcaaaagcaaaagcagaattcctttggaaaattggactccgagggcatctttgacatggactacttttgctcatcaccaccaccaccaagggtgagaactcaactagtccctatgccaattcaattggagccaaaaattgggaaggccccagaagatattntggtgaaagacatcatcaagagtagtcctatggaagtggctattgctaccccatc

SEQ ID NO: 7402 - DNA, 547 bp, Glycine max
  Clone ID: jC-gmfl02220085a07d1
ccaaaatattaatcaaataataataataaaaaaaagtgcctctgatctgtgacttaatttacaagaccacagaaaatatacagaacaaacaacaacaataaggtaacatctggcatcatgttatttacagcaacataggatagggccagattaatagatcttatagcatggttgatccattgtagactacaattgcttcacgaaggcacctaatcaatgctttcaaagaccatcatagtaaccaccaacgcttatgtgagctctgctcataggaacacctcttgctgctgaaattgcatcattcaatttggtcgcatgctgcaccacttgcttaatcctcttgtcatcagtatagatctggaaccgaatcttctgatcctgctttagtttgttcctctgctggcttccaaagaagagaacacaaatagtagcagcagcaacaccaaaagaacagatagctccaacacctgtcaaactccacttccacaagttgaaaccactggtgttgtcttcctcccaagtggactcctcttctttgtcacacaca

SEQ ID NO: 7403 - DNA, 498 bp, Glycine max
  Clone ID: jC-gmfl02220085a08a1
atgagttccatcaggacaaatccatggtggcatgctctttcaattctcaattgaaattcccccaaagccaccttcttttgattcaataaatcaacacccaattttcaaaattccaacttgtaatcaatttttctttccatttgacacaccataccaatcaaccaaccttgttgcttcttgtgatcactcctgaaccacactaatggatattgatgagtgggagtttctctctgatgatggctaccttgatttcaatgaagagggtgggaagcaaaagcaaaagcagaattcctttggaaaattggactccgagggcatctttgacatggactacttttgctcatcaccaccaccaccaagggtgagaactcaactagtccctttgccaattcaattggagccaaaaattgggaaggccccagaagatattttggtgaaagacatcatcaagagtagtcctatggaagtggctattgctaccccatcagagaacacaaa

SEQ ID NO: 7404 - DNA, 481 bp, Glycine max
  Clone ID: jC-gmfl02220085a08d1
ccaaaatattaatcaaataataataataaaaaaaagtgcctctgatctgtgacttaatttacaagaccacagaaaatatacagaacaaacaacaacaataaggtaacatctggcatcatgttatttacagcaacataggatagggccagattaatagatcttatagcatggttgatccattgtagactacaattgcttcacgaaggcacctaatcaatgctttcaaagaccatcatagtaaccaccaacgcttatgtgagctctgctcataggaacacctcttgctgctgaaattgcatcattcaatttggtcgcatgctgcaccacttgcttaatcctcttgtcatcagtatagatctggaaccgaatcttctgatcctgctttagtttgttcctctgctggcttccaaagaagagaacacaaatagtagcagcagcaacaccaaaagaacagatagctccaacacctgtcaaactccac

SEQ ID NO: 7405 - DNA, 268 bp, Glycine max
  Clone ID: jC-gmfl02220085a09a1
gtctcagccatgcctgactatgataatcttcacgcgagaacagccacacaggcaaagacactaagagatgcgttcgacgtgataagagtcggtgcgggcgggagtggccaaagggcatcgggcctggcccacgtcactggcctgcacggaatggctatcagagttgacgacgctgaccctgcagctctttacaacgcctattgttacctcttgttctacgtcaaccgagtcgtttgcgaacaccgcatctggtcatggacagggtgct

SEQ ID NO: 7406 - DNA, 491 bp, Glycine max
  Clone ID: jC-gmfl02220085a09d1
gcatgaagatttaactatgcatgttttactattagttcctgcaatagtctttgtgcttgtatgcataaaagaaatagaagacacattcaagttttcaacttcagccgagtgcaccacccccacggtcagacacaaggttattaaaatgggggtggggaaaacttgatcttccaagtgaaacaaacattttaaagacgggaagatgattttgtagaccttggatctgtactatattcatacgcaccaatacctcggtatcttccaagtcttgcagcattaacatactgcacaagtggagggcacggtgcatatttgctgacaccaaagccagcatgaaaaactctcattattgacaagcacacatcctatccaatgaagtctgcaggctctaaaggacccactggatggttagtacccaccttcattcctgtgtcaatatgcggtacgggtgcaacacccctgtagagagcaaaaaatgctccacctatcat

SEQ ID NO: 7407 - DNA, 495 bp, Glycine max
  Clone ID: jC-gmfl02220085a10a1
gtctcatgcaagcacttgctgtcctagacttgagctgtaacatgttaagtggaccaattcctcctatcttgggcaatttaacttacacagaaaaattgtacttgcatggaaacaagctgacgggcttcatccccccagagcttggaaatatgtcaaagcttcactatttggaactgaatgataaccatttaagtggacatatcccacctgagcttggaaagcttactgatctgtttgacttaaatgttgctaacaacaatctcaaggggccaattcctagtaatcttagctcatgtaaaaatctcaacagcctcaatgtgcatggaaacaaattgaatggatcaattcccccttctttgcagagcttggagagtatgacctctttgaatctttcttccaacaatcttcagggtgcaattccaattgaactgtcacggattggtaatttggatacattggatatttcaaacaataaattagttggttccatccctt

SEQ ID NO: 7408 - DNA, 383 bp, Glycine max
  Clone ID: jC-gmfl02220085a10d1
aaataatatacatgattcttgaaattgattttcatttcaaaatcctctcactcactcactgtttcgagagattacttctccaaacttgaggaagagttgagcatctgaagtgctcattgaggggcatattactaagtgtggggttttgaggatcgcatactcatccacgttgcatggtactttggcagatggattagaagcaggtggttggccagctaggtgctttggtgggatgcttgatggcacgtgactttcgcgtacacgtgtcagttcgagcattgctggcctatcagatggctgccgctatgtgcataatagagcaggctgagtaaccctggttacagctcctaggaccttgcatgtggcagttacgttgggatcaa

SEQ ID NO: 7409 - DNA, 526 bp, Glycine max
  unsure (1)..(526): unsure at all n locations
  Clone ID: jC-gmfl02220085a11a1
gccagagtgatgtaaaggctgggggtgatgtgtgtggtggagttggcattcttggcattgcttgggcctttggtggcatgatcttcattctggtgtactgcactgctggaatctcagggggtcacataaacccagcagtgacatttgggctcttcttggctcgcaaggtgtctttgattagagcaataatgtacatggtggctcagtgcttgggagccatatgtggagttgggttggttaaggccttccaaaaggcttactacaacaggtatggtggtggggccaatgagctcagtgaggggtacagcacgggtgttggattgggtgctgagatcattggaacctttgttttggtctacactgtgttctctgcaactgaccccaagaggaatgctagagattctcatgtgccggttntggctccacttncaattggctntgctgtgttcatggttcacttggcaaccatcccagtaacaggcactggcattaaccctgctaggagtctaggagcttgttgcatgta

SEQ ID NO: 7410 - DNA, 513 bp, Glycine max
  Clone ID: jC-gmfl02220085a11d1
ctaatagattttacttccaatatatcaaaaaaaagctcatcaattctaacaaggaaatacaaaggaaagtgcttcgaagtactaaagggtctttactatttaccaaaggcttacttttcttgaaagaacctttaatctgcagaggatcaaagcacaaacagcaccatattattattattattgttgcaatatcaactttttttgcctccaattatcttttttttaccatttccactaaccccccatgaagaggaaattgactcaaatagtggggttgctcctgaatgatccaagagccttagcagcacttgctctcaatatgaattgatggtagaaggctgcaattgctgctccaataaagggtccaacccaaaagatccaatggtcatcccaagccttctgatggttgtacatgacagcagctcctagactcctagcagggttaatgccagtgcctgatactgggatggctgccaagtgaaccatgaacacagcatagccaattggaagtgg

SEQ ID NO: 7411 - DNA, 548 bp, Glycine max
  unsure (1)..(548): unsure at all n locations
  Clone ID: jC-gmfl02220085a12a1
gttgttgtaactcgttcttcttcttttgttgttctgtgtttgtgtttgttttttctctcacctgaaaatgtcttgctgcggtggtaactgtggttgcggaagctcctgcaagtgcggcaacggctgcggaggctgcaagatgtacccagacttgagctacactgagtcaaccaccaccgagaccttggtcatgggagtggcacctgttaaggctcaatttgagggtgctgaaatgggtgtgcccgctgagaacgatggctgcaaatgtggaccaaactgctcctgcaacccctgcacttgcaagtgaggtgttgggagagcaagcttcaagcagagatagcccttaattaggaataatgataaactattaatgtgtagctaaaaacttatgtattatgtctgtgatggttttcgtgcactctggtgttttgtgttaaacaaacatccttagaataaagtggtcatgtcttgcctttcagcaagttcaagtgttttggacttgtgatgggtgtgttaagctcatggntgcttcttttttttttttttta

SEQ ID NO: 7412 - DNA, 412 bp, Glycine max
  Clone ID: jC-gmfl02220085a12d1
aatattgtaagcagagattcataattcagattagccgaactttatacagaagcgaccaattaccaaacattaaaaaaaaaaaaaaaagaagcaaccatgagcttaacacagccattacaaggccaaaacacttgaacttggtgaaaggcaaaacatgaccactttattctaagggtggtggtttaacacaaaacaccagagggcccgaaaaccattacaggcataatacataaggttttagctacacattaaaaggtgatcattattcctaaataaggggtatctttggttgaagcttggttttccaacaccttacttgcaagggcaggggttgcaggagcagtttgggccacatttggagccatcgttttaagcggggacacccattttagcacccttaaattgagcctta

SEQ ID NO: 7413 - DNA, 387 bp, Glycine max
  Clone ID: jC-gmfl02220085b01a1
atcctgtacatcaggttaaatccttggtggactgctcttcgaacatacacctgtgatagtctcgaaaccacacgcccttttgatctattatagaaactcccaatttgtataattccagctgggagtcaatttttattttccttagatacacgattccagacagacgagcttgacgctattggttatcactgcagaaccacactacacaatactgatgagatggagtgtgattaatgatgatggcttccttgatatgaaagaggagggcgggatgcagaagcaaaagcgggatttctttggaaaattggacttcgagggcatctttgacatggactacttttgctcatcaccaccacccacaatggcgagaactcaactagtcccttt

SEQ ID NO: 7414 - DNA, 525 bp, Glycine max
  Clone ID: jC-gmfl02220085b02a1
aaacaagaggggtttgccttgtgccgtttgtgttgttttcgggacgaagaagaagatggtgtcaggttctggaatctgcgcaaagcgggtggtggtggacgcgcgccaccacatgctgggtcgtctagcctccatcgtggcgaaggagcttctgaacggccagaaagtggtggtcgttcgctgtgaagagatttgcatctcgggcgggctggtgaggcagaagatgaaatacttgaggttccttcgcaaacgcatgaacaccaaaccctcccatggccccatccacttccgtgccccctccaagatcttctggcgcaccgttcgtggaatgataccacacaagacaaagcgtggggaagctgctcttgctcgtttgaaggtttatgaaggaatccctcctccatatgacaagaccaagagaatggttgttcctgatgcactcaaggtgttgaggcttcagaagggacacaagtattgtgtgctgggcaggttgtcatctgaagttggatggagctactatgatac

SEQ ID NO: 7415 - DNA, 509 bp, Glycine max
  Clone ID: jC-gmfl02220085b02d1
atacaaaacacacaattaaataaaaaacagcttccaagatgatcagatatcaaatctatgatccaataacaaagcaacctcaagcaaaattgaaaggtagttcaatttggtataagtggcataaaaaatttcaaacactaacaaaaactactcaatacttaacaggagcaagaacatcaagttgggaaccgagcttctcttcagcaaccttctcagctttcacccttaatttgttgagttgcttctttctctcgtaaaccaccgctgccttctcctttctcttcttctccagctccctaatggtatcatagtagctccatccaacttcagatgacaacctgcccagcacacaatacttgtgtcccttctgaagcctcaacaccttgagtgcatcaggaacaaccattctcttggtcttgtcatatggaggagggattccttcataaaccttcaaacgagcaagagcagcttccccacgctttgtcttgtgtggtatcattccacgaacg

SEQ ID NO: 7416 - DNA, 502 bp, Glycine max
  Clone ID: jC-gmfl02220085b03a1
cggtgctcaaagaaatcttccgcactgatggtgagcaagccctcaagtttccaccacctcatgtcatcaaagttcgtgagtctgaatggatgactgatgaagaatttggaagagagatgcttgctggtgttaatcctggcatgattcaacgccttcaagagttccctccaaagagcaagctagatcccacagagtttggagatcaaactagtacaataaccaaagaacacttggagatcaaccttggtggactcaccgtagaacaggcactgaaaggtaacaaattgttcatattagatcaccatgatgcattcataccgtttatgaatttgatcaatggcctgcccactgcaaagtcttatgccacaaggaccatccttttcttgcaagacgatggcacattgaagccattagccattgagttaagtttgccacatcctacgggacatgagtttggagccgatagtagagtagtcttgcccccagccgcagtcaacagcgc

SEQ ID NO: 7417 - DNA, 454 bp, Glycine max
  Clone ID: jC-gmfl02220085b03d1
ttttttttcttcttttttttttttttttttttttttttttttttttttttttttttttttggtttttttaagggtcatttttgttcctttattcaattttgaattaaaaaacacaaactggggccaaacccggacatcccccaggggcacaggggaccataaaaaaattaaaggggaaaaaacccccaaggggcaccaaaaaaaaaaagggcccccaacccccccggaagaaaaagaaacacccccccccgggggaccacaaacaaaaaaaacacagggggggggccacccctctataaaaaccgaaaaagaaacccgccccacacccccacctgggaaaaaaaaaaaaaaaaacatgccccccccccccagggggggccccacccccccacaaaaaaaagaaccccaaagggggggagaaaacccccaccaccacacgcgcccccaggggggg

SEQ ID NO: 7418 - DNA, 483 bp, Glycine max
  unsure (1)..(483): unsure at all n locations
  Clone ID: jC-gmfl02220085b04a1
gaaccttgagacatcatgaagatttcaagttccaagcaattggctgtgggatttgcacttggaaatgaaggataggcaacgttggagagctgaagaggatgctttacttcgtgcatatgtcaaacagtatggtcctagggaatggaatctcgtgtctcagcgcatgaacacacctcttaacagggatgccaagtcatgcttagaaaggtggaagaactacctcaaacccggcattaaaaaaggatctcttactgaggaagagcagcgtctagtcatcaatcttcaagcaacgcacgggaacaagtggaagaaaattgcagcacaagtccctggtcgcactgcgaagaggttagnggaagtggtgggaagtgttcaaagagaagcagcaaagggaaaccaaggggaatagctgcactattgacccaattagcgatagcaagtacgagcatatccttgagagttttgcagagaaactagtgaaag

SEQ ID NO: 7419 - DNA, 501 bp, Glycine max
  Clone ID: jC-gmfl02220085b04d1
gtatgaaaagatagggatattaataaccatatgtaacaacatttttcagaataatgacaggaacaaaactactatgactataaagttcatatcatataaattcaagacataataagtaaaagcaaactagatttcccaattgtgaatggtgtcactctatcttccatttggttcagtgagccttgatctgcaccctacctgttctagaaacttagtaaggcgcaagtgttttgcagcccattgttcagccaacttctgctccttgctttctgcatctcttctcaaccctgccaactgctccctatattctgcttcaattctatccaatgcagctgtttgctcctctctcagagctttgatcttcgcttcaatttcctccatcttctccctccttcggccggcctctcggactccaactgcagctccaccctacttaaccgccatgccgcctctttctatgttcggcaaagcatgatgcacttcattcactccttgagcact

SEQ ID NO: 7420 - DNA, 397 bp, Glycine max
  Clone ID: jC-gmfl02220085b05a1
ggagtgtctttgtttcctttcttgccctgtatgatatgagagcttgattcgttgccttcaaatcctgcaaggccagaggaagcaatcaactcaaacgacaccatgtctggaactatgtctcctaaaggttctttcaagaagaaagcaatcaatgcctctaacatgctgaggaattctttgaccagaaagggtacgcgaagcagtaaggtcatgtccgttgaaattgatgatgtccacgatgctgacgagttgaaaatagttgatgagttccgtcaagctcttattttggacgaacttcttgctgcagaacacgacgagtatcatatgatgcttagattcctggaggccaggatatttgatattgacaaaacaaagcaaatgtggtctgaaatgctca

SEQ ID NO: 7421 - DNA, 343 bp, Glycine max
  Clone ID: jC-gmfl02220085b06a1
attctttctccctatggtttctttggcgaacaaagtgtgttgatataaaaagaacctgggggcccgtatcggtcctttttgcctcaaacaaatgctttgcgacatctgatgctccaatgacttaaaacttctagattgcaccaacacctgctttttttgaattacccgctgctcccagtgaaaatgatcgattcgaagtctctaagaacgatggagtacttacctttcaaagggacaggctccacgatccctttagcacagaaatctgaattgaacatgaataaacctgattgtacgaagggttgacatgctcctgctcatccactgtggggatttcttgggg

SEQ ID NO: 7422 - DNA, 377 bp, Glycine max
  Clone ID: jC-gmfl02220085b06d1
ttgatctatatcttttagacgtattattattttatcgatagattaacgtgctgtttctctgtgcgacagcaggggatagagacgacggcgaagcgatacgctgtcaatggcacatcgcggagctgaagaaggtggcgcgatccgcggcgagtgcggtggtggaggctcaggagaactcggacgtgaagacgctggtgaagcacatgctcgggaagaagtactgtgacaaacgatgggaatgcaagggctggtcaataaactgttgtgccgtccctattactgattatttccagacctaccagttggagaatcatctgtacggggggaactctccggctgtgcacggcgcttgatttcgggactaccactcgttgatc

SEQ ID NO: 7423 - DNA, 343 bp, Glycine max
  Clone ID: jC-gmfl02220085b07a1
attctttcttcccatggtttctttggcgaacatagtgtgtagatataaaaagacccaggtggcccgtatctttactttttgccacaaacaatttctttacgacataagatgctcaaatgactaaaacttatagattgaacatatgcacctgcttttatagaattaccacgctcctcccagttcaaaatgatacgatacgaagactaccacgaacgattatttacttaacctatcacagggacaggctccgcaataccttaagcactgagataggaattgaacatcaataaacctgattagaagaagggttgacatgcacctgctcatacaatgtggagatttc

SEQ ID NO: 7424 - DNA, 373 bp, Glycine max
  Clone ID: jC-gmfl02220085b07d1
tttatttttatcttttagatcgattattattttaatcgatagtaaaacctcactgtttttctgtgcgacagctggtgacagaaaccacagcgaagcgatacgctgtcgatgtgcacatcgcggcgttgcagatggtggagccattctccgcgagcgcggtggtggaggctcaggagaactcggacgtgatgacgctggtgaagcacatgctcgggaagatttactgtgaccaacgatgggaatgcaagggctggtcgataaactgtaggtgcgcttctattactgattattaccagacctaccagttggagaatctcttctgcggggggcactctccggctgttcacgccgttggatttcgtgactaccactc

SEQ ID NO: 7425 - DNA, 437 bp, Glycine max
  unsure (1)..(437): unsure at all n locations
  Clone ID: jC-gmfl02220085b08a1
cttaatttttttttgtttttttttggcagccaaggaatgtatatataaaaataacaaagtcgcccataacggtcatatatgccagatacaaatttttcacgacatatgatattacaaatgactaaaacttctagatagcaacgaacaaaagctatataatgaattcccacactactacgcagttcaaaattattgcataccaatgatttcaagaacgcttattaactttcactttcaaagggattggtacaacaatatcatatgctcataaatctaatcttaagatgaagaagctcgtttggaagatgggctgaaaggaacctgctgagcgcatgtaaggatttcatggggcccagtctgttgtcgaccaacacctagaaggtcaagataatactggtgatgggaaacgatattgntcatagagtccacatgacctt

SEQ ID NO: 7426 - DNA, 447 bp, Glycine max
  Clone ID: jC-gmfl02220085b08d1
tcgatctataactagtagatcgagtattattttatcgattctttcccttctctttctctgtgcgacaccagatgatggagacgacggcgaagcgaaacgctgtcgttgcgccaatcgcggcgttgctgatggtggtgctattctcggcgagtgtggtggtggaggctcatgataactcggacgtgaagacgctggtgaagcacatgcacgggaagaagtactgcgacataggatgggaatgtaagggctggtcaattcactgctgtgacctcactattactgattatttccagacctaccagttggagaatctcttgtccaagcggaactcgtcggtggcgcacgccgtgggattttgggactaccactcgttgatcgccgctgtcgcgcttttcgagccgcatggggttcggaccaccgggaacaagacgatgctgttgatggaga

SEQ ID NO: 7427 - DNA, 429 bp, Glycine max
  Clone ID: jC-gmfl02220085b09a1
cttaatttttttttgattttgtttggcgaccaaggaatgtatatataaaaataacaaaggcgcccataacggtcatatatgccagatacaaatttttcacgacatatgatattacaaatgactaaaacttctagataacaaccaacagccagctgtgtaatgaattaccacactaccacgcagcttaaaattattgcgtaccaataatttcaagaacgcttattaactttcagtttcaaagggattggcacaacaatatcatatgctcatgaatctattcttaagatgcagaagctggtttggaagatggagtgacaggaacctgctgagcgcatgtaaggatttcatggggcccagcctgttgtcgaccaacacctagacggtcatgataatactggtaatgggaaacgatattggtcatcgagtcca

SEQ ID NO: 7428 - DNA, 484 bp, Glycine max
  Clone ID: jC-gmfl02220085b09d1
ttgatctatatctagtagatcgagtattattttatcgattctctcccttctctttctctgtgcgacaccagatgatggagacgacggcgaagcgaaacgctgtcgttgcgccaatcgcggcgttgctgatggtggtgctattcccggcgagtgtggtggtggaggctcaggagaactcggacgtgaagacgctggtgaagcacatgcacgggaagaagtactgcgacaaaggatgggaatgtaagggctggtcaatttactgttgtgacctcactattactgattatttccagacctaccagttggagaatctcttgtccaagcggaactcgccggtggcgcacgccgtgggattttgggactaccactcgttgatcgccgctgccgcgctattcgagccgcacgggttcggcaccaccgggaacaagacgatgctgatgatggagattgcggcgttcctcggacacgtcggcagcaagacctc

SEQ ID NO: 7429 - DNA, 362 bp, Glycine max
  Clone ID: jC-gmfl02220085b10a1
aaaagattatatgcagtaagactgtgaacatgttttactgtaaaagaaatggctacccgagtttttggagctaatcttttgatcaagaacaagaacgggtgtagcatattcttctaatctcttgatgacgtcacctgcatggatgatggatatagtttagagttcactacatctcttgatggcattaccttttctatatatggagcagcgtttgtttataatagcaccactgcgatataatttgtacttttactttatatccttgaaatgatagatttcaagagagtaagcatcattggacacgatacgatattaatgtaaaatttagttttatattttatttattgttactattagcctag

SEQ ID NO: 7430 - DNA, 362 bp, Glycine max
  Clone ID: jC-gmfl02220085b10d1
ctaggctaatagtaacaataaataaaatataaaactaaattttacattaatatcgtatcgtgtccaatgatgcttactctcttgaaatctatcatttcaaggatataaagtaaaagtacatattatatcgcagtggtgctattataaacaaacgctgctccatatatagaaaaggtaatgccatcatgagatgcagtgaactctaaactatatccatcatccatgcaggtgacgtcatcaagagattagaagaatatgctacacccgttcttgtacttgatcaagagattagctccaaaaactcgggtagccatttcttttacagtaaaacatgttcacagtcttactgcatataatcttat

SEQ ID NO: 7431 - DNA, 549 bp, Glycine max
  unsure (1)..(549): unsure at all n locations
  Clone ID: jC-gmfl02220085b11a1
gttgttgtaactcgttcttcttcttttgttgttctgtgtttgtgtttgttttttctctcacctgaaaatgtcttgctgcggtggtaactgtggttgcggaagctcctgcaagtgcggcaacggctgcggaggctgcaagatgtacccagacttgagctacactgagtcaaccaccaccgagaccttggtcatgggagtggcacctgttaaggctcaatttgagggtgctgaaatgggtgtgcccgctgagaacgatggctgcaaatgtggaccaaactgctcctgcaacccctgcacttgcaagtgaggtgttgggagagcaagcttcaagcagagatagcccttaattaggaataatgataaactattaatgtgtagctaaaaacttatgtattatgtctgtgatggttttcgtgcactctggtgttttgtgttaaacaaacatccttagaataaagtggtcatgtcttgcctttcagcaagttcaagtgttttggacttgtgatgggtgtgttaagctcatggntgcttctttttttttttttttta

SEQ ID NO: 7432 - DNA, 318 bp, Glycine max
  Clone ID: jC-gmfl02220085b11d1
aatattattagcatggatttaacattaaaattaaccgaactttatacatatgcgaccaattgcccaacattaagcaagaataaaaaataagcaaccagtaggttaactatcccattacagggccgaaacacttgaacctgattaaaggcaagacatggccactttattctaaggatgtttgtttaacacataacacccgatggcaccaaaaccatgtcaggcgttttacataagttgttagataccgattaatagatccttattattcctaatttagggctttctttggtcgaaacttggtctcacaaaacctgactt

SEQ ID NO: 7433 - DNA, 549 bp, Glycine max
  unsure (1)..(549): unsure at all n locations
  Clone ID: jC-gmfl02220085b12a1
attttattaaccgcttctacaaataagctatccgtgacacatgatgaagcagaggactatgcttctttgatcatgaaatttctagacaagaaaaacaaaggctacattgagatatctcaaatggggtctctattcaaggcaacanatctatcaaattcaaaggcacattctccaatgaaacaagtatcatcagtaggtagcagcacacacaatgttcttcataacactagcggtgacttttgtgaagaacaacaagaaccaatgtcaaggactgaagttttgttcagaacttattggagacgtgcttggattgttctggtttggttgcttgcatgcttgggattgtttgtgtggaaatttgttcaataccgccatagatcagggtttgaagtcatgggttattgtcttcctactgctaaaggtgcagctgagaccttaaaactcaacatggctcttgttcttcttcctgtttgtagaaacacaatcacgtggctccgcanacaccgtccgatcaactctgttgttccattcaatgacaacattaacttc

SEQ ID NO: 7434 - DNA, 539 bp, Glycine max
  unsure (1)..(539): unsure at all n locations
  Clone ID: jC-gmfl02220085b12d1
aaaaaaagatggacctagattaatatttaaagtaaagaccagataattacggagtatgtttgtaatagaatagtcactctcgtacttttgtaaaatttattttgtttatacttctcctaaaagtatgatttgctacctgaggtgtatagcaaataccgaaatagcatggatacacatactcaacttgcaacgaacaatgaagactgacgtattttctttcatttttcaattgccgaatcctcttcgaagttggtatgtcggagacaccagagcagcaaatatatttacaaattctctggcaaaatagaaggaaactgtccaagattctgaactgctttcctaattaaggaattgcttcaacagatatgttccatcagaaacaagtttagtaattttccttgtggaaaacaaatctagttgtggttttggtggaaaatttggtgcacaacttcttcaattctcttgctaatttagatggtccacantagaaaaccccaatcttagcttctccatgcttgcgagccantctagaaaatatg

SEQ ID NO: 7435 - DNA, 486 bp, Glycine max
  Clone ID: jC-gmfl02220085c01a1
aaagaaaataaaattgttcattgcttggcttttccaattaggaaagctagggcctatttgggtaaccctctttagaagcacttttaagataaataaataagaagaaaaataagacggacttcttcataaactaaaatgagttcttcattagctaatttgtagaaactctctcatatagcttctctaaaagatgagaggacatctacaaattagctaatgaatggctattttagtttatggagaaactaattttttttttttttatttctttatcctagaagtgcttttagagaaacttacccaaacaggtccgtagtctgagccattgttgaggtgaattaagggagtcttttccattgggcaagaccaacttccctaaaaaggaacaggtaaaatttgcagacgctgtttagctccatttgagttcattcagaatgtacatgctataattgtgtttccattcaagaacttcccgcactgatgtaa

SEQ ID NO: 7436 - DNA, 493 bp, Glycine max
  Clone ID: jC-gmfl02220085c01d1
gggacttcatagcttatagccaaacaataataaaaactacccaggctttgttcaattcctgcacataaaaccgttcctgttgctgtaaaagtgcaaactcaaaatgatgttaaaagaattatgtcaaggggtaatgccatgcagctgtgcaaatgataccttatagggcaaaagagttacgtgagacatatagctaattactagccagttcttgaaccaacaaataaaagtgaaaaccgttgtgagacatatcgatgtatctaggccattgcattggcatttttcacttactccaaattactctttacattttcattactaagaagcacaccttaagtcagcaattgggtctgtatttgctacttccatattttaccctcaatgtgcaagcctctctatacttgctaatcacagtaactatctacgtatgtgttccccatgcgaatgacagcagaattccaaaaatcatcacatgcctaatatacatgcaaca

SEQ ID NO: 7437 - DNA, 557 bp, Glycine max
  Clone ID: jC-gmfl02220085c02a1
gtcggcgatggtggcacaggaaagacaacctttgtgaaaaggcatctcaccggagaattcgagaagaaatatgagccaaccatcggtgtggaggttcacccattggattttttcacaaactgtggaaagattcgattttactgctgggatactgctggacaggagaaatttggtggcctcagagatggatactatatccatggacaatgtgctattatcatgtttgatgttactgcccggctaacatacaaaaatgttcccacctggcaccgtgatctttgcagggtctgtgagaacatcccaattgttctttgcggtaacaaggttgatgtcaagaacaggcaagttaaggcaaagcaggttacattccacaggaagaagaatttgcagtactatgagatttcagctaagagcaactacaactttgaaaagccattcttatatttggccaggaaacttgcaggtgatcctaacttgcacttcgtagaatctcctgcattggctccaccagaagttcaaattgatttagctgcacagcaacagcacgaggctgagct

SEQ ID NO: 7438 - DNA, 527 bp, Glycine max
  Clone ID: jC-gmfl02220085c02d1
gatcataattgattcagatcctcgaattcacatccaaaaatgtcaacactacaacccccaacagcacatacggtagcatacaaataccaacactcaggaagacagtccacaaacactcaagccctctactcaaaagattcatcatcatcgtcaggaaggggctgactagcagctgcaagaagctcagcctcgtgctgttgctgtgcagctaaatcaatttgaacttctggtggagccaatgcaggagattctacgaagtgcaagttaggatcacctgcaagtttcctggccaaatataagaatggcttttcaaagttgtagttgctcttagctgaaatctcatagtactgcaaattcttcttcctgtggaatgtaacctgctttgccttaacttgcctgttcttgacatcaaccttgttaccgcaaagaacaattgggatgttctcacagaccctgcaaagatcacggtgccaggtgggaacatttttgtatgttagccgggcagtaacatcaaacatgataatagc

SEQ ID NO: 7439 - DNA, 546 bp, Glycine max
  Clone ID: jC-gmfl02220085c03a1
taattttgtgcatgggttcccctttgtttgtgtctccatcggtcttacaattgggaaagttcctacagttggcgttgtttacaatccaataattaatgagcttttcactggaattcgtgggaaaggtgcttttctaaatgggaaccctataaaagtatcatcacaaactgaactaatgagcgctcttcttgtgactgaggttggaacaaaacgtgacaagttaacaatagatgcctgtacaaataggatcaatagcttgcttttcaaggtgagatcccttcgaatgactggctcctgtgctttaaacctttgcggaattgcatgtggaaggctggatgtatgctttgaacttggctttggaggtccttgggatgtggcaggcggtgctgtcattgttagagaagccggaggtgttatatttgatccgtctggtgcagattttgacatcacatctcagcgggtggcagcttccaaccctttcttgaaggatgcccttgttgatgttctgcaccaaatcgtgtgagaagcttactattaatcaatgac

SEQ ID NO: 7440 - DNA, 497 bp, Glycine max
  Clone ID: jC-gmfl02220085c03d1
agcgcgtcatacgcgagttacattccccggggtacgacagaggcctcagctacgatcgagcggggccccgcacctcttgtttgttctgttctcttttattcttattatattctattttgttctgtattgttattctattttcttcttgtattttttgtttctgggttcttttcttctgtagctacttctcttagtgtattgggaaacgaattgtaaaatcaaaaactgctgcactatgggcgcaatcgcgagcgttgacgatggtggcgctaatcgcggccagcgtggcgggggaggaaaagaaaaccaggacgctatgacgttggggagggcgaagcacggaaaaaagtactgcgaccgagggcgggaatgtacgggcaggtcaattcactgcaggggggggagtattacagcagaggggcagaactacccccgggggaatcaaatgtaaaagcggaactccccaatggcgcacgcccacgaaccgggggactacc

SEQ ID NO: 7441 - DNA, 524 bp, Glycine max
  Clone ID: jC-gmfl02220085c04a1
ctgcaatttttttttttttttttttgcaaccaagggatgtatatataaaaataacaaagtcgcccgtaacgtacatatataccagaaacaaatttttcacgacatatgatattacaaatgactaaaacttctagataacaacgaacacaagctatataatgaattcccacactaccacgcagttcaaaattattgcataccaataatttcaagaacccttattaactttcactttcaaagggattggtacaacaatatcatatgctaataaatataatcttaagatgaagaagcaggtttgggagatgggttgaaaggaacctgctcagcgcatgtaaggatttcatggggcccagcctgtgctcgaccaacacctagaaggtcaagataatactggtgatgggaaacgatattgatcatcgagtccacatcaccttgtccacaaacaccatccccatacagaatgttcattgtagtgccaaatccaggacgccgatcatccatagtatcattcttgctaggct

SEQ ID NO: 7442 - DNA, 368 bp, Glycine max
  Clone ID: jC-gmfl02220085c04d1
tcgatctataactagtagtcgtagtattatttcattgattctctgccttctctttctctctgcgacaccagatgatggagacgacggcgaagcgaaacgctgtcgttgcgccaatcgcggcgttgctgatggtggtgctattctcggcgagtgtggtggtggtggctcaggataactcggacgtgaagacgctggtgatgcacatgcgcgggaagaagtactgcgacaaaggacgggaatgtaagggctggtcaattcactgctgtaacctcactattactgattatttcctgacctaccagttcgagaatctcttctccaagcggaacttcgcggtggcgcacgccgttggattttgggactaccac

SEQ ID NO: 7443 - DNA, 311 bp, Glycine max
  Clone ID: jC-gmfl02220085c05a1
cagataccattacatatggaagaatatacattgttaaaaccgctttacctacatttcaatgtgcgtgtggtttaaatgccatgtacgattggttagactacttgcgagcacatttagagggggaatcaatagttccacagatgcactcaataaaattagccccctaccagagctcaaggatatctttcgcactgatggcgaacacctgctcaagtttgcaccacctcatgtcagcgaagttagtaaacactgcatggatgactgatgattaatcaggaagagagatgcttgatggcgttgatgcatgccta

SEQ ID NO: 7444 - DNA, 456 bp, Glycine max
  Clone ID: jC-gmfl02220085c05d1
ttattttttttttttggtgacatagagaaatttgatctgacattcatagatcagaatatcagacttacatacgggtgaacatgatacgggtgaacatgataggagcacaatactatacataaaaactgacacaacaccctattagatatgaaaaactagatagcatccaattacaaaacttaagcatacataagaaaattatgcacacataagtttgcacgtacatctgccaatgagaggtacgttggaaggaaagaaaaccacacaccacacaccacacactctcattagatagagatgctgttgggaattcctctgaaagtaaggtcttccccactggtaggaagaaacacagtgtaaggcatctgcgccggtgcattacggatcctaaagcttgaattcttgttcctccctgagatattgacctcaatctcctttaactagggtccaaactta

SEQ ID NO: 7445 - DNA, 397 bp, Glycine max
  Clone ID: jC-gmfl02220085c06a1
atgaattctagcattggtttgtttggcgaacaaagaatgtctatataaaatgggcgagggggcccataagagacctaattgcctcaaacaagggcttaactgacaaagacatgctccaatgactactacattgagatctgaacgaacagccgctatttaacgaactcctacgctgcctcgcagaggagaaagaacggattcgaatgatctcaagagcggatatttgcagacactttgaaacggaccgggccatcggtcctttaaggatacaaaaagggattttagatgaacaatacccggtcaggatccgagttgccaggaacgtggtcgagaaatgtgggggtttcttggggtccggactaggaacaaccatcaccaggaacgtctagaaaatgct

SEQ ID NO: 7446 - DNA, 317 bp, Glycine max
  Clone ID: jC-gmfl02220085c06d1
agtcggaggaacggactttatttatatttttctgatgaatcatcattatcaacgatactgtacctggggctatttctgtgcgacaccagaggatagagcctacggccaagcgaaatactgcagatcgcctatcccggcgtagcagaaggtggcgctattctgggcgagtgaggtgctggcggctctggataacttggacgtgatgacgctgatgattcacattcgcggtaagactttctgtgactaaggaagggaatgcaagggcgggtcaatacactgctgttgcctcactataattgaatagttccagacctacc

SEQ ID NO: 7447 - DNA, 329 bp, Glycine max
  Clone ID: jC-gmfl02220085c07a1
attatcttttgttttgttttctttggcgaacaaggggtgtatatataaaaagggcaggggggcccgttacgatccttaatacctcaaacaaattcttcatgacatctgatgttacgaatgactagaaattataggtagcaacgaacagccatctatttaatgtaataccaccctaccaggcggtttaatattattggatacgaaggctctctggaacgattgtttacttttgctttcaatgggacaggtacctaagtcccttaaggtcataaaaatgatttctacatgaacaaagccctttggaagaaggttagaaatgaacctgctca

SEQ ID NO: 7448 - DNA, 339 bp, Glycine max
  Clone ID: jC-gmfl02220085c07d1
tttattttttttttttatgtcgagtatcattttattcgattactctgcggggtgtttttctgtgcgactccatgtgatagagacgacttgcgaagcgtaacgctgaaaaatgtgccaatccctgcgttgctgtttgtggtgctaatctcttcaagttgttgtggtggtggctcaggataactaggacgtgatgacgctggtgaagcacactgctcaggaagaacttctgtgactaaggacggtaatgtaagggctggtgaatacactgttgtggcctcactattactgattatttgccgacctaccagttgtggaatctcttatgaaagcggtactctt

SEQ ID NO: 7449 - DNA, 458 bp, Glycine max
  Clone ID: jC-gmfl02220085c08a1
ctgaatttttttttgtttttttttggcagccaaggaatgtatatataaaaataacaaaggcgcccataacggtcatatatgccagatacaaatttttcacgacatatgatattacaaatgactaaaacttctagataacaacgaacaaaagctatataatgaattaccacactaccacgcagtttaaaattattgcataccaataatttcaagaacgcttattaactttcactttcaaagggattgggacaacaatatcatatgctcataaatctaatcttaagatgaagaaactggtttggaagatgggttgaaaggaacctgctgagcgcatgtaaggatttcatggggaccagtctgttctcgaccaacacctaaaaggtcaagataatactggtgatgggaaacgagattgttcatcgagtccacatgaccttgttcacaaacaccatccccat

SEQ ID NO: 7450 - DNA, 372 bp, Glycine max
  Clone ID: jC-gmfl02220085c08d1
ttgatctataactagtagatcgagtattattttatcgattctctcccttctctttctctgtgcgacaccagatgatggagacgacggcgaagcgaaacgctgtcgttgcgccaatcgcggcgttgttgatggtggtgctattcgcggcgagtgtggtggtggaggctcaggagaactcggacgtgaagacgctggtgaagcacatgcgcgggaagaagtactgcgacaaaggatgggaatgtaagggctggtcaatttactgttgtgacctctctattactgattatttccagacctaccagttggagaatctcttgtccaagcggaactcgccggaggcgcacgccgtgggattttgagactaccactcgt

SEQ ID NO: 7451 - DNA, 349 bp, Glycine max
  Clone ID: jC-gmfl02220085c09a1
ctgaaattttttttggttttgtttggcagccaaggaatgtatatataaaaataacaaaggcgcccataacggtcatatataccagatacaaatttttcacgacatatgatattacaaatgactaaaacttctagataacaacgaacaacagctgtataatgaattaccacactaccacgcagttcaaaattattgcataccaatgatttcaagaacgcttattaactttcactttcaaagggattggtacaacaatatcttatgctcataaatctaatcttaagatgaagaagctggtttggaagatgggctgaaaggaacctgctgagcgcatgtgaggatttcatgg

SEQ ID NO: 7452 - DNA, 469 bp, Glycine max
  Clone ID: jC-gmfl02220085c09d1
ttgatctataactagtagatcgagtattattttatcgattctctcccttctctttctctgtgcgacaccagatgatggagacgacggcgaagcgaaacgctgtcgttgcgccaatcgcggcgttgtcgatggtggtgctattctcggcgagtgtggtggtggaggctcaggagaactcggacgtgaagacgctggtgaagcacatgcacgggaagaagtactgcgacaaaggatgggaatgtaagggctggtcaatttactgttgtgacctcactattactgattatttccagacctaccagttggagaatctcttgtccaagcggtactcgccggtggcgcacgccgtgggattttgggactaccactcgttgatcgccgctgacgcgcttttcgagccgcaagggttcggcaccaccgggaacaagacgatgcagatgatggagattgcggcgttcctcggacacgt

SEQ ID NO: 7453 - DNA, 353 bp, Glycine max
  Clone ID: jC-gmfl02220085c10a1
agaagaagctttatataccgatgaaagaataccctggttacaatttcattgggcttattattggtcctcgaggtaacacccagaagcggatggagaaagaaactggtgctaaaattgtgattcgtggtaagggatcggtgaaagagggtaggcttcagcagaagagggatttgaaacctgacccttcggagaatgaagatttgcatgtgttagttgaggcagagacaccggagtcgcttgaggctgctgcgggtatggtggagaagctcttgcagcctgtggatgaggtattgaatgagcataagaggcaacagcttaaggagcttgctgcgttgaatgggacgatcagggat

SEQ ID NO: 7454 - DNA, 211 bp, Glycine max
  Clone ID: jC-gmfl02220085c10d1
attcttagttttaaggttgttagttcttacgtgcagttcacacagaaagaaagggggaccgggccaaggaggaaaccaccgggggggggcacccgaacaataatggccaagaaaacccggacgcaggggcccaaaaggaccccaagaatcccggagggggacacatgtaccccgactacgggaagcgctcgaggcgagggggggaaacaaa

SEQ ID NO: 7455 - DNA, 469 bp, Glycine max
  Clone ID: jC-gmfl02220085c11a1
gtgaaaacggattggagcaaggccccattcacagcctcatacagaaacttcaattcccaaacttcttcctccactggccaatcactggacgccacggggcaggcaaagatccgttgggtgcaaaagaattacatgatttacaattattgcactgatatcagacgtttccctcaaggccttcctccagaatgctccattgcatgagaatatttaattcaatgttgcatatcattataaaatgatcctcatgaacgtgacacacatgtgttgcctattacgttaatttactttcttgtgtaaattaatgcaactaaaactgttattattgttggtttgtgctttgttgagcactactccattgtttgtggcgaaagataattatagcgtgcaaaattatattcatggcagtgtatatgtgctgaaattgtaaagtattttcattaataaaattgttggagttttattattc

SEQ ID NO: 7456 - DNA, 432 bp, Glycine max
  Clone ID: jC-gmfl02220085c11d1
gaataataaaactccaacaattttattaatgaaaatactttacaatttcagcacatatacactgccatgaatataattttgcacgctataattatctttcgccacaaacaatggagtagtgctcaacaaagcacaaaccaacaataataacagttttagttgcattaatttacacaagaaagtaaattaacgtaataggcaacacatgtgtgtcacgttcatgaggatcattttataatgatatgcaacattgaattaaatattctcatgcaatggagcattctggaggaaggccttgagggaaacgtctgatatcagtgcaataattgtaaatcatgtaattcttttgcacccaacggatctttgcctgccccgtggcgtccagtgattggccagtggaggaagaagtttgggaatcgaagtctctgtatg

SEQ ID NO: 7457 - DNA, 595 bp, Glycine max
  unsure (1)..(595): unsure at all n locations
  Clone ID: jC-gmfl02220085c12a1
ggtaaattccctattgaatctctcacaatctcagaataaatctttaagggatggacttaagttagctgccaagggactcatcctgcctttccttccaagcaagcactggtccagcgtgatatcaacattctcccagaccgagacagacattctttcactgaatcctatatgctcaggaacagaatttgaaagacgaaacagaaatggatatatggatccaattagcgccatgacggctacagtggttccggtgcaaagtccaagtacacccagccacaatgttattgaaagaagagatcctagaacctggggggcaggtgcaagttcacatattgaagtggaaggtaaatggctaaaggggcacaacaaggctgggcttaaaaaagagctaaagatgttaagggagcttgcaaaagctagcttctctggggacacaagggttgatgaagccagtaccagctacactntaggggaacaacaacattcatcaggtgaaatctatttgggtatccaaagcgaagtattactgacactaatgcataanggccatacatcaccacatcctactngggaagatttggaaaatgctaatact

SEQ ID NO: 7458 - DNA, 265 bp, Glycine max
  Clone ID: jC-gmfl02220085c12d1
ggggggggaaaaatattaaaaaatttttagggaaaaaattcaccaaaaaaatggggggggaacaaggggggggccctttaaaaaagaagtaaaaaaaagatagggggccaaaaaccccaaaaaaaaccttccaaaaaaagggggggaaaaaaaacggggaaacgagaaggaaacgggatttccaaaaaatccccaaagggaggggggggaagttgggcccctaaggcaatggggtgaaaaaaccccgtcttgggaacaacccaaa

SEQ ID NO: 7459 - DNA, 340 bp, Glycine max
  Clone ID: jC-gmfl02220085d01a1
gccaattgttcttggtagggccgcctatttgtttcagcaagaattattggatttcatgcaaatttgtttggacacaagacaaaattctttttgctttgggaggacattgaagacatccaaatcattcctcctacattttcatcgatgggcagtccgataattgtcataactctttggccaggaagaggtgtggatgcaaggcatggtgcaaaaactcaagatgaagaaggcagactgaaattccggttccagtcctttgtgtctttcaatgttgcaaacaggactatcatggctctctggaaggccagatccttgagtcccgagcaaaaggtccagttag

SEQ ID NO: 7460 - DNA, 497 bp, Glycine max
  Clone ID: jC-gmfl02220085d01d1
gagatataaacttgatgaagtaaccaggccccaaaattgtttacaacaatcaaaacttctcttacaatgaccgagttaacattttgtcaactataccttggaagcaaagacaacagtagccatgccacatgatactggaccttcgttaatcgttaagaaaataccgagttaacaaacccaaatctggactgctagtagcaactgttgatgcaatctgagtatcttctgtgattttatagccattgaaagaaaagtaaaatctaccacagtcagatccagaggtcacgcttagattacatcactagcaggcttgctccactgatatttagcacaatcacatggaccttactcagagaccacatattccagtcccagctgaagaatggggataatatttgttctgaaagaacttccctaattgaacgagatcatattcagtatgttgattcattctttatttagacaaaaactccttctcaaccagactgaatgtcagc

SEQ ID NO: 7461 - DNA, 469 bp, Glycine max
  Clone ID: jC-gmfl02220085d02a1
aaagaaagtaaaagggtggattgcttggctgttccaattaggaaagctagggcctatgcgggtaaccctgtttacaagcacttttaagataaattaatgagaggaaaaataagacggacttcttcataaactaaaatgagatcttcattagctaatatgtagaaactctctcatatagcttctctaagagatgagaggacgtctacaaattagctaatgaatggctattgtagactatggagaaacgtaacagtcttttggttatttcttgatgctagaagtgcttttagagaaacttacccagacaggtccgtagtctgagccattgatgaggtgaattaagggagtcactttcattgggcaagaccaacttgcgtagagaggaacaggttaaatgtgcagacgctggttagctccatcggagttcattcagaaggtacatgctataatggcggttccattcaagaac

SEQ ID NO: 7462 - DNA, 340 bp, Glycine max
  Clone ID: jC-gmfl02220085d02d1
gagatataaacttgatgaagttaccaggccggactaaatggctcatcacccaacacttatataaccttgaccgggtttgcataatgcctgcaaaacaaagcgagcctggagatgagaaagcgcgcccccagaaagtggaccaaagaaaattgtcaagaggatacggcatgcacatacccaaatgatacctgataggggcaaatggtgacgcgagacaaatatctaatgagatgccagagcctgagccagaaaagtaaagtgtaccccggtgagagacatagggcaggctttaagcccatgactagcaagtttgcaccaacgacaaataacacattaccat

SEQ ID NO: 7463 - DNA, 563 bp, Glycine max
  unsure (1)..(563): unsure at all n locations
  Clone ID: jC-gmfl02220085d03a1
cggacacacaaaaaaagaaagtaaaaaagaaaaccctagaggagaagaagccaaaaaaaagaagccaaaaaaaaggctccaaagatgggtttcaaaagctcttctcttctatgcctagctcttttgcttgcatgctcttcggctattcatgcctttgacatcacacaactgctaggccaatatccagagttttccacattcaacaaatacctaacggaaaccaagctcgcagacgaaatcaacagccgcaacaccatcactgtcctcgccgttgaagactcagccatgaattccattgctgccaagtccccagaagccattaaggccatcattagcacccatgtcatccttgacttctttgatgagaagaagctcatggaagctcaagctaatagccaacagttgacaaccctattccaggcctcaggcattgcagtgaaccaacaaggcttcctcaaggttgcactcgtcggcgaaggcgagatncgccttcgctcggccggagtggcgccccagtcgacgccaccgagctcatgaggaccgcaccagcgagccctacaaca

SEQ ID NO: 7464 - DNA, 540 bp, Glycine max
  unsure (1)..(540): unsure at all n locations
  Clone ID: jC-gmfl02220085d03d1
agtcttcgaaggaactggtgccttggcactctgtgctggcacaggtgactttgcaaccggtgtcggaatgggtgccttggcaccttgtaatgatgacataggagctttggcaccctgtgcagcaacgggagcattggctccttgtgaggattgtgcaccagatgatgaggctggggtttgtgaatcaacacctgggactaggatgggtttggtgacttggagaatggagatgttgtagggctcgctggtgacggtcctcatgagctcggtggcgtcgactggggcgccactcacggccgagccgaaggcgatctcgccttcgccgacgagtgcaaccttgaggaagccttgttggttcactgcaatgcctgaggcctggaatagggttgtcaactgttggctattagcttgagcttccatgagcttcttctcatcaaagaagtcaaggatgacatgggtgctaatgatggccttaatggcttctggngactcggcagcaatggaattcatggctgagtcttcaacggcgaggacagtgat

SEQ ID NO: 7465 - DNA, 381 bp, Glycine max
  Clone ID: jC-gmfl02220085d04a1
cttcgtggttttttttttgttgttcgcactcaaggagggtatatcttgggcttgcttatcagtccgtagggtgccttggtaccgaacacgctatacattggacgtgatagagcgaaaatgactgaacactatctatgcggcaatggctgaagctgtttttttaatgactgaagtactatgtactgtaataaatgcggactccaatcctttaaagagactttagcaaattaagctttagactgtacaggaactacgagtccatgcggtgcttaatatattatcatgaggacacaacacgtttggagcaacaagcgtgaggaacctgctcgaaacttttaatgacactatggtgacccctatgcatgtgatcgacatgtacat

SEQ ID NO: 7466 - DNA, 378 bp, Glycine max
  Clone ID: jC-gmfl02220085d04d1
tctttatctataactagtagtcgaagtattatttcatcgattctctgccttctctttctctctgcgacaccagatgatggagacgacggcgaagcgaaacgctgtcgttgcgccaatcgcggcgttgttgatggtggtgctattctcggcgagtgtggtggtggaggctcatgagaactcggacgtgaagacgctggtgaagcacatgcgcgggaagaagttctgcgacacaggatgggaatgtaagggctggtcaatttactgttgtaacctcactattactgattatttcctgacctaccagttcgagaatttcttctccaagcggaactcgccggtggcgcacgccgtgggattttgggactaccacatcgttca

SEQ ID NO: 7467 - DNA, 335 bp, Glycine max
  Clone ID: jC-gmfl02220085d05a1
actaaattgttcaatgcttggcttttccaaaaagagagttagggcctatgtgggagggcgcccgtagaggccctttttaccacatacaaatgcttcacgacatatggatgctccattgactacgacctttagatatgcaccaccaaactgcgataaacgtattcatacagttcctctcagagcagaaaggacgtctaccaattactctaagaacggctattttcgttcacggtgaaacggactgggtcagcgataacttatgcacacaaaacggattttaagataaagaaacccgtttggacaaagggttgaaaggctcgtgctcggaaaatgag

SEQ ID NO: 7468 - DNA, 487 bp, Glycine max
  unsure (1)..(487): unsure at all n locations
  Clone ID: jC-gmfl02220085d05d1
tggtgcgtcgctctctgcaggtatccccggtccgggaatataattaccnncgggtcgatcgatgcctcaacttatgtcgnngcggccggccctcttgatttattattctttgttgatcgtagtaattattttcattcgataactataacgtactctttttctgtgcaacaccagatgatagaaacgacaggcgaagtcgaaactgctgtaagaagcgccaatcgcggcgatgcagaaggtggcgctattctcggcgagtgcggtgttggcggctcaggagaactcggacgtgatgacgctggtgaatcacatgctcgggaagaagttctgtgacaaaggatgggaatgtaagggctggtcgataaacatgcgtgccgtcactattactgattatgccccgacctaccagttggagaatcatctgtcgaggcggaactctccggcggcgcacgccgctggatttcgggactaccactcgttgatcgcc

SEQ ID NO: 7469 - DNA, 452 bp, Glycine max
  Clone ID: jC-gmfl02220085d08a1
cttaattgttttttgattttgtttggcgtgcaaggaatgtatatataaaaataacaagggcggccgttacggtcatatataccagatacaaagttttcacgacatatgatattacaaatgacataaaacttctagatagcaacgaacaacagctatataatgaattaccacactacttcgcagttcaaaatgattgcataccaataatttcgagaacccttattaactttaacttttaaagggattggtacgacgataccatatgcgcatcattctaatcttaagatgaagaatcacgtttgaaagatgggtcgacaggaacctgcttagcaaatgtaaggatttcatggggaccagactgtgttcgaccaacacctagaaggtcaagatatttctggttgtgggaaacgatattggtaatcaagtacaaatgaccttggccacagacacca

SEQ ID NO: 7470 - DNA, 312 bp, Glycine max
  Clone ID: jC-gmfl02220085d08d1
tttatctttttctattattcagtagataattttatcgattctatcccttctctttctctgtgcgacaccagatgatggagacgacggcgaagcgaaactctgatgttgcgccaatcgcggcgttgttgatggtggtgctttttccggcgagtgtggttgcggttgcttttgagaactcggacgttatgacgctggtgaagcacatgcacgggaagaagtactgcgacaaaggatgggaatgtaagggctggtcaattcactgttgtaacctctctattactgattatttccagacctaccagttggagaatc

SEQ ID NO: 7471 - DNA, 429 bp, Glycine max
  Clone ID: jC-gmfl02220085d09a1
gaagcagaagggttcctcactctcttcatctgattgaacaaaatgtacacctcgaggaagaaaattcacaaggataaggatgccgagcccactgaatttgaggagacagttggacagtacttgttcgacttggagaacaccaatcaggatctgaaaagtgacttgaaagatctctacataaaccaagctattcaaatggatgtggctggtaatcgcaaggctgtagtcatctatgtgcctttcagattgaggaaggcattccgcaagattcatcttcgacttgtcagagagttggagaagaagtttagtgggaaggatgttgtcttgattgccacaaggaggatcgtgcgaccgccaaagaaaggctctgctgttcagcgaccccgaacccgcactatgaccgctgtccatgatgccatgctggaggat

SEQ ID NO: 7472 - DNA, 362 bp, Glycine max
  Clone ID: jC-gmfl02220085d09d1
aaacaaaaaaagcccggggtcaatttttttcctaaagggaaccccttctaaaccccattttttccccccagaaaaccccccccccttgggggctttaagggccccagggggaaaaaccctaaaataaaattcccaaaggcaaaattttgggttttggtcaccaaaaatatggttttccaacaaaaaaatttgccaaaaaaacaattcttctttaaaccaagccccagctttccgggcttcggagatgggatccccaaaaaccccattttttccaaaaagcttcctgtaacccccaaaaaagggccccccctctgcccccggggtggggccctccctggggccccaaaaaccctctttttttt

SEQ ID NO: 7473 - DNA, 419 bp, Glycine max
  unsure (1)..(419): unsure at all n locations
  Clone ID: jC-gmfl02220085d10a1
ggagtgtctttgtttcctttcttgccctgtatgatatgagtgcttgattcgttgtcttcaaatcctgcaaggccagaggaagcaatcaactcaaacgacaccatgtctggaactatgtctcctaaaggttctttcaagaagaaagcaatcaatgcctctaacatgctgaggaattctttgaccagaaagggtaggcgaagcagtaaggtcatgtccgttgaaattgaggatgtccacgatgctgaggagttgaaaatagttgatgagttccgtcaagctcttattttggacgaacttcttcctgcaaaacacgatgattatcatatgatgcttagattcctgaaggccaggaaatttgatattgagaaaacaaagcanatgtggtctgaaatgctcaaatggaggaaggagtttggtgc

SEQ ID NO: 7474 - DNA, 469 bp, Glycine max
  Clone ID: jC-gmfl02220085d10d1
gtactagatattgatttattctgtacggacataataataggacaggctttgcataatgtgcagagcgccatagccctatatatactatacatagagagtaagtcctatcctaatagagaccaaaattctgatcagcataatttatatattttgagcattatgcttatattctggacgttttgaatatttactagttcgcatattgaacatttttgtaagagggcatttgggaagtctcctgaaaggcagaaactaaaatctaattccccgttaatgtctggacctcttgttagggcatccacggatttgctctttaaaagaagaaaaatctcttgttcttcttcgtattctttttgtcaagataagccgaaagctcttcttgcttaacaagtgaagcctccagagccttcttggtagccaaaagttggttctccaagtcatctgctcgagttataagtgcattcagcat

SEQ ID NO: 7475 - DNA, 385 bp, Glycine max
  Clone ID: jC-gmfl02220085d11d1
gattaatatcaaatctcaacctcaatcattatttaatggggaagtaaaatgcgagaacaaatctatctatttgctatatgcctatcccatcaatattgcaaacaatttaaactacttatcctcactcttatcccccaactccatcccaaaagatagggactgggaaacaatccttaaatttgcaaaacttatcacacattgtcagtgattacatattggtcacatatatgatgctgcatatcataccttcaggcgttatcaatatattaactgatatactaagacttaacctcaatgaatgcatgttgggaatcgcaccctacatttcccaaaaggctttctgaaatctgaagcccaatcacgtgaaggatggcatcaatccatt

SEQ ID NO: 7476 - DNA, 490 bp, Glycine max
  Clone ID: jC-gmfl02220085d12d1
gattaatatcaaatctcaacctcaatcattatttaatgggtaagtaaaatgcgagaacaaatctatctatttgctatatgcatatcccatcaatattgcaaacaatttaaactacttattctcactcttatcccccaactcaatcccaaaagagagggactggtaaacaatccttaaatttccaaaactcatcacacattgttagggattacatattggttacatatatgatgctgcatatcataccttcaggggttattaatatattaatctatatactaagactaaacttcagtaaatgcatgtttggtatcgcaccctacatttccaaaaaggctataagaaatctgaagcaaaatcacgtgaaggatggcatcaatccattcacagtttcatctagggaaacgatgcttggtgagtccaataaagtaggcttccttatccagtattgctgaaacctctgccttgcatactccttatagtcaaaatc

SEQ ID NO: 7477 - DNA, 476 bp, Glycine max
  Clone ID: jC-gmfl02220085f01a1
cgaagaaggtattgacgtcgatgatgaaaatgaaattggtgaaaacattactgcttctcctttgtgtgaaactcttctgttatgcagtgattggtgctcctcaaacttgtcctgctaacaatgaggataaatgcggcgattcagatgaatggaaaggggagtttttccctgacattcccaaaattaaatatgagggtccgtcaagtaagaatgtgctttcatttaaatggtataatgcagaggaggaaattcttgggaagaagatgaaggattggttaagatttactgttgcattttggcatacattccgtggaacaggtgctgacccatttggtgcacctaccaaatactggctatgggaagatggtaccaattcattaaacatggctcatagacgaatgagagctaactctgagttcataagcaaactccgtgttgactttaggtgtttccacgacagggatatagcccctgat

SEQ ID NO: 7478 - DNA, 529 bp, Glycine max
  Clone ID: jC-gmfl02220085f01d1
gaaactaaaattaattaactcaagcatgctcaaagccagggaagctatgcatcacgtagttttatacataagctaacatgcacttcaccaggcttcgtatccacctagcagataacagcttcacacttatattttcccaaggaaaacgaagcaggcataagtcaatcttaatttccttttattagtaaacctaattataccgaattgttcctaatataatagacgaaaaatagccaccacacacggctagattctactttctacagaacagattggaggatcatctcggctagctcctgtttcgcagaagcaacctttggttctccccattccttgaccttcttctcaagcagttcaaagtcagccttaccagcctctatttgagccccaatttcagtgtcaaaactctgataacgcttacgaacaagctcagcaagagaaccatcctcaatcaacttggcagcattcctcaggccacgggccagggtatccattccaacaatgtgggctatgaacaagtcttcaacat

SEQ ID NO: 7479 - DNA, 544 bp, Glycine max
  Clone ID: jC-gmfl02220085f02a1
gccggatttctccaactcggtgaaactcaagtacgtgaaactagggtaccaatacctggtgaaccacattctgactctcactctcatacccatgatgatcgccatcttcatggagattctacgcttaggccctgaagagatcctgaacctctggcactccctccacttggaccttgtccaaatcctctgctccgccttcctcatcatcttcatcgccaccgtctacttcatgtccaaaccccgcaccatctacctcgtcgactacgcctgcttcaagccacccgtcacctgccgcgtccccttcgcaaccttcatggaacactccaggctcatccttaaagacaaccctaagagcgtcgagttccaaatgcgtattctcgaacgttccggtctcggtgaagaaacatgtctccccccagcaatccactacatccctcccaagcccaccatggaggccgcccgaggagaagccgaacttgttatcttctccgccatggattctttgttcaacaaaacaggtctcaagcctaaggacatagatatt

SEQ ID NO: 7480 - DNA, 440 bp, Glycine max
  Clone ID: jC-gmfl02220085f02d1
aaagcaaagccctttttacatttcaaggcctaattacaagctttccaataattgggcaagcaaatacaaacttgaaaaaaaaaccgggttttccttacgtacatgtggcccaaattcatgaataaaccccgaccccctcccagttggggaacgatttctgggctaattcacaagaggcccatgtaattgttttgaaataaaccgaaaaaaaaatttttttttaaaagggggatttgatttatgataaaaaaccccatttgactgacaaatgagagaaatttgggggacggcttcggggagcaaataaagaagggttatgagaacccatctatttttttttttcataaaaaaagcaattatctttttggttttgaacaattctccatcctagagcttaacgatcccaggaatatcgaccgggtaacgaacaatgcaatcag

SEQ ID NO: 7481 - DNA, 150 bp, Glycine max
  Clone ID: jC-gmfl02220085f04a1
cttttcatgtggtaatttgacattttatcaatatgatcattattattgccatttgtgtatttaacattcattaattgtaatggaaataaatatcactcttggctgaggttgcaattatttagatctatctgtttattaataagtcatttt

SEQ ID NO: 7482 - DNA, 150 bp, Glycine max
  Clone ID: jC-gmfl02220085f04d1
aaaatgacttattaataaacagatagatctaaataattgcaacctcagccaagagtgatatttatttccattacaattaatgaatgttaaatacacaaatggcaataataatgatcatattgataaaatgtcaaattaccacatgaaaag

SEQ ID NO: 7483 - DNA, 484 bp, Glycine max
  Clone ID: jC-gmfl02220085f05a1
gcgacgccgctcctaaccctaacgcgactaccaaaccctccgtctacctccaagacacggaggagctgaagcgagtcttcagccgcttcgacgctaattgcgacggcaagatctccgtcaccgagttggacaacgtcctccgctccctcggatccggcgtcccgccggaggatatccagcgcgtcatggacgacctcgacaccgaccacgacggattcattaacctctcggagttcgccgccttctgccgctccgacaccgcggatggcggcgacgccgagctccacgatgctttcaacctgtacgatcatgacaagaacggccatatctccgccacggagctctgccaggtgctgaaccgcctcggaatgaagtgctccgtccaggaatgccacaacatgatcaaattcgtggattccgacggcgacggcaacgtcaactttcccgagttcaagcggatgatgagcaacaatcgtgaaaatgc

SEQ ID NO: 7484 - DNA, 402 bp, Glycine max
  Clone ID: jC-gmfl02220085f05d1
cccccccccggcctttttttttttttcaaggggggttgggccctcccccccccttttataaaccaaaaacccaagccccccaaaggggtttttttccccccttggcaccctttcccccaggggggccccccccccccctaaccccggggaaaatgaccttccccccccccccgaaacccccgggttttacccttggggggccccccccgggggggcccttttttccggggggggcccccccccggcaaaccccccggggggaaaaatggccccccttttcataacccccccgggggaaaccccttggggcccccgccccccccccccccccgggtgctgacccccccaaggcggccccccccccgggggtaaagcacccccccggggcggggggaagggccc

SEQ ID NO: 7485 - DNA, 386 bp, Glycine max
  Clone ID: jC-gmfl02220085f06a1
cttaattctttttttatattttttggcgagcaaagaatgtatatataaaaagaacaagcgggcccgtatcgttcatatttacctcatacaaatcttcacgacatatgattttccattactaaacttctagatcgcaccaacaccatctatatcatgaattaccacgctgcatctcagtggaaaatgattcaattcgaataatttcaagaacgcttatttactttcactttcaaagggattgagaccacgatatcgtatgctcttaaatctctacttaacattcagaaacctgtttgaaaaatgggttgacatgcacctgctcagccaatgtaaggatttaatggggcccgagtctggtgcaaccaacacctccaccgttaatataa

SEQ ID NO: 7486 - DNA, 402 bp, Glycine max
  Clone ID: jC-gmfl02220085f06d1
tttatttatatcttttagacggagcatgattttatcgattatatcccttctctttctctgtgcgacagcagatgatggacacgacggcgaagcgagacgctgtaaatgcgccaatcgcggcgacgacgatggaggtgctataccccgcgagtgcggtggtggcggctcaggagaactcggacgtgaagacgctggtgaagcacatgcgcgggaagacttactgtgacaaaggatgggaatgtaagggctggtcgatacactgttgtgccgtcactattactgattattaccagacctaccagttggagaatcacttctccaagcggaactcgccggcggcgcacggccgtggattttgtgactaccactcgttgatcgccggtgtctagcttttcttgccgc

SEQ ID NO: 7487 - DNA, 408 bp, Glycine max
  Clone ID: jC-gmfl02220085f07a1
cttaattcttttttgattttgtttggcagccaaggtgcgtatatataaaaagaacaagggcgcccgtaacggtcatatatgccagatacaatttcttcactgacatatgatgttacaaaggactaaaacttctagagagcaaccaacaccagctgtattatgaattaccacactgccactcagttgaaaattattgcatacgaatgatttaaagaacgcttataaactttcactttcaaagggactgggaccacgatcacgtatgctcatcaatctatactctagatgaagaaacctgtttgtaagatgggttgacatgaacctgctgagcccatgtaaggatttcatggggcccggtctgtgatcgaccaacacctgcacagtcaagataatgctggtggcgggaaa

SEQ ID NO: 7488 - DNA, 448 bp, Glycine max
  Clone ID: jC-gmfl02220085f07d1
ttgatctatatctattagatcgattatgattttatcgatgctatcccttctctttctctgtgcgacggcagatgatggagacgacggcgaagcgaaacgctgacgttgcgcacaatcgcggcgactgcgatggtggtgctattctccgcgagtgcggtggtggcggctctggagaactcggacgtgaagacgctggtgaagcacatgcacgggaagacgtactgtgacacacgatgggaatgcaagggctggtcaatacactgtcgtgccctcactattactgattatttccagacctaccagttggagaatctcttatccaagcggaactcgccggctgcgcacgccgtttgattttgggactaccactcgttgatcgccgctgtcgcgcttttctagccgcaaggattcggtaccacctggaacaagacgatgcagatgatggaga

SEQ ID NO: 7489 - DNA, 427 bp, Glycine max
  Clone ID: jC-gmfl02220085f08a1
cttaattcttttttgattttgtttggcagccaaggtgcgtctatataaaaataacaagcgcggccgtaacggtcatgtaaacgagaaacaattttttcactgacatatgatgtttcaatgactaaaacttctagagagcaacgaacaacagctatgtcatgaattaccacactgctactcagttcaaaattattggataccaatgatttaaagaacgattataaactttaactttaaaagggactgagaccacaataacgtgtgctcatcatgctctacttaagatgaagaaaccggtttgtaagatgggttgacatgaacatgctgagcaaatgtaaggattatatgggggccagtctggatcaaccaacacctgcaccgtcaagataatgctggtgacggtaaacgatatgggtcatcaattcca

SEQ ID NO: 7490 - DNA, 315 bp, Glycine max
  Clone ID: jC-gmfl02220085f08d1
ttgatctatatcttttagatcgagtatgattttctcgatactctccctactgtttctctgtgcgacaccagatgatggagacgacggcgaagcgaaacgctgtaaaatgcgccaatcgcggcgctgacgatggaggcgctattcgcgcgcagtgcggtggtggaggctcaggagaactcggacgtgaagacgctggtgaagcacatgcacgggaagacgtactgcgacaaacgatgggaatgtaagggctggtcaatacactgttgtgacctcactattactgattattaccagacctaccagctggagaatctc

SEQ ID NO: 7491 - DNA, 401 bp, Glycine max
  Clone ID: jC-gmfl02220085f09a1
cttaattcttttttgattttgtttggcgacgcaaggtacgtctatataaaaataacaagggggcccgtaacggtcatataaaccagatacaatgtcttcactgacatatgatattacaaatgactaaaacttctagagaacaacgaacaacagctatattatgaattaccacactactactcagattaaaatgatccgcatacgaatgatttagagaacgcttataaactttcactttaaaagggactgagaccacgataacgtgtgctcatcaagctatactttagatgaagaaacctgtttggaagaagggttgacatgaacctgctgagcacatgtaaggatttcatggtggccggtctgtgatcgaccaacacctgcaccgtcaagataatactggt

SEQ ID NO: 7492 - DNA, 394 bp, Glycine max
  Clone ID: jC-gmfl02220085f09d1
tttatttatttcttttagatcgagtatgattatatcgattctctcccttctctttctctgtgcgacagcagatgatggagacgacggcgaagcgaaacgctgtaagttgcgccaatcgcggcgtctgcgatggaggtgctattctcgccgagtgcggtggtggcggctcaggataactcggacgtgaagacgctggtgaagcacatgcacgggaagacgtactgtgacaaaggatgggaatgcaagggctggtcaattcactgttgtgacctcactattactgattatttccagacctaccagttggagaatctcttgtccaagcggaactcgccggcggcgcacgccgttagattttgggactaccactcgttgatagccgctgccgcgcttt

SEQ ID NO: 7493 - DNA, 285 bp, Glycine max
  Clone ID: jC-gmfl02220085f10a1
cataaatctcttttgaaacaaactgtcgctcattatgcatcctgacaaaatgctgaagcaatacatttggtgtggtgtgaaagagaacaaccatccgagaggcttaaaacatatctgaataatattgcggttttgaagccacaaacagctcatataccaaaatttacattttacactcgtgcatatggtgagccaaacagcatgtttaagcgaatccagaacctcttgacatatgcaatgttttgagacgacgatgatgtgggtgctccatgctctactctagat

SEQ ID NO: 7494 - DNA, 438 bp, Glycine max
  Clone ID: jC-gmfl02220085f10d1
tttatttttttctttttgttttatttttattttatcttattctttccctcacgctatctctaggcaacgccagatgatggagacgactgctaatcgacacgctgacgttgtgccaatcgcggatatgctgaatctatgtgctatgcgcgccgagtagaggccaacgtgtgcaagcacagccaggacatctggacgctgccaaggaacgacttgagaaggcatgtgctgaagccagggtggacttgtacggtctgacagatgctactgaggcaccactgtatgactaacgcgctgctgacctatgagctgctgcatatgctctagaccgagatatggaaaattgcgcacgccatcggactgcatcactatccagagaatgtcgacggtgacgagcatctgacactgtctggggacgacccgactcttaatcctacgata

SEQ ID NO: 7495 - DNA, 543 bp, Glycine max
  Clone ID: jC-gmfl02220085g01a1
gaaaaacattatagcttccgagttaattttctaagttaatctggttgattgctgaaatggaatgcctatatcttagagctcaaaatttgttgggactttgtgtctttgaggttcctttgattaatttcaatttactacgagtgaagtagttctgttagtatgaaatttcaccttatgccgaaggagagggtagtttcctttcgtttgaggctcagtgcatgtttggatttgccttgttatttgtttgaaaatagcttatcaccaaaatggtgttaagcaaaacttattttggatcaatgcaatgctgctgtccctgatcttacattttgggtaatgctttctttctatcttcagatgcaagtcatgcaaccatgtcactaccactgatgatgtcgaggattgggtgtaccaccaattagagaacacgactcatcttttacatggcgtagtacacaccaatggatatgggcacctttcttcggttaatggcagagaagggggctctagatttctttctggtattcatattatggatttctggga

SEQ ID NO: 7496 - DNA, 496 bp, Glycine max
  Clone ID: jC-gmfl02220085g01d1
gaactgaagaaaagaaagttgaatatgctcacatttcccctctccacccttcacaggttagactatatacacaaaataaacaaccgaaggtagaacctgctgaaatatgaacaagacatgccccgtccctgaacctactacctctaaggcctatctgtgttatgtacaggtactttcaggccaaagcaaaataaacagaagaaaaaggagcttttcatacacatcttatctgactaattaaataacatcagatggcactggcaagccgtttctgaagcaactactaccactaacgttagtcacagtctcatctttgcagtgcccactagatttgagttttgattcagagtgttggcatttctggcaaacaaaacgtgctggaacaggatcagtgtcgtggatgtcagaacacctggtgtgtcgccacactccacatatatcacacgccaacattctctctccatcatcatccttggctccacagctgcaatctacc

SEQ ID NO: 7497 - DNA, 450 bp, Glycine max
  Clone ID: jC-gmfl02220085g02a1
ggcgactctcttatttacaaaattatggggtggtggacatgcgtatggcgcctaccgactgtgacatgctgggattgtcggttttgacaccctattatacagaagaagagggatggtccttgcctgaattggatacacagaatgaggatgggggatcattactgttctactagctacagatttacctagatgaatggcacaattttcggggacgagggaaacatactgaggaggatagtacagggcgtgaatttcatgagatatgaggagatcgtcgagctctgccagcatatagagggcaggcattgaccacaacggaaagaggtctgaggtattatataaaagctggaccactccagggtttaggtgatatggccgaagattaagagtcgatgggaggctgtagcgccctgggaatctcatatgacatttcaatgggggaaaggtgat

SEQ ID NO: 7498 - DNA, 455 bp, Glycine max
  Clone ID: jC-gmfl02220085g02d1
agtaaactcagcacgaagttgcacacctaaatgaaaataattgtttctacataggtggtgggttacaacataaaaattctttcaccaaaaaagaatagaaaatttcataaaaatataaaataagcaacgctatttgtaccaaaaaaaacatatcatccaagttgcgctcctccaagtaagagattcttgccgaacccaccagattgtaacctctgaacctgatctgaattttgcataacaagctgtgatcataattttattccataccccagaaaagggagaataaaaattcaatgcccaattaagagatgtgagatctaataaattgacaagatgttgataattaattaatagtctctcaaaagggtggaaaagagagaaactttgattgatgaacatcaatcttttcaaaaatccaaatcaaccatgagtgttaaaagcttcccacaacaaat

SEQ ID NO: 7499 - DNA, 489 bp, Glycine max
  Clone ID: jC-gmfl02220085g03a1
atagacacaaagatatacacatatagggagaggctgaaggaggggcatcagatccctactttgtataaatggggttgtctttctaaacaaccccatcacatcattaagagggggggatcgatccttgatttgtgaatttgcttgcattagcaagatcatatatattcattcatatacacaattacatatcaagatcacattttttttggtgttcttgatctcataaacaacatggagggtcagaacaagaagtacatctcatctgaggagctgaaggagcacaacaagtcaggggatttgtggatttcaatccaagggaaggtttacaatgtttcagattgggcaaaggaccaccctggtggagaggttcccttgttgaaccttgcaggccaggatgtgactgatgcattcatagcataccatccaggctcagcatggaagtatcttgatcccttcttcacagggtaccacctgagggatttcaaggtc

SEQ ID NO: 7500 - DNA, 343 bp, Glycine max
  Clone ID: jC-gmfl02220085g03d1
acacaacatatataattttattatagaggctctgctctgtattcaaacctcactcatcaattacacagctcaaacaatacaatgataataaataatggtaggaataaagtatatggtaaatgatgaatcaataatacaataagaaacttatggtagcaaccataaacatagtactacatgtgaatttaaatgtcacggtttcttctacattcaagtggaagctgagggtagcggcttctgtcagtgcactagtctgagatggtgtatttcctgcgcacccacctgagccatctccgttgagaagcatcaagatcatgaaactgtgcttgatcccaccacctct

SEQ ID NO: 7501 - DNA, 550 bp, Glycine max
  Clone ID: jC-gmfl02220085g04a1
gcaaaatttaccgtgcgagagagttggattcatgcgctgggaactactaccaaatcatgagtgtgcctaattcctcctgtaatatccatgaaaaggaggagcaaggagacgatgagaagggcaagcttgtatcattaggacaaatgaatagtttaagtgtgaaagaggatagtagaacatcaaagaacattagttctgaaggtgaaagaagaacaccagaaatcatgggaagatgtgcatcctggtgggcaaccttcacattttttgtgtgtgtgtgttcattaaaattcagcaaaccacttctccaaccacaaggacccaattcactatggcttgccatattaggaatgttcagttttactgtgtttgtatctgctgcttctgatatggttgatggtgaagcacagctcactcgtatgcagataactgttatgctcagtgccttcttggctctgctgttagcttaattagacagatttcatatgtgtacttatgtttcctttagccatggcgggaaaagatcgtgtaatctttttatttacataatttc

SEQ ID NO: 7502 - DNA, 403 bp, Glycine max
  Clone ID: jC-gmfl02220085g04d1
cccagaaaatggtccggccattggaacgggggttggaccttccccaaccttggtttattggtatgccaatggaattatggtaattaaaagaattccaccacttttttcggcctgggttaagggaacctataggcccctttggaaaccggcttattaagcctaccaccaaacccaaaagggcctgggccttaccggtatttggcttccaagggaccggggtttaaccaccacccttaccggagccggcggttccaaccccggtaaactggacctttcttatttgggcaggccttagggattggggccctgggggtggagaaatgggttggttgatttttatggaccccaaccccccaaaaatggggagggtggccacccaggaggcccatttcccaaggattct

SEQ ID NO: 7503 - DNA, 449 bp, Glycine max
  Clone ID: jC-gmfl02220085g05a1
cgtgtatgtatgtagtccatactctggactctctcttcttctctttgcttctcttctttctctctcacgcaacaatggctcatctcttcagagacctctcattgggccactccaagagagactccacgccgccgccgccgataatgcctcccaagccctccgccgtcatcgccgccgacgacctcccctctccgctcggccagctcgccgcctccctctccgattccgacctcgcattaaccgcctacgagatcttcgtcgccgcgtgccgcacctcctccggcaagcctctcagttccgctgccaaccactcctccaccaattcgcccagtcagaactcgcctaactcgcccgcgctccagcgatccatcaccttcaccggcgccagcaaggtcaagaaggccttcggcctgaaatccccaggttctgcctccagaaagagccctggc

SEQ ID NO: 7504 - DNA, 522 bp, Glycine max
  Clone ID: jC-gmfl02220085g05d1
ctgactaagagggatatgtatgacataaaaaagtgctgaattagcatatgtacaatgttaaatctcaggttacaatcaacgccagccttttcattcatactaagaaataattgcagaaactctcaatcaacaaataggctattatacactgcctgcatttcatactagtaaaaggggcaacccaatccaaaggaatttaacaaaagaataatgagaacatagatgccattttcatactatatatagagagagggaactctcagaaggtaaaaggaaaaattaagttaaacacagaataaaccaccgtgagatatctctaatcttccaataattaatgaatcagaaagaatattcaactaccttcgcaaataagtcagccataatcatggccaagatttatgctgcctcacttcggacttggagaacatgccggtagcactaagcctctgaccaatattcccaatgtcttacaggacggccacatcctgacgtaaatcttgctcaacaattcacataaattac

SEQ ID NO: 7505 - DNA, 458 bp, Glycine max
  Clone ID: jC-gmfl02220085g06a1
ctctcaaacagaatgggaagtgctggaagaactgattatggtgcatacacctatgagaatcttgagagagagccttactggccatcagagaagcttaagatttccatcaccggtgctgggggttttatcgcatcacacatagctcggcgcctcaagacagaggggcattacgttattgcttcggattggaagaaaaatgagcacatgactgagaacatgttctgtgatgaattccatcttgttgatctcagggtcatggataactgcctcaaggttacaaagggggttgatcatgttttcaatcttgctgcagacatgggtgggatgggttttattcagtctaaccactctgtcattatgtacaacaacacaatgattagcttcaacatgattgaggctgccaggattaacggcattaagaggtttttttatgcctctagtgcttgtatctaccctga

SEQ ID NO: 7506 - DNA, 476 bp, Glycine max
  Clone ID: jC-gmfl02220085g06d1
agaacttctagtgcagtaaaccatcttaagcaccacgaagtgccttaaaaaactattaaaatacatcaaggcttccgttccagacatgaactaccagcagagacataagaaatccttagcagctaattaaacataaccagataccgctatttagttgctatatataatataatccaactcttcacttgaaacattaaggtgaatcctactacagccatatgttgaccacctcattctttgccatctgcagctcgaagtgagcctagttgaactggggcttgagtctgcaccactttggaagacccatacacagatatatcaataccttgagccttctccttctcgatctgctccttaatccagaagtatgtgattctcaacccatccttcaacctcatagttggagcccaaccaagtttttcttttatcagtgtattgtctgaattacgacctcgaacaccctcagggccaggaat

SEQ ID NO: 7507 - DNA, 478 bp, Glycine max
  unsure (1)..(478): unsure at all n locations
  Clone ID: jC-gmfl02220085g07a1
cagcttttccctcgttgaaatgaaaatgggttcttctttgtggactttgtgtctaattttggcttcactagcctcttctgcattctgtgcctttccacggaggccagtggatgttccattcggcagaaactacgttcccacttgggcttttgatcacatcaaatacttcaatggaggttctgagattcaacttcatcttgacaagtacactggtactggcttccagtccaaagggtcatacttgtttggtcacttcagcatgaacataaagatggttcctggcgattcagctggcacagtcactgctttttatttatcttctcaaaatgcggagcacgatgagatagattttgagttcttggggaacagaacaggacaaccttacattttgcaaacaaatgtgttcaccggaggcaagggtgacagagagcaaagaatctttctctggtttgatccaacanaagcataccacagatac

SEQ ID NO: 7508 - DNA, 507 bp, Glycine max
  Clone ID: jC-gmfl02220085g07d1
acacaacatatataattttattatagaggctctgctctgtattcaaacctcactcatcaattacacagctcaaacaatacaatgataataaataatggtaggaataaagtatatggtaaatgatgaatcaataatacaataagaaacttatggtagcaaccataaacatagtactacatgtgaatttaaatgtcacggtttcttctacattcaggtggaagctgagggtagcggcttctgtcagtgcagtagttgtagatggtgtatttcctgcgcacccacctgagccatctccattgagaagcatcaagatcatgatactgtgcttgatcccaccacctcttgccttgtgtagcacagaactttgcattcactgaagcttcacacccatcaacgtggaaccctttgtattctgctatgaagggtgctttggaccaatctgttttctccaaccaccccttgtggcccagtcatcagcattccacaagctgttgtacaccttcatgg

SEQ ID NO: 7509 - DNA, 413 bp, Glycine max
  Clone ID: jC-gmfl02220085g08a1
atgtattgtattatgatttttttttgcagccaaggaatgtatatataaaaataacaaggccgcccataacggtcataaatgccacatacaattttttcacgacatatgatattacaaatgactaaaacttctagataacaacgaacaaaagctgtgtaatgaattgaccacactaccacgcattttaaaattattgcgtaccaataagctcaagaacccttattaactttcagtttaaaagggattggtacaacaatatcgtatgctcatgaatctaatcttaagatgaagaagctggtttggaagatgggctgaaaggaacctgctgagcgcatgtgaggatttcatggggaccaggctgttttcgaccatcacctagaaggtgacgatgatactggtgacgggaatcgata

SEQ ID NO: 7510 - DNA, 467 bp, Glycine max
  Clone ID: jC-gmfl02220085g08d1
tcgatctataactagtagtcgagtattatttcatcgattctatcccttctctttctctgtgcgacaccagatgacggagacgacggcgaagcgaaacgctgtcggtgcgccaatcgcggcgttgctgatggtggtgctattctcggcgagtgtggtggtggaggctcaggagaactcggacgtgaagacgctggtgaagctcatgcacgggaagaagtactgcgaccaaggatgggaatgtaagggctggtcaatatactgccagtgccgcactatcactgatcatctccagacctaccagctggagaatctcttgtccaagcggaactcgccggaggcgcacgccgtgggacattgggactaccactcgtggatcgccgctgccgcgcttttagagccgcatgggttctgctccaccgggaacaagacgatgcggatgatggagattgcggcgttgctcggacacg

SEQ ID NO: 7511 - DNA, 522 bp, Glycine max
  unsure (1)..(522): unsure at all n locations
  Clone ID: jC-gmfl02220085g09a1
gtttcttctttggtgtgcacactaaagatggtttagccatgggcttgcttctcaataccaagggtgccatggcactgatcatgctaaacattgcttgggatagagcgattttttctgtacctacctatgcggttatggcttcagctgttcttctaatgactgtagtagtatctcctgtcatcaatgcggtctacagaccaagaaaaagattcgagcagaataagctaaagactatacaaaaactaagagtcgatgcggagcttcgaattctagcatgtgtccacaatactcggcaagccacaagcatgatcagcataattgaaacttttaatgccactagacttacccctatacatgtttttgccatgtaccttattgaacttactggacgtgctgctgcccttgttgctgcacatatagagaagcctagtagccaacccggagaacaaaatctcaccaaatcacaggcagagttagaaaacattgccaatgcatttgatgcanttggagaggcatatgacg

SEQ ID NO: 7512 - DNA, 409 bp, Glycine max
  Clone ID: jC-gmfl02220085g09d1
gaacaaatgtaactgaaagtcagcgacattaattttccattcaatagattcatgttacaaattctaatctgaaacaaaaacctggtattttccaaaagtttattgaatctttcaataatctacacgtttgttccttaccaatcccaatgcttactctgtcttcacaacaagtgactcaaatccatcgttattggtgcccttttggtggagattatttccaaaagccattcctccatacccatattgttgaacaactagcaaagatgaacgcgaaccaaaattgtttgaggccaaaatatcccctataactccaagttctaagcattcacaccattctagcaaatttgagaagactttagagctcctacaattcccttgtcccactacgtacaaatcacaaccatttttt

SEQ ID NO: 7513 - DNA, 375 bp, Glycine max
  Clone ID: jC-gmfl02220085g10d1
gaaaggaggattcgctgagaaattaacttttgaaatcacacgggttacaacgtacaaataatttgaaagagtttgacgatttttgttgggggagggggggttgatatgggcctggcactcacactgcagcttcatttggatgctcttctgtgcatggagctaaccttctaggttatgctaatggcacagcccgaggaatggctccaggtgcaaggattgcagcctacaaagcgtgttgggttggtggttgcttcagctcacatattgtgtcagctattgattaagctgcggctgatggaccgaatgtgctttccatctctctgggtggtggagactcctcttattacacagattgtttatcagtgtcagcatttg

SEQ ID NO: 7514 - DNA, 522 bp, Glycine max
  Clone ID: jC-gmfl02220085g11a1
tctctcatatcaatattatactaaacttaattagttaccactctcaaattcattaacttttatttaaaatacttaaaaacttcttctctgagaaccggaggaataatcccgggtcgaaatctactagagcgttatcgctccttttttttttttgcacaaaggtatgtatatataaaaataacaaagtcgcccataacgttcataaattgccatataccaacacttcactgacattttgatatatacaaatgaataaaacttttagataacacctaacaaaaactttattatgaacttacactcttcctcacattttaaaaaaaatgtaaaccaactatttcaagaacccatacaaactatcacttccacagggattggtacaacaaactcatatgctaataaatctaatcctaagataaaaaaactgaatttggaagatgatcttaaaggaacctgcttaacccatgcaaggatttcatgaggcccagaccgttctccaccaaaacctagaaggtaaacaaa

SEQ ID NO: 7515 - DNA, 313 bp, Glycine max
  Clone ID: jC-gmfl02220085g11d1
ggaggttgaagctctctcggatttgagatcttttcaaaggaagggccacctagtgacaaacccatatttttaccattcctgtatgaaacctcatacattgatgaaaaccatctctaccctttagatgaccctactagcgatggctacatcttcatgtttaccaacagctgtttcctgatactgaaccctagcaccaacagagtggtacggacctacggcgtgctctacggtgatttccggaactaccaggctttcgtaatggcttccatactgcctattaaactgggtgggactgagctaagttgagccttca

SEQ ID NO: 7516 - DNA, 539 bp, Glycine max
  Clone ID: jC-gmfl02220085g12a1
gttcatggttagccagacaattggcagtgttttgtgctgcaaatgtggaattccaatgcaacccaatgctgctaatatgtgtgtcaagtgtctgcgatcggaagttgatattacagaaggactgctgaagcgtcttgtgctggtgcattgccctgagtgtgagagttacttgcagccaccaagaagttgggtcaagctgcagctggaatcaaaggagttgctgacattttgcttgaagaaattgcagaagaatttgaattcgaataaagtgaggttggtgcatgccgagtttatttggactgagccccattccagaagggtaaaagtcaaggtcaaggttcagaaggaggttctgaatggagcaatacttgaacagtcttatcctgtagagtatgttcaacaagagcatatgtgtgaatcctgttctagggtccaggctaatcctgaccagtgggttgcttctgtgcaactcaggcaacacgtttctcacaggcgcactttcttttatttggagcagctgattcttgaacatggtgctg

SEQ ID NO: 7517 - DNA, 409 bp, Glycine max
  Clone ID: jC-gmfl02220085g12d1
aaagaatgctaacaccaaagttatttataagtattggtactactgcctgcaaaattactatcttatcaggctttcaataaacaaaccattagagattgcaaaattacacaacataaatgggaggggggagcctttgacatgaacaaaaaaccaaaattccttaaaatactaatcaagatagaagaagcttttgttcattccgacatgttatcctcttgatcttcgtgctcactcaaatcaagatcagccagcaactcctccaatggaacagaagagtcatcaccatcagaaggcttggactctttatttcggtacaaagatatgttgaacctcatttcagggatttcttccagatcttgaatgaattggtcatattctgagaccattttatcttgatcaactattccct

SEQ ID NO: 7518 - DNA, 493 bp, Glycine max
  Clone ID: jC-gmfl02220085h02a1
cgtgactttatcaagaacatgattactggtacctcccaggctgattgtgctgtccttatcattgactccaccactggtggttttgaagctggtatttctaaggatggacagactcgtgagcatgctcttcttgctttcacccttggtgtgaagcagatgatctgctgctgtaacaagatggatgccactaccccgaagtactctaaggctaggtatgatgaaattgtgaaggaagtctcttcctacttgaagaaggttggttacaacccagacaagattccatttgtgcccatctctggtttcgagggtgacaacatgattgagaggtccaccaaccttgactggtacaagggaccaactctccttgaggctcttgaccaaatcaatgagcccaagaggccctcagacaagccactcaggcttccattgcaggatgtctacaaaattggtggtattggtaccgtgccagtgggacgtgttgagactggtgtcg

SEQ ID NO: 7519 - DNA, 445 bp, Glycine max
  Clone ID: jC-gmfl02220085h02d1
ataaaatcttcgttataaattaaatgcaacttaaaacatccctcagcagcaaaggaaatggactaaaaccctatagctgcttgtgaaattcgaaatatctcagactcttcttaccatcaaaacaaaaaacagtactcatcaaaaacaaacagcaatgaaaattgaccaccgccgatcaagaacctagttttgaaagttacggctacatgaaatcggcagaaacttaaaaatataacttaaacaaaacacctaagactctgcaaggataaaactactataaaggagtaaccacgatgatgatcacatgtgctagcaaaattgcccaaatgcaatcacttcttcttggcagcggccttggtgaccttggctccggtggggtctttcttctcaacactcttgatgactccgacagccacagtttgacgcatgtccctcacagcaaaac

SEQ ID NO: 7520 - DNA, 503 bp, Glycine max
  Clone ID: jC-gmfl02220085h03a1
gcaaaatttaccgtgcgagagagttggattcatgcgctgggaactactaccaaatcatgagtgtgcctaattcctcctgtaatatccatgaaaaggaggagcaaggagacgatgagaagggcaagcttgtatcattaggacaaatgaatagtttaagtgtgaaagaggatagtagaacatcaaagaacattagttctgaaggtgaaagaagaacaccagaaatcatgggaagatgtgcatcctggtgggcaaccttcacattttttgtgtgtttgtgttcattaaaattcagcaaaccacttctccaaccacaaggacccaattcactatggcttgccatattaggaatgttcagttttactgtgtttgtatctgctgcttctgttatggttgttgttgaagcacagttcactcgtatgcagataactgttatgctcagtgccttcttggctctgctgttagcttaattagacagttttcatatgtgtacttatgtttccttt

SEQ ID NO: 7521 - DNA, 373 bp, Glycine max
  Clone ID: jC-gmfl02220085h03d1
cccatgaaaaggtccggctattggaacggcgattggcccttccccaaccttggtttattggtttggcaatggaatttttgtaattaaaagaattccaccacctttttccgcctgggttaagggaaccttaggtcccctttggaaaccggcttatttaacctaccagcaaacccaaaagggccctggccttaccagtattttgcttccaagggaccggggcttaaccaccacccttaccagaggcggcggttccaaccccggtaaaccggacctttcttatttgggcaggccttagggaatggggcccttggggtggaaaaaggggttggctgatttttatggaccccaaccccccaaaaatggggagggtggc

SEQ ID NO: 7522 - DNA, 572 bp, Glycine max
  Clone ID: jC-gmfl02220085h04a1
ctactggctgctgatggaaggagacacataatttccactcctcaacttgctatctacactttctctctttctttttcttcaataataattttagtcacaatattagtatttaaggagctaaatagcaatggctgcaataaccacaaaagaacaacaagtagtagtaaactatatgagtgaagagttgcaaacgatttttctgtccaacttggatgaggcacccgctagacggcgtgctcgtgaggcttttaaggatattcaacttgccattgatcattgcttgtttcggttatcatcagatggggtgaagacgaaagaggtttatgaagtgaactccagaggattaaaaatattctctaaaagttggcttccagaaagttctcatttgaaagcaatcatttgttactgtcatggttatgcagatacttgcacattttactttgaaggagttgcaaggaagttagcatcatctggatatggagtatttgcattggattaccctggatttggcctttctgatggtcttcatgggtatattcctagctttgaaagctagtgaatgatgtcatcga

SEQ ID NO: 7523 - DNA, 492 bp, Glycine max
  Clone ID: jC-gmfl02220085h04d1
gaggcagcaaccacgcgtctgtaaattgctattcaagcattgaacattaaagtagaaatttcattgttttatctaacttcatttaccataccagttcccctaataaaacatgaacacataaactgaaattaatgcctacttttgtggcgaaccaatataccaacaaggtgcttaatatttgttttttctgctgctatgctcatcaagccaagatataatatcaccaagcacgtgaaatatagtttcatcaggttcaccttcaagtagagtatggaaagcatccttatagaggcagagtttcttgtccttcactttagctttctcatacaaagccttactagctgatggatcagtaattatatcagcctctccatgcatgatcaacaatggcagagaaacttcttccaaacgctgttctagctcctgtgtggctttcaacagctccaatgcagttcccagtcttggtttatccttgtagagtaacacgttata

SEQ ID NO: 7524 - DNA, 456 bp, Glycine max
  Clone ID: jC-gmfl02220085h05d1
caacctcatctcctgcaccatttttaagatcaaagcttctctcagagttgcatgatgatggcaacaacaaccattttgttaatgcagtaataataatgcaagttaagttaccttaaattattattttgtggtctttatatttttggttcaaagatgaatatttattcggagaggggttatataatttggctgggtgtataggaattataattatatagagagtagtggaagaggaggctgaggcagaaaggatcgcgtaagaaaggtttcgagtcaagaacgaaccgcgatggaggaacttgtttgcatgcagtttttctgctcatagtggttcgggtattgactcgttcacctgcgagttagtctctgtgctcttgtttggataacattagaaaaaacatcacatgtgcctgtgtttctactcaaattattactaatgcccatcttatcatacac

SEQ ID NO: 7525 - DNA, 466 bp, Glycine max
  Clone ID: jC-gmfl02220085h06a1
gtcatgtacccaatacagcaccgcaagtacagagatgggattgacaatctgttggttctcttgattggaggaattccaattgccatgccaactgttctgtctgtcactatggctattggttcgcacaggctttcgcagcaaggcgctattacgaaacgtatgacagctattgaggaaatggcaggaatggatgtcctctgcagtgacaaaactggaactctgaccctgaataagctcagtgttgataaaaacctgattgaggtttttgccaagggtgttgagaaggactatgttatccttcttgcagcaagggcttctaggactgagaatcaggatgctatagatgctgcaatagttgggatgcttgctgatccaaaggaggcacgagctggtatcagggaggtccactttcttccattcaatcctgtggacaagaggactgctctaacttacattgattctgatg

SEQ ID NO: 7526 - DNA, 511 bp, Glycine max
  Clone ID: jC-gmfl02220085h06d1
aaaagtaaatcctatcaaccacgttatttggtatggaatagaagagtaaaccattcagattttgactgacaaaaggaccttcatcctaatctaaagacggattaacttaggtcttcattacatttgttgttcttgttcttggataagcaccaaagtgtgttctgcttgaaggttgtccaaattccttaaactgtataatgctgttggattgtatcaatgtcaagtcccttcagcttcactactgattcaacatgtcctttcagagtatgaagctccctgagccttgcaacctcggcacgtctcttagcttgctcagcaatctctgaaagctccctgtaactgttcttgtcattgaaaaggttggttgtttcaggtggctgaagaccatgaagagtcctctgagcagttgcccactgtgcttctctctcttctttgccatagtctttctttgtagtgaaggcagtcttggtctccaaaagattatcccaagccttcccactcaggacgtagc

SEQ ID NO: 7527 - DNA, 445 bp, Glycine max
  Clone ID: jC-gmfl02220085h07a1
gtgtaagctctttcttctcttcttgtgtatcttgtgcaccgccattgttgacgatggcgagttcatgtcgaagctcgcgaaggcgctaaggccgacatcgtcggggtggactgggagcagcttctgcgactggaagggcgtgaagtgcaacgccaaccgcatcaccacaatcaacatcgcttcgcaatcactcggcggaacgcttcctccggatctgaactcactctccagaacaacgcgctctccggcgcattgccttcacttgccaacctctccatgctcgaaagcgtgttccttagcagcaacaacttcacctccgcccccgatggttgcttccagggactcaccagcttacaaaccctcagcatgaccgataggatcaacctcgctccatggacgattcccgtcgagttgaatgataacaacaaccttgtcaaactcgaac

SEQ ID NO: 7528 - DNA, 471 bp, Glycine max
  Clone ID: jC-gmfl02220085h07d1
gtgtccattacatatttgataatttatagtcactcaaaacggccactatttgttttaaaatccagtagttcttcaccaaacttcttcttcttccttcaatcttcatcttccaaaacagatctcaatttttttttttaaaaggaaacagatctctgttcactcattaacatttaacaccacacctcaatggtacccgaaaacccgaagccgttctgattgttgagccacatatcctgaatcgcagatctagcgaaggatttgggtaagccaccggtgaggttgttgtaagagagacgaagctcctgcaaactcacgaacttgtcgaatacatcaggcaaggtaccgatgaggtttgcgtttccaagttcgagtttgacaaggttgttgttatcattcaactcgacgggaatcgtccatggagcgaggttgatcctatcggtcatgctgagggtttgtaagctggtgagtccc

SEQ ID NO: 7529 - DNA, 468 bp, Glycine max
  Clone ID: jC-gmfl02220085h08a1
tgaatgatcaatcatccgaggatattttaagaactgaacttaaagcagaatgtttggtgacaagtttattaagagagaagctgtactctaaagagctccaagttgagcagatggaagctgaacttgctacagcagtaagaggaaacgacatacttagatctgaggtgcaaaatgcgttagataacctttcaagtgtaacccacaagttgaaggaccatgaacttcagatgttgaagaaagatgagagtagaaactgccttcaaaatgatctgcaagagtctaacagggaattgacaatcatgaggggaaaactgcccaaagtgacagaggagagagattatatgtgggagcaagtgaagcaatatagcgagcagaatatgctgttgaatgcagaggtcaatgtattgaagaagaagatagagacacttgaagaaaacaacctcgagaaggaaggtcaaatatccatat

SEQ ID NO: 7530 - DNA, 311 bp, Glycine max
  Clone ID: jC-gmfl02220085h08d1
gggtgcaatgggggaaatatgcttctttgtattctcaaactggtatgatcgatcttacacttcacatagggcaagaaaaacgcaggggcatagccaatggaagaaaagcgccaattaaaaaaaaaactcaatcacagatggaggtaaactaagaacactgaaaaaagcctacaaaaaaacaagctcttaaaacaagattgtactgaaaaaaagatgcgcacgactcccagggggatcaccataggaacttttggcccgggaggctcgcaatagggatattcgaccttccttgtcgagggagatttcttcaa

SEQ ID NO: 7531 - DNA, 540 bp, Glycine max
  unsure (1)..(540): unsure at all n locations
  Clone ID: jC-gmfl02220085h09a1
tttacaaattaaaaaaggatgttatagaaagattacttgagtgaagaagaactcaatcactctgagttgttgttcataaagaagactgcgtttgtgatattttctcctaccatgtctggctttctttgaactttcactcgcagcttcttattcttgtgatctaagttcctctactctcattccaagcgtgggtgtatatcaaggatccggattccttgtggtcggaggaagcacgcatgcacgcagttagacgattagaactgtcataaagattcaacagttgatgaattattttagtaaattcaacttaaaaaacacatttaaaatactaactgtctgatcaaattagacagtccacattcacgattgtgtgaatgcgtgagtgcaggtggagtgatataaaatggaggagagaccagaaacagaactgatatctataccggcgacaccaagggtgtcaaccccggagatactgacaccggngcagaggtcaccaagagcagcatcnaaggaagggaaatcatggaccccaacttcttt

SEQ ID NO: 7532 - DNA, 421 bp, Glycine max
  Clone ID: jC-gmfl02220085h09d1
tccttttttttgtttttttgaaaggaggattcgctgagaaattaacttttgaaatcacacgggctacaacgtgcaaataattcgaaagagtttgacgatctttgatgggggagggcgggtacctggagagccaggactgccaagagtcaaagtgcaatgattttgatgacactctaatttggtttggggagattggagtcaatgactatgcctacactcttggatctaccgtctcagatgaaaccataaggaagcttgcaatcagcagtgtctcaggagctttacagacattgcttgagaagggtgccaagtacctagtagtgcagggtttgcctctaactgggtgcttgacattgtccatgtacctggctccaccagatgatatggatgacattggaatgtggaaaaggtgtcacaacca

SEQ ID NO: 7533 - DNA, 466 bp, Glycine max
  Clone ID: jC-gmfl02220085h10a1
caacctcatctcctgcaccattcagaagatcaaagcttctctcagagttgcatgatgatgacaacaacaaccattttgttaatgcagtaataataatgcaagttaagttaccttaaattattattttgtggtctttatatttttggtttctaagatgaatatttattcggagaggggttatataatttggctgggtgtataggaattataattatatagagagtagtggaagaggaggctgaggcagaaaggatcgcgtaagaaaggtttcgagtcaagaacgaaccgcgatggaggaacttgtttgcatgcagtttttctgctcatagtggttcgggtattgactcgttcacctgcgagttagtctctgtgctcttgtttggataacattagaaaaaacaacacatgtgcctgtgttactacttaaattattactagtgcccatcctatcatacacatttgcaaa

SEQ ID NO: 7534 - DNA, 445 bp, Glycine max
  Clone ID: jC-gmfl02220085h10d1
gcaaatgtgtatgataggatgggcactagtaataatttaagtagtaacacaggcacatgtgttgttttttctaatgttatccaaacaagagcacagagactaactcgcaggtgaacgagtcaatacccgaaccactatgagcagaaaaactgcatgcaaacaagttcctccatcggggttcgttcttgactcgaaacctttcttacgcgatcctttctgccttagcctccttttccactactctctatataattataattcctatacacccagccaaattatataacccctttccgaataaatattcatcttagaaaccaaaaatataaagaccacaaaataataatttaaggtaacttaacttgcattattattactgcattaacaaaatggttgttgttgtcatcatcatgcaactctgagagaagctttgatcttctgaatg

SEQ ID NO: 7535 - DNA, 591 bp, Glycine max
  unsure (1)..(591): unsure at all n locations
  Clone ID: jC-gmfl02220085h11a1
gaaaaaaagagaagggggaaatctcttcttcaatggcggcagagtcatctcgcagtagcgctaaacgcccctttatggaagaagacgacaatgaattctccaaaaagccaccagaaaaaagggttaggtttccaaagggaaagaaagtgaagccaggagatgaagtggtggtggacaaagcaaatgttgaggagggtgaagttgacttggtgaatgctaaaactgccaccaatgctgcaaaagagcgggaaaaactcagaaggtttctaaagggaaagaaagtgaagccaggagatgaagtggtggtggacaaagcaaatgttgaggagggtgaagaagttgacttgatgaatcctaaaattgctgctgccaaagaacgggcaaaactcagaaatcaaattacttctgaactccttagtgagggcgctggaggtatcacaaacgatttatcggctgctgaagtgacatatgaggataacgagaattntgttgatgatgggattcaaattgagcctttcaacctagagaaagaaagggaagaagtattctgatgctgcangacnatttgttgatatgtagagagaatgagat

SEQ ID NO: 7536 - DNA, 432 bp, Glycine max
  Clone ID: jC-gmfl02220085h11d1
gaaggcaaaactgcatataactcacaaattgataagagtaaacattgtacagctcctaacttcaagggatcattctaagtaatttttaggcgaaaagtttaaggagctttaaaacaggaaccttaaagagataaacacacaactgttagcagttgcacctaagaagaaaatcccccataacgtacaaaaagatcaagagtgcttcagtctgtacatgagccactgagacagggattgtggctatgctaaatagcctattctccccttaaactaggcactcaactcacattggatgcaacctcgtgaacttcttcatatgcgctagtctcctcattatatgagtaccattgccctgatgctgctgagcaataaagccctgtatttggatcataataatagcccaaagtgctgctgtaatagtacccagaagat

SEQ ID NO: 7537 - DNA, 442 bp, Glycine max
  Clone ID: jC-gmfl02220085h12d1
aacacatgaaaatatttggacatttatccattttgtgatcaattaaaatgcataaagactattttttttacataaacgacttaacaacccaaactaaaagcctctaaagaaagccacaatgaaagcattcgtaagcaaagaaagttgaatgcataccggaggaacatcaaaagcttggactccatgatccacacttaaactcttttttcgcaagagaatctgcgacctgattaaattctttcagcacatgatcacaagcccaaagatcaattccctctgccatgtctacaacctcattggataaatgttgccacttgtggaagcaaatcctggccacaatgatactttgcactcatcacttggacccataacttgcctttttcaatacacaacttccaacattttttcattaagataaggaattcagattcctagcaccccg

SEQ ID NO: 7538 - DNA, 518 bp, Glycine max
  unsure (1)..(518): unsure at all n locations
  Clone ID: jC-gmfl02220086a01a1
aaacagaagcatgcccgcatctccttatcccacacctggtgcccttctcatgggagatgccttcaacatgcgtcaccctttaaccggagggggaatgactgtggctttgtctgacattgttttgctaaggaaccttcttagacccctgcatgatctgcatgacgctaatgctctttgcaaatatcttgaatcattctacaccctacgcaagccagtggcatctacaataaacacattagctggggcattgtacaaggtgttttgtgcatcccctgatccagctagtaaggaaatgcgccaggcatgttttgattatttaagccttggaggtgttttctcagatggaccaattgctctactctctggtctaaatcctcgtccattaagcttggttctccacttctttgccgtggctatatatggtgttggtcgcttactcataccattcccttctccaaaacgaatgtggattggagctagattgattcccgtgcctctgctatcattntccccattat

SEQ ID NO: 7539 - DNA, 439 bp, Glycine max
  Clone ID: jC-gmfl02220086a01d1
gagatactgggtggagtgtgaaccgaggagacacatgccttaattatagactttctgaccaataaaaaaatatgcttttcatcttccggttctttcattctatttatttattggattgaatttttctatttctaaattttctttccatctttaatctgctagctatcattcacttttcttatccatccattcatccaccgaaccctaaccctaatcctccatcatcgattcgattctcttgctctttgttatttccttctttggtgaacaaagcaaaacaattgcatcgatgaatcgggcgtcacagctttcgtgataaagatcttggcgctgcgaaacgattgcatgggtttggagattgtcggagcttcatagtggaccgcgacgacgtcgtgctccgattgttcgtaaaagctctgaaccaccgtcttccgcgggg

SEQ ID NO: 7540 - DNA, 351 bp, Glycine max
  Clone ID: jC-gmfl02220086a02a1
gcacctaatctggcctgcatctccttctgccagaccggatgccgttattatgtgagactcctaccacacgcaggaccctgtaaccgttaggtgaaggactagagctcagtctgacatcgcctcactatgatcgcatcttagaccattgcatgctctgaacgctgcttatgctcttggcgaatgtagccactggttgaacactgctactcatgttcaggggcgtctagcttcttacacattggctcaagcagtgaacgttgtgttttgagcatgacgcgttccctgttgttatgaagtgacacctggcacttgttgatgacttttatgccctatgatgactttctatactgc

SEQ ID NO: 7541 - DNA, 491 bp, Glycine max
  Clone ID: jC-gmfl02220086a02d1
ctcactgttagtagcagcaatggcgaagggtgaagacgctttgattcgaaagaagaataaaaagcttcgaaagaagaacagcagcggctcttcctctgtctccgccaaggttgccgccgttatcgccgccaagaagcgccgcaaggccggtaaacgccgcatgtgccaggggatgtgctttagtctacctactctggatgatcccttcaatgatcgaggtgggaaagaggaaaccaaaacaaagggtcctaaaaagaaatcccattcaaaaccaaaagacaagatggatcatcttaatgggaagagtgcagatggaaagaaaggcgcagttggtgggaggaaaattgcaagggaattgaatgatttacaaagggaaaatgagtctgtcacagccagcaataatcttactcataaatgtatcattaactcagaaaggaaaaatattgatatgactgagatggctcatctttgcggtaccaaacagcgtgatt

SEQ ID NO: 7542 - DNA, 536 bp, Glycine max
  unsure (1)..(536): unsure at all n locations
  Clone ID: jC-gmfl02220086a03a1
agaaaatctagagggttctcctgcggatcaggtttgattgcatttgacattaaggttgcagaacttgacagtacaatcataatgcaccagactgaataattttagtttaacttttgaatgcattaatctggtaattgtcaatgtgaggtgacactatatgtgtgtgagaaattttcctgatctttcattaaccctgtctcatccttaggttagttatcctatgataaaaagagtaataccctgtcatgtttcttgatgcagtgaaatgccctacctctaaataacatgtgaataatgaatatattattgcaagaaaaatcaattttttttgctattaatatgtttacctgtacttgcaagcactggtagaaaaacaactaataatgactatttttctcccatcccactgtgaagcagattgctttgtctttcctatacattattccttatttgtgtgtgtgtacacatgtgcacttgcatgatcttgcactacccncatcacgtggtagtggtttaattcttctattttagcattc

SEQ ID NO: 7543 - DNA, 311 bp, Glycine max
  Clone ID: jC-gmfl02220086a03d1
aaaaacataaaaagaattttcaatcagatcaatgaacgaattccatcatcagactaacatcatcatttacaagcggtttggcaataattaacaggtgctcatccgagcaaattaacagcagtgtttatcttaagaaaaatgtctcgtcattaagagagcgagcatgacgagggaagcgatggcggaagcagcaccaaagagtcccatgttgacgcgggaagcattgctgatgggacctggtgccaaagcataaggtgactgtgcaatgctatcaccggcgccgcctgcggcggttgctgctagggcaccgt

SEQ ID NO: 7544 - DNA, 319 bp, Glycine max
  Clone ID: jC-gmfl02220086a04a1
agaacattaaaatggaattaaacagaataaaaggaaacagaattcgacattaaggttaatgggctacgacaagaccttctctactgaccgagactgttgacttgacattcaagttaagcatgcatgggtttggacatcagcaatttgttgggcgaatataccgaatatgcgcaagttaacagatacctaactgaaaccatgctatcggaccaaatcaacagccataacgccgttacagtacttgcccttgacgacgccagaatggcttacctctacggtatgtcgcacgacgccgttaaggccatacttagcacccatg

SEQ ID NO: 7545 - DNA, 396 bp, Glycine max
  Clone ID: jC-gmfl02220086a04d1
aacccaaaatcaactaatctagataagcactaactgataccgagtttaagacagccttggcagatactaatacaaatacaaatacaacatattcctttgaactcatcatacatgatgtgcagaggacacaagttctagcaaaacaggtaaaacctgattccctcacttatagttacattagcagatgcattaaagtcataaggacaagcaaatcccaaatattagtattattcttgggtgaaccattcaccccaccctctccttttttcccaacaaaaaattaaacggaggttgggtgaaatttccttgcaaaaacatactagaaataactttatacatggcctcagtgaggtgaacaccatcccaattgatgtactgagaagggcttgagcacac

SEQ ID NO: 7546 - DNA, 470 bp, Glycine max
  Clone ID: jC-gmfl02220086a05a1
agattaccaaaaattacgaccaaggaaacgcagattctgttgatgaggaaatacaagctctattgaaaaagttaaattttataccaacatcggttttcacaacggacttgccttacgtggattttctggatcgtgtacataaggcagagctgaagcttagatccaagggtttatgggatgtacctcatccgtggctcaacctttttgttccaaaatcaaggataggggacttcgacaagggtgtgttcaagggcattcttggaaataagacaagtggacctatcctcatataccctatgaacaaaaacaagtgggaccagcgaagctcggtggtgacaccagaagaggatgtgttttacctggtggcatttctaagatcggcattggatactgagacgctggagtacctgactaatcagataccgtcaaattcttgaaatctggcatgatatagagatcaaggtaaaaca

SEQ ID NO: 7547 - DNA, 397 bp, Glycine max
  Clone ID: jC-gmfl02220086a05d1
ggggaaaaaaagatattttttttgaaaaacgaaaccccccaaccaaacggggggggctcatgtgcacttgcgcattgcccttttcctcctccaaagcgggccccaccactccttatattctttgggcctaaaccttattgggttccttacttaatttgctacaagaccccattccataacaaaaatccaactccatcatcaattttattaccctcagataacaacaccttaacaacttttgatccttcactagggccctacaactacatccttttaattttttttttgccatgaccccccttgtgtttcctaaacacaataatacagcacttgcttcttaacatgaacccaagattatttatcccttttgcgtgtttgttctacatattgaggggga

SEQ ID NO: 7548 - DNA, 315 bp, Glycine max
  Clone ID: jC-gmfl02220086a06a1
cagcacaaagcgggttactgtctgatcaagctaccatctctctctctctttcttagtgccttcttgccagaaggtaaaatggcccaagacacttgcctattaacctctggatcagtgaacgaggggcaccctgacaagctctgagaccagatctgcgatgctgcgctcaatgcatgcttggagcaggaccctgacagcaaggttgcctgtgaaacctgcaccaagaccaacatggtgatggctttcggagagatcacaatcaacgccaacgtggactatgagaagatcgagcgtgacacatgcaggaacattgga

SEQ ID NO: 7549 - DNA, 453 bp, Glycine max
  Clone ID: jC-gmfl02220086a06d1
gagagaacatttttttttgtttcatcatataaaatatatatgttctgaaagaacacatacaagtacacaaaaaaaagggggaaattcataaaaaaatacagaaaaaaaaaaacagaattgagtaagagggaaggaaacatagagaaaattttagcaatcagataataagaagccagtagtagtgcaaaagtcccttgccaagagtgttggaaccccttttagttaagcaggtaccttctcccccttgagtggcttcaccacttcccatgtgaagtcagggtcatctctgccaaagtgtccatatgcagcagtcttcaagaacctgccatttccacccctcttgagatcaaggttgatggagatcatgccaggcctgaagtcaaaactctccttcacaatgctgaggatttccttgtcagggatcttcccagtgccataagtgtcaacaaacac

SEQ ID NO: 7550 - DNA, 323 bp, Glycine max
  Clone ID: jC-gmfl02220086a07a1
cacaagtcacattttttggcttttaaaacagagagagagagagagagagagagagattacaaagatcagaatcagacaggctagcttagctccatgtctgactcactcttaactttctattctctttcagccattcttgctcttctgccaatcttcatcttcattctcatcaaaagaaagcaaagcaaacccaggctcaaccttcccccaggtaacatgggttggccatttcttggggaaaccattggctatacgaagccttattctggccccacagtaggggaattcatggagcaacacatagcaaggcatgggacagttta

SEQ ID NO: 7551 - DNA, 496 bp, Glycine max
  Clone ID: jC-gmfl02220086a07d1
cggaaatatttttgatttgtatggaatgccattggagctaggaacttcaaattcttcacgtagtttgatttagatcaaggtgtgactctgttattggctaggcttggagttattacatatttggggtgaacttactaactaatttttctcaaagcaaagagtgggcttggactctaatgggtaggcctttggggaagtcgacaaaagggtaggcaaaagcttgatccgtatcagccaattcccaatggtagttgagaatgagatggtgaatgaaaacagccatttcaagcttagctaactctgatcctgcacataatcgtggtcctcctccgaacggaagaaagttgttgtttgctgtgttcttgcttgaacaacttccaccacgactaccattgttctttatagctaacatctttcacagccttcctgtggagaaacctcacaacatttcccaacctaagtgtctcgttcacaacacaatgagtaaaatccattc

SEQ ID NO: 7552 - DNA, 348 bp, Glycine max
  Clone ID: jC-gmfl02220086a08a1
cctcccagaaaaaggcttaaaaaaaaaagggggggtgtcaaaatcaaaaatggccgattttgatacgaggggccccaatcccgaaaccttaaaaaaaaaaaaaaagggggcccggggggtttaacccccccaccaaaaggccaaaaccctggaacttggggaaggggagaacaaacccccttcatttagggggggggggagaaaaaaaaaaaacccgggggcgcaaaacccccccacggccaaagccgagggtttttaccaccccaaaaaaggggaagcgaatttcccaaaaagggggttattttgtaagaacctggttcccccaaaccctatctttaaaagaccggg

SEQ ID NO: 7553 - DNA, 500 bp, Glycine max
  Clone ID: jC-gmfl02220086a08d1
gctccaaccatgttgaataaaattcatttgtgtagtgtaacaaagttttaagcccttactctaattttctatgcatcagatattaggaatatacaactagaatatttcagaggatggatacaaaaatattcaagaaagccttcattttgcaaccatagcagtgactatagtaaaatgcatctgtggaagtacggaaatcaaacaagtcctagaaacaggtgtaaaagcaccatctggccaggaaaactccctaaaaaaaccttctccaaatcatgatcatcaatgtggtatcattctttttcattcatctgaatcactattgaagttaatatcttcagttttctccgtatcctgctcctttgtctcatcgcctgcttcagaaaactcttcatcttctttgatatatggctcaaccaatttccagaaccaagttgaattgcttcccagaataccaatccaaaaaacccttcctttcctcttgactttgcaatccatggaca

SEQ ID NO: 7554 - DNA, 478 bp, Glycine max
  Clone ID: jC-gmfl02220086a09a1
caaacatccatcatcattattattttactccgaacgagttgacaccgattccactcactcaaccatgagccgattcaggcgttttgagctcatagaacaaccacctttcttccactcctgctactctttcccttccttcgtcctccaagactcactctctctcgacctcgacctcttgccacttcccagccacttcgacgctttcgcagatctggtgcacgcgccgtcgttcgcttaccggcgcgtggagaggcatctcgagaatgagttgcgtttgcagagcctctctgaccgtgtggcggagctggagtcgcggttcgaccgtgtgctcggcggagatcggaagtacacgtggacagcggagatcaagggagcggagaagaacgggttcgataggaagtacaagtgggttgcggaggtcgctgaggaggaagataagaagaagaagaagaataagaagaagcaggtgaaggtgctg

SEQ ID NO: 7555 - DNA, 365 bp, Glycine max
  Clone ID: jC-gmfl02220086a09d1
ggggaaaaaaaatttatttatttattattattcttaaaccgggggggaaaattattgggaaaaataaagggcccccctttttttttttccccgccccaaggggttaacccccttaactttaaaccccgacaaacaaaccccctggtcccaagaaatttggggaatagggcccaacaaattttgtttttaaggtcgggggcaaagggcgttttaccggtaacttggcccccaggcctttaaaattaaccgcaaaataagggcaagggttacttttcccgggccccctggttgggttcaaaggcccacaaaggctttaagggcaaaaaaaacaacggtggggggccaacaaatattccggggggacc

SEQ ID NO: 7556 - DNA, 490 bp, Glycine max
  Clone ID: jC-gmfl02220086a10a1
ctttcccttattaccaacaaaaggaaaaaaaaatccccttccactttgaacttttcaatactgtgtcgctttcgctttagccaatttcaacgtttgagtttttcaggcattaattcattagtttcataattagggcattcaacaagtgtgcgtatggtggtgtttgctagaagatttttatgaacctacctattcggttgtttgaatataattctaggtgttccttactttcagtcaatttggatttggatcaattaattgcgttgcgctggatttgttgactttgattttgggattacgaataatagcgccatcgcattcattgcacgtaggttggttgttttaaaggacgagagattttaagtgtcaagtttataagataggaaaattgagtctcagttgaggttttttggatcaagttgtttaataccatatatcattttgtttattagttggaagcgtattttgcgggtagctgcagaaagtttat

SEQ ID NO: 7557 - DNA, 362 bp, Glycine max
  Clone ID: jC-gmfl02220086a10d1
aggaaataaaaattgccttcaatataataaagagggttcccttttttaataccagagattagaacataagaaagggatggggataattaggggtgccggatacaaattaatagatgacacttcaacttatgtaagatgatttgagccccaaattttggattaagagtgagcacagggactggagcatgtgcataggtgggagaaagctcaaatgaaaagcgttgttagagtaatgacaaaaccaactttgcttttaataaagcaaaattttgggctaagcacactttaggaccccattcaaatgggaaaaacacaacttggccttttggtgcctttgctactccttcagcaaaactttttgg

SEQ ID NO: 7558 - DNA, 494 bp, Glycine max
  Clone ID: jC-gmfl02220086a11a1
gtgggcatggattctctactggcgaactatgcctcttcagatgaagaagaagatcaacaacaaccatctccacccaaaacgacttcgttttcctctcttcctcagcccaaatcttctctctttcaatcccttcctcaacccaaatcctgtcctttttcttctctatttcaatctcttgctccacccaaacaaccttccagcgaaagcgcttcactccctaaccctaaccctaaccctaaccctaaaccccaaatcgaagaaccacggcccaaacgcgtcgtgcaattcaggcccccaatcatccctctcccaaaccctacccaactcgacgatgacgacgacgacgaagaagaagagcgaaacagaagaaagaacaagttagagtcctccacgcaaacctcatcggtcaaatccttcctcgccagcattccggctccaaggaacaccgccactctcggcgttcaagcaagttccggttcaggccggagatccat

SEQ ID NO: 7559 - DNA, 383 bp, Glycine max
  Clone ID: jC-gmfl02220086a11d1
cccaaaaaaagaataaaacccttccccatgggaaaagaaaattggtcccggaaccattgtttggttggtttttaagagaaaaaaaaatttttggcaagaaaggggacttataagttataagcttaaaaaagggggggggaattgttatttccgcccccgggaagcaacttggttggggctccatggtctttccggggccataaatttttttagaaatcaaaaaatttggcggttacaaaaaaagaaaaaaaccctggccaagtttgaaatggtcccattggtgccaaaaagaaaggggtggaccccttttttttttcctatggggggggaaaacaatggaagaataagccattaaggttggcttggtcacaaactccattttt

SEQ ID NO: 7560 - DNA, 492 bp, Glycine max
  Clone ID: jC-gmfl02220086a12a1
tagctgttctgttacaaagaaagaacaccaaataatgcagtccatgttaaccatccgtgccacccatggccttcctctgtgtctctcagggatgattcaccctcttgctctctctcacgatgtgtgtaggatagcggatcacgaccgtaggagacgcaccatgaggaagcaaaggcaaagatcactcaccagagagggtgtagtgcatgatgcggttcgagaaattcactttgtggaggtcaaaggtgagaccgatttgcatgatctctcccacactcatcacctggggttgtcagcaagagctgcttaaaatttagctgcttctccaaaattgattaatctcgctagctcctaccactttgttatgcactttatttaatttcactgtgatggactctttcgttattatatatatcatgttaattaattactagttgtctcctttgttctgtactcaattcttattttctgtaaccacatatgtggaacttt

SEQ ID NO: 7561 - DNA, 481 bp, Glycine max
  Clone ID: jC-gmfl02220086a12d1
ggcaaattaagtagtttccattaaatagccaaaagcaaaattcccattgcttctcccatcatcagtctatgttatatgcatactgaagacagagatgaagtggttgatacaaaaaggcataaatcataaatatgaaaagcttattgaatgattacaaatcagctcctcagacaatggagtggctatgtgtgactgcattgaaattaggtaatcgatttcctgtttatagttttattaatttaggtaggctaaaaaagagattataacactcaagatgctggtttgtctcggatccttaagctttggtgaagctagcatcgaaaggaacgccagcagcaggcaaccaagtgctagcttggagccaaggctcagcagtgaattgtgcagcctcctgcttgctaatgagacctttgccaaacttggctcttgcttgagcaacggaacctggtccagtgttgccaaactcaagcgagtagcaatc

SEQ ID NO: 7562 - DNA, 488 bp, Glycine max
  Clone ID: jC-gmfl02220086b01a1
ggaagaagaaggagcagatgggtaatccacggaaaccgagtaccgccgacgagcttcacacggcggcaaggtccggtgatctcatcgccgttaactcaattttggcttcaaatcctttggccgttaattccagagataagcattccagaacaccgtatcctgctcatttcctcacttcttttcttcctctattaattaattcaattttattttttatgtaaactcaacgcaatagaaaccctaacaattaaattctttcaattagtcgttgttgttgttctagataacaaaacacagtagctggaattgaaaattacgttttgctggttattataatgatatgattcattgcagcatctgtgtctttcgctctttttgatctgtgcattgcatattctacctatcttgtttgaaccattcattttatgaaatcactacatcataatcacccctattagagaaggcttacgtgttccttagcacagaga

SEQ ID NO: 7563 - DNA, 467 bp, Glycine max
  Clone ID: jC-gmfl02220086b01d1
gtttagggttcgaacctcagaaacctcgcatctccaaaaattttaaattcatagaagaaaatgggagacgcagaagaggagaacgcttgcatagctgaagtatttgatttcaaggagaagaagaaaaagaacaagaagaagacggcgaagaagagagtaacatttgctgagaacgaagcaaattctccaacggtagtaaacaatgatggcaatgaagatagtgctgctgctgccagcggcgttaggatttctctgttcgatttctcggtcgagaatttcttccgagacatggacaccattgccagactctgcgggaaagaaaacggtgctgctttggaccagagcgaggttcagagattgtcttcctcagtcactttcttaagagaatggagagattttaaatatccctcaagaagcattaagtttgcttatggacttgagagctctgattgttctgaggggagaaa

SEQ ID NO: 7564 - DNA, 479 bp, Glycine max
  Clone ID: jC-gmfl02220086b02a1
attccaatatattccattctctctgtgtatttccctacctctcccttcaagatgcagatcttcgtcaagaccctcaccggcaagaccatcacccttgaggtggaaagctctgacaccatcgacaacgtcaaggccaagatccaggacaaggaaggaatccccccggaccagcaacgtctcattttcgccggaaagcaacttgaggacggccgtacccttgctgactacaacattcagaaggagagtactcttcacctcgtcctccgtctccgtggtggcatgcagatcttcgttaagacactcaccggcaagaccataaccctagaggttgaaagctccgacaccatcgataacgtcaaggccaagatccaggacaaggagggtatccccccggaccagcaacgtctcatcttcggcggatagcagctcgaggacggccgcaccctcgccgactacaacatccagaaggaatcaaccct

SEQ ID NO: 7565 - DNA, 439 bp, Glycine max
  Clone ID: jC-gmfl02220086b02d1
cgaaacatagaaagaatattcaatcagatcaaagaacgaatcccatcggcagactaacatcatcataaacaagcgttttcgcaataattaacatctcctcatccgtgataattaacagcattgtttatcttaattaattctctcgtcatttagagagcgagcatcacgagggaagcgatggcggaagcagcaccaaagagtgccatgttgacgcgggaagcatcgatgctgggacctggtgccaaagcagaaggtgactgtgcaatgttatcaccggcaccgtcggcggcgggtgttgcaagtggcaccgtagcacatgtcgctgctgctgccgcagattcaacgccaggtgcaacgataggcttgctaacctgaagaaccgaaacggggttgggttggctcgtcacggaccttacaagcacaaccttgaaaggtgcat

SEQ ID NO: 7566 - DNA, 455 bp, Glycine max
  Clone ID: jC-gmfl02220086b03a1
taaacaataaaataaaataaaacagaagagaaggaaacagaagtaaaaaaaaaataaaatgggttacacaagatcttctcttctgtccgtggctcttgtcttggcattctgttcaagcattcagggtttggacatcaccaaattgttgggcgaatatcccgaatatgcacagttcaacaaatacctaactgaaaccaagctggcggaccaaatcaacagccgtaacgccgttacagtccttgcccttgacgacgccgcaatggcttccctctccggcaagtcgcaagacgccgttaaggccatccttagcacccatgtgctcgtcaacttctacgacgagaagaagctgatggaagccgaaggtagtcgcaccaaggtcgaaaccctattccaatcctccggtgtcgccaagcccaaccagggttacatctacgtggcgctcatcaacgaggggg

SEQ ID NO: 7567 - DNA, 488 bp, Glycine max
  Clone ID: jC-gmfl02220086b03d1
gcaaggcctattgaacaataatgcaaacacagcttcattgaatatggatccaacagtttcatcagtggattcaattgtgtcagtcgcatctccattgcatatgaatgctactattcaatcctctggtcatgttagcagccacactgaggttgatgaagttgagttcttaaacaactgcagggatgctggggtggttcacattcttggaaacacagttgtgagggcaaggagggattcaagattccacaagaaaatagctgttgattatatatatgcatttctgaggaagatatgcagggaaaatagtgtgatcttcaatgttcctcatgagagtctattaaatgttggtcaggttttctatgtatagcctctaaacctcttggtaatttttgcgtgaacattgggtttataggcacattcaatcagaagcatgttaaaatagttaatatgtagttaataataataaaaactgtattgaaatctatgtt

SEQ ID NO: 7568 - DNA, 517 bp, Glycine max
  unsure (1)..(517): unsure at all n locations
  Clone ID: jC-gmfl02220086b04a1
gcagaatctacaaagggataattccttccaccggccagcttgtggccgtgaagcaactcgaccgaaatgggatccaaagcagtaaggaatttctggctgaggttgcggagctaagtctcttgcaccatgaaaatctggtcaatctcattggttattgtgctgatggagatcaacgtcttttggtctacgagttatttgcttcgcgtactctagaaaaccgtctttttgagaaaaaagcggatgagagcccattaaattggtttgaaagaatgaaaatagtagcggctgcttctaaaggactagagtacttgcatgagacttcgaagcccccggttatataccgggacttgaaagcgtcgagcatcttggtggacagtgatctgcttgcaaaactatgtgatgttggcatggccaagctttctggtggagacaagatgaacaatggacctncaagacttatgggtacctatggtcactgtgctcccgagtatgtaaaagctggtcaactcaccttgaa

SEQ ID NO: 7569 - DNA, 440 bp, Glycine max
  Clone ID: jC-gmfl02220086b04d1
aaatattaaggacgcttgatattaaagtaatagtttttaaaagaatcccacatattgtgtggcaaaaatacaaagcaacatgtcaaagaatgagcatgcatgcatgttcatcatcatcatcacaagtggcacaattaagcagaggttgataagtttagttatcgcgaataaacacttgatcctccactgctgcttgtttggtcaaaagggtgaccactatcctcatcagacccaatgctggttgcacggtctaaaatattcatgctctcatcctctgtccttctgctgccataggggtccgagcgataacttccttgtgatagcctcatgctgctacgctctgaccgaaccccttcatcctctgatcccacactgctgctacgacaacttgaggaaatgcttccatcctcagatgcaacgttgctcttgtggctcaaaac

SEQ ID NO: 7570 - DNA, 567 bp, Glycine max
  unsure (1)..(567): unsure at all n locations
  Clone ID: jC-gmfl02220086b05a1
cagcacaaagcgggttactgtctgttcaagctaccatctctctctctctttcttagtgcctccttgccagaagttaaaatggcccaagaaactttcctattcacatctgaatcagtgaacgaggggcaccctgacaagctctgtgaccagatctccgatgctgtgctcgatgcatgcttggagcaggaccctgacagcaaggttgcctgtgaaacctgcaccaagaccaacatggtgatggttttcggagagatcacaaccaaggccaacgtggactatgagaagattgtgcgtgacacatgcaggaacattggttttgtctctgatgatgttggtcttgatgctgacaactgcaaggtcctcgtcaacattgagcaacagagtcctgatattgctcaaggtgtgcacggccacctcacaaagaggcctgaggagattggtgctggtgaccaaggtcatatgttcggctatgccactgacgagactcccgagctcatgcccttgagccatgtncttgccacgaagctcggtgccaagctcaccgaggttcggaagaacgggacatgc

SEQ ID NO: 7571 - DNA, 424 bp, Glycine max
  Clone ID: jC-gmfl02220086b05d1
gagagaacatttttttttgtttcatcatataaaatatatatgttctgaaagaacacatacaagtacacaaaaaaaagggggaaattcataaaaaaatacagaaaaaaaaaaacagaattgagtaagagggaaggaaacatagagaaaattttagcaatcagataataagaagccagtagtagtgcaaaagtcccttgccaagagtgttggaaccccttttagttaagcaggtaccttctcccccttgagtggcttcaccacttcccatgtgaagtcagggtcatctctgccaaagtgtccatatgcagcagtcttcaagaacctgccatttccacccctcttgagatcaaggttgatggagatcatgccaggcctgaagtcaaaactctccttcacaatgctgaggatttccttgtcagggatc

SEQ ID NO: 7572 - DNA, 329 bp, Glycine max
  Clone ID: jC-gmfl02220086b06a1
accgggcccccccacctgtatcgataagctggctcgagatagtggtggaagcttccttttttgcaataatatatttgatttgatgtttcaatcctggggtattctttaatctaccaagaattaaatgccagcttgttcttgtgcatgacctcatgcaatctccgtcttttaatttggaaaaatggatccagggtctcttgcttcctggattacagattggcacaagtttgaaaaaagtggtgcttgactcttatgaatgctgacctgcttgttactctttcctcctagtgtaaggctttttcgagaaagcaaaatggcgctacaattca

SEQ ID NO: 7573 - DNA, 394 bp, Glycine max
  Clone ID: jC-gmfl02220086b06d1
ggcaaacacaaaaaagattgttttctatttagcatgttagcataatcacaatatgctcgtacaagtaaaaaattttactgccccaaacattaacaaaccctagaagaacatcaaaacaacccgaacttttcaacaatttaaaggggaaaaataaggggcgcgcccacacaactttgccatcttaatctatgataatttggcactatgatattccacccccactaataatgggggggaaaagaatactttttaagaacaccaattagaagatgcttcaagcattttcatagcacatactgttaaactgggatcacatcattcttggatgcatcttcacattttaaaactataccctcaagactagctggaaaaatgcatttggtccattggcaac

SEQ ID NO: 7574 - DNA, 343 bp, Glycine max
  Clone ID: jC-gmfl02220086b07a1
atatacggctcgaggtaacatagattccatcagcacagaactttgtcgatgttacgaataactgctcactgaagatcttgaagcactactataatcactcaggttaatggcaagggaaacaacatggaacgccaactgtagcatacataggatggtggtgtagagaggtgaaacaagtacctgccaatgtaatagtggtagtgtttaggtacctctgatgatgctgacgataccactgagcaggttgtgatgcctgtatgtactgccagcgattgatatggagatctgggaagtaatatacataactcaatggaagattgattacatgctaagcatcatacct

SEQ ID NO: 7575 - DNA, 356 bp, Glycine max
  Clone ID: jC-gmfl02220086b07d1
gggaaaaaaaaaaaattttttttaatttccggggcgggggccgggttccccccggggggaccccccccccttcaaagggggaacccccccacaagacccaaaagggggaagggttttcccccccttttttccccccttggccccccggggcaaatttaccccccggcccccccttggtccccccgccttttttttttcccccccccctttggttccctgtttcccaacccccccccctgggggccggttcagggccgggcccccccggcgggggggtttcaaaaccggggggttgtccccccccccccccccttggggctttttttcttgggcccgggggggcccagttctttcct

SEQ ID NO: 7576 - DNA, 466 bp, Glycine max
  Clone ID: jC-gmfl02220086b08a1
agtagttaaaattgtgaccaaatacataagttcgtatgataaattataaaaactccaacctatataataactgtaacttctacatttttcatgtaaatgagtccctcacataaatagtagttagatcaaccctccctccaacctttcgtacaagaacaaaacatgattagcatgcatctagagcttatctcataataagcaacttatggtttcaaccagccatggtaaaagatgaatacatattaagaattgatcagaaacacttttgcaatatgggaatttacagtcttataactttaagaggaaattacaagcttttgggtcttatgcattatgatggggagcttctggctgatgaaacttggatcaccatacgcaccagaatcaaaagggtgccctttagcagacaaatcttgaaatgtagattctctccagcaactctctcgaagtataatgggatttgtat

SEQ ID NO: 7577 - DNA, 402 bp, Glycine max
  Clone ID: jC-gmfl02220086b08d1
aaagaaacaaaatctcatttatttcagattacagatgcatcttcaatttttattggggcacataaaacaaccttaacgggttaaacagacaaattagaatgtttcatttcaatgaatatatcaacttaaccaaacaaaacttggccgagaaaatgttgaagtcatacaaaatccgtataactgacagatatcaagggaagttatatgatggagcaggcaaaaagggaaaaggtgcaacagaggcatacgatacgggaggacgcgcttcaatccgatagggacgcctggccttgatattttgatcgccgttatcatcatccaactctgaagactccgtagaggatgcagatttcacaaaaccctttgctttgtcttctaagaattgttcgttttcagaacgac

SEQ ID NO: 7578 - DNA, 409 bp, Glycine max
  Clone ID: jC-gmfl02220086b09a1
ttttaaaattaaccatcgatttagttgcaactggaacacaggtttctttcaatgaaataatattaatatcaatttaataagctggtaatgtaaaatactgctaatgttaatatgaagtttggatggtcttattggcagaagatgctaggaggtgttcatcaatattctgaaaggtaaaacgattttggtttttaatgataatataaccatgaatctaacatcagatattgaacgctacacatcaaaaataaatcgagccaacgcatttaattgtaagtgtcttcatattacctgtgttctgtcacatctttttgcataatattggcactaagtcttttttgatagaaattgtgaagatgtacgtgaatcatggaatcaacaatatggggcccttctttttttattggat

SEQ ID NO: 7579 - DNA, 337 bp, Glycine max
  Clone ID: jC-gmfl02220086b09d1
attgggaaagggccccaaggatttgccccttaggaaaattattccccggttttttttggtataaaaaaatttgtttcaacccccagaaatttttggaaaaaaaaagtcccctttctttttccaccttttgggggggcaaaaccccccttaagggcaaaaaaattttattttttttttgaaaaaaaaatttgcccaaaaaattgtccaagggacccttttttgaaagacttaaaaagggtgaaaaaatttgggggtgaaaattttttaaattggggttgaaaaaaaaggttaaaaaaaaaaaaccccccccctttttttgggaacaccccaatttttc

SEQ ID NO: 7580 - DNA, 483 bp, Glycine max
  Clone ID: jC-gmfl02220086b10a1
gcttcatatataattcctcagcctctatagtagcatcagaaggctttgcagggttacaaggaagtgaaagtgcaaaaaagatgtttcacagacattagttttgataaaattgctgcagaatccatggaaggtagggaagcactatcagccgcagctgtgaagcatagtgttccatgtgcagaaacacttgcagatattgctgcttattgcaatgagagaaagctagctagtagaaacgttaaggatgcctgtgataaactttacatatggtttctcctgaagaaaaaggaggttttattgtcagaagcaagaatactgggactaggcccaagattcatgtcaatttatattcaaaagctagctattgagcgacgcatatattatgatgaagttgaaggtttgactgtggagtggcttgagacaacatccactttggtgcttagcatgtctactagtaagtgtgcatttaggaggggctgccct

SEQ ID NO: 7581 - DNA, 452 bp, Glycine max
  unsure (1)..(452): unsure at all n locations
  Clone ID: jC-gmfl02220086b10d1
cgnacacaaattaagaaactttattaacttgtgaaaatgtaagatatcacagtatatagtatcagttacatacattacagtaaaaacatttattctttagctagctagcctctggtatcatatcatattatctatatttgtttcacgtacgaaacattttgtactcccaaacacaaaaaaacaaagatcattattccttggattgatgagggtgatgatcgctccaacaataagatggaagaacgcgccgttgcaacaacttgcatgcatgggcggcacaagagagagagattcgatgaatgaagtaagtaagtaataatgcgatcgatcacataattgtgcaagcagaggtgttttcttcacagaaatattcatcgcaacggctcacgtaacaaggcctgctcccaccgtaactatcataaacaggccttccataataagcgttataacat

SEQ ID NO: 7582 - DNA, 492 bp, Glycine max
  Clone ID: jC-gmfl02220086b11a1
acaacctttaaccatcacattgtcaacaaattcggcaagaattcatttttttgggaaggtaccaaaccaaaagtggtaatcactgaccctgagcaaatcaaagaagtcttcaacaagatccaagactttgagaaacccaagttgagtcctattgtcaagttgttgggctctggacttgcaaatttagaaggcgagaaatggcgtacacatcgaaagattattaaccctgctttccatttagaaaaattgaaggttatgttaccaatatttcttgaatgttgtgacgatatggtttccaaatgggaaaggttgttgtcttcaaatgacaaatccgaaattgatgtgtggcctttccttcaaaatttaacatgtgatattatatctagaacagcatttggaagcagttatgaagatgggaaacgtatatttgaacttctgaaagagcaaactggacttatgatgaaattgcagaacgcttacattccaggatgg

SEQ ID NO: 7583 - DNA, 316 bp, Glycine max
  Clone ID: jC-gmfl02220086b11d1
aaaaaaaaaaaggttttttttttttaagggtccccaaagggggggggggaaaaaaaaaaggggtttaaaaaccaatttttttttttgggggccccccccgggggaaaaaatttttgggggggggagcaccccaaaaaaaaaaaaaggggggaaggggccccccccttttttaaaaaaacaaaaacgccccccttctaagggggggggggggggcaaaaaaaaaaaggcccccttcttctaaaagggtgttttttaaaaaaagggggggggggcaaatttttaaaaaaaccccctgttttttttttttaaccccccc

SEQ ID NO: 7584 - DNA, 486 bp, Glycine max
  Clone ID: jC-gmfl02220086b12a1
caagcagatcaatctctctctctctctcaaccataatagtcatgggtttgaaggaggattttgagcagtatgctgagaaagcaaagactttgccaccgactcaatcaaacgaagacttgcttatcctttatggattgtacaaacaggccaccgttggacctgtcaacaccagccgtcctggaatgttcaacatgagggacagagctaaatgggatgcatggaaggctgttgaagggaaatccaaggacgaagcaatgggtgattacatcattaaggtgaaacagctgctggaagcagctggcttgcctgcttgataacattgtcatgccttgctttctgattctgtgctagaagttcacaacagtttggaaataaacaattgcagcgtttgaagcttttattatcataatcatatttatttctaatgatttagacatgttgcttttgagtttagttatctgtatcactgttattggaaatgcctgt

SEQ ID NO: 7585 - DNA, 463 bp, Glycine max
  Clone ID: jC-gmfl02220086b12d1
ggacaaataaatcttatttttccattgataataccatggaaaatttcatcagtaatgcatatcataaaaaaaatatccgataaattctatgttagctatataaatgacaaacataggcagagtaactaaaagactaaaaccaacagaaagagacgtgacaaaaattacttgagcacggtaactgaagatgcccacatagataaagagccgccatccaccaaatctctgatcacacactcacttcttggatttcttcagtgcttgagctggctgggatgctgttgcaggtgtagtaatttgtgctgctgatggcctctctcctggaccttgggccaagcgctcctccctccgagcatttttcctctccctgctagccttgttcttggcacgcttcgcctcaaactggtcagacaatgtcttttctcttgccttctcagccttggacttgtgtatgctctccatc

SEQ ID NO: 7586 - DNA, 503 bp, Glycine max
  Clone ID: jC-gmfl02220086c01a1
cttaacaacagtactaaactgaaatgaattatcaaatcaaccatcagtgatagcattgggaataggtatacattaaacattacactctacaaaatactacaacttattttcccctacaaactctgtttcacttttattagtgcaaactccagttttacaccattaagaaaatgaagagcacatcttcaacgggatcaaatgaggtaattcgttcctattctgctctttacaacacaattttttttgctcctttccttcaatatcaacacttaaactactaaaattataatctttctatgattgcagataaaatctgtcattatcaagccgcctttgatcttacagtttatcgctgcctttagcaacgaacaaaaacatcatccctgttccagcgttctaccatacacaatgggcaccacagtatctagagttcgttcatctaagatataatggagcaatctacaaaatacaggtcatgcgccacaaagaagagtctatttggc

SEQ ID NO: 7587 - DNA, 472 bp, Glycine max
  Clone ID: jC-gmfl02220086c01d1
ccactacgtacacgcacattctcctcaaagacaacaatggcaccaacagccaagactctgacttacctggcccaggagaaaaccctagaatcgagcttcgttcgggacgaggaggagcgtcccaaggttgcctacaacgaattcagcgacgagatcccagtgatttctcttgccggaatcgacgaggtggatggacgcagaagagagatttgtgagaagatcgtggaggcttgcgagaattggggtatattccaggttgttgatcacggtgtggatcaacaactcgtggccgagatgacccgtctcgccaaagagttctttgctttgccaccggacgagaagcttcgttttgatatgtccggcgccaaaaagggtggattcattgtctccagccatctccaaggggaatcggtgcaggactggagagaaatagtgacatacttttcgtacccaaaaagagagagggactatt

SEQ ID NO: 7588 - DNA, 120 bp, Glycine max
  Clone ID: jC-gmfl02220086c02a1
tttttttttttttttagtcagtggggagtgggaccatttaaaaggaaaggatggttacgaatgatgtatcgggagaaaactttaatacaagttgaattataatatggttagttaccttgt

SEQ ID NO: 7589 - DNA, 363 bp, Glycine max
  unsure (1)..(363): unsure at all n locations
  Clone ID: jC-gmfl02220086c03a1
ggaggtcgtagatcttttagctatgagttctttccaaaggaagggcaacctagtgacaaacccatatttttcccattcctctatgaaacctcagacattgatgaaaacaatctttacccttttgtccacctttctagtgatggcaatctcttcatctttgccaacaaccgttccctccttctcaaccctaccaccaacacagtggttcgcacctaccccgtncttcccggtggttcccggaactacccggctttcggcatgtcttccatcctccctataaaactcgatggcactgagctaagtagtgccttcatcaaggtagaggtccttgtatgtggtggcaacagccatgatagtttcatc

SEQ ID NO: 7590 - DNA, 310 bp, Glycine max
  Clone ID: jC-gmfl02220086c03d1
aacaaacgtaggtgggatattagagtactattattaatgggacacaattgagttcaacacaaaccgaacttatttttaagggacattattacagacccattaaacatcaaagttcttcaaatgttttgggaacacatccaacattacacaacgagcttaaaaccccccacggagaccgaggacaaggtgaagggttgattccttctggatgttgtagtcagcgagggtccttccatccttgagctgcttgccagcaaaaatcaacctctgctggtccggggggaagccttccttgtcctgaatcttggcc

SEQ ID NO: 7591 - DNA, 477 bp, Glycine max
  unsure (1)..(477): unsure at all n locations
  Clone ID: jC-gmfl02220086c04a1
agagcttttgcttttctttctgcgcgcttttcccaattaagtagttcttccttttctcaaagcaaaaaatgttcatcgagagtttcaaggttgagagtcctaacgtgaagtacacagagactgagattcagtccgtgtacaactatgaaaccactgaacttgttcacgagaacaataatggcacttatcagtgggttgtcaagcccaaaactgtcaaatatgaatttaaaaccaacacccatgtccctaaactaggggtaatgcttgtggggtgggggggaaacaatggctcaaccctcactggtggtgttattgctaaccgagagggtatttcatgggcaacaaaggacaagattcaacaagccaattactttgggtcgctgacccaggcatcagctatcagagtggggtctttccaaggggaagaaatatatgctccattcaagagcctgcttncaatggtgaaccctgatgatg

SEQ ID NO: 7592 - DNA, 478 bp, Glycine max
  Clone ID: jC-gmfl02220086c04d1
aagcacaaaatacttcgataactttatattattttacatgcatgcatagcatagatagcctgctctcaaattagtcagcaggaacaaagatagagagatccaacgatctttaaatttcacatttgccataaatatataacagaaaagagggtatgggatatgagttaagttttgatctcattcaactacagtatcccaaaccattactcttaagactttgaacttcacttgtactccaggatcatgttgttctcaggagctaatccaacacaagcccttaggatgttttccagcatagctcgctgctttgacagtgcattaaccactggcgtactcggtggaaccagaggggccttggtcaggtaactgaggatggtcgcaactgggtggaatgagtggaactttccctcattttcagctttaaactcgattcgagtgctaagctcagcaagaaggaccaagtccaagataataggag

SEQ ID NO: 7593 - DNA, 453 bp, Glycine max
  Clone ID: jC-gmfl02220086c05a1
ggacgaaaagattcctcatcggcaagcaggggttggtttccttctttcttctcttgggcgggcacatcacttccctctacaaggcaagaatattcattcctctcttcctcttgccaccacctattgcttgctttgcttctgtttcgctccactccgagatctacacactattccagtgcagtattgggcaaatgcaactgctggtgaaaattgggtagttaatttgcaaggcgacacacctggaacttgggaagctgcagtaatggatcttgacggagggtgttcagcaacagttagcacaggagcacaggcaagttcaggacgttcagacacgacatggtgcgacctatcggattacacagcagaaccttccagcatgtaaacctgtgcttacacctgcagcagacattgctacatctctattgatgggtatcaatttcattcctgatggac

SEQ ID NO: 7594 - DNA, 468 bp, Glycine max
  Clone ID: jC-gmfl02220086c05d1
aataagtgtttcaattccattctgtaaaaatattcagcaaaatacaatacaacatacacactttctatttcaatatagtaccttttttttgtgcgtgtacaatggcaaagctgaggtttgattttatgacctcaagcaaaccacccaaactcaactatgccactcctaatggctcatttgcatgatagttaaagccaaaggaattgtttaccctgcttcatcttttacaattaaatacatcagttttaataacaagaatgtgtatcctgtgtgtcgcttaagaaaagtattaccattgtaccacgtacctattcaggtagcaatgttgttcctattccaagataagtaggccgtgtccccataaggtctaggattcttcacatgaagcaacaggaagatgatggagactaatatacagaaggcaccaacaaataaattggcaactccaaggaagtgattttttccacc

SEQ ID NO: 7595 - DNA, 475 bp, Glycine max
  Clone ID: jC-gmfl02220086c06d1
gaaaaaaaggacggacaaatatctactataacaatcaataacaagtacattagcaagtattcaagccaagtacatcagcgagtatataaaaatccaaaaactcgatccccctccacaagagaaaacatcaaaagtccaaaaaagagctaatgctcctccaacaagtaacaccactggtttcagaaaccgatttattcagacctctcattttttgctcgagcaagacactaaatcgcagctaaacataaacatacggtaataatgtgaagacaagctactttgaagtaacaccttaaagagacttcttggcaacgaatacaagaagatcaatgacacgtgagctgtatccccactcgttgtcgtaccaagaaacaagcttcacaaagttcttattcaatgcaattccagcctttgcatcaaaaatacttgatctgctatcgccgataaagtcagtggagaccacatcatcttcagt

SEQ ID NO: 7596 - DNA, 109 bp, Glycine max
  Clone ID: jC-gmfl02220086c07a1
caggcattagtcatccattagtaattgctgactcacggtaacaactaaggtgctaggatttggtactctagaaacatgattgccaataaaatgaactttttttcttagc

SEQ ID NO: 7597 - DNA, 133 bp, Glycine max
  Clone ID: jC-gmfl02220086c07d1
gctaagaaaaaaagtacattttattggcaatcatgtttctagagtaccaaatcctagcaccaaatgcaacaaaatgaagtagcaattactaatggatgactaatgcctgactcacggtaacaacaaagttttt

SEQ ID NO: 7598 - DNA, 400 bp, Glycine max
  Clone ID: jC-gmfl02220086c08a1
ggcgcccttcaatttgctttgtgctcactcatttatctattataaccaaacactctttttcatattcggccgcttcttattgtgcttgaactatctgtgacgagcataatggccaagagagcagtgcttttgtctggactaatgagcgtgccctcggtcatggatgcggccatacgcccagcaaagaaccctttttgcgagacgggtgctgtctactgagaaccttgccgagctggttttgagacctgagcaaccacctaccttggcggtgctgagataatgttgcaatgcacgagcaggcttaccaaccaggttgtgttcaccacgaaggggtacactggctcaactggagcctacacaatgtacgtggaccaggagcacgcacatcaaatatgcagtg

SEQ ID NO: 7599 - DNA, 485 bp, Glycine max
  unsure (1)..(485): unsure at all n locations
  Clone ID: jC-gmfl02220086c08d1
aggggcacggtcgatccgaaccggttaattcccatgcccgggtcgacgagantcggcggccgcccttttttttttttttttgaaaaggaataactggtaccatctattacattaatataatcgatctacaaacgatcacaccgagaacttcattgaacagagagcatgaactacttattttccattacagtacacgagaggagtacgaagtttattttgagatacgatgtagctgtacttataaaggcatttagaaatggaaccgataactttatagtttgagatagagtattatactcttatggagttggaattggcttgtgaattggcaatggtggtagaagtggtttcttgaatttggggtgaagtggtagcttaggaataataggctttttgaagaaaggctttggttttagaaattcctccgactcaacagtcgggatgggctttttcactataaatgggtttgggataggcttaataat

SEQ ID NO: 7600 - DNA, 487 bp, Glycine max
  Clone ID: jC-gmfl02220086c09a1
caaagcatcccccccaagctacaagcacccaaaggggaggaataataataagcctaacttctaaggccaaaaaaaaaaaaaaaatagcaaatatgtcaggaaagatcattatctcggctgtttctctcatcctggtggtgggtgtggcaatcggcgtggtggtcgccgtgaacaagaagggcgaggatcctgcagttgaatcccaccaaaaatacgtaggggtcatatgccaaaacaccgatgagaaaaagctctgccatgacaccctgagctccgtgaagggcatggacagcgctgaccccaaggcctacatcgccaccgttgtgaaagccaccatggacagcgtgaccagggccttcaacatgagcgacaggctcaccacagagtacggtggcagcgataacggaaccaagatggcccttgacgactgcaaagacctcttgcaatcagccatcgagagcctccagctcagcactgacatggttca

SEQ ID NO: 7601 - DNA, 492 bp, Glycine max
  Clone ID: jC-gmfl02220086c09d1
ataaaagaatagtttattataacgacacaaaatagactacatcatcctcatagtccaggatagatcttgatgtaataatataattaagcagggtcggtccatcaacatatataacatgataatatgaaaatgtcgagataagactccacatcaagattgaattaaatagacattagaaaacccgaatcgaaagtagattaataataacagtcttactgaaattaattacgtaattaattctcattgtcgaactcctcgtattgcctgaggacctcagcacagccagaagcaacctcctgagacatgaagcccatggcattggcgaacctatcatcggatgcaatgccgatgtagcgggtgagaataaccacagcttcgtcgcggcccggggtgacttccttgcattgagggtgagggctgcttacacgcttggcactggatatttgatctgcgtgatcctcgtgcacgtacattgcgtatgctccagttgag

SEQ ID NO: 7602 - DNA, 463 bp, Glycine max
  Clone ID: jC-gmfl02220086c10a1
ccacattcaaatccaaatggccctttacattacactaataattggcctcctagtaaacaccctagtactctataaatagcatttgcatgcaccttagtcttcaccaaaatactcctcttggcatcttgtgttgtgtccctcttttaagctatttccttctcttaacacaattggttgtgccaattgccatagtcaccaaccaattaacaaaggtatatatatcatcatatcatcaccaaatgaaaaatattgggttgttttttcttgtggtggtggctacttttgtggtggcagccacagctggtagcttttaccaagactttgaaataacgtggggtggtgagcgtgccaaaatctatgagaatggaaaccttctcacactctcccttgacagagcctctggctctggctttcgttccaaaaaagagtacttgttcggaaaaattgacatgcagctcaagct

SEQ ID NO: 7603 - DNA, 471 bp, Glycine max
  Clone ID: jC-gmfl02220086c10d1
accagagaaacaaaaccagatgtattataacacagcaagggggggctttccttcaactccttgcctcactagtttacaaccctaaaacacaagctttggcgtatatatgttattgagttttggggggaaatttcacaaccacaagacacagacaacaacagaaaatatatatacacatacaaatgaacctcttataattttataacttaagcaaggattcttgtaaaatgatttcggagtaaaaaaaaaaaggaaaaaagaaaatgtaactggcaagatttcatgagttaattgttttgctctttatcttgcccactgttctcttcagggctgctttcctgcgcatgaataaccgtagcggttccgcaatcctcattgtgtttcacctcactatcattggttgtctgtgcctgcacatttgaagctgaatttgtttgctgctctgttatcaagctagtaaggccattttgc

SEQ ID NO: 7604 - DNA, 488 bp, Glycine max
  Clone ID: jC-gmfl02220086c11a1
gtggtgagtgaattgcagagtcggcaatggtatgtgtatgagcgtagtcacacttgaattgaattgaagctctgttccttcatgtgacgacaatctccaacgtcatctgagctctcgtatattccccagccatggccgaaaaggtcaccataatgaggctcaaggttgatcttcagtgccacaaatgctacaagaaggtcaagaagattctctgcaaattccctcaaatccgagaccaggtgtacgacgagaagaataacatcgtgaccatcgcggtggtttgctgtaaccctgagaagctcagggacaaaatttgctgcaaaggttgtggtacgatcaaaagcattgaaattgttgagcctcccaagcccaaaccaccacctcaaccagaaaagcccaaggaaccagagaagccaaaagagccacagaagccgaaagagccagagaagccgaaagagccagagaaaccgaaggagccaccgaagcct

SEQ ID NO: 7605 - DNA, 442 bp, Glycine max
  Clone ID: jC-gmfl02220086c11d1
aataaaactccaacaattttattaatgaaaatactttacaatttcagcacatatacactgccatgaatataattttgcacgctataattatctttcgccacaaacaatggagtagtgctcaacaaagcacaaaccaacaataataacagttttagttgcattaatttacacaagaaagtaaattaacgtaataggcaacacatgtgtgtcacgttcatgaggatcattttataatgatatgcaacattgaattaaatattctcatgcaatggagcattctggaggaaggccttgagggaaacgtctgatatcagtgcaataattgtaaatcatgtaattcttttgcacccaacggatctttgcctgccccgtggcgtccagtgattggccagtggaggaagaagtttgggaattgaagtttctgtatgaggctgtgaatggg

SEQ ID NO: 7606 - DNA, 485 bp, Glycine max
  Clone ID: jC-gmfl02220086c12a1
caaccacagtggcgaaagagcttcttcctctgctgctgctccaacaacggtgtcgttttgcacttcctctgccaatgtcgaagctcgcattctcagattcgtctattccctctaccttttgaatcccttctatctcctcaacttcttctttgcccgtctcatgagagggaagtctcttgctgattgatgacatggagcagtatgaaatacttgagcaaattggaaaaggtgctttcggttctgctcttcttgtgaagcataagcacgagaagaaaaaatatgtgctgaagaagattcgccttgcccgccaaactgagcgctgtcgtaggtctgcacacctggagatggagctcctctccaaattaagaaatccatttcttgcggagtataaagattcatgggtagaaaaaggttgctatgtgttcattattataggctattgtgagggcggagacatggcggaagctataaagaaagctagtggt

SEQ ID NO: 7607 - DNA, 514 bp, Glycine max
  Clone ID: jC-gmfl02220086c12d1
gagtcgttagttaaataacacagctctaacacaagccaatcttttcgttcagaaagtgccaaaagttcagcaaaacaaataccattggatggaaagcctaatttagaagtcttgaaatcttagactaaaatacgtctctgcaaacaaactacaacagcagaaggaaaacacgaaataaacagatagatattactttcttgatctcacgggcatgcttcactactattctctgcttcttcaagcatttgcacaacctgtgcaaccccttcttctatttccttcctgatgactccatcaggcatatcaaatgtccttcttttgaagtagagcgatgctgatcttccaccaggctggggatctaccacatcaagcattgcttccagctcatccaccattgacctcttcgcagatcttaccataatatcagatccctcaatggcatcaacagtgaggagcaagacaatgattttctcagaaaaccgctggcgttccccgcatcacgagctacatgacg

SEQ ID NO: 7608 - DNA, 274 bp, Glycine max
  Clone ID: jC-gmfl02220086d01a1
agaaaacgttggtgtttcatagtggcagagctcctgatgggaaaaggactaactgggtcatgcatgagtacaggcttgttgaagaggagcttgagagggctgggtctggatcctctcagcctcaggatgcgtatgttttgtgtagagtgtctcacaaaaataacataggacccccaaatgggcaacggtatgcgcccttcattgaagaagagtgggatgacgcatcgggaatggttccaggggcaaaccttggggttacccgttttttggccac

SEQ ID NO: 7609 - DNA, 490 bp, Glycine max
  Clone ID: jC-gmfl02220086d01d1
gcaacactataggcgaaggactttaggttgggatttgggaattagggttattcgcgtggcgaagatgattgaggtggttttgaacgatcgattggggaagaaggtgcgcgtgaagtgcaacgacgatgataccatcggcgacctgaagaagcttgtggcggctcagactggcacaagagccgacaagatccgcatccagaagtggtacaccatctacaaggatcacatcactctcaaggattacgagatccatgacggcatgggtctcgaactctactacaactaaacacaacaaggtgtgttttatgcgtaatatactatgtgctgggaatgggataagcgctaaatgtaattctgacttgcgaaagttcccatgatttgaaataatgtacatctccaaatgatattgggtattatataccgttgacagcttaagttgctttgttatataacctatatctgatgacttgtttggcttgttgctaagctt

SEQ ID NO: 7610 - DNA, 496 bp, Glycine max
  unsure (1)..(496): unsure at all n locations
  Clone ID: jC-gmfl02220086d02a1
gaaaaattagctgtgtcacatatagcataagcaaattcactgaaataatttcaccaattaaagctgtggcactctcaagggaaagagagaaagatgctgccaatatcaagagactacttgaggaaggggacttggtgatttgccctgaaggcacaacttgtagagagcctttcctcttgaggttcagtgcactatttgctgaactcactgataggattgtcccagttgctattaacacaaagcaaagtgtgttctacggaaccacggtttgcggacacaagttgttggacccgtactttgtgttcatgaatccaatgccaacatatgagatcactttcttgaaccagcttcccaaggagctcacatgcagtggagggaaatcagctattgaagttgcaaactacattcanagggttcttgcagggactatgggatntgagtgcacaaatttgactaggaagagcaaatatgccatgcttgcaggcacagatgggac

SEQ ID NO: 7611 - DNA, 467 bp, Glycine max
  Clone ID: jC-gmfl02220086d02d1
ggattaaattagcacagttctacagatccacagaaagaataaactaaacttccaactgttttggcttgtttattgctaaaaacatttattcactccacacatatctacttatctataagtacttaagagcgcataaagtacatataatccatagaacgttaataactctacactgaaataatctgccaaaagagtttggcttgggactagccgggagaaggttgggtatcatttgacacccacataatctagggtaagggtaagggtcggcaaccaagtaatcaataacgcctaccaccggctgtcgacagaagaactcgatttggtttctttcccttcttccccaactcatttgtctttggtgcattcgagcttatattagattctgctcttgatataacattggagtatgattgtgtctccccatttctcaagcctgttgagacagaagaatcagaggtcctgtt

SEQ ID NO: 7612 - DNA, 521 bp, Glycine max
  Clone ID: jC-gmfl02220086d03a1
cacaaaggtgatagctggaaaaggtgtcctttgtgctttgtgatgatatctgccaaggatttatataccttgcacatcacaaatgtaaaacagtatcaagtaggagataatgttgagttcacctttttaacacggaaaaaggattcctttactctgtcacttaaaaataaacgagagacaaataccacatcaggtgtcgatggagatatctgtgatcccttttctaagttcactcttatatcagatgtagatctctcagtgaagcatgcaatatccgatctagatggttggctagccagagctgattcaggtcttgttgatgacctggagaagcttccttatgtttgtgctgcaatgcaacaattagaacagaggaagaggtattggagtgagcacaggtctcatgacagtgaaaaatcttctatgattattgattgtggacaccagataccatcaacagttgcaaattctatggatactgatgatgaatactgttctaatggatcaataacttcttcttc

SEQ ID NO: 7613 - DNA, 122 bp, Glycine max
  Clone ID: jC-gmfl02220086d03d1
tttttttttttttttttacaaggtaactaaccatattataattcaacttgtattaaagttttctcccgatacatcattcgtaaccatcctttccttttaaatggtcccactccccactgact

SEQ ID NO: 7614 - DNA, 436 bp, Glycine max
  Clone ID: jC-gmfl02220086d04a1
gcaaagtaaagctctcttggttttgggaaccgaaacctaagaaaaacgcagaatctgtttcggaaagcgaaggaggcatggcatttgagtccaacgaagttgcagccacaacgctccaagccatatgctacaagcgcggttccctccagcttctcgatcagagaaagctccctctggagacagtttacttggaaattcgggattcaacggatggctggaatgccatacgggaaatggtggtccggggagcacctgctattgcaattgcagcggcactctctttggctgtggaggtgttcaatttagattttaatgggtcagctactgatgctgtatccttgctgcagaagaaattagaatatcttgtcacaagtcggccaactgcagtgaacctatcagatgctgcgacaaaactcaaagaagtgatatcaaatgc

SEQ ID NO: 7615 - DNA, 455 bp, Glycine max
  Clone ID: jC-gmfl02220086d04d1
ggacaaggggtcaatttttatcatatctaatgtttatacaatggatcactacacatatgacataattatctcatgcaatataatatatttttccatgccataccaaacattgcataatatattgatgttatcatcttatacaattaggtctcaaagttaataagtcttatctaacttgcgtaccaaagaggctcttaaagaaccctaccactccaatacttttcaagcctacaatgttgtaacgtgtgataaaaatctcactctaccttaacctgttttctgtacgaaggctttgatgtcaaatgcatcaccagcagatgtcttcgtaatgacacccttctcagtgatgatccccgatattagattagcaggagtaacatcaaaagctgggttccacacagaaattcctgaggcagcaatctgctctccaagtcctccatgtgtgttcagcaatt

SEQ ID NO: 7616 - DNA, 482 bp, Glycine max
  unsure (1)..(482): unsure at all n locations
  Clone ID: jC-gmfl02220086d05a1
ctttcttttcttctcgcagagcgaaatcccaatcccacacaaatggcatgctcagccacctctgcttctctcttctccgcaaaccccacacctctcttctctcccaaatcctgcctctccctccctaacaactctctccacctcaaccctctccccacgcgcccttctctctccctcacgcgcccctcgcacactcgccgctccttcgtcgtcaaagcctactccagcgagcttccgctagatggaaacacgcgaccggatttcgaagcagaggctgtagttgaccagtagtctatcaacgtgaaactatctgattacattgggaagaaatatgttgtgctcttcttctacccgttggacttcactattgtttgtcccacagaaatcactgctttcagtgaccggcatgcagagttcgaggcactaaatactgagacattgggtgtntcagttgacagtgtgttctcgcaccttgcatggat

SEQ ID NO: 7617 - DNA, 535 bp, Glycine max
  unsure (1)..(535): unsure at all n locations
  Clone ID: jC-gmfl02220086d05d1
agtacacttcaaaatccagcatgcatttattagtatattcccataccctgcggctcaaaatttaaggacttacaaaacattaagaaacaagacccttttgcaattcacactgactgatacagatgcagatagccactcttaactatctagtatcctagctacaccgctgcaaagtagtctttgctaagtttagggtctggtttcatggacttctccccaggcttccacccagcagggcaaacttcatctgggttctcctgcacatactgtaaggcctggagagttctctttgtctcgtcaacacttctaccaattgccaagttgttaatggtagaatgctgaataaccccttccttgtcaataatgaacaaacctctcaatgcaattccctgatcaggaatgagaacaccataagatttcgatatggatttggtgacatcagaaatcaaaggataattcaagtcaccaaggccacctgactttctatctgttnggatccatgcaaggtgcgagaacacactgtcaactgaaacac

SEQ ID NO: 7618 - DNA, 612 bp, Glycine max
  unsure (1)..(612): unsure at all n locations
  Clone ID: jC-gmfl02220086d06a1
gcactcataataattaaaacaaagaaaaacaacacatacctgttggtacatgccaacaacttgcgttagcctttaaccggaaggagaatgactgcggcttagtctgacattgaacagataggaaccttcttagacccctgcatgatctgcatgacgctaatgctctttgcaaatatctagaatcattctacaccctacgcaagccagtggcatctacaataaacacattagctggggcattgtacaaggtgttttgtgcatcccctgatccagctagtaaggaaatgcgccaggcatgttttgattatttaagccttggaggtgttttctcagatggaccaattgctctactctctggtctaaatcctcgtccattaagcttggttctccacttctttgccgtggctatatatggtgatggtcgcttactcataccattcccttctccaaaacgaatgtggattgcagctagattgatttccggtgcctctgctatcattntccccattatcaaggccgaaggaattagacaaatgttcttcccagtaactgtgccagcgtattacagaacacccnctaccaattnggaagataaatacacatcttggaagg

SEQ ID NO: 7619 - DNA, 521 bp, Glycine max
  Clone ID: jC-gmfl02220086d06d1
cagtcagataaaacttgtccttccaaaatattcaaattaaatactataaccttcatgccacatcctatgtctatggctaaagttttaatagttttaagtcagtcactgctgtttttatgccaaaacaaattaacagaagaacaagcagcatttacacatttccaacagcaagaggcattttgactttggccttaggtgtttgctaattttatttatgtagccatctaaaatactgagatcttaggtcaaagcatccatccaggaataaatccattgacttgttgagcttgagttgtggcagctagctgctgctctgaggcttcagggatgtacctgtagtcagaacctatctgcaatgtggggttgcactccaaaggctggaagaagccttgagagtgagcattttgggttccatatggcatactttgctcaccagcttcccatgtttgcctatactggtttcttgaattgatttcttccagcttcatggtcaaagatctgtttgcttcaccaacatatgc

SEQ ID NO: 7620 - DNA, 134 bp, Glycine max
  Clone ID: jC-gmfl02220086d07a1
cttctgagctctgattagggtcgcctagccgaggggttctctatgagaaaggcttcttccactatgcattgcgcacttctgcgcttttgggttcccctgttgctgcttgctaacttcaactatgctccttctgt

SEQ ID NO: 7621 - DNA, 285 bp, Glycine max
  unsure (1)..(285): unsure at all n locations
  Clone ID: jC-gmfl02220086d07d1
gcgaatccgtgccccccgggtcgacgagctacggcggccgcccttttttttttttttttgaaaaggaataactggtaccatctattacataaatataatcgatgtacaaacgatcacaccgagaacttcattgaacagagagcatgaactacttattttccattacagtacacgagaggagtacgaagtttattttgagatacgatgtatctgtgcttataaaggcatttagaaatggaaccgatgactntatagtttgagatagagtattatactcttatggag

SEQ ID NO: 7622 - DNA, 363 bp, Glycine max
  Clone ID: jC-gmfl02220086d08a1
tctcagaggactcagtatgtccactcctccaagtggtttcttcaatgccatcatgtagacttattaaagaatcattgcagaggagaatttccatgaactttgactattatatcagtgcgagtactgactttgtgttattagatgagacaactttaatcaatatcattaagcatccagatctgacagtaacgtctgaagagaaagtccttaatgcaattctaatgtttggcatgaatgcaaaacagttgtttgggtgggaagtggtggatcagttaatggaaaattcaaaaccagaactcctttttggtgagaggcttcagttaatctatgacttgttgccatttgtgcgatttccactactac

SEQ ID NO: 7623 - DNA, 295 bp, Glycine max
  Clone ID: jC-gmfl02220086d08d1
agaaccacaaccctttatccatgacttgattcaaataatttagtcaataagcaaaccataatgtacatgaaggagctggaattgtattttaggaaggtatggtattggcatggctaggctttaaaggaagtagccatacaattccaagtaacaaatgcagaaattccagggattgggggcatcggggggggttcctgtgagcacaacccggaaatacctgaagggaaacaaagcgttggggccaattatgggccaagaggcaaactggccaggtttacatatactccgatcattt

SEQ ID NO: 7624 - DNA, 471 bp, Glycine max
  Clone ID: jC-gmfl02220086d09a1
ctgggttgcagggaaaaagaaaaataaaatgggttccgataataccaacttggagttcttgaaggagatcggtttgggctcctccaacattggttcttacattaatggccaatggaaagccactggttcttctgtcacttctgttaatccttctaacaatcagagcatagctcaagtgactgaagcgactttgcaagattatgaggagggattgcaagcttgcagtgaagcagccaagacatggatgactattccggcaccgaagagaggtgagattgtgagacagattggtgaagcattgagggccaagttggatcctttgggtagactggtgtctcttgagatgggaaaaattctcccagaaggaattggggaagttcaggaaattattgatatgtgtgattattgtgttgggctaagcagacaattgaatggatcaattataccatcagaacgtccagatcatatgat

SEQ ID NO: 7625 - DNA, 149 bp, Glycine max
  Clone ID: jC-gmfl02220086d09d1
gaaaaatatgattaaaatattttcataaggtattttagaaagcttataagataaatccaaatatactgcaaattagttctgccaaaaacatcctaaaagttatgatcttcatcataaaatgaaagagggaggtgggggcgtggagggtg

SEQ ID NO: 7626 - DNA, 493 bp, Glycine max
  Clone ID: jC-gmfl02220086d10a1
ttttaaaattaaccatcgatttagttgcaactggaacacaggtttctttcaatgaaataatattaatatcaatttaataagctggtaatgtaaaatactgctaatgttaatatgaagtttggatggtcttattggcagaagatgctaggtggtgttcatcaatattctgaaaggtaaaacgattttggtttttaatgataatataaccatgaatctaacatcagatattgaacgctacacatcaaaaataaatcgagccaacgcatttaattgtaagtgtcttcatattacctgtgttctgtcacatctttttgcataatattggcactaagtcttttttgatagaaattgtgaagatgtactgttatcattgtatcaactatattgtgcccttctttttttatttgatttggcaaacacggctacttttctccaaataagatggatcatttgtattgccggctttgtgcacaattatctacttgtaagaagt

SEQ ID NO: 7627 - DNA, 471 bp, Glycine max
  Clone ID: jC-gmfl02220086d10d1
aggggtaaggtaagattagatgatttgcattcaacggtcttgtaccagagttgacactcaatcaggtcacagtacagaagaaattaacaggtttcattgtggtaaactagtagcaatgcacatcacaactgaaaagatgttattctaaagctaatcagggatgaaaattgtagttgagaatcccttttaacacagttcaatgctttcccctcgaaaaattttgccttcaaatttgtagggcattagcaatagacccggctagactcagcacttcaaaaggagctgtatttgctacagctttgacagtaagagggcaagaatctgtaatccagaagtaggcaaatgcattctccaaggcgtcttttttatgagtgaatcgctcccatgattggttaggaaacacgccatgggtaacataggcactcacctttgctgcaccattggctgccaaaactttctgacactcaatca

SEQ ID NO: 7628 - DNA, 495 bp, Glycine max
  Clone ID: jC-gmfl02220086d11a1
cttagaagcaaatgctggcatggtatcccagattcgtgtggcaagaccacctgctgaaggacggggaaggaatcaattgcttccacgttattggcctaggattaccgatcaagagttgcaacaaatatcaggagattcaaattctacgattgtgccactctttgaaaagatgcttagtgcaagtgatgctggtcgaattggtcgcttggttttaccaaaagcatgtgctgaagcatatttccctccaatctctcaaccagagggccttcctttacgaatccaagatgtgaaaggaaaagaatggatgtttcagtttagattttggccaaataataacagcaggatgtatgttttagaaggtgtaaccccctgcattcagtctatgcaattgcaagctggagatactgtaacatttagccgtatggaccctgaggggaaacttataatggggtttagaaaggcaacaaattctactgcagtacaggaaacactacc

SEQ ID NO: 7629 - DNA, 504 bp, Glycine max
  Clone ID: jC-gmfl02220086d11d1
ggttctaaaaaaattaataatatactgaataaagtgtcgaagaacaataattaaattaattcaaggaattaaattaaaacaataattatattgatcaactaaatctaccatatgaaaatttcattctttacttgtaaagagccgaaattatcttcaccttaataattgtagatgtagaagaataatcagaatcttcctaaatccacgtaatttcttcgaaaatgctttgcccaacacaatgatattgtcacaccagaagctatgcggcgtcttccatttgatattccatttatcgcctggagatttacaatgctaatgacctatttctgcattacaaacgttgttgcccgaaattggacttcttacaagtagataattgtgcacaaagccggcaatacaaatgatccatcttatttggagaaaagtagccgtgtttgccaaatcaaataaaaaaagaagggcacaatatagttgatacaatgataacagtacatcttcacaatt

SEQ ID NO: 7630 - DNA, 490 bp, Glycine max
  unsure (1)..(490): unsure at all n locations
  Clone ID: jC-gmfl02220086d12a1
caaaggttggcatgccgatgaagtcattggatatatttagggaaatgcagtcaaaactaggtagaacagatgttgccgcatataatcaaataatagagatactatgcaaagcacaagaatcagaattggcagaatcaatcatggaagattttgtcaggagtggtctgaagcctgttacgccatcatatgtttatttactaagcatgtacttcactttggaattacatgataaattggaagaggcattctaccagtgcttggagaaatgtcgtccaaattgtactttatacagtatatatctgaattctttggtgaaaataggtaatattgacaaggccgaggatatatttaaccaaatgaatcgtgatgcgactatcggtgttaatgctcgatcatgtaacatcatcttaagtggatacctctcttcgggaaaccacttaaaggcagagaaggtctatgactttatgtgtctaanaaagtatgaaattaa

SEQ ID NO: 7631 - DNA, 493 bp, Glycine max
  Clone ID: jC-gmfl02220086d12d1
ggttctaaaaaaattaataatatactgaataaagtgtcgaagaacaataattaaattaattcaaggaattaaattaaaacaataattatattgatcaactaaatctaccatatgaaaatttcattctttacttgtaaagagccgaaattatcttcaccttaataattgtagatgtagaagaataatcagaatcttcctaaatccacgtaatttcttcgaaaatgctttgcccaacacaatgatattgtcacaccagaagctatgcggcgtcttccatttgatattccatttatcgcctggagatttacaatgctaatgacctatttctgcattacaaacgttgttgcccgaaattggacttcttacaagtagataattgtgcacaaagccggcaatacaaatgatccatcttatttggagaaaagtagccgtgtttgccaaatcaaataaaaaaagaagggcacaatatagttgatacaatgataacagtgca

SEQ ID NO: 7632 - DNA, 472 bp, Glycine max
  unsure (1)..(472): unsure at all n locations
  Clone ID: jC-gmfl02220086e01a1
gtttgttgttgtaactcgttcttcttcttttgttgttctgtgtttgtgtttgttttttctctcacctgaaaatgtcttgctgcggtggtcactgaggttgaggaagcttctgcgagtgcggcaacggctgcggaggctgcaagatgtacccagacttgagctacactgagtcaaccaccaccgagaccttggtcatgggagtggcacctgttaaggctcaatttgagggtgctgaaatgggtgtgcccgctgagaacgatggctgcaaatgtggaccaaactgctcctgcaacccctgcacttgcaagtgaggtgttgggagagcaagcttcaagcagagatagcccttaattaggaataatgataaactattaatgtgtagctaagaacttatgtattatgtctgtgatggttntcgtgcactctggtgttttgtgttaaacatacatccttagaataaagtggtcatgtc

SEQ ID NO: 7633 - DNA, 480 bp, Glycine max
  Clone ID: jC-gmfl02220086e01d1
agctttcaagagacaaactgttttgaaaaatgggatccaaggttgttgcatccgttgcccttctcctctccatcaacatccttttcatttccatggttagctccagcagccactacgatccaccgcccccaccttgttacgtccctgctcctttaacaccaccaccatcattgtcaccaccaccgtcattgtcaccaccaccaccgtcaggacctagttgtccggatctgagtgtttgcctcaatattttagacgggtctcccgcggatgattgttgtgccctcatcgctgatcttgttgaccttgaagcctctgtgtgcctttgcatccaactcagggtcctcggaatagtaaaccttgaccttaatttgcagttaatattaaacgcctgtggaccaagctacccgtcaaacgccacttgcccccgaacctaagaacagaatatgtatggcactaatcaccatattacttcgtatcatg

SEQ ID NO: 7634 - DNA, 421 bp, Glycine max
  Clone ID: jC-gmfl02220086e02a1
ctctcaagtccaacctacccctttttcttctcccaccaacttcaccgtcttcttcctcgatcatgtctcacttcaagggcaagtaccatgatgagcttattgccaatgctgcttacattggcactcctggaaagggtattcttgctgctgatgagtcaacagggacaattggcaagcgtttggccagcatcagtgtagagaatgttgaatccaacaggcgtgctcttagggagctgcttttcaccgctcccggtgctcttaaatatctcagtggtgtcatcctctttgaggaaactctctaccagagcacagctgcaggcaagccctttgtggaagtcttgaaggaggctggtgtgcttcctggcatcaaggttgacaagggcacagttgagcttgctggcactaatggagaaaccaccac

SEQ ID NO: 7635 - DNA, 447 bp, Glycine max
  Clone ID: jC-gmfl02220086e02d1
aacaattaacgatgttgatataagatatataacatgaacagcagcaaatgttgcaccaccaaaacaatgttcaagtagttaatgtatgatctaacatattttcttgctaaacattgactttgacagcacccacctaatttgttcagtttcttggtccttttattcttaaaattgattaaaaagttattgtaacaataattcccaattttgctaacagaaagccagtcttagccccatgctttatatctatttacttttgtatttcttaatttcttgctataccatgggcaaaaaatttcttcataaatacaaacacttatgagactattacaacagaacatagactatgacaaaataattattacggttttggaagtttggactgtgtgtcacttggggaaggaattacccggccaaggtgaagaagcttctatacacacttgcaag

SEQ ID NO: 7636 - DNA, 518 bp, Glycine max
  unsure (1)..(518): unsure at all n locations
  Clone ID: jC-gmfl02220086e03a1
agagaacgagaaaaagacatcgagaaagcaatgctggaggctgagagggaaagggaaagagaaaaggataggatggctgttgatagagcaactttagaggctcgtgatagggcatatgctgaatcttgtgaaagggctgcatttgaaagagcaactgtggaagcacggtacaaggcactggctgaggccagggaaagacttgagaaggcatgtgctgaggccagggataagtcaaacattgataaagaaactatagaggcaagactgaaagcagaacgcgctgctgtagaaagagcaactgcagaggctcaagaccgagctatggaaaaattaaagaatgaaaggactgcatttgagtccagagaatggttagcgagatctgtatctgacaatttttgcggaagaccagactcttcatcctccgatatgctggatcctgagtttcagaacttaagctctaccacaggttccagacatccatattcactttatgngtgctgcctcttntcttagagatc

SEQ ID NO: 7637 - DNA, 466 bp, Glycine max
  Clone ID: jC-gmfl02220086e03d1
gacccaataatagtagttatgatttgtatatatcagaacaacaaaatatacataaactgtaatttttttccagccagtgatcagattttatttctatcataattctaagtgttttggaaacacattgggcgccaatacagaataatcaaaagggagaacttaatttctctcccttttcaagccttctccttagatggaactgtcccatctgtgcctgcaagcatggcatatttgctcttcctagtcaaaattgtgcactcaaatcccaaagtccctgcaagaaccctttgaatgtagtttgcaacttcaatagctgatttccctccactgcatgtgagctccttgggaagctggttcaagaaagcgatctcatatgttggcattggattcatgaacacaaaagacgggtccaacaacttgtgtccgcaaaccgtggtttcgtagaacacactttgctttgtgttaa

SEQ ID NO: 7638 - DNA, 546 bp, Glycine max
  unsure (1)..(546): unsure at all n locations
  Clone ID: jC-gmfl02220086e04a1
gtgctcattggaagatggaagtgtaatcaagcctttatatgagcagtcatttacaattccaagattcaaaaagcttcaacttgagccaccggagattgttgaaatacaggctaatgatggcactacattgtatggagctctgtataagcccgatgcttcaaagtttggacctccaccttacaaaactatgatcaatgtttatggtggtccaagtgtacagcttgtttgtaactcttggcttagtacagttgatctgagagcacaatatttgagaaaccaaggcatcttagtttggaagttagacaacagaggaactgcgagacgggggttgaaatttgaaagctatttaaaacacaaacttggtcaaattgatgctgatgatcagctaaccggagcagagtggcttgtcaaacaagggcttgcanaaggtggtcacattgggttgtacggatggagctacagcgggtatctctctgccatgacactgtcaagatatccagatttcttcaagtgtgcaatagcgggcgcccctgttacatcatggga

SEQ ID NO: 7639 - DNA, 509 bp, Glycine max
  Clone ID: jC-gmfl02220086e04d1
gatagccagaagagtttctttttagggtgtgaagtgggcaaaaatagccatcaaagtagctttaaggcaagaagaaataaaaccaactattgggtaaaaaaaaacttgagaaactactctggccattcaaccaaagatggaataacaagttattttacagattcctctgaatgaagtcccacatcctcccttccatgtaaactcgatcgctatgacgccttggcatgtgacgttcatctgggaaaactattaactcatacggttttccagctgccacaagtgcattgataagtcttgcagtgtgcctgaagtgaacattctcatcaatcatgccgtgcacaagcaacaaccgccctttcaactgctgcacttggttcataacagaaccgctttcatatcccaacttgttttcagatggcaaccccatgtacttctctgtgtaaaacgtgtcatatccgtcccatgatgtaacaggggcgcccgctattgcacacttgaagaaatctgga

SEQ ID NO: 7640 - DNA, 482 bp, Glycine max
  Clone ID: jC-gmfl02220086e05a1
ctctctcccctacttccaaaacccttcttcacttctccagttcccattgctgcaacagctacctcatattgttccgaatggaatgatattgccgggtgatacccttgcttaacgatgaagatgtcactggttcaacttcgacctctcttgacaaggcgagggttcagcacaagctctgagaaccttgttgcttctgtgctctttgagagactgccagtggtcattcccaaaattgaccctgtagtttatgcatttcaagaattctcgtttcgatggcgacaacaatatcaacgcagatatcctgatgaatttctagacaaatctgatgctaggggtaaaggtgattatcagattgactatgtgccagcaccaagagtcactgaagctgacaaaaacaatgatcgaaggtcattacaaagagctcttgatagaagactctaccttctactctatggtaatgcatatggtgctacaagcgggaa

SEQ ID NO: 7641 - DNA, 462 bp, Glycine max
  Clone ID: jC-gmfl02220086e05d1
gaactctaaaacaagactagttggtgaactggtaagatagatatccaaacataattgtcaataaaattgggcaaatttgggatgttaagtgtaacttcaaattgaaatcttcagttatgcccagaaaaactatgctagcttgatcttctttcaaggtccctcactgtcatttagagctaatttgcaatagtttcaactaaacaactatcctccattgtcatcagctaatgatcatcttgtttaaaaactcagcttgctcgggaaaatactccatcagttcatcctttgtcacccagacatgatcctcacattttccgatgttgaatttgtttttggcaataacttgagacttgaagaagaatctcttaaaagatgtggatctagactggtcttctgtaggctgaacaaccatatgggccattggagcatttccaacaaaatatgtgttagaaagatctccta

SEQ ID NO: 7642 - DNA, 360 bp, Glycine max
  Clone ID: jC-gmfl02220086e06a1
ctctctcccctacttccaaaacccttcttcacttctccagttcccattgctgcaacagctacctcatattgttccgaatggaatgatattgccgggtgatacccttgcttaacgatgaagatgtcactggttcaacttcgacctctcttgacaaggcgagggttcagcacaagctctgagaaccttgatgcttctgtgctctttgagagactgccagcggtcattcccaaaattgaccctgtagtttatgcattttaagaattctcgtttcgatggcgaccacaatatcaacgctgatatcctgaagaatttctagacagatctgatgctaagggtaaaggtgattatcagagtgactat

SEQ ID NO: 7643 - DNA, 478 bp, Glycine max
  Clone ID: jC-gmfl02220086e06d1
gaactctaaaacaagactagttggtgaactggtaagatagatatccaaacataattgtcaataaaattgggcaaatttgggatgttaagtgtaacttcaaattgaaatcttcagttatgcccagaaaaactatgctagcttgatcttctttcaaggtccctcactgtcatttagagctaatttgcaatagtttcaactaaacaactatcctccattgtcatcagctaatgatcatcttgtttaaaaactcagcttgctcgggaaaatactccatcagttcatcctttgtcacccagacatgatcctcacattttccgatgttgaatttgtttttggcaataacttgagacttgaagaagaatctcttaaaagatgtggatctagactggtcttctgtaggctgaacaaccatatgggccattggagcatttccaacaaaatatgtgttagaaagatctcctaagactgatttcaatgc

SEQ ID NO: 7644 - DNA, 415 bp, Glycine max
  unsure (1)..(415): unsure at all n locations
  Clone ID: jC-gmfl02220086e07a1
ctctcaattgntttctacataatacaaacctctctaagttttgaagcttattatacccaatctcgatatgcagatcttcgcgaaaaccctaactggcaagacgaacaccttggaggtggagtcctttgacaccatagactgcggggaggccaaaatccaagacaaggagggcattcctccggatcaacagcgttaaatcttcgcctgaaaacagttcgaagacggcagaacccttgccgactacaacatccaaaaggagtccacgctccacctggaactacgactgcgtggaggcatgcaaatcttcgtcaaaacccttactggcaaaacaatcacgctagaggtggagtcctccgacacaatcgataacgtgaaagccaagattcaagataaggaagggattcctccggatcaa

SEQ ID NO: 7645 - DNA, 467 bp, Glycine max
  Clone ID: jC-gmfl02220086e07d1
acataacgaagaaattatattaataaaattgaagtacacatcattaacaagattccacagtaccgaaactagacagggacaccacggagcctaaggacgacagagaaattggaaaaaggaaagagaaattattattagaactgaaacatctcattagcaagattcaactgaactagaaatcaccaccacggagcctgaggacaaggtgaagcgtggactccttctgaatattataatctgcaagcgtgcgtccatcctcaagctgcttccctgcgaagataagacgctgctgatccggtggaatcccctccttatcctgaatctttgccttcacgttatcgatcgtatcagaactctccacctccagagtaatcgtttttccggtgagcgtcttcacgaagatctgcatccctccgcggagacgaagcaccagatgaagcgtcgattccttttgaatattgtaatcg

SEQ ID NO: 7646 - DNA, 549 bp, Glycine max
  Clone ID: jC-gmfl02220086e08d1
cacaaggaaaactatccatacaatgtttttattagactagtcacggaaacaatcttgaaaatcagacaaaaaaaaatgataaaacctacatataatacataatggagtaacatataaagccaagctgtatacattaactgccacatcccccacccccaaggaacttgtaatagaatgggaggggagagagaataatactaaagatacaacaattctctgctatgttatacttgattgggccattacaaaatatataaatttcagacacaatacgttgacctgtgaaggaaattagcatactgtgcgcccatagcacaaacaagcaaggtaaaggttttttgaccatttttccttaacatgtgtgcttggaaattgagatgtacgcagagtttcctgggtttcatctcctggcctgcgcctaggaatgctaagtataagagcagattgatcccatgtagcagcccgtgctgtaatcctataaccattatcccatcgtctgtggattccctcactaggatagagaaaatcaagttcaacaacctgatcact

SEQ ID NO: 7647 - DNA, 479 bp, Glycine max
  Clone ID: jC-gmfl02220086e09a1
ctccatattatatcaactggagctggggaacctagactctactcgctctcgtccccgccggagatccaccatggacgcaactctgcgcgcacagcacctctacgattggtcccgagaatagaaattaactgatcgccgaaacccctgccgagatatactcacttcggataaagtaaaccactgtacccaagccctcaaccttctgaaggagaaacttcactatccttaagtgatcactgaggaggaaccacactcgcatgcgaacaagataactccccctgagatgagaagaggatgcaccgcctcgtatgacgccctcaatttgagcaaaaaccgatgcacggacgttttggcatttaacaagaacagggtggttctcaaagcaagtactgattataagcctgaagcacacgggtatatcaatgcaagccttatatccacctcatccgctggaaatgtgtgccactttatagccacac

SEQ ID NO: 7648 - DNA, 491 bp, Glycine max
  unsure (1)..(491): unsure at all n locations
  Clone ID: jC-gmfl02220086e09d1
gtaantactgctcgctgcgggagcgaggacgaggtggagaaaatggctgacgagctcagtaggacgtggggcggcctccattgcataggaaatttatcctcccaaggagccctccaatttcctgaacgaagggagctaacgagactaatagtgaaagctgtctcatgctgattgcaagaatgcaactataagcgatggcctcgggatgccattaaccgtcacttctatgacatccctagtgacctggctttcacacaacccctaatcctcttgtaacctatgtctgggcgggatgattacagggtggttcccaaatcttacccattgaaatctacttttcctatgactaactttcgagaccaggaattcatgttaaatgaattgaacttttgctttaagtaaccatgtatgcggcaaagacttcttaaagatgtgtgtctaccgcctgacacattaaatcctccaacatgttggatgtgtgatgcatatcc

SEQ ID NO: 7649 - DNA, 498 bp, Glycine max
  Clone ID: jC-gmfl02220086e10a1
ccacgtccctctctcccacaatggacctccatcgccggccgccccacgccgccgctgacgacggagccatccaccacaagaagaggagggactcctccacttcctctcccaaggcctccgacgcgctccctctccctctttacctcaccaacgccatcttcttcacgctcttcttctccgtcgcctacttcctcctccaccgctggcgcgacaagatccgcagccacacccctctccacgttgtcactctgtccgagatcgccgccattttctccctcatcgcctccttcatctacctcctcggcttcttcggcatcgacttcgtccagtccttcatctcacgcgcctcccacgactcctgggacctagacgacgccgtaacagctccctcccccgcaattaccaaattgccctcacgggatacctcaattattttctccgaggacgacgaggagattgtgaactccgtcgtcgagggcgtcacgccctcctacgcgc

SEQ ID NO: 7650 - DNA, 448 bp, Glycine max
  Clone ID: jC-gmfl02220086e10d1
aacaaacaaagacattttcatttgggatagaaaaatattattatccaataataggcatcctacaaatacaattaaagtataagaaaaagggcaagcaaagtagagaagctgtataaaacggcaaaaattaattaattaaaaatgaagtgaggcaattttcactcaatgatggattggataacacctgcaccaacggtcttgccaccttccctaatagcaaacctcattccctgttcgcaagccacaggcacaatgagctccaccaccatcttcacacggtcaccgggcatcaccatctgcgactcttcatccctatcgttggtgatagccgtaaccttcccagtcacatcggtggtcctcatgtaaaactgaggcctataccctgcaaagaaaggtgaatgtctcccaccttcttccttcttcaaaacatacacaatcgctgagaact

SEQ ID NO: 7651 - DNA, 491 bp, Glycine max
  Clone ID: jC-gmfl02220086e11a1
ctaaaattctctttctgcttagtctccacgctcttgcttgcttttgtgtgagagaacaatggcaatggtgaagtctcccaagaagcaagtgaacctcttctattcccttgactgtgaagaccttgcccagaacgttgctcttcaatcaccccacatcgttctccagaacatcaaatggaggtcatttgctgatggatttccaaatatatatataaataatgcagaagaacttcgaggtcaacatgttgctttcttggcatctttcagctcccctgcacatgtctttgaacaactttctgtcatatatgcactccctcgtttatttgttgcttccttcacattggtattgcctttctttccaactggatcctttgagcgaatggaggaagaaggagatgtagcaactgccttcaccctagcaaggatgttgtcaaatattccaatttcaagagggtggcccactagtttagtcatatatgacattcatgcct

SEQ ID NO: 7652 - DNA, 425 bp, Glycine max
  Clone ID: jC-gmfl02220086e11d1
gaacattcatcaactcattcggctacaagaaaagacaatgatagatatgctaagcatattatataggggaaaagaattacaatacaacacgtcaaatgtcttggttgaggagaaaaaagagcgttaacacccactcaatggctcggcagaacaagcaacgaaaagtatacaggaaagaaaggaaggatccagaaggggacagggaacatgtggagtagaactcttctttcctctctccaaataattaaagatctacacagacagcaatgcaaagccaaacgtggatgacaacaatctaatctaatgtttctccattttccttcccaaatttcgcttaccctcaattttttatttattctggagtccacaattaatgactgcaaccacgtccttgacctcaagattatgatattttggttacatct

SEQ ID NO: 7653 - DNA, 468 bp, Glycine max
  unsure (1)..(468): unsure at all n locations
  Clone ID: jC-gmfl02220086f01a1
ctcggaggcactccatactcaactcttccacactccaagagtgggaacagaatctcgatacgtctcatttaccagaaatggtttttggggaaaacactttgagtctgaaacacttgagcagtggcaccaacattcattttaatgcatttgatgctctacgtggctggaaacaggaagcattgccgccagttgaagttcctgcggcggctaaatggaaatttagaagcaagccctctcagcaagtaatacttgattacgactatacatttacaacaccttattgtggaagtggcactatggagattgataaagatccgaatgagggagagagagagacttctaaggaaaccagtgatatccattgggaagactgcaaggatcaaatngatgtagttgcactagcatccaaggagccaatacttttctatgatgaggtagtgttatatgaagatgaactcgctgataatg

SEQ ID NO: 7654 - DNA, 477 bp, Glycine max
  Clone ID: jC-gmfl02220086f01d1
tgagaaagagacttgtcaggaaggcatttgatatgattcaagaccttgctgaaagtgaaaataaagaggactacaaaaaattctgggagaactttggtaggttcataaaattaggttgcattgaagacactggaaatcataagcgcattacaccattattgaggttttacacttccaaaagtgaggaggaacttaaaagcctagatgattatgttgaaaacatgggagaaaaccaaaaggctatcttttacctagcaactgacagcttgaagagtgcaaagactgctccatttttggagaaattggttcaaaaagatattgaggttctttatttggttgaacctattgatgaggttgccattcagaacctacagacctacaaagaaaagaaatttgttgatatcagcaaggaggatttggaattaggtgatgaggatgaggtcaaagagagggaaaaccagccagaataccacctac

SEQ ID NO: 7655 - DNA, 458 bp, Glycine max
  Clone ID: jC-gmfl02220086f02a1
gaaagatcttggccatggatattaacagggagaattatgaattgggtttgccagtaattaagaaagctggtgttgaccacataattgaattcacagaaggtcctgctctcacaatactcgatgaaatggttaaagatcagcagacccacgggagctatgacttcatctttgtggacgcagacaaggaccactacctcaactaccacacgaggtcgatagagcttgtcaaagttgtgggagtgatcgggtacgactacaccctatggaacggctctgtggtggcacccccagatgctcctctcaggaagtacgttagatactacagggacttcgtgctcgagctcaacaaggcactcactgttgaccccaggatcgagacttgcatgcttccggctggtgatggattcactatatgccgtctgatcaagtgatactgacttctgataatacacaatcgt

SEQ ID NO: 7656 - DNA, 467 bp, Glycine max
  Clone ID: jC-gmfl02220086f02d1
aagattggatgagcattttatatattgtcttctcattgttcaattcctcaggccaaaaaaatacagatactaaataggaatattcggaaagcatgggtatataatctttaacagtggtggaacaagaagtagctaatgtaaccataataattgagaatcagctataagttccatttgtaggcaattttaagcattctgcaactttgaatctatgaattataggtgaatgatcttggttgagttctaagatgtaggaaaaggcacataggattgaacactaagataataacttctcttgtaatacaaaagggtggacttctagttcctagtacggaagattttcttattgcaacaaagaaatactactgaacttgtaaatagtcccgttgaaattcacattggtggtggcagccatgttatcataatggggcttctcacagtgtgcaaaccatccttccattccatac

SEQ ID NO: 7657 - DNA, 502 bp, Glycine max
  Clone ID: jC-gmfl02220086f03a1
caaaaagtcactgcaataaaaaggttgtgggggcaagagtgttctaccatggatatgaagcagcaattggtagaattaatgagcaaaaagagtataagtcaccaagagatcaagatgggcatggcactcacacagcagctacagttggaggctctcctgtgcatggagctaaccttctaggttatgctaatggcacagcccgaggaatggctccaggtgcaaggattgcagcctacaaagtgtgttgggttggtggttgcttcagctcagatattgtgtcagctattgataaagctgtggctgatggagtgaatgttctttccatctctttgggtggtggagtctcctcttattacagagatagtttatcagtggcagcatttggagcaatggaaggggtgtttttggttcatgttctgctggaaatgcatgacctgaccctgccagcctcaccaatgtgtcaccatggatcaccacagttggagccagcacaatggatagg

SEQ ID NO: 7658 - DNA, 465 bp, Glycine max
  Clone ID: jC-gmfl02220086f03d1
gcaaaataaacacaaagcctcgttaacagcaaggtggtggtgtctatcaagaaaacaaagttacatcccctcccctgtttgcacaggtttgaccaatacaccgaattactaaaattgatatgaaggaacactaggaaaaacaaaaagcaaaattccaaacgattattattctgggaagagtcgaagcacaatactcattaacaagaaaattcggttgtacccataaaataccgattcctacccgcacttagattgatcagtacttgtagtcctcaacatggaggctctctgaggcaccatcagcaagctttgagttacccttgtaggttcccagagttgcctctgagttggccttggctcttaccaaaagggcttcctgagccttcttcacattctcctcttttccactccatgccttaagggtgctctgttgaagtgcccttccaaaggagaaagagagtgacc

SEQ ID NO: 7659 - DNA, 520 bp, Glycine max
  Clone ID: jC-gmfl02220086f04a1
cttatttgtatacggtgagctgaatgccttgctctttgtaaccttggtgcttgcagtaattttcaggttagagcatataaaaataagggaattacgcagtcaagcgaaagtaattggaaccttagtaacctttgctggggctttgttaatgacactatacaaaggccctcaattcgacctatttcatcattcaaacacaacccaccaacaaggtggaagccacactcagaatcactcacactgggtcgcaggaactctcttcatttgcctgggttgcctggcttggtcttccttctacatattgcagtccataacggtgaaaaggtaccctgcggaactatcactctcatcgttgatatgcttggcgggtgctttgcaaagtgccgtggttgctctgattgcagatcataaccctcgagcatgggctatcggttttgactacagcctctacggtcctctatacactggaataatgagttcaggaatagcatattatatacaagggttgggtatgcaaagc

SEQ ID NO: 7660 - DNA, 419 bp, Glycine max
  Clone ID: jC-gmfl02220086f04d1
gttaaaagctttttttttttttttggaacgggggcaaaacactttttaacaaattagtattaacttaaacaaaggcgggtttaaacttaacaggggtaaatattgggcccccacccgcacaacaaattactttttggtttggaaattacgctatcattgggcacttccggcaacataaggggaccggattactatggaaattttcttttctataaggcaacacaaaggggttggtatttattatttgggaagggaattggaagccgcattgtttctgtttcttttgggggggcgggggaagacccgtcatttttatagtctttggcttttccccaccccccagagtataaacccactgggattatgatgcccccaatgatgcttcccaaggggaggggtttttctagaagggaggggcc

SEQ ID NO: 7661 - DNA, 389 bp, Glycine max
  Clone ID: jC-gmfl02220086f05a1
atccacacaaactcagggtagggcagagagagagagagagagagagagagagagagagaatgggagggtgggctatcgcggtgcatggtggcgctggtgtcgaccctaatctcccactcgagcgccaagaagaagcgaaacaacttctcacgcgctgtctcaatcttggaatctctgctctaaattctaatcttcccgccatagatgtcgtcgaacttgtggcgagggaattggaaacggatccgctgttcaattcgggccgtggatctgccctgacagtaaaaggaacgggggagatggaggctagcatcatggatggtccaaaacgacgatgcggcgccgttgtgggtcttaccaccgttaagaacccgatctcggttgcatcgttg

SEQ ID NO: 7662 - DNA, 396 bp, Glycine max
  Clone ID: jC-gmfl02220086f05d1
ggggggtctaccacaagtctttttttaagagaaagacaacaaagttcccattttattatttcacatttttttctaattcttaaaaacaagggtaccattttttatctaaatcgggccccagcagaaagaccctacactacagtggaacatggtacaaaaatccaaaagttgcatcgaaacaaccatgaaggaaaataatgaagcttttcccagattccgacctccatgaagccattttcaggggcacagcccctaaacatgccattgcaattgaaaccataagccacttccccagcgttggacacagcaatgagaccagccattcctttattgagacggggcttgatcacaaaatccacgggttcttgaagcttcaagcctttgtatttcataacc

SEQ ID NO: 7663 - DNA, 304 bp, Glycine max
  Clone ID: jC-gmfl02220086f06a1
acaaaaactcgctgtccttctccatttctcgtcgcaccttttcctcttctctctctttctctctttctagttcgtgttcttcgtcgcaaatccgaagtaggatctctctcgttctttctctaagtttttcgcgatggcgtctaagcgaatctcgaaggagcttaaggatttgccgaaggatcctgcaacatcttgcagtgccggtcctgatcatgaagatatgtaccattggcaagctgcaactatgggtccttcagaccgtccctatgcttgaagtgtaatcctagtgactattgcatatcct

SEQ ID NO: 7664 - DNA, 284 bp, Glycine max
  Clone ID: jC-gmfl02220086f06d1
gtaacagaacaaaccaatcattttttaaaatttccacaattctggcaatacaagggtaaaattttaaactttttaattgggcttacatttcactgttttaaaaggggcgtttgcattctgcaatacaaacaacaaaaaaaaaatttccccattcattttcaactgggggggccttaatcgaagaccccaaattttcataccagggtgtttggcctaaacactgaaagtaaaaaacgctcttttttttatgtcaattaccccatggcatatttttggggcccgct

SEQ ID NO: 7665 - DNA, 438 bp, Glycine max
  Clone ID: jC-gmfl02220086f07a1
ggcaagagaaaattgtattaatccagaatcggtcgttacttaacagtcaacagattgtccagccaacttacccaacaaagggattccaaatcagatacaattacatcctacattacaataacaaaagtttagttttactatgaaaatacccaactacgggttttctttttcttgggtatcggcggaactttggagatgacttaaggtaactctcgccttttttgggtgggaagactttttttcttttgggccatcttaattacccttcttccttttatttcccacattgtctttttcatcaatagcagctgcagaagggtcagaactcaaatcacctttagaacccaagggggatgtttttggatcagaatattcagctttatctttggctttctttccagattctacattctttgctggcttaatatattcctccaa

SEQ ID NO: 7666 - DNA, 400 bp, Glycine max
  Clone ID: jC-gmfl02220086f07d1
gggaaggggcatatactagcatcatatatgcaacatcataagaagaatatattaatcatgggagtaagagtacaagaaaaagttccacatatgtggttacagaaaataagaattgagttcagaacaaaggagacaactagtgattaattaacatgatatatataataacgaaagagtccatcacagtgaaattaaataaagtgcataacaaagtggtaggagctagcgagattaatcaattttggagaagcagctaaattttaagcagcttttgctgacaaccccaggtgatgagtgtgggagagatcatgcaaatcggtctcacctttgacctccacaaagtgaatttttcgaaccggattatgcactacaccctttctggtgagtgaactttgccttt

SEQ ID NO: 7667 - DNA, 482 bp, Glycine max
  Clone ID: jC-gmfl02220086f08a1
ccaacacgacgagactgtcaccaatgacgaaattgctgctgacctcaaagagcatgtgatcaagcctgtgatcccagagaagtaccttgatgagaagaccattttccacttgaacccttcaggccgttttgtcattggtggccctcatggcgatgctggtctcaccggccgcaagatcattatcgatacttatggaggatggggtgctcatggtggtggtgctttctccgggaaggaccctaccaaggttgataggagtggtgcttacattgtgagacaggctgctaagagcattgtggcaagtggacttgccagaaggtgcattgtgcaagtgtcttatgccattggtgtgcctgagcctttgtctgtgtttgttgacacctatggcactgggaagatccatgataaggagattctcaacattgggaaggaaaactctgattgcaggcctggtatgatctccatcaaccttgatctcaaga

SEQ ID NO: 7668 - DNA, 460 bp, Glycine max
  Clone ID: jC-gmfl02220086f08d1
aaaaccttaaattaaataataaaacctaaatattaaacagtacaatttacatcaggagctttgcacaaatgggtgaacttgctacaaaaagccaagtccttttcccgcacttaataatgaacaaaagatgatacatattaactcgtcactctttactatgatttcttctagtggcatttaatctaaatctaaagatgatattcacattaaggaagcactttacgacacctaatttaagtggataagatgctgtcatttcttcaaggcccatctcttatcaatattagagtaaacaatctcctgacaacgtacaagtccacaagctcctccaaagcacaaccatctttcactacctttgttcatgttccatctcactctgtgcaatgcggctactttgggagggaaggtttcaggtatattcccaaaatctgacttttcattatcagcctcggggagtatt

SEQ ID NO: 7669 - DNA, 470 bp, Glycine max
  Clone ID: jC-gmfl02220086f09a1
agaaacatagaaagaatattcaatcagatcaaagaacgaatcccatcaacagactaacatcatcataaacaagcgttttcgcaataattaacatctcctcatccgtgataattaacagcattgtttatcttaattaattttctcgtcatttagagagcgagcatcacgagggaagcgatggcggaagcagcaccaaagagtcccatgtagacgcgggaagcatcgctgctgggacctggtgccaaagcagaaggtgactgtgcaatgttatcaccggcaccgtcggcggcggttgttgcaagtggcaccgtagcagatgtcgctgctgctgccgcagattcaacgccaggtgcaacgataggcttgctaacctgaagaaccgaaacggtgtcgggttggctcgtcacggacctcacaagcacaacctcgaaaggtgcattcggtgcggcggcggcggaaccgaacgcaat

SEQ ID NO: 7670 - DNA, 444 bp, Glycine max
  Clone ID: jC-gmfl02220086f09d1
gaaccaaattaaggaactataagattatacatataatttttacaattttgcaattgaaagctttaacattaccatgtatgtgtttaaaaatcatacatgctattttacaattttgctttgcttacacacaaatctcaaaccctgtacctaattgccaagccaacctattattttttacaagtaaccggccattcattctgggacaaataaaaaagacatttcaattgaaataaaataacaataatgactaatcaaccaaccaatcacatcatgaactgcatgagtttgaaccaagcaaacccaccaccaccaccaccatatccctccctctctttctctgcctctttcgcacaagacgcaaacgacgtcgttacgccatcttccactgttgtagctggctttctcggacatagaaaaaagttcctagatccaagctctagcagc

SEQ ID NO: 7671 - DNA, 288 bp, Glycine max
  Clone ID: jC-gmfl02220086f10a1
agccacgcaaaaaaagaactattgaaacataattggtttatctcaaacatacacacggtcctgttttattgacacctttaacgccactcctaaatagggtctttaagtccttataattttggttggccgaacttcagattcacagaatgcagtctcgggaccggtatagtatctgtgtccatgccttccagatttgaatttaaatagtgagaccgagatgtgggggtgtgggcgaccaatgcactattgcggggaagaacagcagaataatggcttcgggactattaa

SEQ ID NO: 7672 - DNA, 415 bp, Glycine max
  Clone ID: jC-gmfl02220086f10d1
aaaacaaaagcctttggataatttaaaaataattttaacatagatttcaatacagtttttattattattaactacatattaactattttaacatgcttctgattgaatgggcctataaacccaatgttcacgcaaaaattaccaagagggttagaggctatacatagaaaacctgaccaacatttaatagactctcatgaggaacattggagatcacactattttccctgcatatcttcctcaaaaatgcgtatatttaatcaacagcttttttcttgtggaatcttgaatccctctcttggcctcacaactgtgtttccaagaatgtgaaccaccccagcatccctgcaggtgtttaagaactcaacttcatcaacctcagtgtgggtgctaacatgaccagaggattgaattg

SEQ ID NO: 7673 - DNA, 440 bp, Glycine max
  Clone ID: jC-gmfl02220086f11a1
tgaaaacccaaagtgcttctctcctctgtctttttctctctcttgctatccttttggctagtggcactgctgcaagtgcaactccaagaagcgcagtgccaagccaccatgtttcaacattcaacagaagcctttttccttccacttttctctttggaattggatcttctgcttaccacgcagaaggagcagcaagtgtagatgggagaggaccaagcatatgggacacctacactagacagcatactgaaaagatttgggatcatagcaccggtgacatgggagctgatttttatcatcgatacaagggtgacataaaaatagcgaaagaaattgggctggactctttcagattctctatctcatggacaagaatattcccaaagggcaagggagcagttaaccctcttgggttaaattctacaacaatgtcatcgatg

SEQ ID NO: 7674 - DNA, 459 bp, Glycine max
  Clone ID: jC-gmfl02220086f11d1
gagaacgtaaaaagagtgataagattattattaattagcattcttcctcaaaatgaacctctagaactcatggccactataatgaaccggtggtattttacttcgacatgccatttggcattatttatttgataaaatgatctcttgattacatccaacacaagtgatatacgatgaaatctagggaaataaacaagaaaaacactagacatgtcaaaggaacactaaattcagatcacttgagaaggaacttttgcaaccaaaaagcagagaacttggggtatcttttcaagttgttcttgtaatccacatatatgagcccgaatcgaactgtgtaaccagcatcccattcaaaactgtccgaaaatgaccatgcataatagcccttcaaattaacaccttccttgatcgcttgaagaaggaatttaagatggccatcatggtatctaatccttatac

SEQ ID NO: 7675 - DNA, 488 bp, Glycine max
  Clone ID: jC-gmfl02220086f12a1
atttggttcaatcaaatcaatgatgttgaggaggaggggttctgtgacctccttctattccaaattcatcgattctcacaatcttaattgtgggcgttcctcttcgaatccccatcgcgtcgccgcttctgcaacttcattcgatatctcttccgcttctgcgtctaaagctacgaccgactttgtgtcgttgacccgccactatggaaggtgctattgggagctctccaaagctcgtctcagcatgcttgtggttgcaacatctgggactgggtttgtcttggggagtggtagtgctgttgatctttcggcactttcttgcacttgcttgggtaccatgatggttgctgcatctgctaactctttgaatcaggtgtttgagatcaataatgatgctaaaatgaagagaacaagtcgcaggccactaccctcaggacgcatcacaatacctcatgcagttggctgggcatcctctgttggattagctg

SEQ ID NO: 7676 - DNA, 457 bp, Glycine max
  Clone ID: jC-gmfl02220086f12d1
aatcgaaataaattatctaatttttattaaaaatattatccggagacctccaaagataaatgcaaagaataacaaattgtcacacggactatgaccctcaacatgacaaacgctaacactcaattaataatgtgagcattgatagatatttggtttaatttcaagctttcatgaagttaagtgcatgaggaacatggagagccttcaaccagtcagttccaccgttggaaccagcctggaggaattgggcaggggtgaactgagcagcttcttgctggctaatgagaccgcggtaacccttccacttgatccttccgttaacgttggcaccaggtccatcgttgttgtattcagcatagtacagggtgtcttcgaagtgttcaccggcccatgggcaccatccttccgggtgaaggaagtcacccacggtggattccatcacaattgtccttgagaa

SEQ ID NO: 7677 - DNA, 457 bp, Glycine max
  unsure (1)..(457): unsure at all n locations
  Clone ID: jC-gmfl02220086g01a1
tgcgaggtggctattaatgcggtggatgaggagtcgaggacgtcaccggaggagacgaagatcggagcgcgtgtgaaggtgaaggaggcgggtttgaaggtgtaccacgtccccaaagttggggagcttgacctaacgggtctggaaggcgagatcaagcagtacgttggcctctggaacggtaagcgaatctccgccaatcttccttacaaggttcagtttctcaccgacatccccggtcgtggtcctgtcaagttctttgcccacctcaaggaagatgaattcgactatctttagtcactgtactgcactgcactgccctgcacgtcactttgtgtatgatgatttgaagaaggtgtagcctgaatcctttctaatatttnttagtaggtgtccctgtacttgttgggtaaagcaatggtatcctttcgcaaatctgtctttttgacctactatg

SEQ ID NO: 7678 - DNA, 410 bp, Glycine max
  Clone ID: jC-gmfl02220086g01d1
cccgctacaatttgctttgtgctcactcatctatctattgtaaccaaacactcttcttcatattcgtcggcttcttattgcgcttgatctatctgtgacgagcattatggactctagagcagtgcttttgctggctatgagcgtccttcccgtcatggtctgcggccattacgcccaccataagaaacctttttgcgcgaagggtatgtttactgagaaccttgccgtgcaggttttgagacctcagcaaccacctacattgccggtgctgagattatgatgcaatgcacgagcagggttaccaaccaggttgtgttcaccacgaaggggtacactggctcaactggagcatacacaatgtccgtggaccaggatcacgcacatcaaacatgcagtgccaagcatgaaag

SEQ ID NO: 7679 - DNA, 451 bp, Glycine max
  Clone ID: jC-gmfl02220086g02d1
agtaatacatgaagctgtcgacttcaatttttttcttggttcaacagattcatgttttagcattacaaacagtgggctatttgattgcataccaagtctgttcttttacttaatcatacacaggtattaaatgttcatgcaaatgctacaaagcacctttaaggggatggataccacaaccatttttattcaccaacaaagggacgtgcactctcaacacgctccctttacttccccaagaagatgaggaatcacttttcaagcttacgcttcacggaaaatctgccaaaaccacacagttggcacaccaaaacctactacctattttgcacattcattccttgggcgattcttgcttatgctgctgaaccagcttggtcacatatgtccaacagatccagagtctctggaactgacagctcaggacgaagctttggaccatcataatgac

SEQ ID NO: 7680 - DNA, 299 bp, Glycine max
  Clone ID: jC-gmfl02220086g03a1
tcgagtttcacagcgaagtcgtaggagggttttaaaagatggagaacatgcctagcttctggcaattgggcgatgaacttcgtggacacttaaaagcattggaggatcacaaatggttaatggttgcgttgaaattggcggaacatacgagattgaagggggagcgtgtgaacaaccttgatctttgaagggccccattgaaacaaggtcaagggataaatttgggttccaggaatagaacaaatttgagtctcttaacttaagcatgttgaacctggactctaaatttactgagaatg

SEQ ID NO: 7681 - DNA, 425 bp, Glycine max
  Clone ID: jC-gmfl02220086g03d1
gcgccctttttttttttttttataagaaaaaaagtcatttgcatataattaattgtccaccgttttccacatgaataatagagaaaagaaaagtacaaacacaaatattttgaagaaaaaaaaataaaaggaaaatatcgattgcttttaaatgcattagcaggtgccactcaatgatgaccaatcatcactagggtgcagaagaagcaacggtggtcttggtccacgattgtgtgattatcagaaaatcagaatcacttgatccgacggcatatagggattccatcaccaaccgggagcatgcaaatctcgatcctggggtccacagcgagtgccttgttgagctcgagcacgaagtccctgtagtatctaacgtacttcctgagaggagcatctgggggtgccaccacagagccgttccatag

SEQ ID NO: 7682 - DNA, 394 bp, Glycine max
  Clone ID: jC-gmfl02220086g04a1
atttcccatcttgtgagaaattgttattgatggcgcgctgaaacttgttggattgcccatggaactgttacatggggtgtgagtgtggatccttatgtcatgatcatcattgctcggtgatgtgctcatgatgcctatatcatcctggtccactgcatgaaagatcagactagggtctaatgcatcagatggattaacatgaccgctgccataatgaaacggagtagctttcaccaacctcctagctgtgtattaaccaacttcttccggtaatagatggtaccatggtatttgtatagctctggaattgatcgttcgagctgctttgactattttgaggatccagtgtagaatttgggttgccaatacatctattcgtctattatatgtatat

SEQ ID NO: 7683 - DNA, 515 bp, Glycine max
  Clone ID: jC-gmfl02220086g04d1
aactagccaatagctttggtaggatttacgctgtgccattgataccttatgttatacaaattatttcatgtattacacatgctgtaagcaacgaacttttggggaatggggcagatacaggttaaaacttgtgatgaagcattccaacaaaattactagacaatataagcaaaactatatgtggaagaaactaggagtgaccccttacacctgcttacctttacacctattcataatttaacattacatatttatatatttagacgaataaatgtagcgccataccttattccccacaggttacaaagaatattacaagcagcacttgctttcctttcctttgctgaccaaacttcactatgctatctatcgtcggtatccgttggccagaacaggaatcctcaccttgtgccctctgctccctttcatcaaaacctctccaaaactataccttcctgtcaccgagcgcactggtagtgacaccaaaaactggcgcgatgcgcctgctttgatag

SEQ ID NO: 7684 - DNA, 295 bp, Glycine max
  Clone ID: jC-gmfl02220086g05a1
atttccaccaaacccgtttgcgttgttgtttgcgaataaatggcaactaagaggagcgtgggaacgttgaaggagggagattcgaaggggaagatggtattcgatgacggtcagatctgaacgtgcctttggatgacaaccttagcatcaccgatgacactagagtccgtgctgctgctaccaccatcaagtacttgactggatatagtgctaaagtgatcctttctagccatttgggacgtacaataggtgtaacagctaaatacagtttgaagccttttgtgccaaggctgtc

SEQ ID NO: 7685 - DNA, 479 bp, Glycine max
  Clone ID: jC-gmfl02220086g05d1
aaccaacaaagtaaactcatttggaaatgaacattgttcaagaacaattagatcaaagctcaatgcaacaccaaggatgccacaaaaccctcttattttgaaacctatcctatattaagcctctacaggagcaagagctcgcagctctcattgtaccttaatccactgttggctgaaacccaaccataataataatataaagcacaaacttcaaaggaacgaatgatttttgctcaagcatcatcaagagcaaggacaccagggagttgctttccctcaagaagctctaagctggcaccaccaccagtggagatgtggctcatcttgtctgcaagtccaaccttctccacagcggcaacggagtcacctcctccaatgatggttgtcactcccttcccactcagctctgccagtttcttggctatagcctctgttcctgtggcaaacttatcaaactcaaaaacacccattggtccatt

SEQ ID NO: 7686 - DNA, 367 bp, Glycine max
  Clone ID: jC-gmfl02220086g06a1
gattaaccttgcaacttggatctaccacctctctctcccaaactctctttgtagtgctgcttcagcgtctggtagcaaagatggcgacattgactgcttcaagtaacttagtctctaaaaattctcatgtccaccatggaccaacaactgcttcatatgagtctaaagcagttgcactgggacttacatctctgaatcagacagatactcatgatggactaagaattgtgaacccggcggatgatctacttaacagaacctcagttaaaaccaatgcagtgcaagctatgaggaatggacctgaacgcaagaatgccatgcctcaaggcatgatcacatgtggcatgactatcataattataggaac

SEQ ID NO: 7687 - DNA, 442 bp, Glycine max
  Clone ID: jC-gmfl02220086g06d1
gatataacccatgttaatagtcttagattcgagacatgaacaggatcaaaataaaattatataaaaaaaaaaacccaccttttggagccaaatatagcctgggaacctgtgtcatatctagactattaagaaacgctttaatttatgctaatcttgaaagacctgcactcattacactgattcgaatagtgtaatttccgtgtccatgtacatttctataatctatttagaagaaaacaaaaatttggaagaaggatataaaacataatattaataacaagcaaggggctgggagaacttcacgagactcagactaggagaggcttccctcacatctttgttcttattattatggggttgccacattttcctttgcctgtggagcaatttcttctccatcacttccaggttcactgccaggaactcccaagcttagcagcac

SEQ ID NO: 7688 - DNA, 417 bp, Glycine max
  Clone ID: jC-gmfl02220086g07a1
ggagaaaatatgattatgcaaataacaactccatagtatgaatcacaatattcaaagccacctacaagagcctactgtatggccgggagatgattgtcctccagctaaattcaacgatttgaaacacatactttgccaagtcctacccaaagtaaaagtttgtcacaacacttattaaaagaagaatcttgcagctttactcttcaagcttttgatgttcggtaatttcccgcaatattaaaaagctaaccaggtcattgatggaatgttatgaacacagaaccaacacctagaacagagcaacataaggaagaagaagaagccggggccaaaaggagaatcattagaccaaggtccctggatgactattcacccaaattacagccgccacgtcagcaaggattttagaaaattgcc

SEQ ID NO: 7689 - DNA, 314 bp, Glycine max
  Clone ID: jC-gmfl02220086g07d1
aaaccaaattggaattcattttactgggaggggggaattggaacataaagggggagaacaaccaaacttttaagcaaaaggccaagtggttttaatttttctaggcaaaaatttttggggccccaacgtttggttcccgggatttccaataaccggggttccgataactaaactcaaaagccacgtggttaaaacattagaaaaaaatttggttttgaaaaaaaaagccttaaacactggaattggttttttccaaactggggggaacttctcgcccaaaaataaaaagcaggggctgacaatgtttttaaaga

SEQ ID NO: 7690 - DNA, 484 bp, Glycine max
  Clone ID: jC-gmfl02220086g08a1
ggacaccaagcagtggcacttcgcgtgcaaggtgatcgttcagtgttctttgattgtgctatgcgcggttaccaagacacattgtatgcccacgcccatcgtcagttctaccgcaattgcgaaatctctggaacaattgatttcattttcggatactccaccaccttgatccaaaactcgaagatcttggtgaggaagcccatggcaaatcagcagaacatagtggtggcagatggcacagggcaaaagaacatgcccacaggaatagtcctccataactgcgagatcatgccggaccctaccctcttggcagaccgcttgagcgtgaagacttacttggccaggccatggaaggcattctcaagggcagtgttcatcgagaatgttatcggggacttgattcagccagatggttatattccatggaacccaattgaaccaaacacacaggattgctacttcgctgagtttggcaacactggac

SEQ ID NO: 7691 - DNA, 440 bp, Glycine max
  Clone ID: jC-gmfl02220086g08d1
gcagccaataataaagacagtgccacttattttcatttataatagaggcaaatataaggtatacatagatgagccagctagctaataagacataggcaactgaacacaacacatgatatccccacaaaggataaatcataagacgtacaaaagcacaaaggtaaggactattattaattcatggcccttaaaaaatactaaaaacaccaagggggcatgcaaatgatacatatgtaattattattaattaagcaagaatctccttcaaaggcttggcctcaagttttgccttctgatcaagttcttgcaaatgcttttcattctcaaggtcctgcaaatgcttttccttagccagcttcttcatccttgcaatctcaatgtccttgctcatcttcctcctgtacatttcagcaaaagtgattggttcctccatcacaggc

SEQ ID NO: 7692 - DNA, 500 bp, Glycine max
  Clone ID: jC-gmfl02220086g09d1
gtacaaaaatatcactgtccttcaaatggcagcactcatgggaatgcgatatatatattatgtatatatgattttttttctctataaattaacaaaatcagattagtgggttaccccttgttcttttgacaaatttgaacttggctgattcttggcgcattatattatagaatttgggtcaatatatgcccagagcatctctgaattcgcttccctttgcttctacttcactatactactactctaaccaccaccatcttaccagttacacggcttaagttccatagtttgtcatcttgaaccctggttggatgagtaccatagctttttctggcatattaatatcttctgcatgtcactgccattgtcagtatcttctttacgacattcccaacgcatacccttaccaatggtagtgatagcatctgtaaaataactggattcacgaatgattgcatacccccaaggccgtaagaatcgatccatttccagcaatacat

SEQ ID NO: 7693 - DNA, 355 bp, Glycine max
  Clone ID: jC-gmfl02220086g10d1
ggtggggggtgttttttttttttttttttttttttttttttttttttttttttttttttcttttttggggaaaaaggggggaaccatagggggggggggggacccccaaaaaattcccccttttggggggggacgggaaataaatttccccccccaccccaaaaataaaaaccctcaaaaggcccaaaggcaccctttttttttgggccccccccgggggggaaaaaagggggggggacccccccccctttgtgttggccgggccccccggggggaaaacaggggtctccaaggggccccctccgggggaaagggggggaaaaaaaaacccccaaaaggggaaacggggccaccc

SEQ ID NO: 7694 - DNA, 358 bp, Glycine max
  Clone ID: jC-gmfl02220086g11d1
gtacctgaatcatcatcgacaacaactcctcgatgtccatttcggttcattactgcattcgccttttcaacaattcccctttctgggtaaaagacgacacaccccagaggccaaaacataacaaagaagcaagcaaataactaaaatatctcagtcctgaaacaagaattaacaaaaacaactacaaaggaacgacaattagcatgggagtcttggttgttcttcaagcgagtgtaggattctctgcaggagaagtcctccacacgatatctttaagagctggacgaagctccttgctacagaactggttatactccaaggtggtcaccgttgtccttcttaacctccaccaccaaaa

SEQ ID NO: 7695 - DNA, 492 bp, Glycine max
  Clone ID: jC-gmfl02220086g12a1
cttctgagctttgattagtgtggcctagttgttgttttctcgatgagaaaggcttcttccactatgcattgcgcacttctgcgcttttgggttcccttgttgctgcttgctagcttcagctatgctccttctgtttcggccacaactgaaatttcagggaatgaagtgaacacagatgggaaggtgataaatgaagagttagcaaaaccaagtctaaaaggacatgatgaagaagcaaagttcaaaggattttttccaaaaccaattcctatagttaaaccaattccaaagccaattcctattattaaacctattccaattccagtttataagcctattccaaaaccaattcctattgttaagcctattccaaagtcaattccagttgctaagccaattcctaatgaagaagaaaaattcaaaggatttattccaaagccaattcctataattaagcctattccaaagataattcctattgttaaacctatt

SEQ ID NO: 7696 - DNA, 458 bp, Glycine max
  Clone ID: jC-gmfl02220086g12d1
gggaaataagaacttttgcagctaaatttatttaagatttaagatatcttatacattgaaactgtcatgtgaaggtaccatccttacagcaggcagatcttgttaatacaacactttgaacccatgtcagccagactaacatctctctttcgggctgcaaaatcgcattatttgtgcagtttcatttgcaaggatagctttctagccaaagtttattccctgagctaatggtagttcacttccataattgatggtacatgtagaacgccgcatgtattgcttccacgagtcacttcccgcctcacggccaccaccggtcgccttttctccaccaaaggcaccaccaatctcagctccatttgtaggtatgtttgcattcactataccacaatcactacctcgtggcccaatccacttgaatatagttccaggtctttgggtaaagatgactacttaat

SEQ ID NO: 7697 - DNA, 554 bp, Glycine max
  unsure (1)..(554): unsure at all n locations
  Clone ID: jC-gmfl02220086h01a1
tttcaactctctctctccccccctctttctctcacacacaaatgtctaaaataacaataacctctccaaaacactgtgctgacaaagaaggactaaaaatcaagaactacaagaagatctacttcactttctcagcatttttcatcacaatcctactactaatacttgttatatggctcatcctccaccctgcaaagcctcaattctccctcaaagaagtcgacatcttccaacttaacctttcaggcccaaacctcaactcctccatccaactcaccctcctctccaaaaacccaaaccagaaagttggcatttactacgacgagattcaactctatgcaacctacaagggccaacaaattactggtgatacccctgtgccacccttttatcaaggccaagaagagagtaatctcataacagcttctttggtgggaaatgctttacccgtggctccgtctcttggctatgaacttggtcgtgatcaaattgttggaagactagtnctgaatctcanagccaatggaaaagctcgttggaaagtgggaacatgg

SEQ ID NO: 7698 - DNA, 392 bp, Glycine max
  unsure (1)..(392): unsure at all n locations
  Clone ID: jC-gmfl02220086h01d1
gggccccggnnngaagtgtatgcacgttagaagagcaccgacgnnggaatgcacgtcgtacgcgagcctcagaattgggttcgagctccatatcatatcaactggagctggggaacctcgtctctactcgctctcgtccccgccggagatccaccatggccggcaacttcgccaccggcaccgtcaccttctaaggattgagtcccgagaatttgaaattaattgctccccgaaacccctcccgagatatacttacttcggatcaggtcaaccactgtacccaagccctgaacctgttgaaggagaagcttcacgatcctcacgtgatcactgaggagttcccacacttgccggcgaacaggataactccgagtgagatggagaagaagaat

SEQ ID NO: 7699 - DNA, 425 bp, Glycine max
  Clone ID: jC-gmfl02220086h02a1
ggctgtggaaccagcaacagccataaaccatttgttctttgtcaagcacaacctctcccttgacatcactcctcagtccatccaaacccagatgatatggttcaacaggtacctggagagccaggactgccaagagtcaaagtgcaatgattttgatgacactctattttggtttggggagattggagtcaatgactatgcctacactcttggatctaccgtctcagatgaaaccataaggaagcttgcaatcagcagtgtctcaggagctttacagacattgcttgagaagggtgccaagtacctagtagtgcagggtttgcctctaactgggtgcttgacattgtccatgtacctggctccaccagatgatagggatgacattggatgtgtgaaaagtgtcaacaaccaaagctactaccaca

SEQ ID NO: 7700 - DNA, 376 bp, Glycine max
  Clone ID: jC-gmfl02220086h02d1
aagaaaaaccgggtttaaaaaaatccacttcccccaaaaaatccccccttttgaaacccaaaacccgtggggggggggccctaatggcccaagaaaaattttttctcccaaatacccatggaaagagccgggttgggtttttaatcttaaaaaacaaaccgggggtggctggaacacatgatttttgctccccctgggactagaaaaaaagcccaaccccccccccaaaagggaataaatggggtttgaatgaaatcgaccgggcaattttaaaacactgggggcgttgcaaccctgggagggtaaagcggggtttacaatggggaaaaacccaatttttgggcgaacccccaaatctttaaaaaaaaaacatcgg

SEQ ID NO: 7701 - DNA, 474 bp, Glycine max
  Clone ID: jC-gmfl02220086h03a1
caaacacttccatccatcaccctttctctctgcttagggttttgatcgcatcggatcttcactctcttctccgatctcaaaatgcccgccgtttatggagctcgcttgaccaccttcgaagactccgagaaggagagtgaatacggttacgttcgcaaggtatcaggaccagtcgtcgttgcagatggcatggctggggctgctatgtatgaactcgtgcgtgttggtcatgataatctcattggtgaaattattcgtctcgaagggaattctgctaccatccaagtttatgaggaaactgctggcttgatggttaatgatccggtgttacggactcacaagcctttatccgtggagttgggacctggaatactggggaatattttcgatggaattcagaggcctttgaaaactattgctaaacgatctggtgatgtctatattcctcgtggtgtctctgttccagcactcgac

SEQ ID NO: 7702 - DNA, 524 bp, Glycine max
  Clone ID: jC-gmfl02220086h04a1
ggctgcttctggtaatatcatagcacaagagggtgaagctgagcgtggcaacactgtcaaatcctctggtatctctctctactatgcgatgccagagggtgatttgaagaatttcaaaggggaacgtgaagggaaggagttccttataaatctcattgactcaccagggcatgtggacttctcatctgaggtcacaaccgcacttcgcatcaccgatggagcacttgtggtggtggattgtgttgagggtgtctgtgtccagaccgaaactgtgctgagacaagcccttggagaaagggttaagcctgttttggctcttaacaagatggataagtgctttcttgagctcaatcttgatccagaggaggcatacctaacactccaaagggttgttgagagtgtgaatgtaatcatgggtaactatgaagatgctctacttggagatgttaaggtgtaccctgagaagggaacggttgccttttccgctggcttgcatggatggggctttacactcaccaactttg

SEQ ID NO: 7703 - DNA, 362 bp, Glycine max
  Clone ID: jC-gmfl02220086h04d1
gaggggcaaggggccaaaaccttttttgaaaaaaaaaaaaaaaattaccgcccccccccccacttttcatggggccaaaaaaaaattcccccatttgggaacctaaaaagggggccccaaacccccacaaagggaaaaatgggtaaataacccctttttttttccgaaggggacaacccccccccaaaggggggggtcccgggccccgggggaaaaaccgccccaaatcccagggaaaaaacccccctggggggaaacccccccccccaaatggggcccccaggggtcccccggaattgaaggcccccacccccggttaatatccccccacacaaaaaaagggggggcccgcccccttaatt

SEQ ID NO: 7704 - DNA, 380 bp, Glycine max
  Clone ID: jC-gmfl02220086h05a1
ctattatcaaatcagggaatttgttgcaatggttcgcaaaatttatatctaccccaaagaggagatgcataagcatgagcccgggacccttgatgctcaaagcatgtgcagaatcaatctgctattgaaggtgccacagacacacacgaaatcaagcgtcagctcaataattcagcttcagatacctgataatttgtagattcgatttccatagcttccagattccggactggagtggaaagtacgtgactgtcatagagccatccagttggcgaatatgacctgatgaagaagattctagattctgaaagctgactgctatatcacgtgactgctagcgattggaatctgaatatggatggcatgaatgagtatgcatc

SEQ ID NO: 7705 - DNA, 325 bp, Glycine max
  Clone ID: jC-gmfl02220086h05d1
aaaaaaaaaaaaaacccccccgggatttaaaccctgataacctttaccaggtgggggccctaggggggcgctaaaatttttgccaaggggggaggggtggaaaaaggagggggcataccccccctgtataccttggccagggggcacattccttctttttttttggggggggctaaccggggggggaaggttttttacccccatttctaccaccaaatcccgggccgggggaaaaaagggggggggacactttgaggggctccccttacagattcgaaaccaaaaccatggcgttgtaaaagggtcctatgccagaagagaaatt

SEQ ID NO: 7706 - DNA, 313 bp, Glycine max
  Clone ID: jC-gmfl02220086h06a1
cggctcgagcgagagtaagattgtagccaatggggttgtttctaatggtgtctaagctctactgtgtttgaaggaggcggtccaatacacctcagtggcatatattggtgttcttagaagtatatttatcagcaatttggtaccgtccggatttgatctgtcttgccttctcttgcagtctgaagatagtgtgattggttgcctagtgaagataaagatctgtatattgagattggctgggcggagttagttcatagaatgctagcaccaatcccttctcattgggtctctgtaacagtggttagctgctaac

SEQ ID NO: 7707 - DNA, 517 bp, Glycine max
  Clone ID: jC-gmfl02220086h06d1
agaactaaaaaatattgtgaccttcatagccagaaaacacctattacataacagattgtccacaaaatataaatctttttcaagtatgcccaagtcaatcatcagatagaaaataaacagactaaattaaaacgaaaactcaaaaacttaaaagccaactatatttcagtatttcccaccttgcttctacccctgttgaaagtaacaaagtaagctgctctgcaacaaagtagatctgaatttacaagacaggaaacgaccaaacaagtaaaataaaaagagagaaaaaaaaaggcttagagaaggataaacccgaacaaaaaccaaaagatataagcatcttaggcagaaaaccctaaaaaaccccaaaaccctagaggagtaaaccctgttaggagctaaccactgtaaacaaaacccaatgagaagggattggtgctagcattctatgaactaactccgcccagccaatctcaatatacagatctttatcttcactaggcaaccaatcacacta

SEQ ID NO: 7708 - DNA, 466 bp, Glycine max
  Clone ID: jC-gmfl02220086h07a1
cacaacactgggaaactgaaagtcatatgatacacgatgacaggttttaaatgataacttgacaagtttagccaaagaaacgaactacaattcttactcaaaaaaataagaaaatatccggaagaccgagcttcattactcagttttaactaacttacactgatacaagggattggcattgccgattcctaaggattttgggccaccatcctcttcaaatccttattttctttgctgagaacgtcgacgcgagactggagaatggtaatcattgcttgtgtgctcatcatctcaaacctgatcgtgtccttttcaactgaaagcttctgcatctcactcttcattaccttgatgaactttgcgcagcttggaggcatggatgactcaagattttccacgtcaaaatccggtgtcttaattgaagcaaggctgtcctttgattcaggggactctagcagtgaaaact

SEQ ID NO: 7709 - DNA, 486 bp, Glycine max
  Clone ID: jC-gmfl02220086h07d1
gggtaaatggaaaaacgttgttacctataaaaatcagctgtctaaatgtaagtgtgagaagaaacaccgaactctacaaacatgactatatgagatgttacagcaatttaggtggggtggattgatcccggctgaaagtgttctcttttaaactcttgctcaaccaaatagcagctgccctcggggaagctatccctggcccaaacggatttaataaaactgcaaggtgtccatacctttcctgctgtagtaatcttgcactaaattcaagcgaaccttctaagggctcagtcctttgtcggaatgatgatgtatcaaactgtccgtggcgcaagtctgaaaagttgaggcttgatgctccagcagttgcattttgatcagatgagccacttttattctcatcgttatgattggacatgctgttcgtgattgcctgccaagcatccgtacatactgggctaacataagatgtgtcacataccttga

SEQ ID NO: 7710 - DNA, 478 bp, Glycine max
  Clone ID: jC-gmfl02220086h08a1
gaagaagatggtgtccttgaagcttcagaagcgcctcgccgctagcgtcctaaagtgcggcaagggcaaggtctggcttgatccaaatgaagtcaatgaaatctccatggccaattctcgacaaaacataaggaagttggttaaggatgggtttattatcaggaagccgactaagattcactctcgctcccgtgctcgtcgaatgaaggaggccaagagaaaggggcgtcactctggttatggtaagcgtaagggtacaagggaggcaaggcttcccaccaaaatcctttggatgaggaggatgcgtgtcctcaggcgcttgcttcgcaagtacagggaatcaaagaagattgacaagcacatgtaccatgacatgtacatgaaggtgaaaggtaatgttttcaagaacaagagagtcttgatggagagcatacacaagtccaaggctgagaaggcaagagaaaagacattgtctgac

SEQ ID NO: 7711 - DNA, 348 bp, Glycine max
  Clone ID: jC-gmfl02220086h08d1
aaaacacaacccccaaaaaagggggcccccccccccaaaaggggtttggaagtgggggaaaaaaaaaaaaccctggggggggggggggggaaaaaaacccaaaaaggggggggggggggcctattttaaaaagggggggacccccgggggggaaaaaaaaaattggggggtctcccccccccgcgccaaattgttttcccccaaaaaacccccctgggggggtttgggggggaaaaaaaaaaaacccccccccccggggggccccaaaccccggggggggggggggccccgggggggggggggccccctgggggggggggaattggggggttttggggcccaggggcc

SEQ ID NO: 7712 - DNA, 491 bp, Glycine max
  Clone ID: jC-gmfl02220086h09a1
taggttaaaggagtgcatgttatgaaaaagggcatcctcccatgtttctggcgagctcctatcgataatgacaaaggaggaggttcagccagttatttgtccaggtggaaagcagctggaatggactgcctccactttattactgagagctgttctgtgcaaaatattacggagaactcagttagaatattggtggtttttcttggtgttaccaagggcgaggatggttctctctccaaccaagacaagtcaaaggttttatttacaacagaaatggcatatacaatttatgcttctggggatgtcattatagaatgcaatgtgaaaccaaaccctgatcttcctcctttgccacgtgtgggaatcgagttaaatgtggaaaagtctttggatcaagtaacttggtatggaagaggaccatttgagtgttatccagatagaaaagctgcagccctggttgcagtctatgaacataatgttagtgagttgca

SEQ ID NO: 7713 - DNA, 490 bp, Glycine max
  Clone ID: jC-gmfl02220086h09d1
aaaggaagaaatatgattttttgtcataaaaaatgtactgtatgaaattccactgtctataaggatagaaatacataatttgcactgaaaaaagggagcaaacgtacatatcattagacagaacagtgaaacacaaggactgcagttaaatataaaaacttccactttgtatttcacgtttcaatggaagtatttccaatatcatcgtcccaaatcaccatccatattttgcttgtgtttcagctttggtaagcatgccctttgcacgccgctcagtgagtttcatttcgttttgtttcatatcaaagtacaatgaaccaatttgatgcttcctcttgtgcagctttgtaggcttcccctttgtcgaagcaggctgataagtgggtccgaatgcaatcccagttagcttggcctgatcctctcttggccggtttttaatcaactctttttgcttcacctcaatcacttcagttggaatctcatgcctccc

SEQ ID NO: 7714 - DNA, 491 bp, Glycine max
  Clone ID: jC-gmfl02220086h10a1
ctcggttgttgcatggactatttttcttcttactagttcctttcttcttcttcttctctctctctctctgagcactgtttgtgtttcagccaccccccatttttcattcttccaaacacaacaacagaggcagagagaatcagagaaaggagtattaaatagttgattatttcacagataatgaacaataaagatggaaaaccagtcacccagccagacaaaagcaggattgtctctatggcaatcatatttgtggtgctgtgtggattttctttctatatgggtataatcttttgttccgagaaggacagatttgtgacaatgtacaaccagaactccattgaatcccccaaggagtcatcaataagttctctgcaaattaaatacaccagttttcctgaatgcagcgctgactatcaagattacactccatgcacagatccaaggagatggaggaagtatggctcgtatcggcttaagttgttggaacg

SEQ ID NO: 7715 - DNA, 471 bp, Glycine max
  Clone ID: jC-gmfl02220086h10d1
caaataagaacagtaaattattcatatcacagttacagcacatttattaaacaagttgtgaaattgtctgcttggttccttgggtaatggaacaaatttgtacaataagattattcaccttccacattattaaatcaagcttccaaccaaaatgattgcatgggatctttacaccaatagcttccaagtttctttgtagtccttagtaagcacaccagtctttggtcttcggtcttcggtcttctacaagatgtttattcttgaatagaacaagtcatgtgatccaagaaatcaagagttttgaaactgggatttgtagatgtcatgaccagaagtggctggatttactgggcacagcctaacagagaatgagtatggcacaggaggaatcaaatactgttcgtggacacatggcgaccaactatcatctccacccaatcccatgtgcttgtgatctagatgaatctcaat

SEQ ID NO: 7716 - DNA, 492 bp, Glycine max
  Clone ID: jC-gmfl02220086h11a1
ctctcaatcgttttctacataatacaaacctctctaatttttgaagcttattatacccaatctcgatatgcagatcttcgtgaaaaccctaactggcaagacgatcaccttggaggtggagtcctctgacaccatcgacaacgtgaaggccaaaatccaagacaaggagggcattcctccggatcaacagcgtttaatcttcgccggaaaacagctcgaagacggcagaaccctcgccgactacaacatccaaaaggagtccacgctccacctcgtcctccgcctccgcggcggcatgcaaatcttcgtcaaaacccttactggcaaaacaatcacgctagaggtggagtcctccgacacaatcgataacgtgaaagccaagattcaagataaggaagggattcctccggatcaacaacgtttgatcttcgccggaaaacaactcgaagacggcagaaccctcgccgattacaatatccagaaagaatcgac

SEQ ID NO: 7717 - DNA, 439 bp, Glycine max
  Clone ID: jC-gmfl02220086h11d1
aacttgaacactctctttttgatattgatattaagagacacattggtagggcatacatacaaacagagagtacatgtttttagttgatcacgtaaaaaattacaaaagaacatacaaataacaaaataggaggaagaggagagaaacacacagagtaagagacgtggaaagttatggatattagacatattataagggcaacgctcaaaaaacttccagcatagagcagtggaatgaattacttaggccttctcccacttgaggggtttgaccacttcccatgtgaagtcagggtcttctcttccaaagtgtccataggcagcagtcttcaaaaacctgttatttccacccctcttgagatcaaggttgatggagatcataccaggcctgaaatcaaagtttttcttcacaatgttgagaatctccttatcatggatct

SEQ ID NO: 7718 - DNA, 294 bp, Glycine max
  Clone ID: jC-gmfl02220086h12a1
gacggtgtgaagtagatgtgtgcggaaaatcgaggaatcaaaattagggttcgaaatagcattgaggagaaagaagaagaaggatgtggcacgaggcgaggaggtcggagaagaaggtccaccacatgatggacgcggctcggaagagagcgcaacgacgcgccgcttacctagccaagaggcgcggcgatcctcaacaatctattcagctcgtctggctttcgaagccgaacctatcgcgacgacgctctctaccaagccacgcacgatcagcagggcctgataccttggaat

SEQ ID NO: 7719 - DNA, 440 bp, Glycine max
  Clone ID: jC-gmfl02220086h12d1
actcataattcattaattaatgttaaatatacgttggcaaatactaaaatgacatgttcaggtagattgcatatcgcaacttcaacacaactcaaccaagaccgatttccctcgaactatttggcagaaatgaaagccatatattaatatccatttcatattataaataaatgccacacaaacttcgtcagccttctactcgtatatagcattccatcagtgctttgatcgatttcttatcctgggagatcgagaataaggagacggagaacgtgtgcgagaaggggaccgtgaatgagaactagaataatatcttctggaacttctgcttctacttggacttctactgcgccggtatcttcttggaggggaaccgctgaaactcctgctgcggcttgcgcatctataccgactcaatctactagtttctgcaagctttt

SEQ ID NO: 7720 - DNA, 462 bp, Glycine max
  Clone ID: jC-gmfl02220088a01a1
cacacttctcacattgctgtgaagttttctgaaatcttgaccaagattgacaggcgatctggtaaggagcttgagaaggagcccaaatttttgaagaatggtgatgctggtatggttaagatggttccaaccaagcccatggtggttgaaactttctctgagtatcctccccttggtcgttttgctgtgagggacatgcgtcagaccgtagctgttggagtcatcaagagtgttgagaagaaagaccccaccggagccaaggtcacaaaggctgccgccaagaagaattgattgcattttggcaattttgctagcacatgtgatcatcaacgtggtttcaaaaaaacttgttcctttacagtagtttatctatgcagagtcttaggtgtttgttttaccagttatattttgaagtgtccgccgatttcatgtagccgtagccttcaaaactgggttcttgat

SEQ ID NO: 7721 - DNA, 555 bp, Glycine max
  unsure (1)..(555): unsure at all n locations
  Clone ID: jC-gmfl02220088a02a1
agatattctcccgcgagaacaacatccttcgccgtcgccaccattttctttaagctccatttttgttaaccgccgtcgaaccgggtcgggtcgggtattaacgagacaccttcacagagaggcagtaaactaggttgttggagttgttctgtctgaaaccgaaccacattccaaagatagccgttgtcattgtcagaaggagaaggcattgcgttttagaaagcgataccgtgagagacaacaatgcatcgcgctagggtttgattatattacgcagatcgaaactccccccaacggtgtgttgaagcgcattttgcaatttcaataaataaataaatgggagaaaaatcgaggtccaaaggagggtgctgcggttggttcatcgcgttcgtcattctggctctcgtcgtcggtgccattgtttttaccgttaagaagaaatttagtcactccggttccgataagcctgctcctggttccggtccccctggcgccgttgaccaaaaatactccactggacttaanaccgcaatgcaattcttcgatgttcagaaa

SEQ ID NO: 7722 - DNA, 573 bp, Glycine max
  unsure (1)..(573): unsure at all n locations
  Clone ID: jC-gmfl02220088a03a1
tgagggtaaccaatatgagttaagtgacacaaagtacacagaagaaggatacaacaacaagtatcacaactcctatcagaacaactacaacaacgatgctgccaatgacaaatactcctacaacaacaacaacaacaacaaaaattacaatgctcacaataacaggtacaatacttacaacaacaatgctgttagcaggtacaatggtgagaggcaaggaatgagtgacacaaggtttttggagggtggaaagtacttttatgacgttggcgcggagaagtacaatccaacaaactatggtgactcgtctagggaagtgaacactaacaattggtacaacaacagaggtgtcaactacaatggataccagaaccaggaggagtttgaagatgagcataagaactttgagccatgagcttggatcactggcaaagtgaagaattcaccatacttaattttgagtatccactatgggtgtttaatgtttttaaagagctttagattcaagaaaacacaaagttaaaggatatgttaactatgaaaggcttttattntaatttttacttagtagta

SEQ ID NO: 7723 - DNA, 524 bp, Glycine max
  Clone ID: jC-gmfl02220088a04a1
taaacaataaaataaaataaaacagaagagaaggaaacagaagtaaaaaaaaaataaaatgggttacacaagatcttctcttctgtccgtggctcttgtcttggcattctgttcaagcattcagggtttggacatcaccaaattgttgggcgaatatcccgaatatgcacagttcaacaaatacctaactgaaaccaagctggcggaccaaatcaacagccgtaacgccgttacagtccttgcccttgacgacgccgcaatggcttccctctccggcaagtcgcaagacgccgttaaggccatccttagcacccatgtgctcgtcaacttctacgacgagaagaagctgatggaagccgaaggtagtcgcaccaaggtcgaaaccctattccaatcctccggtgtcgccaagcccaaccagggttacatctacgtggcgctcatcaacgagggggagattgcgttcggttccgccgacgacgtaccgaatgcacctttcgaggttgtgcttgtgaggtccgtga

SEQ ID NO: 7724 - DNA, 576 bp, Glycine max
  Clone ID: jC-gmfl02220088a05a1
cttgatcccacactctatggtgatcaaaccagtaccataacaaaagaacaattggagattaacatgggaggggtcacagtagaagaggcacttagtactcagagattattcatattagattaccaagatgcattcatcccatatttgacgaggataaacagcctacctactgcaaaagcttatgccacaaggacaatcctgttcttgaaagatgatggtactttgaagccacttgctattgaattaagcaaaccacatccagatggagataatttgggtcctgagagtatagtggtgttgcctgcaactgaaggtgttgatagtacaatttggctattggccaaggctcatgttattgtgaatgactctggttatcatcagctcgtgagccattggttaaatactcatgcagtgatggaaccatttgccatagcaaccaataggcatctcagtgtgctccaccctatttataaacttctttatcctcactaccgcgacaccataaatatcaatggacttgctaggcagttcctgattaatgcagatggcattatagagaaatctttttgcccgaaa

SEQ ID NO: 7725 - DNA, 508 bp, Glycine max
  Clone ID: jC-gmfl02220088a07a1
aaagaacttatcaaaattttcttcaacatcaccattacaaaaattggtgataaactcaaagaaactaatattttgcatgaggttgaggaggaacccagagccaagatggcacttgacacttgcaagcaactcatggatctttctattggggaattaacaaggtcacttgatggaataaatgagtttaacctcataaatgttgacaaaatcctcatgaatttaaaagtttggcttagtggtgcggttacataccaagatacttgcttggatgggtttgagaacaccactagtgatgctggcaaaaagatgaaggatttgttgacgataggcatgcatatgagcagcaatgcccttgccattgtaacagatttggctgacactgttaacgattggaatatcacaaaatcatttgggcgtcgcctacttcaagattctgagcttccgtcatgggttgatcaacatagacttcttaatgaaaatgcaagtccattaaaacgcaagcctaatg

SEQ ID NO: 7726 - DNA, 588 bp, Glycine max
  unsure (1)..(588): unsure at all n locations
  Clone ID: jC-gmfl02220088a08a1
gattgatcgagagaagagaagatgactacacgcttcaagaagaacaggaagaagagaggccacgtgagtgccggccatggccgcatcgggaagcaccggaagcaccctggaggacgcggtaatgccggaggcatgcaccaccaccggatcctctttgacaagtaccaccctgggttcttcggcaaggtcggaatgcgctattttcacaagctccgcaacaaattctactctccgatcctcaacatcgacaagctctggtccctggttccgcaagaagtgaaggacaaggcctccaaggagaacaaggcgccgctgatcgacgtcacgcagttcgggtactttaaggttctcggaaagggtgttttgccgcagaaccagcccgttgttgtcaaagctaagcttatttccaagatcgctgagaagaagatcaaggaggctggcggtgctgttgttctcaccgactgattntatagacggtatcgctttttcaacgatttatggttttttttttgatatggtctgatacgtttcgtttggatgacgttgtgttagtcaatgctacattaggattaaataaggtttattttt

SEQ ID NO: 7727 - DNA, 519 bp, Glycine max
  Clone ID: jC-gmfl02220088a09a1
gtgaaacaagctccaaatattctcacaattgccttgaaaagatttcaggtctgagtaatttgatctggatgatcttgccaagttgttgagagatgttttaagtaatataaatatcagttcttatgatttgttctaattttgccttcttgaaatgtgcctcgagtgtaaattgtatgggtgttagtttaccatgactatgcaccatactgtacgattacattatttctttttcctgctagtacttataaaggattgaatactacttgaatgttttttgaatttgtcaacttttctcatgatttttctggggcattgtgaacatgcagagtgggaggtttggaaagcttaacaagagagtaactttccctgagactttagatcttagtccttacatgagtgaagttggagatggatctgatatttataagctatatgctgtcgtagtacatattgatatgctgaatgcttcattttttggtcattacatctgctacatcaaagatttctgtggaaactggt

SEQ ID NO: 7728 - DNA, 386 bp, Glycine max
  Clone ID: jC-gmfl02220088b01a1
gttgttggccttgcagaaggtagcaatagtggtagtgccgagaccagtagaaaatgggcaaggcagggtttagatcttaatgcaggacctgtaggttcagatgtggatgggagagacgggaattctcctcttccatctaggcaactttctgttgctagttcacaggccctagctgaggagcaagtaagggtccagctggctggtagtgttcgtaagaggaaggagcctgatggtgggtgggatggccacaaccaatcctcatggcgatagccaaatttattatcctacaatctaatgaccacaaatgctttgatttgaggatttggcaatggtcaactttcagcgatcattcaatttttgcttttgggagaattgggtggtaagtg

SEQ ID NO: 7729 - DNA, 290 bp, Glycine max
  Clone ID: jC-gmfl02220088b02a1
atagcccaagccctatacaaccaaaccctaacacacacccatttgattcagtttccatggctagcctcaaggttgcatttttggctgcagtgctctgcatggttgtggtgagtgcacccatggcacatgcagctatcacgtgcgggcaggtgacgaatagcctgatcaattgcatcggttacctccagaacggaggaacgccgtcgtcgggatgctgcaacggagtgaagagcctcaatgccgacgccaagaccaccgccgaccgccagacggggtgcaactggcttaag

SEQ ID NO: 7730 - DNA, 545 bp, Glycine max
  unsure (1)..(545): unsure at all n locations
  Clone ID: jC-gmfl02220088b03a1
gttcgatgaaaagtaggtgataagcaaacaaagtctctggaaaacgcgattcttcttctgttgagagatgaagctcattgcactgagttctacggttcggcgcgctctgctcaatggtcggaaccaaaactgtaaccgcctaggttcggcggcggagacgaggctactctgcgctggcggcgcgaatggagggttcttctactggaagaggacgatggcttcgccggcggaagcgaagtttccggagaaggagaaggccgaggctgagaagagcgtggtggagtccagttattgggggatttcgaggccgaaggtttcgagagaggacgggacggagtggccttggaactgcttcatgccttgggagacttatcgtcaaacgtgtccatagatcttactaagcatcacgtgccaaagaattttctggataaagttgcttacaggacggtgaagctcctcagaattccaacagatttattttttaagagacgttatggttgccgtgcaatgatgctgganaccgttgcagctgtccctggcatggt

SEQ ID NO: 7731 - DNA, 218 bp, Glycine max
  Clone ID: jC-gmfl02220088b04a1
gctccagtaaaagtatgtgatatgcaatctaaggctctggaaatcgcgattcttcatatggggagacactaaactcattgcactgacctctactgttggacgcgctttgctcaatggcatggaaccaatagttcttaccccctatgtttggcgattgagacgaggctactcagcgctggaggctgcgaatggaaggttctgctactggatcaggacta

SEQ ID NO: 7732 - DNA, 553 bp, Glycine max
  unsure (1)..(553): unsure at all n locations
  Clone ID: jC-gmfl02220088b05a1
gagagagcagggcaagtccggcggatccgccggaggaggggcgacgccacctgcgaagagaggccgtcccttcggcagcggtaacaacagttcctctgccgctgcttcagccgcggattcggcggctccgtcaaccctccttggtccttcccttcacgttcacaactccttcgccgatcagaacaacaaaagaattgtcttggctcttcaaagtggtctgaagaatgagctaacatgggctttgaatacacttacgctgctctcctttaaagaaaaggatgacatgcgcaaggatgcgactccccttgcgaaaattcccggcttgcttgatgcgctcctacaaatagatgattggcgtgatatagcactcccgaaggaatttgccaagacaacgaggatcaggactttaggtgcaaattctgatgtaagtggatttgggagtgaatatcaagcgctgggctcaactggtactccccaccgacctggtgtaagatctggctctgctggtatagaatcaacgctacagaatggcatggcanaatctcggttttct

SEQ ID NO: 7733 - DNA, 520 bp, Glycine max
  Clone ID: jC-gmfl02220088b06a1
agattaccaaaaattacgaccaaggaaacgcagattctgatgatgaggaaatacaagctctattgaaaaagttaaattttataccaacatcggttttcacaacggacttgccttacgtggattttctggatcgtgtacataaggcatagctgaagcttagatccaagggtttatgggatgtaccttatccgtggctcaacctttttgttccaaaatcaaggataggggacttcgacaagggtgtgttcaagggcattcttggaaataagacaagtggacctatcctcatataccctatgaacaaaaacaagtgggaccagcgaagctcggtggtgacaccagaagaggatgtgttttacctggtggcatttctaagatcggcattggatactgagacgctggagtacctgactaatcagaaccgtcaaattctgaaattctggcatgatatagagatcaatgtaaacaatacctgccccattcactacgcagcaagagtggaggaccactatggtgatag

SEQ ID NO: 7734 - DNA, 100 bp, Glycine max
  Clone ID: jC-gmfl02220088b07a1
cgcaaacagaatattgtggcttatccatcatacctctagaactagaggcagagcaatgactgggatcatacttagacaggatgccttcgcaggaagtcac

SEQ ID NO: 7735 - DNA, 110 bp, Glycine max
  Clone ID: jC-gmfl02220088b08a1
cgcaaacagactattttggcttttctaccataccgctagaaagagagacagagaaattactgggatcataatgagacacgataccttagcaagatgtcagtctcaatcag

SEQ ID NO: 7736 - DNA, 109 bp, Glycine max
  Clone ID: jC-gmfl02220088b09a1
cgcaaacacaatactcaggtgtttctatcaaacctcttggactagagacatagaaatgactgggatcatacagatacacgatgccttagcaggatgatagtctctatga

SEQ ID NO: 7737 - DNA, 377 bp, Glycine max
  Clone ID: jC-gmfl02220088c01a1
attcaacactcatatccttatcctgtttctttcaatggaagtcatttctgcttctagcttgaatcccaacgctccgatgttcgtgccactcgcctatcggacggtggaggatttctccgaccagtggtgggacctcgttcactcctccccctggttccgcgactactggctccgcgagtgcttccaagatccccagttccaaaacgacgacgctttcgacttcgactttgacctagatctccaagatgaagatgaaagggaacgaaaggaagggaaggaggtggtgtcgttggggctgctgaaatggcgaagctgtggaggaggatgggcccaggcgccgaggtatgtggaaaaggcccccaagtttgtgaagccca

SEQ ID NO: 7738 - DNA, 458 bp, Glycine max
  Clone ID: jC-gmfl02220088c02a1
gcaatatctttatgatgatagtgggaggcgttaccttgatgcatttgcgggaatagttactgtttcttgcggacattgccaccctgaaattttgaatgctatcacggagcagagtaaacttctgcagcatgctacaaccatatatctacaccatacaataggtgactttgctgaggcattggcagcaaaaatgcctggaaaccttaaggttgtttattttgtaaattctggttcagaagcaaatgaattagcaatgatgatggcccgtttatatactggtaatctcggtatgatttctttgagaaatgcatatcatggggggagttctagtacacttggtctgactgctctgaactcgtggaaatacccaattccagagggccatgttcatcatgttatgaatccagatccatatcatggagcctttggtacagatgctgctagttatgcaaatgatg

SEQ ID NO: 7739 - DNA, 467 bp, Glycine max
  Clone ID: jC-gmfl02220088c03a1
ttagagaaattgaggaatcaaaattagggttcaaaatctcattgaggagaaagaagaagaaggatgtggcacgaggcgagaaggtcggagaagaaggtccacgacatgatggacgcggctcggaagagagcgcaacgacgcagccgattacctcgccaagagacgcggtgatcctcagcaatccattcagctcgttggctttcctagccgaacctatcgcgacgacgctctctaccaagccttacaggatcagcagggcctgataccctggaatgggaaacaggatgtattgatagaccgattagatgggcgtgctctacttgatttcgttcgtgaatctagtaacaggctcgcttccgaagaagtctgaacactaagaatagttatgaagagttagacaattctgaggcttatcgggaattaataaagcatcgacgtataggatgtcgtaactgatgacgagggtt

SEQ ID NO: 7740 - DNA, 561 bp, Glycine max
  Clone ID: jC-gmfl02220088c04a1
cggaaagcttagcttctgcactacatgaagtatctgcagaagctagagatgccaaagaaaatctactaaacattcaagctgatagtgaaagctatgatgctcagattgaagacttaaagttagtcttaaaagctactaatgaaaaatacaagtccatgcttgatgaggcacgacatgagattgatgttcttgtatgtagtattgaaaattctaagagtgcctttgagaactccaaggctgagtgggagcagagagagcttcaactagtgagctgcataaagaaaaatgaagaagacaaagtgtcactggacaaagaaatactaagattgctgtatttgcttaaagaaaccgaggaataatctgatgccaacagggaggaagaagctcagatgaaggaaaatctgaaagaagttgtggctgaagcaatacaactggacgacgctattaaggaaacagcagctgagaacatgaaattgaaggacaacttattggataaagaacatgacttgcagtgtatgtttcatgagaatgatgaactacgaatcagggaagctgaatcta

SEQ ID NO: 7741 - DNA, 449 bp, Glycine max
  Clone ID: jC-gmfl02220088c06a1
ccgttacctaaaactcattctttacctgcaactatttggattgctgatatgtgttaataccatatttactgatattggcgcattcctttgagaaagttactaattcctagatagaggcaaaaatgttgggaattttcaaggagaagttggataaagcacccaaagagctgaacagtccagcttcattgaattcatgcactaatcctaagctaagtcacgaaatccttcacgatttcatgtcctgcgattcctccaatgctttctcaatgtgctttgggaatgaagctttgctagcctattccccttcgaacaagccctgcattcatcacaggttgtttactggtttggataacatatactgagtattcctgggtggactgcacaaccttagcatgctcaacaagcagtaagggctatcaaagggaacaaatgaagccatgtttatcact

SEQ ID NO: 7742 - DNA, 105 bp, Glycine max
  Clone ID: jC-gmfl02220088c07a1
ccaaaacagaattctctggcttatgcaccaaaccgtatgcatgtaagccagaataatgaccgtgattacagatagacacgatgccaatgcaggtctggccctcac

SEQ ID NO: 7743 - DNA, 171 bp, Glycine max
  unsure (1)..(171): unsure at all n locations
  Clone ID: jC-gmfl02220088d02a1
ctcttctcttggtatatatcaatctacacgattaaagtcaaaantgngtcatcanaacttctcatcatctacttaaatntacaatatataatatactcttcattgaatttgtgtactagtcattaacaatcagcataatcataaagagtgtaggtacatatacatgattta

SEQ ID NO: 7744 - DNA, 561 bp, Glycine max
  Clone ID: jC-gmfl02220088d03a1
gacatggtcctaaagtctggcctgagatgaatataaaatggactaatcttcttctggcttgttttcttcagaatcatgggggttacacagagttacaaattgctgcaaatggaataacttggtttcttcagtggcttctctctacctctcacctgaaatcaacttgtaatcttcatgagcttgcattgaattgatactttgataaagatggatgggaaaaaatctctacaaataactagaagtggtactggtgcttatgatgatgatggacatgccaaaaggactgggaatttgcagagtgctgtagctcatatcattactgctgttattggttctggtgttctctctcttgcatggagcacttctcagttaggatggattggaaggccaattgcattgctttgttgtgcaattgttacctatatttcttcattcctcctgtctgattgctacagaacttctgatcctgtcactgggaaagaaactactcttacatggatgctgatatagtttacttggttataaaatgacatgtgtatctgggtttcttcaatttttgac

SEQ ID NO: 7745 - DNA, 343 bp, Glycine max
  Clone ID: jC-gmfl02220088d04a1
cacacacactctcatagctgtagcggcgtcactaagatcggagaatgaatggctatgactgacgtcgttgctgctctttacactgctccttaccggaaccctagctctcatccaggcgaagaaatccgaaggacgatctgaaggatgagacccacaaggtttactttgatgttgacattaatggacaagaagcaggtcgtatcgtaatgggtctttacgggaaggcatgaaccagacactgcagataactttcgcgcactttgcacacgggaaaagggaactggctaatgcaggaaagcctctccattacaaaggtcgctcaacatatgcaaccattcctagc

SEQ ID NO: 7746 - DNA, 185 bp, Glycine max
  unsure (1)..(185): unsure at all n locations
  Clone ID: jC-gmfl02220088d06a1
ctcacccaatattatacgtatcataactataactctcttcatcacaccagaatactccactatcgntacgcaactacacatgtatactttaatagtccacgtacaatactgacgatctctatcattatcctatcatcttctcatatagaacaacgatgtatgtactatgcaagatctatgacgtt

SEQ ID NO: 7747 - DNA, 105 bp, Glycine max
  Clone ID: jC-gmfl02220088d07a1
cagcaacatagacctctggcgtaagcctcctacagcatacatgttagccggcatagtgaccgattttgcggatattcacgatgtcaatgcatgtacgacataact

SEQ ID NO: 7748 - DNA, 414 bp, Glycine max
  Clone ID: jC-gmfl02220088d08a1
ccaaaatagatacctctggattataaggaaacagactttcatcacagatggaatgggtaccacaatatctcctcttctggccgaggctcttggcctggcatcccgatcaggcattcacggtttggacatcaccaaatggttgtgcgaatatcccgaatatgcacagttcaccaagtacctaactgacaccaagctcgcagaccaaatcaacagacgaaacgacggtacagtccttgcccatgacgacgccgcaatggctttcctatacggcaagtcgcaagacgccgttaaggccatccttagcacccatgtgcttgtcaacttctacgactataagaagctgatggaagccctaagtagttacaccaaagtcgaaaccctattccaattcttcggtgtcgccaagcccaatca

SEQ ID NO: 7749 - DNA, 230 bp, Glycine max
  Clone ID: jC-gmfl02220088d09a1
ccaaaacataatgctcaggattatgtctgcaaccggatggaccaatgagggaatggggacctagatatcacatatacaggaggcctgtgtaggtagggattcttgatcagacattccctgtatggatgtttcccatttatggcgagaatgatctgactactcacagctcaacctgtgcctacatgggacctcgttgtctgactagatcaacatactatgcgacgacgtgc

SEQ ID NO: 7750 - DNA, 365 bp, Glycine max
  Clone ID: jC-gmfl02220088e01a1
gaagcatcccctggacctcatgattctgactacatttttagggagtttatagagctaatgaagcaagggaaaaacagaacaaagggaaggctacaccaactatcaacagcacatgctttggatgcataagtagttgaaggaagctgctcgcgttcggggcaaaaagaataatgcatctgctgaaaaattacgaagttatgagtccattactatgattttgtagatgagtttattaaggtttcctagggatccataaagattatgattttctcatgctcgcgttcgggccatgattgtcataaacctcaatgaggtttaatgtacttattacttatcgctatcaacactaaattttggttgctggt

SEQ ID NO: 7751 - DNA, 500 bp, Glycine max
  Clone ID: jC-gmfl02220088e02a1
caaacttctttcactctttcgcttctgaatcttcaacaatggtgctcgaggcgacgatgatctgtatcgacaattctgaatggatgcgtaacggagattactctccttctcgatttcaagctcaagcagacgctgtcaatctcatatgcggtgctaaaacgcagtctaatccggaaaatacagtgggagttctcacaatggctgggaaaggcgttcgtgttttggttacccctacccgtgatctggggcagaatctttacctggcatgcctggactaaatttaggtggtgaggatgaacctacctgcttgccattcaggtggcccaatgggttctaaagcatcggcaaattaaaaggcaccagcggaggataatggccttggctggaagtcctgtcaagcttgaaaggaaaatgctggagatgataggaagaaagttgaaaaggaatattgttgaactggatatggttaattttggtgaagaagatgaggggaagacaga

SEQ ID NO: 7752 - DNA, 547 bp, Glycine max
  Clone ID: jC-gmfl02220088e03a1
cttggcagattattagaagagaagaaaagattaaaatgttggaatatcgagagaacaggttgcaaatggaaccattaaaattcagtagtgcttattcatcaaatgaggaattagattctctggaatttaggaaggtggtgtgcaaaggatattttgatgataaaaaatcaatctatgtgggaccacgttcaagaagtatttcaggaatcactgaaaatggttactatatcataacacctcttatgccagttcccaattgtcctgacagtgtgagttttccaattttagtcaacagagggtgggttccacgtagttggaaagacaaatttttagaggcttcagaagatgaagatttggaagatgctcttacttccccttctcacgatgatggaactaaatcttggtggagattttggtctagaaagcctgttattgaagatcaagttgcatctgctacacctatagaagttgttggcgtagttcgtgaaagtgagaagccaagcatatttgtttctgcaaatgatcccaaggctatcagtggttctat

SEQ ID NO: 7753 - DNA, 602 bp, Glycine max
  unsure (1)..(602): unsure at all n locations
  Clone ID: jC-gmfl02220088e04a1
gaaattgagcagtgcagagactcctgaacgtcaacggctatggcagcttcttcctttacaacatcttccattctcttcccattcacaactagttctaaatcccctccttctcaactattcccctcttttccttgcaaacatcataccctccgtctcagacccgtctcagtctcagccgcttcaaccccaaccccctccatccaagccgacaaatccccggtctccgccactccctccaagcttctcccctttcggattggtcacggctttgacctccaccgattggaacccggttatcccctaatcatcggtggaatcaacattccccacgatagaggttgcgaggctcattccgatggtgacgttctgcttcactgcgttgttgatgcgattctaggggcgctaggtcttcctgatattggccagattttccccgattctgatcctaagtggaagggttgtgcctcttccgtcttcatccatgaatctgtgagacttatgcatgaggctggttatgagaatgggaattagatgctacatngatacttcagagggctcaaactagcccacacaatgatgctatcaatgccaacttatctgca

SEQ ID NO: 7754 - DNA, 537 bp, Glycine max
  Clone ID: jC-gmfl02220088e05a1
agaaggtggagtgatggccttcaccaagcagttgaggcaaaggaagggttgccaattcaaaatgaaactgtaacgctggcttctatcagttaccagaatttctttcttcagttccccaaactttgtggtatgactggcactgcagcaacagaaagtacagaatttgagagcatttacaagcttaaagttacaattgtgccaacaaacaaacctatgataagaaaggatgaatctgatgtagtttttagggcaacttcagggaaatggcgtgcagttgtagtagaaatctctaggatgcacaaaaccggtcgcccggtgcttgttggcaccactagtgttgagcagagtgattctttgtcagagcaattgaaagaagctggaattccgcacgaggtacttaatgcaaaaccagataatgttgatagggaagcagatattgtagcacagagtggtcgtcttggtgcagtgacaattgctaccaatatggctggtcgtgggacagatataatccttggtggtaatgcagaatttatggca

SEQ ID NO: 7755 - DNA, 480 bp, Glycine max
  Clone ID: jC-gmfl02220088e06a1
tagctatctatttatctatagcaagtgcgtcaagagacacgtggtaccctagctagagtgccattctgtggtttctttctttctttctttctgcatcacatcacaatttgcattgcctcgtgtcctttttcttctttgctctccaaaaatctcacacacacaggtatctagcaaatgggttctcaccaacaagaaccatggctattggagaatgggaaaccaagggttttgaccaaggagaccaggcatggccgttctgcacacagaatgtcctccacctttttgcgcaagaaatctagccgaactcttgtctcaaaggttccatgtgccactctcagaaactttctttcaaatttgcaagaggttattcttggcaccaagctttccattctcaatcctgctaattcagctgccatcgttgctgaatgctttggctttggaagaccttggatttttatattaagcttacttggacttaca

SEQ ID NO: 7756 - DNA, 104 bp, Glycine max
  Clone ID: jC-gmfl02220088e07a1
cagcaacataatcatctggattttgtgcgacaacgtacacatggtagccagactagtgaccgattctgtggttacacccgatgtctctgcaagtaattcatcac

SEQ ID NO: 7757 - DNA, 105 bp, Glycine max
  Clone ID: jC-gmfl02220088e08a1
caaaaacatacttctctggcttatgcctccaaccggatgcatgtcagccagactagtgaccgatattgtagatattcaggctgacagtgcaggacgggcgtcaca

SEQ ID NO: 7758 - DNA, 94 bp, Glycine max
  Clone ID: jC-gmfl02220088e09a1
caaaatcagaatcctctggcttttgcatccaaccgcatggctgtcagccatactagggacccttattgtacatagacacgatgccaatgcagga

SEQ ID NO: 7759 - DNA, 440 bp, Glycine max
  Clone ID: jC-gmfl02220088f01a1
caagaagagttacgagcataatagagataatttcaattttcaggctctaccctcagcgcctggcacgtgtgagtccaacgcatgcatcaacgaaatcctggtcaatgaaatccgtagaaaaaatctgcagtctatctgcataccctttggagaagcactgactaatgaagagccttgcaaagccatgaatgcgctcagtgacaggcttcacacacagaacggggttatccgccacaggcgtaacggtattcttcaccctgtagaagtattttctggacgtaacaggttgctgctcactcaaatgcttcaatgtgctcttaaacttggttgaatggcaaatcaatgttgatccaatttatccttaagtaccctgcacttcacaaatgacttcctggcttaagctggggggaaattccttggcttccaaacacatataactc

SEQ ID NO: 7760 - DNA, 544 bp, Glycine max
  unsure (1)..(544): unsure at all n locations
  Clone ID: jC-gmfl02220088f02a1
ctcctctcctacggcgtcagagtcggcattggcatactcctcctcgccttcaagcttgttggaggacaatcctactcctctctcctcgatctcaagctaatatgattcggtggaatggttgaagcttttgtaggtttcagttgttgtcaggtacagaacctaatgagttcacttttgctaccgtgcttacttcatgtataggttcttcgggttttgtcttagggaggcaaatccactctcatatcataaaattaaattacgaagcacatgtttatgttggaagctcactccttgatatgtatgccaaagatggtaaaattcatgaagctcgaggcatatttcaatgcttgcctgaaagagatgtagtttcttgtactgccattatctctggatatgctcaactgggtctggatgaagaggcattggagctatttcgccggttgcaaagagaaggaatgcaatcaaattatgttacttatactagtgttttaactgcactttctgggcttgctgctctagatcatggcangcaagtgcacaacca

SEQ ID NO: 7761 - DNA, 555 bp, Glycine max
  Clone ID: jC-gmfl02220088f03a1
gaaaaggaacacacattctcattctctcacactttctttctccaatcccaattccaaaccctaaccaatttccatggcttcctcggagatcgaggtggattcatcatcatcggtctccaaacccaacaacgaccagccttcaatcctcgacatctacaccgcctctgctcacggcgactttaacaaattgagaaccttcgtcgaacaagacggcgcctccgtctctcttcccgattctaacggctattacgctcttcaatgggcctcgcttaacaactttcacgacattgcgcactatctcattcagcatggggcggatgtcaatgctaaagacaacatgcaacaaacggcattgcactgggcggcggttcgtggttcaactctagctgctgatgtgctcgtggagaacggtgctcgggttgaagctgcatacgtaaatggataccgggcagttcatgttgctgcacaatatggacaggcagcttttcttaaatcatattggtattaagtaccatgctgattatcatgtgcctgattatgatggatggagtcctc

SEQ ID NO: 7762 - DNA, 557 bp, Glycine max
  unsure (1)..(557): unsure at all n locations
  Clone ID: jC-gmfl02220088f04a1
gggtttcacactttgtccaatctttcacactgaactcttcaattttcaattctctttttcatgcaccactcttctttttcttcagacaccttcatcatctgcataccgcttagctccaaaaactacacacacaagaattctgtttctttctgttgatttgatggatccgcagatctaatggtttcacacactttcttcactacggatcattgtcttcttcatctggggcaccccaatagcttcttctaatcgatagtcaaattttgttggtttgtggtggatcatcttcgtcgttgtggtgactagtgaggagtgcaggactatacctatctatatagtgtatgaaaattctggggggtgaagtcgtttttggggtagttgatagatgttgaaatccttgacggttgattggtgaaatgagggatgttatcggtgttgatgaacttattgagggcctgctttcggtcgggttcggatggatttacacgtgcaggttcggatgccggtggtagacaggatggactattgtggtacaaggactcggngcagcacttgaa

SEQ ID NO: 7763 - DNA, 456 bp, Glycine max
  Clone ID: jC-gmfl02220088f07a1
ctcactttcactattttcaaccaggcataaaaaaagatacaacccagcgccaaaccctaattctccgaaagttgatttctttcaggaaagttctttctaaatccacgcctcctgcagacccatatcgctttttttcttcattctaattctgcgccaccaaatttgcgatctttctgtgccttcgaatcatggagaaggaagagaacgaaccccacgttcagaaaagtggctgctaaagcgaacacgctgaacccatagtgctcgttctctttcaagtgcccgagtgttacgtctacataatacctccaagaaagagtgcagcttcttacagggttgatgaatgggatgtcaacaaatgggcatgggaagggatattaaaagttactagcacgggagaagaatgcatcataaaacttggagattagagcacaggtgaattatatgctcgggcatttt

SEQ ID NO: 7764 - DNA, 105 bp, Glycine max
  Clone ID: jC-gmfl02220088f09a1
catatacacaattctttggctttttcctaccacatcatagctttctgccggaatagggactcttattttagatatgacactatgccaattcaagtcttccttcat

SEQ ID NO: 7765 - DNA, 459 bp, Glycine max
  Clone ID: jC-gmfl02220088g01a1
tttgctttctctcctttgcactttcctcctcttccttgtgatttttgtttgcatcggggggagaaactgagacacagaggatgagagagataattagtattcatataggacaagctggaaatcaggtggggaatttatgctgggagttgcattgccttgagcatggaattaaccctgaaggcaccatgcctagtgataccttaaatggtgtagcacatgatgctattaacactcatcttcagcgagaccggatccggtaagcatgtgccaagggctttatttgttgatctggaacctagtgctatctgatgaaatcacgaactggtcccttacagacaatctgttaaaccctgagcaaataattgttggccaggaagatgctgctaataacttctcatggggacactacactgatggaatagaaatagaagaactatgccatgatcgaatcagaaaatt

SEQ ID NO: 7766 - DNA, 579 bp, Glycine max
  unsure (1)..(579): unsure at all n locations
  Clone ID: jC-gmfl02220088g03a1
ctttgagggaatttgacaaaaaagtagccactgccccaacgatcccatttcccttgacttctctacgtgaagctccttgttttgcataggagctagttgaaatgtccgagggaaatgcagggaaaggaaagaaaatcgccatcattggtgtctcaaccttattgttggtggctatggttgtggcggtcacaattggggtcaatctcaatgagaatggttctaacaatgatatagaggacaacaagaaagatcatgttgcttcttccataaaagccgtccaaaccctttgtcatcccacaaattatgagaaagaatgcgaggaaagccttatagctggggctggaaataccacagatccaaaagaacttatcaaaattttcttcaacatcaccattacaaaaattggtgataaactcaaagaaactaatattttgcatgaggttgaagaggaacccagagccaagatggcacttgacacttgcaagcaactcatggatctttttataggggaattaacaaggtcacttgatggaatacatgagtttaacctcataaatgtngacaaaaatctcatgaatt

SEQ ID NO: 7767 - DNA, 570 bp, Glycine max
  Clone ID: jC-gmfl02220088g04a1
gatgtggaggaggactgaaagaaaccgacccaatgcagaaggctttcacaaaacagagtatggggagggaagatctatcatgcattcagctctatccctccctgcattggagaagttgttaccaggatttgaatccgtcacaagacagatttagagactgattccgaaatttggtaatgtcatcaaaatagacgggttacttgaactcattcttgatacttccatgcattataggagtttaagtgaaagaatagagttgaattgtttggtggctgggaaaagaaagtgatgtccccaacctgagtttttgtgcaatgatgtaaaattttatttgatgattaatatgaaatatttatacacctgatgtgataaggtcaactcagcgtctatgtgagtgtaggtttttcttttcttggaccagcatgctatttgacatttatagacattacgtactctgaaagaagaatacgttatcggtttaacagacgtctgatgaggaaatacactcatgtgataggccttaaatataaacaatcgtgtatgatgatgtttattttattgataggaata

SEQ ID NO: 7768 - DNA, 470 bp, Glycine max
  Clone ID: jC-gmfl02220088g05a1
ctccattctccggatacactcactacccgctgttctctctcaaacatcgagggcggccttccctacgattcatctccgtcggactggccgacacgaaaccgtagacgaataactccagcaattctcagttctttctttaatattttgagaggagcaccaggaatcgcttggcactaacgagaaagtgagagagggagatgaaataagttcgtactgaagatggcgtcgaggcaaatggaagagattcggaagaaattggctgaccttaattacccgagagcgaatgcccctgcacagtccctcctatttgctggcatggagcgctatgcccttctagagtggctcttcttttggcttttatgtgatgagtgacccttttctcaacagagcatacaaggggatggccttgatcgtgatgaggagacaggtcgaattcagtatttggctgagattgctaagtttctgggtat

SEQ ID NO: 7769 - DNA, 488 bp, Glycine max
  Clone ID: jC-gmfl02220088g06a1
ctccattctccgcatacactcactacccgcttttctctctcaaacatcggggtcggccttccctccgattcatctccgtcggcctcgccgacacgaaaccgtagacgaataactccaacaattcttagttctttctattaatatttgagaggagcaccaggaattgtttggcactaaagagaaagtgagagagggagatgaaataagttcgtactgaagatggcgtcgaggcaaatggaagagattcggaagaaattggctgaccttaattacccgagagcgaatgcccctgcacagtccctcctatttgctggcatggagcgctatgcccttctagagtggctcttctttcggcttttaggtgataagtcacccttttctcaacaaaacatacaaggggatggccttgatcgtgatgaggagacaggttgaattcagtatttggctgaaattgctaagtttttgggtattacaacaactgttgatac

SEQ ID NO: 7770 - DNA, 491 bp, Glycine max
  Clone ID: jC-gmfl02220088g07a1
tggataacctttatgggctggtgctagagcccagagttgaaaagcaaagaacagacagcacttactagtccaacagcgacggctgaacctctttgttctctctgtctaagaagaagaagaagaagaagaagaagaagaagaatcaaatatccttgagccagacatgtacaggaacgctgcttcacgtcttagggtcatcagtgcccgttcgtgcagcagcagcaggatacctgccagtgccagatttgcaagttccgttgccacacaacaatcctcttctggtttgggtggtttatttggatggctcactggagaccgatccagttctttaccatctctggatttcccgcttccgggcgttacacttcccccttcattgcctgattttgttgcgcccggaaaaactattattactacactcccaaatggactcaaagtggcctctgaaacattaccgactcccactgcgtcggatggcttatatgtagatt

SEQ ID NO: 7771 - DNA, 531 bp, Glycine max
  Clone ID: jC-gmfl02220088g08a1
gttttaactctaagccatggctcttcccctgttcctcctctgcttcatgctctgcatttcactcacacaccaaacgattatgttacccctaacacactcaatttcgaaaacccatttcaacagtacccaccagcttctcaaatctacctccactcgctcagcctcacgcttccaccgccaaactcatcataactccgtagtctctctcccactttcttcaggaagcgactacaccctttccttcaacttaggctcacacccttctcaatccataaccctttacatggacacaggcagcgacctcgtgtggttcccatgcgctcccttcgaatgcattctctgcgaaggcaaattcaacgccacgaagcctcttaacatcacgcgctcccaccgcgtctcgtgccagtcccctgcatgttccacagcacactcctgcgtctccttccacgacctctgcgcaatcgcacgttgtcctttggacaacattgaaacctccgattgctcttctggcacgtgtcctccctttactat

SEQ ID NO: 7772 - DNA, 590 bp, Glycine max
  Clone ID: jC-gmfl02220088h01a1
cttgcttctttcaacaacttatcattgtattgtcttcaaactttgcttcttccatactttcttctttttccttagccatcattgattgttgcctttcttggctttaaaatggagttcgaggaccgcttcagacaccaggctcagagaccaaaatatgactgccttctttttgatttagatgacactttgtatcccctcaaatctggtcttgcaaaatcatgtctccaaaatattaaagactacatggttgagaagcttggcatacaccctagcaaaattgatgacttgtccaacctcctttacaagaattatggaacaactatggctggtctaagggcaattggatatgactttgactatgatgaatatcacagttttgttcatggaagattaccttatgagaacctaaaaccagaccaagttctgaggaacctgttgctgagcctaccctatagaaaacttatcttcacaaacgcagacaaagttcacgctgcgaaggcgcttaacaggcttggattagaagactgctttgaaggaatcatatgctttgagacccttaatcccatcacaagagcattgttttgatgatg

SEQ ID NO: 7773 - DNA, 141 bp, Glycine max
  Clone ID: jC-gmfl02220088h05a1
cttgtaatagttaataactgtttagatattgaatgatatataattataatgaaatattacttataaatgatatttaatttatatgttatataaaataatatcttcataaaatagatgtagtagcaatacaagatctatgat

SEQ ID NO: 7774 - DNA, 440 bp, Glycine max
  Clone ID: jC-gmfl02220088h08a1
aacgcctccattatcagtcctttatcaggcgtgggtattacctaaccctgcgattggccgatccttccagttggggtattacgctttcagcgaatagcggtgaatatagaaaccctattccccctatgcaccaagggaattgattatagaaataagaaaaaggcatcaatgaaagaggttgaaaaagaagtatgttaaataggtcattctgttgtttctcgtgtatctggactcatgagctgagctgcattcagggaaaagcatgtacagtatgaactctaaatgcagtactggggattgccagatattctggatgttaaggtctacaccattgacaccacagtttctttgaaactgctcaaggtctaggcttctatttagactgatgcacctgctctttgatatttaagagtgctaatggattttgggctagttgattt

SEQ ID NO: 7775 - DNA, 169 bp, Glycine max
  Clone ID: jC-gmfl02220089a01d1
ctgtaaaacaccaatcgatatcgactccttctctgattgtcttaaaaccatactacacacatataggtaggacctatgaattaaaatttagttgcattgactctccactctggaacatcacacatgattgtacacccttaaacgtatgtcggtaataacatactgagcc

SEQ ID NO: 7776 - DNA, 409 bp, Glycine max
  Clone ID: jC-gmfl02220089a02d1
aaaccctcaaaacgaacaacttttaatcaaaaataataatacatgtacagggcaaacatttttggtctcaaaagttataaataaaagtaataattttctatttccacaatttattgatatcaatatgctaaaacattgactttgtagaaaacaagaatttacacgttgacccaagttttttgtttacacctgcgttttgcatgcggaggtctgtgggtcccacatggccggcaagaggtacttccttccgttcccggcgcctgacaaattgtagctcgcccccgtcgttttgtccaccaaaacccgacccggataacctggatatgccccgttcccgaaaatccccgtgcaggccgaaacagccttcaacggcgccgtgggaggaccctgttagaacccctcgttgaac

SEQ ID NO: 7777 - DNA, 472 bp, Glycine max
  Clone ID: jC-gmfl02220089a03d1
aaccaacaaagtaaactcatttggaaatgaacattgttcaagaacaattagatcaaagctcaatgcaacaccaaggatgccacaaaaccctcttattttgaaacctatcctatattaagcctctacaggagcaagagctcgcagctctgatgggagcttaatccactgttggctgaaacccaaccataataataatataaagcacaaacttcaaaggaacgaatgatttttgctcaagcatcatcaagagcaaggacaccagggagttgctttccctcaagaagctctaagctggcaccaccaccagtggagatgtggctcatcttgtctgcaagtccaaccttttccacagcggcaacggagtcacctcctccaatgatggttgtcactcccttcccactcagctctgccagtttcttggctatagcctctgttcctgtggcaaacttatcaaactcaaaaacacccattg

SEQ ID NO: 7778 - DNA, 512 bp, Glycine max
  Clone ID: jC-gmfl02220089a04a1
gcacatgctggtctccggtccggttagggcatttctgggaccttaaatcaccaatttctcacccaatcaattccaattaagctgagagtgtttctgatctatatgtgatgggtgctccgaagcagaaatggactgcagaagaggaacaagcacttaaagccggagttgtcaagcatggtgttggtaaatggcgcaccatactgaaggatccagagtttagtagtgtcttgtacctgcggtcaaatgtggatctcaaggataaatggagaaatctgagtgtgatggcaaatggatggagctctagggaaaaatctaggttatcagtcagaagggtgcatcaggtcccgagacaggatgagaactctatggctatcactgctgttgctccaagtgatgaagaaattgttgatgttaagcctcttcaagtttctagagatatggtgcatattcctggtccaaagaggtctaatttaagtttggataaacttataatggaagcgatcacttgcttg

SEQ ID NO: 7779 - DNA, 539 bp, Glycine max
  Clone ID: jC-gmfl02220089a04d1
gaacgaattcccattcatctaaacatctactttctataaacaacaagtacatggacagagcgctaaggtaacaacagctataaagaaattacaataaagattcaaacaatggttctatctacaagaaggatatttcaatatccaaaaatatatcctaataaaggtgaaacttgcatagtcacaagagcctccaatattgcaaactatagactataccagcaaatgatatttagctggctggctgtcctactcaattccaccgttcatctctcctcgagtctaattcttcaaacttccatcaagcatggatcctctttggggattttctccctttcgctgattttgttgtagcatctgcaaaagcttgtgcagcctccgcatcagcttctgctgcctctgcttcctttgctgcctcctctgcttctgcaatggcggcttctgcttcagcaactgctcgagcagcaaatgcagctgcctcttgtggagtcatagaccttatcttttctaactctaaatctatctgagatctagtaaggatg

SEQ ID NO: 7780 - DNA, 473 bp, Glycine max
  Clone ID: jC-gmfl02220089a05a1
ggtttctgaggaaaccaccactggtgttaagaggctatatcagatgcaggcgaatgggactctactcttccctgctattaatgtcaatgactctgttaccaagagcaagtttgacaacttgtacgggtgccgtcactctctccctgatggtctgatgagggctactgatgtgatgattgctggaaaggtggctgttgtggctggatatggtgatgttggcaagggttgtgctgctgcattgaagcaggctggtgctcgtgtcatcgtgactgagattgaccccatttgtgcccttcaggctctcatggaaggccttcaggttctgaccttggaggatgtagtttctgaagctgatatctttgtcaccaccacgggttacaagggcatcatcatgatttgaccacatgaagaagatgaataaccatggccttgtttgaacattggtcacttagacaatgagatcgacatgctgg

SEQ ID NO: 7781 - DNA, 423 bp, Glycine max
  Clone ID: jC-gmfl02220089a05d1
ggacagaaacacataatttagtatttaataaagcaaaagcaaaatgcacacacattccccaaacaaaacatgcttattcaacccaaattggtttcatatcacagaaaccaacaggatgtcttcctccttacccgtcccacccactcgaacagaaattctacggaaattaaaaataaaaaaagctaaacttcttttacctcaaatctgaaaagtctaacaacaaaaattcaaaaataggaaaattaaacaatcaatccgcttcattaaacccaaggagtctttccctcatttttcgttgataatcccaatttcttaggacctgtaatgagcaagcttgtatggacccttaacaggcacactgatgtaatcagcctgggccggtcttagcttggtgagcttaacttcaagtttgccaaggtgaaa

SEQ ID NO: 7782 - DNA, 480 bp, Glycine max
  unsure (1)..(480): unsure at all n locations
  Clone ID: jC-gmfl02220089a06a1
ggtttctgaggaaaccaccactggtgttaagaggctatatcagatgcaggcgaatgggactctactcttccctgctattaatgtcaatgactctgttaccaagagcaagtttgacaacttgtacgggtgccgtcactctctccctgatggtctgatgagggctactgatgtgatgattgctggaaaggtggctgttgtggctggatatggtgatgttggcaagggttgtgctgctgcattgaagcaggctggtgctcgtgtcatcgtgactgagattgaccccatttgtgcccttcaggctctcatggaaggccttcaggttctgaccttggaggatgttgtttctgaggctgatatctttgtcaccaccacgggtaacaaggacatcatcatgattgaccacatgaagaaaatgaagaacaatgccatntgttgcaacattggtcactttgcaatgagatcgacatgctggggctggag

SEQ ID NO: 7783 - DNA, 467 bp, Glycine max
  Clone ID: jC-gmfl02220089a06d1
ggacagaaacacataatttagtatttaataaagcaaaagcaaaatgcacacacattccccaaacaaaacatgcttattcaacccaaattggtttcatatcacagaaaccaacaggatgtcttcctccttacccgtcccacccactcgaacagaaattctacggaaattaaaaataaaaaaagctaaacttcttctacctcaaatctgaaacgtctaactaccaaaattcaaaaaaaggaaaattaaacaatcaatccgattcataaaaccgattttggctttccctcactttccgttgataatctcaattacttagtacctgtaatgagcaggcttgtatggaccctcaacaggcacactgatgtaatcagcctgggccgggctaagcttggtgagcttagctccaagtttgccaaggtgaagtgcagccaccttctcatcaaggtgcttgggcaaaacgtaaactt

SEQ ID NO: 7784 - DNA, 341 bp, Glycine max
  Clone ID: jC-gmfl02220089a07a1
gaggccctagatattattgaagctgccggaggctcctttcacttagtcaactgccatgtgggtcaaaacattcaaggcgcatcattctctgaacttgacactggcgcagatcacagggctgaggtggatcgaatcattgatgctttaactgctattgctcatacaactgaacatgatggatgatcagatctagattctagtcaaatttcacttacacttggtaaagttgaagagaatggcatatagaatgaatctgaccccagaaagaaggctgcggatctaattcttggagctggtctggactgacaaccagctgctgagatgtgatctatcattcggaa

SEQ ID NO: 7785 - DNA, 370 bp, Glycine max
  Clone ID: jC-gmfl02220089a07d1
aaaataaaacattgttttgataaaaatttttgtccgaccaaattaacaaatatgcacagacaggccgaaaagaaaaaccgaaaaaaaagagggaaagggggctgatggcatgaaaccgggtagagctaaaacctaccatttacggggaaacaccaggggccttatataccacttaaaaaaaagggggacttttacagaaacaactaaggatgacacaacatttacacaattcaagaaaacataaagctggccaaacggtataggcagctgcaaaggcttggcttaggtgagatgcccacaggaacaaccttacacttggacatgaatgcaagactacttcctgggcagaattaattaacaatagaatgga

SEQ ID NO: 7786 - DNA, 491 bp, Glycine max
  Clone ID: jC-gmfl02220089a08a1
tcttaagccattggattcttctagaaagaggaaaagtaggagcagagggtatgggactagatccgtggctgagactattgcaaagtggaaggaatacaacgaacacctttattctggcaaagatgatagtagaacaactccaaaggcaccggctaaaggttcgaagaaagggtgcatgaaagggaagggaggacctcaaaactctcagtgtaactacagaggagttaggcagaggacatgggggaaatgggttggtgagattagggagcccaatagaggaagcaggctttggttgggtaccttctcttctgcccaggaagctgctcttgcctatgatgaagctgctagagctatgtatggtccttgtgcacgcctcaattttcccggcatcacagattatgcttcttttaaggaaatcgtgaaggaatctcccatggccgcatcgtcctcttgttcttcggcagaaactggcacatctgacactactacta

SEQ ID NO: 7787 - DNA, 527 bp, Glycine max
  Clone ID: jC-gmfl02220089a08d1
agaatagttattatatatatatacattccactacttgttcagtttttatacacaaaaagtgagcaacgatataatatactcgagatataatagttctccatggtacataacaaagaaattttgtatccaaatcagtgctcaactatagtcagccaaacgacttcaaacagtctactcctcagctccacctatgtagttaaaggcagtccaatttgaatcccaaaaaacatgtaagtaaaaagaattaacaaatattgtcacagctaaattctccattttaaaaaatcttacagagaattagcatattaaaagaacataaacaaatcaaatttcttgtattagttgtatagttgtattcctcttatgcacctgtatatagctaaaaaggggacaacaacctaagagacagattactagcagatgctcgaaccagttgaaaatgaggcagatgatagacttatgcacgtcgccttctctagtcatccttccttgcttgcatgccctttgaatcagggttcagatcatca

SEQ ID NO: 7788 - DNA, 363 bp, Glycine max
  Clone ID: jC-gmfl02220089a09a1
ggctgggagactgataatgttgaagaaatagctttaaagatttctcaattgccaaaagcatcagaaaaacataaaaggattactgttatcacccaaggtgcagatcctgtttgtgtcgctgaggatggaaaagtaaaatagtatcacaggatacaatttttttttgatttgtggaattactcttgttcctacctggttcagcacagcctgctcaatctcctcctcttgttttttctctttttgtttttttataataaaaagattcagtttttttgtgttgtcgctgatacctatttgcatcttgtgttctgggtcaatgctgtcatgttctctgcaaattatggcttcaatccgtgctctggg

SEQ ID NO: 7789 - DNA, 559 bp, Glycine max
  Clone ID: jC-gmfl02220089a09d1
aacggaagatctcaaaccgctcttgtagcttgagaccaatttctaacatcaataattccactcataacaagggaaacatagaggcagtgttgggtctcaatgcgaaaaaacaataacaattgtatcataaactacaactctactttcatctattttgatttatagaaaagaaaacaagttttttctagtaaaaaggagaggacccctggttgagttctcaggagcatgttttaggaacatgatacaacatccgagaaatctttcttcagaaggcatatctatgagggggcagaaaatagtccaccttggtccataatttggtaacaggaagtgaagttgattatgacatcatggctcatggcaattcaataatatacatgaacatgattccataatgctcgagatcgatagttcttggataaacaggtgcattagaatttagaaaatgtctgtgacaaattgaaactggatatacttgttacttcctgatggagaggagctcaaaactccgcagaggatcatcgcggttgcctcttgtggatccagagcgcatgtaaat

SEQ ID NO: 7790 - DNA, 219 bp, Glycine max
  Clone ID: jC-gmfl02220089a10a1
ctctaatatacctgaacggtgaagtgaattgcttgaaagacaaaaatgtagccgaaggaaatttttgaacatactgggataggtgtcatagctcaagctctacttgttgggcacagggacgaaaacaaatggagagcccactctctttgattacgtttttttcatgatttcttaatataaatcggactcatgaaaaactagcacatatatatatatata

SEQ ID NO: 7791 - DNA, 471 bp, Glycine max
  Clone ID: jC-gmfl02220089a10d1
gcccttagtacttaaacttctgatttgatagatcgttaagcacggtcgagggcacttccacatatatcatgctacagtttatgactctcgcaaaggcttagtctgacgacggctcggactgagcgcgatacaaccttggcgcttctgacgtaccctgcactagtgaagctgtgcgccgaattccacatgtactccggcgtgatcaatgccttgtgattgtgctgcactttcttgccgaatgtgtccaacacccgactaggtctcgagtctgcgtgcatacctatcttagctgagcaggtttgggagcaccaaggtccacacagcgggctaacgaactcgtatagcaccgcatatgactgccagtacgattgaaaggaattgcctacggcataggacatgacgcgcaagacatcatagcatgaccaggtctggtccattagctcttgaacaatgctttcgacacatgccctc

SEQ ID NO: 7792 - DNA, 166 bp, Glycine max
  Clone ID: jC-gmfl02220089a11a1
tacttcttcatcatcattgtcaccaccactcacatagtggaacagtagtatctaactgacatgtatctgacaaggtaactgatccactgacattggaattcccggatgaaaataggaataggagcattaaagtgatggtgctggctacggtggtattgcaaaacat

SEQ ID NO: 7793 - DNA, 499 bp, Glycine max
  Clone ID: jC-gmfl02220089a11d1
agtcaaagaagcaatagattttattctaatcaagggggcataggggtacaccattttaagggggggcacaatagaatacatatattccaaggcacacagatacagaagaaactggctaagtacatataatatagagcttaagggaaatgaactagtattatacatacgacaccacctttagatgttgggagttcttcattctggtttagatgcttattctcgtaacataaagaaaggggcctttattatatgccttggcatgtaaactgtgaagatccattgacagaagagagggagcatgccggtgaacacattggattcatctaatatggaaggagttgtagccagaattctttgcaatgttcatctgaattcttgcccagacatcagcatttctgcaacggctatctgtaaggtgctgccctttgcttccactgcatacttcattgcaagtttcagcattgctattccggcgccgctcgttatgtctggccaagcg

SEQ ID NO: 7794 - DNA, 429 bp, Glycine max
  unsure (1)..(429): unsure at all n locations
  Clone ID: jC-gmfl02220089a12a1
cagccttgaagctcattggaggtactctggctgaccacacattcttgtttcttggtgctggagaggcaggaactggaatagcagaactaatagctcttgagatgtcaaagcagacaaagacacctatagaggagactcgcaagaagatatggcttgtagactcaaagggtttgattgttggttcaagaaaggcttcacttcaacacttcaagcagccttgggctcatgagcatgagcctgtaggcagtctcttagaagctgttaaggtaatcaagcctacagttntgattgggtcatcaggagtgggaaaaacatttacaaaggaagtaattgaggctgtgacttctataaatgaaaaacctcttgttctggctctctccaatccaacttcacagtctgagtgtacagctgaagaggcttatcaatgga

SEQ ID NO: 7795 - DNA, 443 bp, Glycine max
  Clone ID: jC-gmfl02220089a12d1
ttttttttttttttttttttttttttttttttttttttttttttctttttttttttttgtttttgggggaagaaaaccaaaatttcataatacaaagcattatatggtttattacgaccaaagctaaccgggttttgccccataacaaaaaggttactttacccgcaattttggggatttcactgaaaattgcctaaaacccctcactttggcctaagtttcctaaaacaacttacacgtgcccccaaaacatgggtttattcccgcccaaggcaagggacttgccccataattcacctatagtttctgggcacgggggaatccctgcagctctaaacctacttgacaagattctggggccctgggaacccaatggcccagcctacgctctatgccttggcagctacacttgcggggatgtcagctgcaaattgcttggggtt

SEQ ID NO: 7796 - DNA, 517 bp, Glycine max
  Clone ID: jC-gmfl02220089b01d1
gacccaaaataataagatattttcattatttagcaaactcctacatgcaagacgataagaattacagtgtttccaacagatactattttcttttacataaaaagcatctaaacactgatatacatatattaaaataaaataaaaacatctaagctttctttggagacttggtagccttggatggagattttggttccttagcaacctgagtcttcttaggtagcaaaacagggttaatgtttggaagaacaccaccatgagcaatggtgacaccagcaagcaatttccccaactcctcatcgttccttacagccaacagcacatgtctcggaataatcctgttcttcttgttgtcacgtgcagcattcccagccaactcaagcacctcagcagctaggtactcgagaactgcggccaagtaaacgggagcaccggtaccgacacgctgggcgtaccttcctttcttcaaataacggccaattcttccgacggggaattggagaccggccttgacgga

SEQ ID NO: 7797 - DNA, 574 bp, Glycine max
  Clone ID: jC-gmfl02220089b02d1
ggggggaaatgatttgtagtttaaacagaaatatttgtagaagtgaaatgtggcaagggcaaaataagcaaaataaaaacaccacgagcatggaatttttaatcgaagcattttcaggcaataagttcatttgggaacaaagaagacataagtgaagcaacaaaatcagactcactagtaagccagcggaaggagttttcaaaagattccttttcctttggccactgaccgagtcattttttgtatccaaatagaaacaaaaaaaaattgccatccatatgaaatgagctaggcaatagatggcatattttgagcttcatttgagctctttttggacttgtgctttgatttcttctcccgcttcttgccctcgtcatgagagtgatgaccccaacaagacttcagttttcggttgatatgcttcaattccttctcagaaggacttttgtattttctaacccaagaatcaattgcatccagtgattcagaaagctcggacattgtatgcatggaattctcacgggaaaaaatacccctaagataactatcaaagtcaatgactctgtggaatgca

SEQ ID NO: 7798 - DNA, 525 bp, Glycine max
  Clone ID: jC-gmfl02220089b03d1
gaacgaattcccattcatctaaacatctactttctataaacaacaagtacatggacagagcgctaaggtaacaacagctataaagaaattacaataaagattcaaacaatggttctatctacaagaaggatatttcaatatccaaaaatatatcctaataaaggtgaaacttgcatagtcacaagagcctccaatattgcaaactatagactataccagcaaatgatatttagctggctggctgtcctactcaattccaccgttcatctctcctcgagtctaattcttcaaacttccatcaagcatggatcctctttggggattttctccctttcgctgattttgttgtagcatctgcaaaagcttgtgcagcctccgcatcagcttctgctgcctctgcttcctttgctgcctcctctgcttctgcaatggcggcttctgcttcagcaactgctcgagcagcaaatgcagctgcctcttgtggagtcatagaccttatcttttctaactctaaatctatctgag

SEQ ID NO: 7799 - DNA, 505 bp, Glycine max
  Clone ID: jC-gmfl02220089b04a1
caaccactcttaatttctctctgccttgctcatttacacacctctccaacctttcactttcagctttatttgaatccctctctctcctttccaaatggccagcgttgaggttgcacatcaaacaccaacaacagttccagaaaatgaaacaaccgaggtaatcaagacccaggaaacaaccccggaaccagtaccagccactgaggctcctgcaacagaacaagcagcagctgaggttcctgctcaagaagaacaacaagcaactgaggttcctgccccagaatcaaccaccgaagcaccaaaggaagaaaccaccgaagcaccaacaacagaaacagtagaaacaacaactacagaagaagccaagccagaggagcctaaagaagttgcagttgagaccgaggaggtggtgacaaaggagacagaggaagagaagccagcagcagaagagaaatcagaggagaaaactgaagagtgaaagaagaagcagagagcctaaagaaac

SEQ ID NO: 7800 - DNA, 336 bp, Glycine max
  Clone ID: jC-gmfl02220089b04d1
aaagcgtctataaaagaaaatttttttttttaaaccctaagaaaccccattaccccttttttaaaaattctttgacccttcccaaaaaaaaaacccttattcctaaaattttagaccagcaagaggttggttaatttaaaacccaaatcccaaaaatttttatggtccccccggggaaacccccttttttggggcccaaggttgggcccaacccgggggtttcccctcattattccacccaaggccttaccctttttttaaaaaaattttttaataaataagggtacctaagaaaattatttaaaaaaaagctttttaaactggcattccaaaagg

SEQ ID NO: 7801 - DNA, 391 bp, Glycine max
  Clone ID: jC-gmfl02220089b05a1
ctcagattgaatgagacaaggagcttaactaacagagcaagccaaagaggaggtggtgaatcaagaggagctttgaacttgctaggcaggggactgagttctgggttgtcacctaggttcctctctggattatttacgaaagaaaagccagagaagactaggcagcataaagacgaaaacattatcttaatgggttccttaccaagcactatatgatcacaacctgtacgtaagtgttatctgtctatatcttacgctgatcagctataccatacattttattacatcttaggatgtttcttcaataatcactaatgtccatgtattcaatttttggatttgtcattctttgtaaaaataaattatgtatagtgtgaaatcatgtttcttc

SEQ ID NO: 7802 - DNA, 391 bp, Glycine max
  Clone ID: jC-gmfl02220089b05d1
gaagaaacatgatttcacactatacataatttatttttacaaagaatgacaaatccaaaaattgaatacatggacattagtgattattgaagaaacatcctaagatgtaataaaatgtatggtatagctgatcagcgtaagatatagacagataacacttacgtacaggttgtgatcatatagtgcttggtaaggaacccattaagataatgttttcgtctttatgctgcctagtcttctctggcttttctttcgtaaataatccagagaggaacctaggtgacaacccagaactcagtcccctgcctagcaagttcaaagctcctcttgattcaccacctcctctttggcttgctctgttagttaagctccttgtctcattcaatctgag

SEQ ID NO: 7803 - DNA, 530 bp, Glycine max
  Clone ID: jC-gmfl02220089b06a1
cgtaggttttggtaatcattacccaaaacacgtccaccatagaggagcatctgtaccgaagaacaagatcaagtatagctgtaaaggtggatggaaatggagggacacttctaagccaaacccaaatacaattgttggtgccatggttgccggtcctgacaagcatgatggcttccatgatgttcgtacaaactacaattacacagagccaacacttgctggaaatgccggtttagttgctgcactagtggcattgtcaggcgacaaaggcacatctattgacaaaaataccattttctctgctgttcccccaatgtttcctacaccgccaccaccttcagcgccatggaaaccataagctcatcgtgccattggttatttctttctagcaagtaccccagatgatatgagtgcaccgttaaccttcgttgtttgtatcaacttgaagatagggtaattttgagaaaaaaaagctggagaagtggagcttggcactgaatatagctggctggggcaatgatcgactcaga

SEQ ID NO: 7804 - DNA, 397 bp, Glycine max
  Clone ID: jC-gmfl02220089b06d1
gaaactggcaaacaattacaagctggtcagtttttcatgtttaaagaatacaagatttgatttagatccctgtttactatttgagtttcacaaaaatttaaagggacccactttcaagtcccactttatcaattcttaatgctaatcttgggtccttcattggccccaggcagatattttcagtggccaatgttactttttccaagctttttttttttcaaaattaccctggtcttcaagttgtttcaaaaccacgaaggttaacggggcactcatatcatcggggggacttgcttgaaagaaataacccatggcaccatgagcttatggtttccatggccctggagggggtggcggtgtaagaaacattgggggaacagcataaaaaatgggtttt

SEQ ID NO: 7805 - DNA, 461 bp, Glycine max
  Clone ID: jC-gmfl02220089b07a1
gcagaaagcaagctcatcctagagttttaaaaatggcagcagcctcctccatggctctctcttccccatccttggctggcaaggccgtgaagctgggcccatcagcccccgaagtcgggagggtcagcatgaggaagaccgtcaccaagcaggcctcctccggaagcccatggtacggcccagaccgcgtcaagtacttgggcccattctctggcgagcccccgtcctacctcactggcgagttcccaggtgactacggctgggacactgctgggctttcggccgacccagaaaccttcgccagaaaccgtgagctcgaagtgatccactccaggtgggccatgctcggggccttgggctgcgtcttccccgaactgttgtcccgcaacggggtcatgtttggagaagctgtgtggttcaaggcccggtcccagatcttcagcgagggtgggctggactac

SEQ ID NO: 7806 - DNA, 509 bp, Glycine max
  Clone ID: jC-gmfl02220089b07d1
gtaaaaagcaagtaacattaagttggattgggatacacaagataattcacattatctgaagtacattgcaataacatatacttcaccaaacacaaatctaaaaactctcaaaagtccacaagtcatccttttctttcatgctcacttgccggggacgaagttggtggcgtaggcccaggcattgttgttgactgggtccgcaaggtgatcagcaaggttctccaatggacccttaccggtgacaatggcctgaacaaagaacccaaacatagagaacatggccaatctcccgttcttgagttccttcaccttaagctcagcaaaagcctctgggtcatcagcaaggcccaatgggtcaaagctgtcaccagggtagattgggtcagtgacctcaccgaggggcccaccagcaatacgataaccctcaacagcacccattaggataacttgggtggcccagatggcgaggatgctctgggcgtggacaatgcttgggttgccccagtagt

SEQ ID NO: 7807 - DNA, 483 bp, Glycine max
  Clone ID: jC-gmfl02220089b08a1
ggctaaccaaccctgacactccttcttctccgcttcctcttcgatcatcgcttcagaatgccgccgaagttcgacccctcccagatcgtcgacgtcttcgtacgcgtcaccggcggtgaggtcggcgcggcgagttccctcgccccgaagatcggtcccctcggtctctcccccaagaagatcggagaagatatcgccaaggaaaccgccaaggactggaagggcctccgcgtcaccgtcaagctcaccgtgcagaaccgtcaggccaaggtcacggtggtcccatccgccgccgcgctcgtcatcaaggccctcaaggagcccgagcgtgaccgcaagaaaacgaagaacatcaagcacaacggctacatctcgctagacgacgtcatcgagatcgctagggttatgaggccgaggtcaatggcgaaggacctcagcggcagcattaaggagattctcgggacgtgcgtctccgtcggatgc

SEQ ID NO: 7808 - DNA, 436 bp, Glycine max
  Clone ID: jC-gmfl02220089b08d1
ggggccaaaaaaaaaactaatcagcccataaaaaaaatatcttttgaaacccttatttaaattatccaaagggggaaaaaaaccttaaacaaaacgttcgatagttcccccaaatttattttaaaaagaacccgaaacgatctgaaaaaagaccaaagaaaaagagagaaagagagtaacaaagccttcctccttaatcgagaggggccttaacattcccatggggaatctcctggtgaaagtccttgggaacctttccattaacggggcatccgacggaaacccccgtcccgagaatttccttaaggctgcccctgagggccttcgccattgacctcgggcttaaaaccctagggatctcgatgacgtcgtctagcgaaaagttgcccgtgggcttgaaggtcttcggtttcttgggggcaccctcgggctcctt

SEQ ID NO: 7809 - DNA, 381 bp, Glycine max
  Clone ID: jC-gmfl02220089b09a1
ctcttgaccttgtgatatctctctcttttaatttctaggatcaaaccaaaaaatggtcttagaagagagtgtagtgcatgatgtgaggctatcctcagttgggccgggccgggccaccgggtcggacgtattccacaacccgggtggcttggacttggccatgaagcttcactaccttagagtggtgtacttctttgatagtgaggctgcacaagacctaaccatcatgaaaattaaggatggcatgttcactttgttcaaccattacttcatcacctgtggccggttccggcgatcggattccggtcgacccttaatcaagtgcaatgattgtggagcaaggttcattgaggccaagtgcaacaaaaccctagatgagtg

SEQ ID NO: 7810 - DNA, 447 bp, Glycine max
  Clone ID: jC-gmfl02220089b09d1
aaaacaataaattttgttttacaaactgaaagttttccttgctcacagatccctcaaataaaaaagaaatttattcattaacaaatttttaatgcgtgtttgggtattcgacgaaccaacattggggaaaaatgaagtttgcaaaagcatttccatcattccttttgggttaatatacggttgaccattgaatttaaaattgaaattcgggctaacaagatgaacggaaagtcaaacatgcttttaatctcattaaaacttaattattctcaagcaaaagaccaattatcttgagctcaaatttaagcttcaccatttcatcctccggaaaaatcatgggcagaaacttcccattaacaccattctccatagaacctttgggcaatggattccccaaaacaaccccttaatttccaacaccttgaagggtgtagtaaacaaactttg

SEQ ID NO: 7811 - DNA, 489 bp, Glycine max
  Clone ID: jC-gmfl02220089b10a1
ctcttgaccttgtgatatctctctcttttaatttctaggatcaaaccaaaaaatggtcttagaagagagtgtagtgcatgatgtgaggctatcctcagttgggccgggccgggccaccgggtcggacgtattccacaacccgggtggcttggacttggccatgaagcttcactaccttagagtggtgtacttctttgatagtgaggctgcacaagacctaaccatcatgaaaattaaggatggcatgttcactttgttcaaccattacttcatcacctgtggccggttccggcgatcggattccggtcgacccttaatcaagtgcaatgattgtggagcaaggttcattgaggccaagtgcaacaaaaccctagatgagtggctagccatgaaggattggcccttgacaagttgctcgtctttcaccaaggcattggcccagaactatctttttctcttcctgtttgttccaggtgactaaatttaagt

SEQ ID NO: 7812 - DNA, 453 bp, Glycine max
  Clone ID: jC-gmfl02220089b10d1
aaaacaataaattatgtattacaaactgaaagttttccttgctcacaaatccctcaaataaaaaagaaatttattcattaacaaatttttaatgcgtgtttgggtattcaacgaaccaacattggggaaaaatgaagtttgcaaaagcatctccataattccttttgggtaaatatacgggggaccattgaatttaaaattgaaattcgggctaacaagatgaacggaaagccaaacatgcttttaatcccattaaaacttaattattctcaagcaaaagaccaattatcttgagctcaaatttaagcttcaccatttcatcctccggaaaaatcatggccaaaaacttcccatcaacaccattttccatagaacctttgggcaatggattcaccaaaacaacccctttatttccaacaccttgaagggtgttgcaaacaaactttggggggg

SEQ ID NO: 7813 - DNA, 391 bp, Glycine max
  Clone ID: jC-gmfl02220089b11a1
actttcaactttgcagagagctttatgagcttgtagtagcagagtggggaggtaccaaacagagcaattgaagttgaacattattaggtgttctagatcctagggtggcatctggaatcacactcttcaatcaacaatgaaattctgggacctattcttcgtggctctcatgccagtcttggagaccctcttgattactctccttggtttattaattgcaacccaacgatttaatctcctgcgaagcgttgaagcaaggaattatttaaataatcttgtgttttacatcttcactccggcgctccttgttgctgatttggccgagacaatcacgttcaatcgattggttgaaatgtggtttttgttggtgaatataattttaacgttaggt

SEQ ID NO: 7814 - DNA, 631 bp, Glycine max
  Clone ID: jC-gmfl02220089b11d1
tgcttccgacgctcagatcacgaacggcatgatttgccgtgtcgtgcagcctaccggtcggtgggcgccctgctcgtgggtgtctgaaatatcacgacaagacactcttaccgcgttctacacatcgtgatgcgtcacttacaaatcagtttatgactattccaacacaaatcgaccctacacccactctgtcagtgacaggccgagcaggcagatgcaaccctcgactaaattacagggatgcgtgacaccgtccacgtaaggaacgggcacccggaagcgaggccacttgtggcagcgtagaatgctcatttcttgataagagagcattcactctgagcattgctgagcgtggacccttgtcgcagggggaagctgatactgtatcttcagaacggagagctgtagcggatgcgatccaatgaatccccaatagcatgctgctgaagctggcacaatgcccactgtaggtggaagtatgaaccgcgctgccatagtccctattgtcaagacaatgcgtactgctgacttgatcaagccattgagaagattggctgcaactaccaaagtcataggcacaatggtggcctcgcccactagagaagcagagctgacattacacgaaagggag

SEQ ID NO: 7815 - DNA, 463 bp, Glycine max
  Clone ID: jC-gmfl02220089b12a1
actttcaactttgcagagagctttatgagcttgtagtagcagagtggggaggtaccaaacagagcaattgaagttgaacattattaggtgttctagatcctagggtggcatctggaatcacactcttcaatcaacaatgaaattctgggacctattcttcgtggctctcatgccagtcttggagaccctcttgattactctccttggtttattaattgcaacccaacgatttaatctcctgcgaagcgttgaagcaaggaattatttaaataatcttgtgttttacatcttcactccggcgctccttgttgctgatttggccgagaacaatcacgttcaatcgattgggtgaaatgtgggttttggttggtgaatatattttaacgttagtggttggctccattctcggttggatgcttaataaaatcgccaaaacccccaaacacctccggggtcttgtaat

SEQ ID NO: 7816 - DNA, 558 bp, Glycine max
  Clone ID: jC-gmfl02220089b12d1
tcctttttttttttttttgaaaaataatgacaagacactcttacaaatgttctccaaattggtatggggcaattacaaatcattttttttatatttcaaaacaatttgatcttacatacatactggatatgatccccgtttggcaaaagaaacccatgattaattttagtctatacctgcaacatgcacatgaagaaggtgcaccaaagagcgagactaaatgtcgcaatgaaatatgtccatatcatgataagagaacattcactctcaccattcccgagcatgtacaattgctgcaggtggaagcgcatattgaagcataagaacatattgatataacgaatacgatccattgaatcccctataatatgctgctttaacaatcaaaatacccaagataggtgaaattatgaaccgcactaccataatccctataatcaagaaaatgcttattgctgacttctttaaaccattacgaagatttgctacaactaccagagtcatagacacaattgtggcctcccccactaaagaagcagaactgatgataacacgaaa

SEQ ID NO: 7817 - DNA, 379 bp, Glycine max
  Clone ID: jC-gmfl02220089c01d1
ttcgtttttttttttttccaataaaccatactttttgcattaaccatcaaagtatcattacatcatcttaattttataaaattattgttgaacctatcattgataggcatgtattatttagtatataatgagttgcgtacaaagcctagatctcaggaataaaatgaacctgcattgtatttttcaagatggaactgtactaagatgattggagtatattcacatcacctccgtatggtaccttccattcaaaattcaaaaccaaattagctccacagtactccaaattaagctaagccaacttatagccagggcaaatccttcttccaataccatagggcataatcttaatcactttactttcaggtatattaaaccc

SEQ ID NO: 7818 - DNA, 550 bp, Glycine max
  Clone ID: jC-gmfl02220089c02d1
gattggaaggccttaaacatacctccaccactcactgactcattcttaattcctagagttgcccatatagaactctttgcagcctcacttggatcatcaattctcaacgttttgggaaccaaaacacccccgtttcttggctttgaagcttcttctttaggcaaagagtattgcttaatcatgtcaccgtcgcgcgagtgcttccccaaagttggagaatttggactggagcttcgagactcgaggtttgaagcagatgaatgtgaggaaaacaatggaacattccaattccctggcatgccacagttccaaaatgtagcaggatagaatggtaggggaaatcctgaaggacacatagcaggtggaggaactggagaattccatgtatagggccaagaaacaccaggaatacatggaagttgaggaaggaaaccatgattttggggcactgattgttgttggaaggtgtttttggtattttctcccttggaacttgaaactgtgatggaggatgtagttgaagagtcattaccattttccccacttttgc

SEQ ID NO: 7819 - DNA, 500 bp, Glycine max
  unsure (1)..(500): unsure at all n locations
  Clone ID: jC-gmfl02220089c03a1
tccaactttgattctaatgctacgttctgaagatgctggtgttcattatgaagcggtcggtgtgattggtaatttagtccactcttcccctaatataaagaaagaagttcttctcgctggagctttacaaccggttattggattacttagttcctgctgctctgaaagccagagagaagcagcattgttacttggacaatttgcagcaactgattcagactgcaaggttcacattgtacagagaggtgctgtccaacctttgatagagatgcttcagtctcctgatgtacagctcagggaaatgtctgcttttgcattggggagattggcccaggacccacataaccaggctggtattgcacacaatggtggcttagtgccgctgctcaagcttcttgactcanaaaatggctctttgcaacataatgctgcttttgctctatatggcctngcagataatgaggataatgcgtctgatttcataagggtaggtggagttc

SEQ ID NO: 7820 - DNA, 503 bp, Glycine max
  Clone ID: jC-gmfl02220089c03d1
aatggtctggcagaagtaaacccagcggcacaacttccttgcagaaaactttttgttcatatatacataagggaaacaatatttacacctataatcataaagtcaacaatggtaattccctgaacgtaggcatctgagagaagaactgttaaatcatatagcagtcacattgcatgagaaaaaaacaatgttcgtgaaggtcatatttgctatatctatgataatgacgttacagacagaaaggggcttacacctcatttaaaaagaagaagaagcatgactccggcgttagatatttcttttagccaaactgtataccatacaggagattgctactagagtcggtcgttttgagagttggcctttgtaagagctttaacgaagtaattacggatctctggtgttatgcgctgaatcagaagagagtgccctggccttgaactcaatttatcaaattgctccaagataaaaaggatgcatgcatgcctcaatgatattgcgtt

SEQ ID NO: 7821 - DNA, 469 bp, Glycine max
  unsure (1)..(469): unsure at all n locations
  Clone ID: jC-gmfl02220089c04a1
gagaatggctcccaagggtttaacctttctggctgtgttaatatgcgtttcagcactgtcactgagtccttctgttgcgggggaagggcaaaataatggccttgttatgaacttctacaaggaatcatgccctcaggctgaagacatcatcacagaacaagtcaagcttctctacaagcgccacaagaacactgctttctcctggctcaggaacatcttccatgactgtgctgttcagagttgtgatgcttcactgttgctggactccacaagaaggagcttgtctgagaaggaaacagatagaagctntgggttgagaaatttcaggtacattgagaccatcaaagaagctttggaaagagaatgccctggagttgtttcatgtgctgatatcctcgttctctctgccagagatggcaattgttcgctaggaggtccccatatccctcttaagactggaagaagggat

SEQ ID NO: 7822 - DNA, 489 bp, Glycine max
  Clone ID: jC-gmfl02220089c04d1
acatatataatatccttattgaaattaaaaaaaaaacaacagtaacatcggaagattaaaaaacatagcctcttaatcctcccatccccatgaacctgcagtggtctcggttcattgaaccagcccatttaaaggaaaagaccttaattattttttgcataatatattacagattttcttcctcgatcatagacaaggggaggaaaattcaagggtcctgatcatggtgcttgttggcaacattgcactgctttctgacctcaccctttgtgccagtgagagggttgttctctgagagcaaggtaatggctctagagaactccttgaagaaatagtcttggctcttggccattttcttcacataaggcttggtcctcttgtcattggctagttggtgatccactatcaagagacccttgctgtctaacatgtccctgaagaatatgttgtctagaatcatgggagtgccacggtccgttttcacgtact

SEQ ID NO: 7823 - DNA, 469 bp, Glycine max
  Clone ID: jC-gmfl02220089c05a1
gccattcttagtacagcggttatatttgggatgttgatagcactaccaattactctactctactacatattacttggtttgtaaaatatctatgcagtagtagccaacataccaggacagaatgaaatgaatgaatgaccctttgaaccttttttatactttgggagttagcatgcatgcctggtggtgaccacagtggattgattatgctgttattaacaacaggggatttggattttttctgagggggagaacaacaaaaactagtagtatccttaaaagagaggagagatccttgcttgcttgagagtttccaaaaattttggaatttcagaaaaaaaaattgacccaattggtccaaatccccacaattctaatccccctatcaaaagtccaaaatacacgcaattttcaagagcagagagagacgaacaagtacatgaaatgggagacatagcagaggaaaaac

SEQ ID NO: 7824 - DNA, 478 bp, Glycine max
  Clone ID: jC-gmfl02220089c05d1
aaaaaaaaaaaaaaaaacggtcttttgcttatattccaatttcatatttcccctaccaaattgctaagctgtctttgttacttgatgacccaaacatgacttttctaattaataaaaatttacaatgcaaatacggggggaaccatttctagatttcattgggagccttgcccctgtttttcctctgctatggctcccatttcatgtacttgttcgtctttctctgcttttgaaaattgcgtgtattttggacttttgatagggggattagaattggggggatttggaccaattgggtcaatttttttttctgaaattccaaaatttttggaaactctcaagcaagcaaggatctctcctctcttttaaggatactactaatttttggggctctcccccttagaaaaaatccaaatcccctgttgtgaataaccgcttaatcaatccacttggggcaccaccaggcatgcatgctaac

SEQ ID NO: 7825 - DNA, 471 bp, Glycine max
  Clone ID: jC-gmfl02220089c06a1
tttgacaacaaatgaataatttttatgaaaaatcaacaacagtttaagaaaaaagtagtacaatttttttaaatgtaaaattgtaggattcatgcacccacaaacaagaaacaagaacaaattgcttatatttctaaacgagttgaccacaatccggtcaacaaactggatgccccaaggccctacgttattattcttcttctctactattccatataaaaaaagatcaccacacaaagaactccacgttctgatggcatatatatatatagtctataggcccttcatagtggcccaacatcagtgatatggctctggctttggcagacccttcactacgccacaaagcaacgcgtactccgggatgttgtactcgtccctcagagaacgctcaggagttagaacactgatgtacaaattgtgtcccagtagcgattctcagcaagctcggacctcaagttcacacccaac

SEQ ID NO: 7826 - DNA, 523 bp, Glycine max
  Clone ID: jC-gmfl02220089c06d1
cacactgtaagtaaataaaatcgaaatttagacaagacatcatgggtggggtaacatcgttactaatgttgctatgtctcttcgcaggggctatgtcccctgtgaagggtgaagacccttacttttttttcacatggaatgtcacctatggcaccctttatccagccggtgtgccccaacaggttattctaatcaacaatgaattctctgtacccaccatctatgacgccatactcatgaatatctgctatattgaattgctgatccttgccaagcccttgcttttccattgggccgctgtccagcacaggatgaatagttggaaagatggtgtcgtcggcgccaattgccctatccaaccaggcacagactacacgtaccacttccaggtgaaggaccaaatcggtagcttcttctactaccctagcctagggttgcagcgtgctgccggaggcttcggcggcctccgcatcaacagccgcctcctcatcccagtcccttatgctgatcccgaggatgacta

SEQ ID NO: 7827 - DNA, 486 bp, Glycine max
  Clone ID: jC-gmfl02220089c07a1
ggagaagtgaatgctgagcttcttgacacccaagtgaatcctgctgtgtgggaaattagtggacacatggttttaaagaggaggaaggattatgatgaggcgtctgaaggcaatgcttggaggcttcttgctgaggtgtccctttctcaagagaggtttcaagaagtcaatgatcttgtttttgaagccattggctgtggtgaattggaggatgtcaatgttcaaagtgtcaaaaaagaagttgatgcagtcagcacaagcgaacaccctactgtggtggtggtggctggttcacaagaatgtgtggttctacagtaacaaggctcttgtattttgaacaaattcagaaaatctgcagtgttttaagaataattgctgaaatgtgtcaccgtttaagtcatactattgccttgtgcttgagccttatggtcgtgtgtgttgaatgtatatgcttttatctgcctttatgacactttcatgtgaaag

SEQ ID NO: 7828 - DNA, 414 bp, Glycine max
  Clone ID: jC-gmfl02220089c07d1
accaacaacacttctcagctgagcagttattatatctgactttcacatgaaagggttataaaggcagataaaagcttttacattcaacacacacgaccataagggtcaagcccaagggaatagtatgacttaaacggggacacatttcagcaattttttttaaaacactggaaattttctgaatttgttcaaaatacaagagccttgttactggaaaaccccacatttttgggaaccagccaccaccaccacagtagggggttcgtttgggctgactggattaacttcttttttgacactttgaacattgacattctccaatttaccacagccaatgggttcaaaaacaagatcattgactttttgaaaccttttttgagaaagggacacctcagcaagaagccttcaagcatt

SEQ ID NO: 7829 - DNA, 512 bp, Glycine max
  Clone ID: jC-gmfl02220089c08a1
ctgttacaagaatataaagggcacactaataaggttagtctgcagatgcctgaaactgattttagcacttcctactttttaatgttctgcatatagccttgtttaaagatacaggaccaggtgcaagttcccaaagaatttgggatacaagttgagattcactgtcacttatatatcttcatttctggactattatttagcggttcctgcaattgttcattcttaaagcattttcttgtgtgatttaacttttaagtaactttacatgttacaaactttttaaatattcgtcgtcttcttctttttttttttaatatttgaccatttctatccctcagtcttacaaattggattgctgccttaccaatacggatgctcatgtaactggtggctctgaggatggcttcatctatttttgggatcttgtagatgcatctgttgtttcaagattcagggcttatacctcaatggtaacaagtgttaggtatcatccaaaggaaaactgcatggta

SEQ ID NO: 7830 - DNA, 458 bp, Glycine max
  Clone ID: jC-gmfl02220089c08d1
atcaatcaaccgtaaaaaattaattaaaccaaggattaatgaaataaacagtccaaaacgtctacctcaatcaataatttgaacaaaagggttttcttttcccaaacgatggggcccacaaattcgaaaaagtttgagctgggttagatcaatggaaaaaccccagccacggattgaatgaatcacagcaaagatttggagctacataagagcattgcaggaactagttttccaactattccagttgactcccagatcaaaaactccatataacggatgcaatacaaactcattttcacaacataacggattgtttacaaaacattttccttttatggacacctgggaataattcaataccctatccctttcggagacagaaggtcaaaaaatgtgggcgatttgaccgcttttaagaaagatgctgtaaccaacaaactccccttgcgtttaccatt

SEQ ID NO: 7831 - DNA, 479 bp, Glycine max
  Clone ID: jC-gmfl02220089c09a1
ggttaaagtggcttgaaaggtttgcttatgtgaacaccaccatctatccagtcactgccattccccttctcatttattgtatcttgcctgctgtctgtctgctgactaataagttcattattccacagatcagcaaccttgctagcatatggttcatctccctctttctgtccatctttgctactggaatcctggagatgaggtggagtggtgtcggaatcgacgagtggtggaggaatgaacagttttgggtcatcggtggtgtctcggcacatctctttgctgttttccaaggcttgctcaaagtgcttgctggaattgacaccaacttcactgtcacctccaaggcctcggatgaagacggagactttgccgaactatacatgttcaaatggaccacccttcttattcctccaacaacccttctcataataaacttggtgggggtggttgctggcatctcctatgccatcaacagt

SEQ ID NO: 7832 - DNA, 545 bp, Glycine max
  Clone ID: jC-gmfl02220089c09d1
atcacaggaaacactcactgagatgtatacatacaaaatgtgaacctgggaatagcttataatacatagctactccagaaaactggaaggcacgttagtattacaaataaaacaataccacaaagttcggttctagtttgttctcttatgcatcttctataaacaactgcacataacttaaacataacggctacaaaacaacaattataattacaacccaaaacacaatacactacacttgtcttttggtcttctagcagttaatgccacactcctcaacatcaggaccagtgacccttgtggtgaatggatcaattctaacccacaagagtgagaaaatggatgcaagcagaacggaccacaccaccacaatggttggtgttctgttttggcgccccatgagacctttgaagaaagggtatagatggatgatcacccaaaatgcaaagaaaagcttaccaaagaggggtccccaagattggtagccactgatgatggcatacgagatgccagcatccacccccaccaagtttattatgagaagg

SEQ ID NO: 7833 - DNA, 426 bp, Glycine max
  Clone ID: jC-gmfl02220089c10a1
gtttattagcagatgaaagaaatgttcccccgtcgttgcctgagcaaggacaagttccagtggataatgggagtaagaccagtagttcaagcagctccagcagtgattcaggctcttcatcaagtgattctgatagtgatagttcctcagcctctgggtctgatgcagggtcaccaaaaacctgattcattctgtcagatctcagatatttaaagattagatagtgatatgcaatgtttggctagttggtttttttcccgcatccagatttagctgttggtttgtaaaggaagtattctcaaggccacctatgatcctactgatgcagtatggcggggtccttttatcgcaactgttgcactactgctataaggccttatttgtgataacaaactaatgtaaaatatatggtagaatgtgatgata

SEQ ID NO: 7834 - DNA, 415 bp, Glycine max
  Clone ID: jC-gmfl02220089c10d1
aaattgcctgtttcatagatgagacccacacggctttattgttctgtacataatcatgtgccttgtactatacatgaatattataaggcaaagaacctttacaacatggtgccaaacacgaacctagtttcatcccatactcgaatgtcatgcgcttcgatatcgcctggcactctgttgacattcaccatcagagactaacctatttcgctacaaagagctaccataaattcaaggtccccaaggttccctgatgcgttcatcacgtggaacacattcaatgcttgctaccctgttgcagaaacacctggcctacaaactgacaacccaatctctcataaaatgcttgtaacttctgacagcaaacccactgtatccttggcacacagctcaaggctcacaccctcgctgactc

SEQ ID NO: 7835 - DNA, 471 bp, Glycine max
  Clone ID: jC-gmfl02220089c11a1
catcattgtcccaactctctcttataagttctaatacacatttaatttcctaaggtgcttcctttccctctaaggtttaattattcgttttggacctaccaacaaacaaacagtgaagcctttgtttttattaccttacttacacctctctatggtctagaccaaataaaaataaatgtctggaagtgcagatctgcagctacaagtgtgcttaagctgacactctccgagtggagaacattcacaagtgagtgaggctaatggatcttgaatccagcaagtgttgggacacatcaaaggactcttggaagacaattctgctcttgtgctaccaaagccttggtgtggaatatggggacttgagcattttttcattgtatgtttacaccagcacatttgttgaagatattgaacattctaagaccaagaagagattttggggccctttctttgttttttgactctgacact

SEQ ID NO: 7836 - DNA, 424 bp, Glycine max
  Clone ID: jC-gmfl02220089c11d1
catataactcctttttcaccggattctggttgctcttttccaaataatctggtgttttactcaatatcacggtttctgctacaccaaaacaactcctattaccttcggattcaagaatttgttggaaacattcactgccgatgtgcatagagcaaagaacaggccactgaatgcgcccttaatagccccttaaaccatcgctacctttagataagccaacgagagaaaaacgggccataacggttgagtcgagcaatggatctgccgggtgccgccaggcaccaaaaatgcctgttgccactgcagacgaccagaccactgccatggccacggcttaaaaagcatgtgccctctggaggagatgttctgcactcacttagggctccatgttggtggagactgctagcatccctccaaggcatca

SEQ ID NO: 7837 - DNA, 515 bp, Glycine max
  Clone ID: jC-gmfl02220089c12a1
gaggaatatgtttgaaaccccaccaaggtttcatatcaaacatcagtagtcgtttaatcatttctcggcagttctccctgctgagtgtgctgttgcagaggtagccagttaacatgggacctggtgggccagggggtcctgggcctggtggacctagttggggtcctgggcctggtggacctggttggggtcctggtggtggaggacctggcgggccaggatggggtcctgggcctggtgggccaggctggggtccaggcctgggtggacctggcttctttgggcctggcggacctggcttctttgggcctgatgggttttttggtggatgtgcaaatggtttatgcagccttgtatcttcatgcttctactgcttgtgctgttgttggtttttccgagattgttttggtggtccaggcatggcaccttctttctgataacaggaacattatcactgttattattattaatttggattagaagagttgaagatttacttgctgccgctcatgact

SEQ ID NO: 7838 - DNA, 387 bp, Glycine max
  Clone ID: jC-gmfl02220089c12d1
gtttttgacatcatgagacatttgtggactattattaatgacaccgtgttcttaacaggaggcctatgcttacacagggatataatagtgacttggctacacactcaaaggcatctactgcaatgaaagagcacgtacacaaactggcagttattggagcaatggtcacacactggcacacttatccaggtgtgagtaaccgtcatactccagtaaagctaacatacacatctctccgtcattctgttgatgacatcatgacggaggatgcaagtctgaaccatctatacattgtcggagtatccaacgacagctcatgcagtatagtcatgaatattctaggctgtactaaccattggcacttccagcatatatcccatcatgccc

SEQ ID NO: 7839 - DNA, 536 bp, Glycine max
  Clone ID: jC-gmfl02220089d01d1
cgtatctacgagtacgacgtcgcatgcactcccgggtcgacgagctcggcggccgcccttttttttttttttttttgagacttacacatacatgtgtatgattcggaatatcatcatggagaacatcctgcttttttcttatccgtatgaagaattctatcctcaccacactaaaaccctcttaactgtaacttcatgtgatgacgattctaatcgggagacatacttgaccttagaatttagaagttcatatgcgtacaaacccactggaaggggaaaaaaccatcatagagtaagatcagggattgtcataagaaccatcgtttctactctagaacactagagaaagcacattcttctattggaaaagctaacgcacccttcctaaagggctgttcgagaaatccaggattccttacttcgcatgttcaggtgctggtctaagctcccaatgaaggcctgagcttttgagaagagctcttgcccatttactcctgcaagctcctgtactgcttgaagctcttcatccatgacct

SEQ ID NO: 7840 - DNA, 459 bp, Glycine max
  Clone ID: jC-gmfl02220089d02d1
gatacatacacacacatatgtttgatttcgtttatcatcgtggagaacatcctgcttacatataagaggcatgaagaaatctagccatacgacactgaacccctcacaacagatactcactctggtgatgacactaaacaggcaacataccagacgttaggactcatatgatcacatgggcacaaacccattcgaaggcgaaaaaagcatcatgcaatagaatcatgggtactcataagaaccatagatgataatccagaacacgatagaaatcacattatgccattggaacagctaatgcgccctgcctaataggctcaaggaccagcccaagattcctcatttcgaatttctacatgcttgcagaagtaacgaacgaaggcctcagcctccggaacgagctattgcccatgaacggctccaagctcacaggctgcttcaagctcttcatccatgaac

SEQ ID NO: 7841 - DNA, 385 bp, Glycine max
  Clone ID: jC-gmfl02220089d03a1
ggagtgtcatctggatttattgcatctggtagcagcttggaaaatggatataatcagggatttcattctgcgacacagctacctgcttttattgataactcaccgtttcatgtgaattctagcattcacaagatcacaagaggggcatctgcgggaaaagtatctggtgtttttgaggccagtaatgcttttgatgctatgaaatttgcatccatttcgaggttccatcctcattctttacctgaatatcgtgaaagtttagctactggcagtccttacaacttttcaagtaccattaacacggcttccaatattggaactggatcgacggaatcatctgaaagcaggcacattcagggaatgagttcaactgggaacctagctg

SEQ ID NO: 7842 - DNA, 477 bp, Glycine max
  Clone ID: jC-gmfl02220089d03d1
ttcgttcttttttttatctgaatgctccctctcaccgaagaaaatgtttaatttaaatgttattcctcgaaaatccattagatcgacaacaaaacccataaggataccaatgcccgggaatataagggaacaaaattacatatgaacaacaaagatgaccatgaaaacaaaatcagcaaagaacccttgaaacccacaatgatgctcattagcacaaggaaactgcaaagtgccacattgaccattcacagctagccaaaattttaagcttcagttaggtcattctctaaagatgtaggatggtagcagtactccatgcagaaatattaggaaaataacggataacaattaaatcagtgacttcattcgggttatgtaccttaacttccaacaactcttgcaaggctcctctatagaaaaaaattttgagccccctttcctaccagctccaactcctcttgcttgaacgagcaaaaa

SEQ ID NO: 7843 - DNA, 405 bp, Glycine max
  Clone ID: jC-gmfl02220089d04a1
gggctagaaaccaatatgtgtcccgcgcatgactttgaccgtgcccctgcatctcggtggctttttctggacctacagagactaacctcatgctcacacgacgttgtgtgatcctatcgacataccctcacatcaggcacatctatggtccagaccacttcgatctattcaaggatttccctgatccatgacaaaatcgatcgtattttacgtgcgttccttgccatagggttagatggtatggtggcctgtggggatgggaactggggtcgtgtcagattgattattgaggcaatgatcacatatatcaagtgttcgctttattttgccgagaggaagacatggttatctgagtgtcaggcaagttccacacctgcacgagcttatttcgctcctttctaatgg

SEQ ID NO: 7844 - DNA, 369 bp, Glycine max
  Clone ID: jC-gmfl02220089d04d1
gattggagtacgaatgacccgatataagggtaataccctacattacattcttatactgcacatggaaagagatcatctttgggaacttacaaagggggaactgagataaatgaggaaggcaataacacatatgtgcggtattcagccaaagcccacattggaaaaatatgtccatcgaatgagtcatgaaccaagctgttactgaggtgtactccaagagtgtcttgtaggggccaatcgccatcttctaactgagaattcatgacataactttgctgcgtgatgaaggggagttggatctctctgaggctgcttagcatgaattagagccatcagaagcccaagatgtatgtacaacatttgatcgac

SEQ ID NO: 7845 - DNA, 405 bp, Glycine max
  Clone ID: jC-gmfl02220089d05a1
cacaacaacactctctcttctcgctctcggctttgcgctcttcactcactctcattgattcattttcaccgttcatggatccagtaagcgtgtggggcaacacgcccttggcgacggtggatcccgagagccatgacctcatcgagagggagaagcgccgtcaatgccgtggaatcgagctcattgcctccgagaacttcacctgcttcgacggcatcgaggccctggtgcgcgctcttacaaacaaatactccgagggcgtgcctggcaaccgctgctacggcggcaatgaatacatcgaccagatcgaaaacctctgccgctcacgcgccctccaaggcttgcacctcgacgcccaatcctgtggcgataacgtccagccctactccggctccccggtcaact

SEQ ID NO: 7846 - DNA, 490 bp, Glycine max
  Clone ID: jC-gmfl02220089d05d1
ataaagaaaggcagcacgtattatgtcaattgttaagtaagaaaaaaaatatgatatcaatcaggctaacaaaattaaacatgaaatcatcgacaaagaaacttcaaacttttgaattgaaacaccatggcgataaaccctatcactcccaggaaaggaagacacatatttcctttttctacatttctgcactttgtgacgaacttgagtgacacaatttagtagaaagcggtatggttgaacctaatccttggacttaatttcagataccaggaagccaggcttgtctaacaaggcagagaacttttcaacatcagctttgagatcttcaatagccttgttgatgacgagacccttgctgaaatccttgacaagttcgccatgctccttctggatcttcagtgagagagtgacagcacggtgatggaactcaccaatctgctcaaagtctgtgtcaaccaaacccctagaagtcatggctggggcacca

SEQ ID NO: 7847 - DNA, 482 bp, Glycine max
  Clone ID: jC-gmfl02220089d06a1
ggatggaaagattcgcggagggtggcgcgagtgcaccaaagttacaaaacatagttagtgctaatgaagaaggaaaagaggaagccaaatggcagtgggaaggagacttgaatgccaccatacaaaaagggttcaacaagcttttggagtctgcaagtactgaatcatctcttagtctcatagatagtccattacaagtgatatggcttgactcagggcggatcccaaagtcgtgcttcagtaacttgaactctttgactgtggacggatgccaatttttaacagatgttgtcatacccttctatttacttcctttcttaactaatttggaagaattacaagtccgaaagtgtggttctgtggaaagcatatttgacgtgaaaacagctatgggagtgggagcagcagcctttcctagacctctcccttttccctcaagaaattgactttaagaggctgcccaacttgagaatgtctggaat

SEQ ID NO: 7848 - DNA, 523 bp, Glycine max
  Clone ID: jC-gmfl02220089d06d1
cggtaggcaccaggccacttaattcgttgatctcctgtaaccattttctttctggtgaatcaatctcctctaactctaatattggagtcattgcccttgccagaaatgcctatcggatttgcatggcagagttcagatcagtttccaatgggatatgatctctccattcgaatatcacttctaacagcttgtctgttttgactgtacctgcacacaaactttccatcctcttgcaatactttactgtgaattcctccaaggacgggaaacttaaactccctttgtagaaccttctcagctttcctaaatatttaagtttcaaacaattgagctgcttaaatattatctcattctcatctgattcatccccttcctctgttgaagacactatctcttcaattgaatcacacctttttatcttcactgttttgagttgacccaaacttcttgctgttgaggatgtgaacaaatatagcagactcttgcaactttctactttcaaatatgtcagattggaggaaga

SEQ ID NO: 7849 - DNA, 172 bp, Glycine max
  Clone ID: jC-gmfl02220089d07a1
gttattgatgagcattagaaaaggacggcatggtgattatgatgagggcgtgggaggtaactaacatcctaaagcaagcgccatggggacctttgctaactcaccaacacgcacaaacaaagccttgctggcggccgacactgctaggggcctgaatgtcctattgctgtcc

SEQ ID NO: 7850 - DNA, 403 bp, Glycine max
  Clone ID: jC-gmfl02220089d07d1
aaaattctaccatgtggcctgaaacatggtcacatttctaaaagttgggcggtgattacatttcatcatgtgcaaacatgctccttgcaagcatccctttttaaccatgatcaggttctggtagcattttgtatactatgcctccattcagctcttactcaagctttagcaatgatactcactggtgagactaagggggatactgtctttgcatactgtaggtctgtagagcgctaaccatattttctgattccctatgactcccacttagaaacatatgattcatatatgcacgcttgtggcttactggatggatctatgaatactgttctacagtctattaccgtgagtcaggcttttgcttagatctgtgaatgcttgtacaggggtaaactccagaatg

SEQ ID NO: 7851 - DNA, 530 bp, Glycine max
  unsure (1)..(530): unsure at all n locations
  Clone ID: jC-gmfl02220089d08a1
tcttcttctcttaaaagagcctttgctttttctttaggcctttccgaattaagtacttgtttcattttctctcgaagcaagaaaaatgttcatcgagagtttcaaggttgagagtcctaacgtgaagtacacagagactgagattcagtccgtgtacaactatgaaaccactgaacttgttcacgagaacaagaatggcacttatcagtgggttgtcaagcccaaaactgtcaaatatgaatttaaaaccaacacccatgtccctaaactaggggtaatgcttgtggggtggggtggaaacaatggctcaaccctcaccggtggtgttattgctaaccgagagggtatttcatgggcaacaaaggacaagattcaacaagccaattactttgggtcgctgacccaggcatcagctattagagttgggtctttccaaggggaggaaatatatgccccattcagagcctgcttncaatggtaaaccctgatgaatgtgtgtttggggatgggatatcaatacttgaacctgc

SEQ ID NO: 7852 - DNA, 527 bp, Glycine max
  Clone ID: jC-gmfl02220089d08d1
ggataacttgatattattttattacatacatgcatagatagcctgctctcaaataagtcggcaggaacaaagatagagagattcaacgatcttcaaatttcacatttgccagaaatatataacagaaaagaggggtatgggatatgagttaagttttgatcacattcaactacactatcccaaaccgttactcttaagactttgaacttcacttgtactctaggatcatgttgttctcaggagctaatccaacacaagccctcaggatgttttccagcatagctcgctgctttgacaacgcattcaccactggtgtacccggtggaaccagaggggccttggtcaggtaactaaggatggtcgcaactgggtggaatgagtggaattttccctcattttcagctttaaactcgattcgagtgctgagctcagcaagaaggaccaagtccaagataataggagcagctaacagtgaatcctcacatgtgttgtgcaacacaattgtgttctttccacccatgaatatc

SEQ ID NO: 7853 - DNA, 330 bp, Glycine max
  Clone ID: jC-gmfl02220089d09a1
gtgacactcactaagctcagggttatatcgtcaaccttagtggttttgtacaacatgtgccagcacactatgtggtccggtgaccatcccaatgcatgaaagcacgttcttgcccgtgccggctgaacgctctcaccaaaccgggcctagttccttcagatactcgctctatggctctggcgcttttggggacagcacggctgttactttaactccggcggtcggtggcgctgcgccaactgtgacttgtgatgacccctgatctgctactgctgcggaaggagcccaccgctgtccctgggagaggttaacctgttcaacaatctggac

SEQ ID NO: 7854 - DNA, 478 bp, Glycine max
  Clone ID: jC-gmfl02220089d09d1
aaattctgatgtattgtgcatcaaatatctagataatcctcactcaggggcatactgccggtcttgaaacaaaggaaggatcattctcaaaaaacctttgtcgggcgaatcacatggaaactgtatgggccataacatatcaagagaagcggggttccactgatcatgaaccgatgcacagaatcgagctacaagaacacacatgtgtttgttggggccatttgcccatgaatctcggaacaaaggtggcttaatatcactaatgcgtgcatatttgatgccatatgccagggctactgatttaaaaatgaattgacgggattccagaatgtaatgccaaaaactttctatcatgcggtcctgaagaagacagcattaactggggacgggtcatgattgcgtgtgacgatccagagcatacgcatgaatctgagaggctctaaaaccaagtcttttgttaatggtaccataatggaat

SEQ ID NO: 7855 - DNA, 350 bp, Glycine max
  Clone ID: jC-gmfl02220089d10a1
aacactttcgagttcgaactaagaaaaaaaaaaaggaaaacaaaatggtttcgtgggtgagaggcaagtgcgtcggtaacggcgcgtttggggttgtgaacgtggcgatttcgaaaagagataatcgcgttttcgcggtgaagtccgtggattgtggaagggggctttctggtcatcaggtggaggcgttggagaacgagattgggattctgaagcgggtggcttcgccgcacgtggtggcttatctcggagacgatgtcacgtgcgaaggaacggcgtcgttcacgaatcttcatctggagtacatgccaggtggcaccgtcgctgacttggaccgcgctgacgtggac

SEQ ID NO: 7856 - DNA, 642 bp, Glycine max
  Clone ID: jC-gmfl02220089d10d1
ccagtcggcggccgccctttttttttttttttacattaagaatattaaattacacaacatgaaatttttacaatacaagctgtaaatgctgaatattcctctattcctacccaacttttcccacccacacccataccgacagctccaaccaccaccccctccagcggtgttactcccacccaactttcctattccccgatttacccctacagaatccgaatattccataccagtccccgccacattgtgaaactcccaatttaccccttctttgctcgaaccaacaccatcacactcacacgtacatgctccttcctctatttctgtttctgttcccgttgtcgttggttttccgttggactcaatttccctcaccactatccaaccctgcgtttcccaatttaccctcgactctgtcgcaaatttactaattctattgttaataactgatttttcttcgctgttggtaaattttataaacacgtcttcttgatgatcacggtcgttacaatctgactcggagttgagctccgagtcaacccagtcgagaacgcagcgaggcgacgattcagcaaccgcgtagtatggaagcaaaaatggatgctgcagcagctgatcgcagctccaccgttcactatgttc

SEQ ID NO: 7857 - DNA, 430 bp, Glycine max
  Clone ID: jC-gmfl02220089d11a1
aacgtctctctcacaacggttttccattcgaaaatctgcgttcagaactccaatcacgaggagcacttgttgctgcaactgcatgcaataatgtcgttatccgattctgaaacgccgtacggcggtggaacggagtacaagcctttccgccatatcagccgcgatcggttattaattgaaatgcttagatcggcaaagtcacctgattcgaaagcttggaaggtgctaataatggataaagtcacggtgaaagttatgtcacattcatgtaaaatggcagatattacagaccaagaaatttccttggtggaagacctattccggagaaggcaaccattaccatctttggatgctgtttatttcatgcagccttctaaagagaatgtggtcatgttcctgtctgatatgtcttggagggagcccctgtata

SEQ ID NO: 7858 - DNA, 473 bp, Glycine max
  Clone ID: jC-gmfl02220089d11d1
gagagtgaaatgtatcataaggatacatatacttcaacagcttagggcagatgtccatcatatacaagaaaagaaatatagcttcgtatatatatgagagtgaaatgtgtcaaatgagtacttatacttcaacagcttataccagatacccatcgcatacactcaagaaaaaatgtcctacgcctatatatatatatatatatatatgactatctgacagtggagtggcgctttaacaaaaaatttataaaacaaaaactgaaagggcccccctgtgttcatccattttcaagagagtataaactctctaatgtctaaacaattatggataattataattgctacaaaaggatattatgccaacatactgtaattagcagtctttagaaacaagcttatatcccgaggccattcagctgtgaaacatcgctgtcgaacaatatctttagttgctgaagatattgtggaggatc

SEQ ID NO: 7859 - DNA, 554 bp, Glycine max
  unsure (1)..(554): unsure at all n locations
  Clone ID: jC-gmfl02220089d12a1
cttttcctttctgtgacattcagatctcagaagaaaaaaatgaaggactcaaactccagcagtagcagcaacagaaccgaacccattgcccaaaacatcatcaaactcattagcaacctctgcttctccctcttcgtcttctctgtcttaatcttcaccgtcatagccataacctaccagcccccagacccatggctccagtccaccccagccctaaccaacctcttcacccaatcagaaaacgccactttccgaatcgactcctccgtcctcagaaccggcgaagacctctccccctccccgcaagacccttccctcccgccaccgcccccctccgaacccctcatcgatataacccaacagcaaatcgccaattccaccgttaattccaccgtcgactctaccgcttactccaccgacgcgcagcctncctctctccctgcctgcgatgaaaccctaaactgctctaaccctcgcgtncttattgcccgtcagagattcaacctacgcgcgttcaagtccattggcttcttcgactaccagccgccgatgaa

SEQ ID NO: 7860 - DNA, 552 bp, Glycine max
  Clone ID: jC-gmfl02220089d12d1
aatgagaaatgagaatggatttagcagcttgattcaatagagaggaaagaggggagaaagggattctcttgtatggatacaaaatcctggttatcaacataaattatcaatacaccataggaactagcatgtacaacaacaagctcatatctaacccaatggcatgaatctgaaactgaatccaaaagcaaggccctagtgtaccatgcattctgaataagcacacaaatcattcctgccaacctgatcagcatgtattaactccatccttgcaacctttagtcaacttatagaacgtctccacgcttgtctttccacggtaaaagacctctgtatccactgcaactctcatgtacccatcaaactcaacaggctttccactgacgataagcgtggtctcgttataccactcgcttgcatttccccacagctccttataatcatcaagcaaatgcaccttgtaatttgaccttaacttatcaaagcaattatcataaggctcattggtggcaatatacaaatgcctccaaggctgaaccatccatctgagct

SEQ ID NO: 7861 - DNA, 379 bp, Glycine max
  Clone ID: jC-gmfl02220089e01d1
gcaaaaataggccatgcaacgcccctttttattaaatcgggcatcatatttacataccaaaaatcagggggaactccacacaattttaaaattttcactttacaaaaagggcagtaatttttaaacacgtaaaccattggattggatccataataccggaatgaaggaaatttacccccttctaaattttccgggtgacttgaaaaaactaatctttgggtcaaaaaaaacttggtttgcttgcaagcttaaaaggaagtcaacatgaccatagtttttaagataaaccacttccgggggggaagggaattccttgagggggggccggaaaatagttttttttgccaaaagattttttcccccatagggcattcccagg

SEQ ID NO: 7862 - DNA, 529 bp, Glycine max
  Clone ID: jC-gmfl02220089e02d1
gaagaaaaaacccaagcacagtatagcatgggaaggtacaaaaggtcaaatgtgggtgtacatgactacatgatttcaggtgtaaatttatttgttataacaattgaacacacaaaaaaagtatccatatcaagcatggcaacccgacattaaatctcgctaaatgtatttttttttcatgtcgccctaggcaagactatgtgatttttcaaatggaaaataatggataatcatcatctaaaggtttctagaagctttggaatcaaataacttgagacaatgcgatttgtcttctccgtaggatgaaatgcatcccaaaacacgtacttttcggcgtctgtgcatgtaagtggattcttgtcactgcacaagtagctcatctcaaatgttcctgtcgaacaacacgccttctctacaacctcaaatccatatgtggaaggttttgtgatgatatcattgacgatggaatatgcatttgccgacaacgctttcaaccgtggaagctccctattaagcttcgtgatcacat

SEQ ID NO: 7863 - DNA, 483 bp, Glycine max
  unsure (1)..(483): unsure at all n locations
  Clone ID: jC-gmfl02220089e03a1
ggtaaggaaaagactcacatcaacattgtcgtcattggacatgtcgactctgggaagtcaactaccactggtcatttgatctacaagcttggaggtattgacaagcgtgtgattgagaggttcgagaaggaggctgctgagatgaacaagaggtcattcaagtatgcctgggtgcttgacaagctcaaggctgagcgcgaaagaggaattaccattgatattgctttgtggaagtttgaaaccaccaagtactactgcacagtcatcgatgcccccggacatcgtgactttatcaagaacatgattactggtacctcccaggctgattgtgctgtccttatcattgactccaccactggtggttntgaagctggtatttctaaggatggacagactcgtgagcatgctcttcttgctttcacccttggtgtgaagcaaatgatttgctgctgtaacaagatggatgccactaccccgaagtac

SEQ ID NO: 7864 - DNA, 546 bp, Glycine max
  unsure (1)..(546): unsure at all n locations
  Clone ID: jC-gmfl02220089e03d1
ataaaacttcgttataaattaaatgcaacttaaaacatccctcagcagcaaaggaaatggactaaaaccctatagctgcttgtgaaattcgaaatatctcagactcttcttaccatcaaaacaaaaaacagtactcatcaaaaacaaacagcaatgaaaattgaccaccgccgatcaagaacctagttttgaaagttacggctacatgaaatcggcagaaacttaaaaatataacttaaacaaaacacctaagactctgcaaggataaaactactataaaggagtaaccacgatgatgatcacatgtgctagcaaaattgcccaaatgcaatcacttcttcttggcagcggccttggtgaccttggctccggtggggtctttcttctcaacactcttgatgactccgacagccacagtttgacgcatgtccctcacagcaaaacgaccaaggggaggatactcagagaaagtttcaaccaccatgggctngggtggaatcatcttaaccatacctgcatcaccattcttcaaaaatttgggctcct

SEQ ID NO: 7865 - DNA, 483 bp, Glycine max
  unsure (1)..(483): unsure at all n locations
  Clone ID: jC-gmfl02220089e05a1
tttcattttcgttttctctctcttctttctttctctttaaacgccgaccaacgacgcgacacgacaccgtttcgatggtggtgaagatgatgcggtggaggccgtggccccctctcgtctcgaagaagtacgaggttaagctcgtcgtgaaaaccctcactctccagggctgcgatctggtgcgtgcgtccgcagagaaaggcttcatgctccagattaagtggaagggtcccaagcttaccctaagcttgctgagacgcaacgccgttgcgagaaacttcaccagagaagcgcaccctgaacaaaacgacgacgtcgttttgtgggacgaggagtttcacgcactctgcacccctaacgcgtacaaagacaatgcctttcacccctgggaaatcgctttctctcttcttaacggtttgaatcanagggtcaagactaaggttcctgtggttggaactgcgactttgaatctagctgaatttg

SEQ ID NO: 7866 - DNA, 475 bp, Glycine max
  Clone ID: jC-gmfl02220089e05d1
gaaaaccaaaatctatttttttattaattgatcttatatcattgctatcagtaaataataaataaatatgatcttgtggaatcagagtgcaaaatgtaagccaattcacaagtcttttgcaaactacatgttaggtgccaaaagtttgagctctcacatcgaaaaggaaattacaaagtcatttacagatactcttccttggtaagatgtagcaaaacaaagcctttttgttaatttcactgaaaaccagaaggcactcttaacgtaagactagtttgaataaccacattgtttccttataatttacagttgtgcaactattatgcggaaacctcagttactgcaagagcaagagtctctggcacagtcatggatggttcagccactactggaggtgcaacacaagactgcaacacctgagtgtagtgaaactcaatttgtagcctatgatgaaatgggtgttgagttgatgata

SEQ ID NO: 7867 - DNA, 466 bp, Glycine max
  unsure (1)..(466): unsure at all n locations
  Clone ID: jC-gmfl02220089e06a1
tgtcagtgtcagagtttccaatgaacttgggcttggacatccaagagctgccaagtactctgtctatgtgatagtctttcagtcacttttcttgggaatctttttcatggctattattttggcgactagagattattatgccattatttttacaaacagtgaggttttgcataaggccgttgcgaaactaggatacctcctttctgtgacaatggttctaaacagtgttcaaccagtggtttcaggtgttgctattggaggtgggtggcaagccctggtggcctacatcaacataggttgttattacttatttgggcttccactggggttcgttcttggttatacagcanatttgggggttgagggaacttggggtggaatgatatgtggaattgtactccagaccttgctgctcttgttgatactttacaaaaaccattggaagaaagaggtggaacaaacagct

SEQ ID NO: 7868 - DNA, 532 bp, Glycine max
  Clone ID: jC-gmfl02220089e06d1
ggaaaaataacgaagtttttttatcttcaccatctcatcagacaccacagctaaactatgttctgtacctaattggaagagagcaacattacatgtaaaatggacagactaggaacacatgaaaaaaagactttgagaacttgactcgagtggaggtggaagatatacaagattatgcagaagccactatcttatcaactccaatgtcttgtccactccatatccgcatgcgttcagctgtttgttccacctctttcttccaattggttttgtaaagtatcaacaagagcagcaaggtctggagaacaattccacatatcataccaccccaaagtccctcaacccccaaatttgctgtataaccaagaacgaaccccagtggaagcccaaataagtaataacaacctatgttgatgtaggccaccagggcttgccacccacctccaatagcaacacctgaaaccactggttgaacactgtttagaaccattgtcacagaaaggaggtattctagtttcgcaacggcttatgc

SEQ ID NO: 7869 - DNA, 498 bp, Glycine max
  Clone ID: jC-gmfl02220089e07a1
ttataactaggtatttattttctcatatgctcttcttaaacttctctttggtagtgtgttcacatacatatctacttattgttattattattgtcaccacatacaataatgggttccattagtaacaccgaggttcataatcatcacaatgatgatgacgacgatgatcatcgtcatcgggtgaatttctcgatccagagaggatttgggacaaaattgaaggaggcattgaaggaaacattgtttccggatgatcccttcaggcagttcaagaacgaggagaagccaatggggagggtgatgaaaggggtgcaatacttcatcccaatctttgagtggctccccacttacaattttcgcctcttttgctctgacttgatcgctggactaaccatctcaagccttgccattcctcaaggcattagctatgccaaacttgctgacctttctcccctcattgggctttaatccagctttgtcccacctttgatctatgct

SEQ ID NO: 7870 - DNA, 506 bp, Glycine max
  Clone ID: jC-gmfl02220089e07d1
gggaaaagtcattaatttattagcgaatattttctcaattccacaaatatatagttgtataataatactattctataatacaacattgatttgggcaaccgaaaggctaattaattaactacttaggcatgaatttcttcttaaaccacctcttgagcattatttgcagcctttgatgaacgaagtgtatattgacttgccatcactgcatcatccaatattagataaaacgactccttcccaattttctcaacaaacttggacattaggatcttctcgaggggctccagccttggggtgacgggcgttaagtttaagtgtatagtgggggaatattttaattaactcgtccaatcctttaatagcagggagaccaatggctgtcactcctgacaaattaagtatgatgtgctcaactacatcttcagtagagctttcctcacttcgaatatacctcataatcctatctttgacgtatatagaatttgccaagtaaacgggagaac

SEQ ID NO: 7871 - DNA, 441 bp, Glycine max
  Clone ID: jC-gmfl02220089e08a1
cttgttcctaccagtcccactgggtattcttttttactttgcatcttcttcatcatacatgcatgatgaagattttcaacccctctgaatgctttcttcggaacgtggtatgtccatccgataccatcttcctgaaaagcatcaatctttcccatctgggtgtttcccatctctacctattcagaatgtccattctctcctggcccaattagcagctacactacaccccaatacaacactatacttcttctcctatggatccacaaaaccaacacccccctaacccgagaagcattatcttcaacaagtacgagatggggcgggtcctgtggcaaggaaacttcgccaaagtctaccacgcccgaaacctcaacaccaacgagagcgtcgccatcaaagtcatcaagaaagagaagctcatgaaagagcgactcgtgaagc

SEQ ID NO: 7872 - DNA, 462 bp, Glycine max
  Clone ID: jC-gmfl02220089e08d1
aaagtgaacaacaatgttttcacttttccatgatttgcgggattatttttgctagtatatatatatactactgtagtgtagtatattcaaatcaaacaccgtcacaaactccacagtccaaatttacatagtatgtatgaaatcaaattaagcaaatcaaagacaaactaaattaaaccacgaccatgatggatcatagaaagtactagtactataaaaaaaaaagacacagaaatgagaaatgacttagtaactactgttggagttattattagtatcaatcaccctgccagcttcaaacaatgtctttgagggaaggcctcacttgctcctcacagaacttaacatactccaacgtatctccggcagacttagtaaactccgccaccgacaccttcggcgccacctcgaaaacctccaccgtcatcgccagcttacccttcctacccttctacgtcccct

SEQ ID NO: 7873 - DNA, 419 bp, Glycine max
  Clone ID: jC-gmfl02220089e09a1
ctcgcgaaagcgccaaatcccaacaatacccacacctcactcaccctaatgcccaaattccgttattcaactttccccctcaccacctccttcacacctcactcaccacggtggtgcgttaaaatcactggtcgcaattttcctctttcttaaccgcaccatgtcgaataggaagttcggattcgaagggttcggcataaaccgccaatccacctacagcttcgagcgatcccagccccctcagcgactctacgtacctccctccgcgcgccacggccacgaccactacgaagacaccgacatcgacaacatcgacttcgacgacaacaacaacgacgacgggagcaagaataacaacggtggcggcaacgacgacgacgacgaaatcgaccccttggatgccttcatggaggggattc

SEQ ID NO: 7874 - DNA, 490 bp, Glycine max
  Clone ID: jC-gmfl02220089e09d1
ttttttttttttttttttttttttttttttttttttttttttttttttttttttttttggttttggttttaaaaataggggattgaaaaccgggcccttttttattcaaaaaaaatcaattcttgacttgacccaaatataggaacattgatacctttgacaggggggccattcaatggggcaccaaactttttatcccaacctggtggcccccccctttttttagggttaaaactggccgggttcttttgaccaggatttaccccaaaaacttgaccgggggaatttcccggtgttgtacccggattgggggaaacaaaattccgacaaatttttatgtccccgccaattgatcccccgggttcaaaacccgggggtgccggtcccttattagcagccatgcttgaattgcgccccaatccttgattctggaagtttgatgaagccgcaacaaaggtccccttaaatggggacatctattcctggtccc

SEQ ID NO: 7875 - DNA, 429 bp, Glycine max
  Clone ID: jC-gmfl02220089e10a1
gagtaattgcggaatcagctagaattttctaataatggccaaagacgttgagcaggttacagagcaaggtgaatactccgcgaaggattaccatgacccacctccggcgccgttgatcgacccagatgagctcactaagtggtccttgtacagagccgccatagctgagttcatagcaacactccttttcctttacatcaccgtgttgaccattattggctacaagagacagagtgacaccaaaatccccggtaacaccgagtgcgacggcgttggcattttgggcatcgcttgggccttcggtggcatgatcttcatccttgtttactgcaccgccggcatctctgggggacacatcaaccctgcggtgacattcgggttgtttctgggacgcaaggtgtctttggtgagggcgttgttgtacatgat

SEQ ID NO: 7876 - DNA, 571 bp, Glycine max
  Clone ID: jC-gmfl02220089e10d1
aggtaaaatttggctaatgatccaccacattatataaaaagggaacacatgatgataaatactggaagaaagaaagaaattaaataaaaaaaaaaaacaaaacaaaagggatacaaatacacccttgacataaaagcattcttatctacaaattcaagagccccaaacccacggtatttggcttttgccccaaacccacgggtaagcagaaaagccaaaaaggaaggaactccaagaattgaactgaaacactgttattgttttgggtgacacaggacaaatgatcataatttaggtagtggagattattaattaagtgttgctcctgaatgatccaagagctttgattgcagcagctctaagaatgtattgatggtagaatgcagccaccgcagctccaacaaacggtccaacccagtaaatccattggtcgtcccaggctttgtcgttgttgaagatcacagctggtccgaaactccttgcagggttaatgccggttccagtgacagggattgtagccaagtgaaccatgaagacggcaaacccaaatggaagtggtgctacacaggaa

SEQ ID NO: 7877 - DNA, 488 bp, Glycine max
  Clone ID: jC-gmfl02220089e11a1
cgaagagaatggctcccaagggtttaatctttttggctgtgttatgcttctcagcactgtcactgagtcgttgtcttgcggaggataatggacttgttatgaacttctacaaggaatcatgccctcaggctgaagacatcatcaaagaacaagtcaagcttctctacaagcgccacaagaacactgctttctcctggctcagaaacatcttccatgactgtgctgttcagagttgtgatgcttcactgttgctggactccacaagaaggagcttgtctgagaaggaaacagatagaagctttgggttgagaaatttcaggtacattgagaccatcaaagaagctttggaaagggaatgcccaggagttgtttcctgtgctgatatcctcgttctctctgccagagatggcattgtttcgctaggaggtccccatatccctcttaaaacaagaagaagggatggtagaaggagcagagccgatgtggta

SEQ ID NO: 7878 - DNA, 533 bp, Glycine max
  Clone ID: jC-gmfl02220089e11d1
agcagcactcacatgcatacataacatagtaatggacaccatgaacatgcccttctacccaactctaacctacttgcacagtacttattgaaataaaaaattaaaaaacaaactatcaaacaagagtgacatcggaagattaaaaaacaaagcgtcttaatcctcgcatccccatgaacctgctgtggtcttgatcggttcattgaaccaatcaaccaacccatttaaagaaaaacaccttaattattttttgcataatatcttacagatttcttccacatagagaaggggaagaaaattcaaggcccaaattaagcgggaagcaattaaggctcctcatggtgcttgttggcaacattgcactgctttctgatctcaccctttgtgccaatgagagggttgttctcagagagcaaaggaatggctctagaaaactccctgaagaaatagtcctggctcttggccattttcttcacataaggcttggtcctcttgtcattggctagttggtgatccactatcaacaagccctt

SEQ ID NO: 7879 - DNA, 593 bp, Glycine max
  unsure (1)..(593): unsure at all n locations
  Clone ID: jC-gmfl02220089e12a1
tcgagcaaaaacccaaccatactaaaatcagttgctgcaacatctccaacatttaacatagctatggcacctcctcaggcagacctaaggaagatcggtgcagaaggctttgctctgatagacaagttctatggtccagcaagaaggaacagtgtcaatgatgcattccatgggcgaagaggagatcgttgttgggttgtttataatgtgtctaatgatgtcatggaagattctgctgcaattggcatggaggcaacaactggccattttgctgcgaaatctgctatgaattatccaaaggcaggtaaacccgaaattcgttattggggtagacccttaaaattttaagtttttttggcttatgcatgttatcaatatcaggtgtcttcaaatgggtctgtatttcatgttagcttactcttgtttgatatatacgtgtataaaaaaaaaaactcggagaccttcatctatatttatatcaaggtcttctgtagtttgtggaaggtaaattacatatgtagttgaataaagtactcaagtatcaagggatgtaatgaaactactnngtatgcatggactactattttttttag

SEQ ID NO: 7880 - DNA, 403 bp, Glycine max
  Clone ID: jC-gmfl02220089e12d1
ggttcaaaaattttttttttattaataaaaagtctgcccggaaaataaaaaaactacgataaaaaattcttcgtatcgcgatccaaattggaatactcccaaacggggcaattgaaccttaacttaatacaaccattttgtctccccaaaagggggaaactcactacaggcttaaaatcgtaaataaaaaatggcccactgcaacacttataaaggcccttggggactgctaaacttacactagcttacccactggaatagattggggcaacaaagttttttccattttcacaaaagggggaaattcaaccatatgagggattgtttcctttaaaaacctgggggttccccttaataaacttaaagttaaagttcctggatttacgaccagtcaaagctgggg

SEQ ID NO: 7881 - DNA, 470 bp, Glycine max
  Clone ID: jC-gmfl02220089f01d1
aaaaaagggggccaccccaaaataattaacccaaaaaaggcccccccaaaaaaaaatccgtaaaaaaaaccgccttaaaaaaaatttcagggcccaaaaaaaatttgggggcaaaaaaattttttaaacaaaaaaacccgccaaaaaaaacggggccctttggaggcttaaaccccccaataaaacccccaagaaagggaaacccccccccccatccaaggaaatcggacccctttttttttaaagccccccaaatttttgggctctccccggaaaaaaaaaggcccccttttttttgggggcggcaaaaatttctcgtggtaaaacatattttaccacccaaactttttggggcccaaaaagggggaaaaaccctcttgaaaacccgggagggaaaattgcggggggggccaaacacacctttccctccccttcgggccccttttttaaaaccccggggggccccttta

SEQ ID NO: 7882 - DNA, 589 bp, Glycine max
  Clone ID: jC-gmfl02220089f02d1
acaaacaagaaaaaccaaatcatgaagcatgcttttcttattgaccttataccgtcgtcaggtacacatggaaattatacatgaacaatgagtgtcagtaacacattcactaacactcttttttaacacattcttctattgcttaaaatttaggtggatcctactaatttgtgaacaagacccaccaaatagaaaatgaaactcaccggacttttaactaacaggagatgtatgtcacaaagagtgttagggaaagtgttgttgatacatgaatatatatatatatatatatatatatatatatcatcatcatcaaaagcgtcagattgaataacaaaaatgcttgcagagtcagtcatctgaagggttcaaccggagcggattcttcaagagagtttgctgtctcaaaacattctgcagcttctagaattgtaccctcatccttgtgaaaaataccaagattataccaagcagaagcattaaatctgtcatgccgtagtgcatccatcagaaagcttctgatagcaggatttgatcgattactgcaccatctaagaacaaccgcagcagagatcaagctagggacatg

SEQ ID NO: 7883 - DNA, 506 bp, Glycine max
  unsure (1)..(506): unsure at all n locations
  Clone ID: jC-gmfl02220089f03a1
tctcggccatggaagaattacggaaactcgagaaagtacagagcatgcttgaattcatggaatcacattcacggggcgtttcaaactccgatcaacactctaaccgcttcctcgctaatttcattcttttcttgatcgaaccctgcggagacctttccatcaaccacaagtgctccttgctctcccactttattcccactgtcagttccacttcctcatttgaatttgcatttgcatttgcattttcatttcatttccctttcgcttttgcagctctcatctgcattcctcgaagacgcgtatcaacaccaccttttcaccacctctaaacaacaaaattctggtggttttcaacaaagtcttgttggaaattctttgcttagttgcaatcagatgaaagaatacagtttgttgcaaagatgtaatgaaaacgctgccatggtcgggctggattccatgcaaatggcanattctacacttgaggatttttgcagatcttattttat

SEQ ID NO: 7884 - DNA, 576 bp, Glycine max
  unsure (1)..(576): unsure at all n locations
  Clone ID: jC-gmfl02220089f03d1
aaatcaattactattatattaaataatttatgtcttggaaattaaataatttttgaaacagtttgaaggctgggaacggagaaacaaacatgctgtcaacgttcagcccaaagctacaatatagttgcttttttgttttgtcccttggaatgtatgaatgtccattttggaagctcctaatggtaatccaaacacacactatagtttacatcatcggtggcaagtgataaaatcagaatgagttatagaaatatccgttcagctttacttggtgtgtcaaaattaaattacttttttgaaagggagcttgggactctcatgtgtcgcgcacatgcgttgcactatagcacgggcctggcacaccctttttgtaagtcctttaatgagtgcgtcattcaacatttcaactccaactcgtcatgttatactggaggaattacctcagagacacagttaaaagttatattcacgaaatatctgacttcaactttaatctatacaattcctcatcttgaatcacggttgganatactcatgttccaagagggtgctctgataccttttcaccttctttag

SEQ ID NO: 7885 - DNA, 391 bp, Glycine max
  Clone ID: jC-gmfl02220089f04a1
agatgacggaggtggcgagatcagtggtgcacgacgttttggggcaaagagtggtcgacgtggaccagccaatcgtcgattatatcgtcaacgtcctcgccgacgatgacttcgatttcggcctcgacggcgaaggcgccttcgatgccctcggcgagctcctcgtcgccgccgactgcgtcgacgatttctcccactgccgctccgtatgcagcacgctgtgcgacaagttcgggaagcacggtttggtgaaggagaagcccgctgtgcgaagccttgcggcgccgtttcgaatgaacgagggaatggacgacgtccaagctcccaagaagaagcccgagcccgtcgacggccctcttctatccgaacgcgatcgcttaaagctcgagcg

SEQ ID NO: 7886 - DNA, 328 bp, Glycine max
  Clone ID: jC-gmfl02220089f04d1
ggagtaattaatttaacctcttgtgttcataaaattgccttgaaatggtgtcacttgcacataggtttggataaattgcaaaattggatattcccatgtatgacagctgacaggaggaagagcataaaaccgagatccaggtgtcttccagtatacattcacaaaatgtaacttttctaagatgattggagtatctgcttatcatctaggaatgcgccatggaatggtgccactatggcattattacatcctatagtgccttacatcttccatagatgacttgctcatcgtgactcaccatgagaatgcctgcttggaacagcgcatg

SEQ ID NO: 7887 - DNA, 442 bp, Glycine max
  Clone ID: jC-gmfl02220089f05a1
tgtcagtgtcagagtttccaatgaacttgggcttggacatccaagagctgccaagtactctgtctatgtgatagtctttcagtcacttttcttgggaatctttttcatggctattattttggcgactagagattattatgccattatttttacaaacagtgaggttttgcataaggccgttgcgaaactaggatacctcctttctgtgacaatggttctaaacagtgttcaaccagtggtttcaggtgttgctattggaggtgggtggcaagccctggtggcctacatcaacataggttgttattacttatttgggcttccactggggttcgttcttggttatacagcaaatttgggggttgagggactttggggtggtatgatatgtggaaattgttctacagaccttgctgctcttgttgatactttacaaaaccaattg

SEQ ID NO: 7888 - DNA, 570 bp, Glycine max
  unsure (1)..(570): unsure at all n locations
  Clone ID: jC-gmfl02220089f05d1
ggaaaaataacgaagtttttttatcttcaccatctcatcagacaccacagctaaactatgttctgtacctaattggaagagagcaacattacatgtaaaatggacagactaggaacacatgaaaaaaagactttgagaacttgactcgagtggaggtggaagatatacaagattatgcagaagccactatcttatcaactccaatgtcttgtccactccatatccgcatgcgttcagctgtttgttccacctctttcttccaattggatttgtaaagtatcaacaagagcagcaaggtctggagaacaattgcacatatcataccaccccaaagtccctcaacccccaaatttgctgtataaccaagaacgaaccccagtggaagcccaaataagtaataacaacctatgttgatgtaggccaccagggcttgccacccaccttcaatagcaacacctgaaaccactggttgaacactgnttagaaccattgtcacagaaaggaggtatcctagcttcgcaacggccttatgcaaaacctaactggttgaaaaataatggcataataatc

SEQ ID NO: 7889 - DNA, 496 bp, Glycine max
  Clone ID: jC-gmfl02220089f06a1
gagaaacagactcgctgcttagtttatgagcttgtccctaatggaagtgtcgaatctcacttacatgtagctgacaaggtaactgatccactggattggaattcccggatgaagattgctcttggtgcagctcggggattggcctatctacatgaagattcaaatccatgtgtcatacatcgagacttcaaggccagcaacatcttgttggagtacgattttacacccaaggtctcagattttggattggctagaacagcactggatgagagaaacaagcacatctccacacatgttatgggaacatttggctacttagctcctgaatatgcaatgactggccatcttctggtcaagagtgatgtttatagttatggagttgtactccttgagctcctaactggagaaagcctgtggatttgtcacaaccaccgggtcaagaaaatttcgtgacatgggttcgtccacttttacaagtaaggaaggcttgcaatga

SEQ ID NO: 7890 - DNA, 537 bp, Glycine max
  Clone ID: jC-gmfl02220089f06d1
acctagaaaccaacatggggacatagtttatacattgacaaaagttgttgtagtttgtgactttgttacattattatcacaatattttctctcaagtgaatctaacatgcgattcatggaactcgatgaattcggtatggaaaacgcaagattaccaaaagcttaatgggatccatgttcactggagctacctctagacaaacttctcaacttctgccagaactgccttttcttcccaataattagaggccctgaacgagaatactgcctgaacgactcaaattcctgacctgaagtactgagcaactctgatgctgataatcttaccttttcttcattagattgatagccagaaaaagttttttgacactctgaaaattccactctttcacctgaagcttcggaaaaaattcctttcacatcggttagaagaccctcttgagaacccttcgattttataaagtctgtgttctcaaactcactgcatactagcttcaaggccttgacaacttcttccattgaaagacgttgagagac

SEQ ID NO: 7891 - DNA, 443 bp, Glycine max
  Clone ID: jC-gmfl02220089f07a1
acactatttgcaaattggagtcctgtatatttatctgcttctaaagatgagtcggaatccaaagacacagagccagccttttggactggtggtcaggtaacagaagaaggcctaaagtggttactggataaaggatataaaactattatagatctcagagcagagactgtaaaagataacttctgtcaagcggctctgcaagatgctatttcatctggaagaattgaattggtaaaaatcccggttgaagttaggactgcacctacaatggaacaggttgtgaagtttgcatcttatgtttcagattgcagcaaaaggcctatctatcttcacagcaaggaaggagttttgcgaacatcttccatggtctctcggtggaggcagtacatgactcgatcttcatcacagattgtttctaatccaacagttacaccctatgacat

SEQ ID NO: 7892 - DNA, 422 bp, Glycine max
  Clone ID: jC-gmfl02220089f07d1
aagattaaaaaaaattactaccttttataaagggttttccaacagcattttgccattttgacatggtgaaaaaacattgggaaaccctatttttacaaggggagccaatggaataaaggggagggatctgctatatatccaaggtctggaaaatcaatggacaagcggtccaggaattttagaagccctatccttaggttggggacctgccctttgggccttcacttgggcatgccttacagagccttttgatcaagcctgtaattctccttgaggcggcgaatcaggcttctgaaccaatcacccgtttgggcaaacttgttaacagatggaaggggaggcgggctcatcgaatttcggacagaatcgccttttgagagggggggccttgttttcccaataaatgaaacccaggctttact

SEQ ID NO: 7893 - DNA, 460 bp, Glycine max
  Clone ID: jC-gmfl02220089f09a1
ttcacagctgaagagctacgtcgtattatggactataagcataatatccgtaatatgtctgtcattgctcatgttgatcacggaaaatcaaccctcactgattctcttgtggctgctgctggtattattgctcaagaagttgccggtgatgtccgtatgactgatacccgtgcagatgaagctgagcgtggtattaccatcaagtctacaggtatctcactctactatgaaatgactgatgaagctctcaagagttttaagggagagcgcaatgggaatgagtatcttatcaatctcattgactcccctgggcacgttgacttctcatctgaggttactgctgcactccgtattactgatggagctctagttgtggtcgattgtgtggaaggagttttgtgtcccaactgaaactgtgctaagacaagcccttggagaaaggattaggcctgttctgact

SEQ ID NO: 7894 - DNA, 577 bp, Glycine max
  unsure (1)..(577): unsure at all n locations
  Clone ID: jC-gmfl02220089f09d1
gaaccaacaccgatgcaaaatcctattagagcaaaaatacatcgatgcaaggaccaaataacagcattacaacattcacgggcaaaaccacaaacaaaactaacagaaattaaatctaaagtagcattgttcacaagagaaaataaattcgactaagttcaaagtaaaataattcatgaaacaaatttaaagcttgtcttcaaactcggagagaggagtcatctgttccttcaagcccttcctcttgcgaatgtcagtgacaagctgtgcagcttgtgatccagcctccaatgggtcagaagacatcatgtcccagtgatcaaacacacattgtgggaaggcctggcctgatgttgcagccctcaatgtgctcgagaaaccaaaggactcgatgacagggaggtatgccttgatgttgtatagtggggtacctggcctctgcatttcctcgaacacgtgtccacgcttctggttaagaacactgtagattccaccaagagcttgttcaggagcctgtatttcaccaggtagacaggctcaagaagcctgggttnggcagtaatctgggaagcataga

SEQ ID NO: 7895 - DNA, 403 bp, Glycine max
  Clone ID: jC-gmfl02220089f10a1
atttaactcatcattaatcaacttcgcattgattaattaaatagcgatggcaatgacaagggtgatgcagggtcttgttctctgcacacttttgttgtcggcggttttggtccaagaagttgaggcaagagtaatcagcaaagaagcaatgcagcgtaacaccattcctggatgcagcaaagtacaccccaatgtcgccgcttgtcatctgccattagttaacatcaactatagaagaggttgtgagccaggagaaagatgtcgccaataagatccagatcgaggatgatataagccagggactcggcctttgatcaatttcttttaaaaaccatgtgtactggctacaatatgtaaaaggacattaccttgtacaccaagtaaaataatgaaatttcatctt

SEQ ID NO: 7896 - DNA, 411 bp, Glycine max
  Clone ID: jC-gmfl02220089f10d1
gaaagacaaagatgaaatttcattattttacttggtgcccaaggtaatggccttttacatattggagccagtacccatggtttttaaaagaaattgatcaaaggccgagtccctggcttatatcatcctcgatctggaccttattggcaacatttttctcctggctcacaacctcttctatagttgacgttaactaagggcaaatgacaagcggcgaccttgggggggactttgctgcatccaagaatgggggtacgctgaattggttctttgctgattactcttgcctaaactttttggaccaaaaccggcgacaacaaaagggggcagagaacaagaccctgcatcacccttggcattgccatcgctatttaattaatcaatgcgaagttgattaatgatgagttaaat

SEQ ID NO: 7897 - DNA, 439 bp, Glycine max
  Clone ID: jC-gmfl02220089f11a1
ccaaccccaagaagggttcttcaattttgtagtttttttctttgtggtggccgggttaaacttcaattaataattatttggagtccaaaccttggcagctggcatcaataccggccaccaacaaagaaaaaaactaaacaatattatggcgaactgtcagcaatattattttcttttgctttctctggcaatttttattcctaccctgaatgccaattccttagagaaagatgagtattggcagagccatgtctatgagtttgatagttattggcaggaaagggcaaaagccgctaaagtggacagtcaggcagcttattttgaagacccatattcagtctccagcaacttcacttccagtgttagcgaactcacaattggcaagaaggatttacgaaggaacttgaagggaaaatatcgtggtgacggtccatgcata

SEQ ID NO: 7898 - DNA, 582 bp, Glycine max
  Clone ID: jC-gmfl02220089f11d1
caaaagcatatggcgtatttatacaattttcttgctttctctctccttgggtacatccttggccattctatcattatgggtatcgtgaggaacagaattaatgggaaaaaggcttattaacaagggctacccactctggacttcaccaggtcgactgcatagcaagtaagccttcctacataatgtcctaccttagcggcgatcatgccttctcttgagaataccctcttagccgacccatgccccgattgcacaaaaaatgctccattcatgtacacatcgataatagatctccactgccaattagcccatacgtgttctggagcgtattccctctttagaatctgtctatcgaattgactgtcaggggcattaaaacggtcaccctcactgataatggcggggtccttgctaccaccaatggcatacatttcccagtgagcgtagtcattatttaccgaatggacaaaaccatatcgaactctgggcatcctctgaactaaacttttgcccaaacggttgaatgccaaggtgatttgcatgagcttatcatcaggataactgccactggcaccaaacaac

SEQ ID NO: 7899 - DNA, 590 bp, Glycine max
  unsure (1)..(590): unsure at all n locations
  Clone ID: jC-gmfl02220089f12a1
agtcgaattctaaagctaatcttgaagactttgaagaaggtaactcaaaatctggaattaggtcagcgttctgccgaagaagttgatgactgcgacgtgaaaggggatcaagaaaacctctgaactctcacgtcactgttaactcacaacaccattccaacagttgatgtttgatatagaagtgcacctaaacacatggggacaagcagttttctatggaactgtactaaaaaattcatcacagccgggatcgtcactgtgactgtgactgatcattttgtgacagttattccagttcgaggcggatctatgtctcccacatttaatcctaaagctggttctcatatgggagatgtttttgatgactatgttttggttgagaaattttgccttaggaattacaagttttcacatggcgatgtggtggtctttcggtaatatttctgtccatcctttaccaagtattgtactctntactttaagaattaaatttgcatttatatgccatattttcctttttatatgatgtctggaagataatttagctggtggctgtagaagcctgtgaactagcatgtctttggataata

SEQ ID NO: 7900 - DNA, 591 bp, Glycine max
  Clone ID: jC-gmfl02220089f12d1
agcttattaatttctcatatctatgctagtaatcaccattgctgctcatgatcgtgacatctggacaactactcgagaaagctggtatcacattcggaccagcatccttctaaacattgttatgcaagttttttcacctattctgctttaagatatcattcatctcatttgtaacctttaggttaccttgcttagaatgtaaccaacatttgagggattcaaggtttacactagcaacccaatcaacaaataggtaagtaactatcctttccactgacaaatcaaggaacatgtaagggaacaacgtcagagatcagaagataacacttctgatgtagttctttcgcacctatcctttgaggaagcccaacaatatagcattattccactagtggatccaactaaaaagaagataatcgttgcggtggagtactcttgacagctcctattctttgaggaggccacacaacatgggtaacccttccccgaattagggccaaaggaattggtccatatgaatttgaatccaagctagaagcgggtgtgtcttcttcaacccaacaatgtcctaatggaatctgaatcacatca

SEQ ID NO: 7901 - DNA, 402 bp, Glycine max
  Clone ID: jC-gmfl02220089g01d1
gaaacaagggcagtaaataatcatttggaaaaacctgtccgcaagtttacattattacatgatgagtgcgaagagagtttgagcttaatatttgcttcaaagcaacttcgtatagcttcatgaaatcatattttagattcagtaaataaattaatatgataagctaagcctcgccagtaaataaattaatatgataagctaagcctcgcttgagcctcaaagttttcatattatgggaacagggacagaactttaaaatttggccgagtgcagctatgataaaataaaagtcttaattcaaacagaatagagtcgcaatcagatattattcgaccagttagcagcacttccaacccttggcatgccagttgcttcctttttagcctcagcttccaccttgaa

SEQ ID NO: 7902 - DNA, 563 bp, Glycine max
  Clone ID: jC-gmfl02220089g02d1
aaaagtgaagttgactgcttcgatgtcaaagaaagacaggaacaaaggtgtacagtctatcaactgcaacgattttcctcaagatatacagattttcctacttaacaaactcaattttgtgtgcagctatattcggatggttgtcgtctaactctacttgctcacttctgataacctctttacagattcgtacaagtctaaacactccaaaaattcagcatcaaactgagaccattatgtccttaaaaatgcagaagatgatcgtacgattaaatttttgagatgtctttttactatagttcggccagtattgagaaagacgtgccttttctgttcctgtttttgagctttataagcagctgtcaaatcgagctgcttaagtgatgggggcaaagagccataataagtcaacaggtacatcaacactgaataaggcaccttcactaatctgatataatttcctccaactcaggatcctcgaagttcagagcatcatagtccgaaattgttcattaaatgtacccttctctgctagatcattctgatcatcatcatcatcatca

SEQ ID NO: 7903 - DNA, 440 bp, Glycine max
  Clone ID: jC-gmfl02220089g03a1
ctcgcgtaacgcatgcgtttcttcactcaatcggagcccagcactgatctatttggaactcttcgaggtctgtggttttactgtactcaatttgataaattaaggcaaagacgatgaccaagaagaagaatcccctggtgtttatggatgtgtccatcgatggggatcctgttgaaaggatggtttttgagcttttctatgatgttgctcccaagactgcagaaaactttcgtgcattatgtacaggagaaaaaggtatcagtccaaatactggaaaatcactgcactacaagggttctttcttccatcagatcataaaaggttccattgtgcatggtggagattttgtcaatcgaaatggaactgctggagaaagcatatatggttcgaagttcccagatgagtcacctaagctaaagcatgatgctaccggactttta

SEQ ID NO: 7904 - DNA, 549 bp, Glycine max
  Clone ID: jC-gmfl02220089g03d1
cttacagggcttttgctgataattattcctgatggtgctctaggagaactcctgctccggtgacttcgagaatgggatcttacagggctcttgctgacacttctaagagaacgagttctcgcagggcttctactgacacttctaccatgcctgcctctcactgggcttctactgacacttctccaattcctgcctctcactgggcttctactgacacttctcccattcctgactcttactgggcttgtactgacacttctcccattcctgactcttactgagcttctactgacacttctcccattcctgactctcacagggcttctactgacacttctcccattcctgcctatcacagggcttctactgacacttctcccattcctgcctctcactgggcttctactgatgcttctgcttggactcctgctgatgcttctggcgggacttctgctcatactcctctgtgatggaggagggcttctaacacttggacttttgcttaatcccctttctggagaacacttgggctctagctaatctcctttt

SEQ ID NO: 7905 - DNA, 461 bp, Glycine max
  Clone ID: jC-gmfl02220089g04a1
tgctgctgctgctttggtaattgcatttgctggtgaggtgactcatctctctctctctctcatctctccctctctctcatctctcccttccaaaaaaaagcaccaattttttcgaacgccaacgcgaatcacgaagagggtcaccgagaaaatgggtgtttgtgggtcgaggcccaaagtgaacgaggacctctcagcgaagaagaagaacaaccaccaccgaagaagaagaaggagaatcctcagaagacgcgtctcttctagaaagatcgaagctaacaacgtttctcactgtaattcagctcttcaagcttctaatcgcgcttctgatgctgcttggtttgattctacttcggcattggattctgagtgtgatgacgaattttacagtgtctatgatgatgggatgtctttgaatgagtatgaaaatgggtcaaggccaaacgattcatctcctaaag

SEQ ID NO: 7906 - DNA, 431 bp, Glycine max
  Clone ID: jC-gmfl02220089g04d1
gggagaaagataaattaaacattggtaattgccaatttggttattgtcattactggacattggccaaattttagatcaatgaatcaagaaattcaaagatacattggggttagctaccgaatgtcatttgaaagccacctatgggaggaccactcggaacaattttgggacatgttatgggtaaaactctttatggtgaagcttagacttaaaagccaaactggttgaaattgctgtaatcaagtttattcaaccgtatggcacataataaatgctttggcaagtcttcggccttggttccctgaattgtcaaaccaaaatccaggttacatagcttaagtctttcaatgaagccttaaaatacctttcttgcatatagctaaatctgaggacatccaaatttatttcaaggtagttttctcccaagaaaa

SEQ ID NO: 7907 - DNA, 590 bp, Glycine max
  Clone ID: jC-gmfl02220089g05a1
gattgatcgagagaagagaagatgactacacgcttcaagaagaacaggaagaagagaggccacgtgagtgccggccatggccgcatcgggaagcaccggaagcaccctggaggacgcggtaatgccggaggcatgcaccaccaccggatcctctttgacaagtaccaccctgggttcttcggcaaggtcggaatgcgctattttcacaagctccgcaacaaattctactctccgatcctcaacatcgacaagctctggtccctggttccgcaagaagtgaaggacaaggcctccaaggagaacaaggcgccgctgatcgacgtcacgcagttcgggtactttaaggttctcggaaagggtgttttgccgcagaaccagcccgttgttgtcaaagctaagcttatttccaagatcgctgagaagaagatcaaggaggctggcggtgctgttgttctcaccgcctgatattattgacggtatcggtttttcaacaattaagggtttttttatgtttggtctgatacgtttcgtttggatgacgttgttgttagtctatcctcaattaagatttaatttaaggtttatttttt

SEQ ID NO: 7908 - DNA, 459 bp, Glycine max
  Clone ID: jC-gmfl02220089g05d1
aaaaaaataaaaccttaaattaaatcctgaaatgtagcatagactaaacaacaacgtcatccaaaacgaaacgtatcagaacaaaacaaaaaaaaaaccctaaatcgttgaaaaagcgataccgtcaataaaatcaggcggtgagaacaacagcaccgccagcctccttgatcttcttctcagcgatcttggaaataagcttagctttgacaacaacgggctggttctgcggcaaaacaccctttccgagaaccttaaagtacccgaactgcgtgacgtcgatcagcggcgccttgttctccttggaggccttgtccttcacttcttgcggaaccagggaccagagcttgtcgatgttgaggatcggagagtagaatttgttgcggagcttgtgaaaatagcgcattccgaccttgccgaagaacccagggtggtacttgtcatagaggatccggtggt

SEQ ID NO: 7909 - DNA, 473 bp, Glycine max
  Clone ID: jC-gmfl02220089g06a1
gttgttggttaatagtgttctgtgtcagaaaatgttgtgaatgagagatgtgtattgctagcagtttgactgcacagttgaattagtatgctactaaggggattctgctggatgtcaaatgatgtttaagatttgatatacagtaaaaagaaattggagactatggaagaaatacagtctcaatcagataattatagatcttcgtcatcgtcggcaagcagcccggcaagtagggtgccatcaagtaactttttctacctgcgtaaacctggttcacttaggcagcccatctcttttgaggattcacctgagtgggaggatactgatattgatgttagagttgaggaaggaggtgactctattaatgtcgcaacaacaccagcttctccctctcttttaaagctcaacagtgggtgcctgccgtcttcacgtctaccggagggtgcagttattccgcggaaaattgctggggc

SEQ ID NO: 7910 - DNA, 481 bp, Glycine max
  Clone ID: jC-gmfl02220089g06d1
ggaaaaaataatgaataatagaacttttaaacctggtattgaccaaggttaataatattacattttctcttcattagtcaaagataaattcacaaaactaagagttaacaagcaaaactcgatcaaaaggaattgtacaaagtaaatggctgaacaacgttccttcccattaacttgtatctggtggggccctattattacacttgaaacatttacgcagcgatatttttctccccacagagaaaaattacaagatgaacccaaaaattcgataaccaattgccataagaaacaaaaccaacaaatttttccacttcgaattggtgtccggggagatattggacacattttggagagcttgaaacccaaatatgggccttacctgccccactgcaaaggaggttcctagggactcattctccaatagcccctgaatagagtaagtttgaaaggctatatatgacattggatacacccacat

SEQ ID NO: 7911 - DNA, 432 bp, Glycine max
  Clone ID: jC-gmfl02220089g07a1
aaaagagcgcgtgttttatttccctcaaggacatattgagcaggtggaggcgtcgacgaatcaggtggcggaccagcacatgccggtttacgatctcccacccaagatcctttgtcgggtcatcaacgtgcagctgaaggccgagcccgacacggatgaggtgtttgctcaggtgactttgcttccggagccaaaccaagatgagaatgccgtggagaaagagccaccaccacctccgccaccacggtttcatgttcattctttctgtaagactctgacggcgtccgatacgagtacccatggtgggttttctgtgctgagacgacatgctgatgaatgtcttcctcctctggatatgtcgaagcagccacccacacaggaattggtggctaaggatcttcatgcatatgaatggcgatttaaacatatctt

SEQ ID NO: 7912 - DNA, 500 bp, Glycine max
  Clone ID: jC-gmfl02220089g07d1
ggtatacgaaactttcattacattaatgggttgttgttcatagggtgggagagaaacaactatgtacagcaacaactacaaggtgggattgttttaaaaaaaaaaaaaaagcaaggtcgatatcaccctatatcacctcactcaaaaacacaattgattaaatactagggattgtataactgggcaggcatatactactaattccgggatttccaaaattggacggatactactcttttaatgccatcttatatatttgatttgaagcagtcactgataagcagcagtcagcctcgatttcatcttcaagttatgttttccaactggatggatggcttcatgacagttccttactttccatcccagaatctgaaagctatggaaatcaatctactaatcattaggcgtcaaggccattttctgaattgaactcttgatgtggctgacatttaacaacttttgcatctgcaccatcactagccatcaccgactggttctct

SEQ ID NO: 7913 - DNA, 461 bp, Glycine max
  Clone ID: jC-gmfl02220089g08a1
gaaacttatcacaaggttcactgccaagtgagaatgcagaaaatattgctggaataaagcagggtcgaattgagtcttcccatgttcataataatagcagtagaacttctactagtttccaattggataagcgggggaatcaaaatgtagttggaaagagaagcaatatttcatccagtgcaaaagaatcagaagttcagcctgtcactagagatgcatcatataatccagtttcaaaagagaattttatggagtcaaaaacacaatttggtggcaggggaaagagatatgtctttactggtaaaaattcaaacccaagatcatctggtccagctccaagggttaatcgcccagactctggaggatttatgaggaggccctcgtccgaatatgcagcgcactgaggtttcagttcgggaaaatgctgacaagaggcaggctactagtttcggttttgactg

SEQ ID NO: 7914 - DNA, 488 bp, Glycine max
  Clone ID: jC-gmfl02220089g08d1
aaataatctgcattttttttacgatcaaaagaaaacaaagatcgaccatgcttggttgatagatacaccattgcaaaacgacagtgtccatcaaagccacattaccatgctaaatactagtctccaatatcccctaccacaacctggtatggaatttgttgtagccagcaaaaatcaacaatcaacctcccaagtagaagctttaatcaaaacttttattttctgccagatcaaaaattaataacaaagcctttcctgagttttttcaaatccagctgatttttctcgctcctcatgacactgttgatgccccactaatggtctgtttagccacatatatttgctttacctttgttgaggaaaagttcttatctgatcccagagattgatttcttccttggtacactctacgatgggaccattcgcccccagaattatttctctgagaaacaccacctctctgataattaccatgtcctgaggaatgg

SEQ ID NO: 7915 - DNA, 440 bp, Glycine max
  Clone ID: jC-gmfl02220089g09a1
gccatcatcatccattccatttcatttcatttggtagctcccttttctcgttttttcgggcctcggggggttctctatttcttcacaaattaaagagggtccaaactaaactcattattcctccctgcaactctgtgttcactggttcccttgatggtgaactcttcagctcctcttcaatcatttttaaagctctgagcttaaacaaaacattggatacgacatgggttttcagaggtttctcataatatgaccaatgctcggtaaggtttctgcttttgccggttactagttgatactagtgtccaaagagagacaagggccattatctgtgtgctggctgatctgtagatcactccgatgaggtcagatatagaccttcttggttattatacttttctctaatagaaaattctcctgcttttgtgcatatgttcctg

SEQ ID NO: 7916 - DNA, 596 bp, Glycine max
  Clone ID: jC-gmfl02220089g09d1
agaaaaactaaatccttagtatttgtataattactgaaagttacaattcagcgagtgattgtatacatgaaacggccatatatacaggactcagtactagttagcagctggaggtaagccacattggcaaatcaacataacatttataattgcttagaatagtcacctgaaaagagaaaattcaaattccaaaaccattctaagatatattcatgaatcataaacatatcatcacgtatctggcatgacgttaatagtttggccttccacatatggcctaatgaaagtcctccgccaccacacctgaaaagctctctgaagattgggacagccatcaccagttttcaagaaacttgcaacccatgaaagcaaaatactctgctgatcctccaaaggcaaggcgagaattgtccttgcaattccttcctgcacaagtttcctatcgaatgacccggacccgtgctgcaaccagttatagtcattgattagaggctgtagccatgtctgcaacaagaactggcgtgtgtactttgatggcaaaacctaccctcttccaatgccaacatatagtctttctgaaatgcaactgacatgat

SEQ ID NO: 7917 - DNA, 385 bp, Glycine max
  Clone ID: jC-gmfl02220089g10a1
gttttcaaccagaccgtccttcgtcagttaactatgggctaatcacaattcaggaagcccaaaactattaaagtatgtatatctgctctctcttttttgtttgactgagcatagtattcaactcaaagatgatcactgtttctttctttctctatatctcaaaaaggaaaccgacaacacaaaggatttgcagaaagtgcagctacttagttccattttcatcctctctccattaactttcagtcaaaacaaaacaaaacctctttaggtgtgaaattccacgtgccaaaatcatctccgaggcaccaacatcggcagccacatatttctttatttattgaaggaatcagtatataaaacacctgctttctaacggtggcgcacc

SEQ ID NO: 7918 - DNA, 556 bp, Glycine max
  Clone ID: jC-gmfl02220089g10d1
cacactaaattagtattatatcttctaaatacatccctcaatcgtcattccttaataaaaaagttggtttattgggaacaggttttataaaagatattggtttcttcacctttgcgtggattgttgacaaaatgttaacatcaaatccattgagttgataatctggaataaactcagcttccaacctaagtactgctttgtctttatctctaaacaattcttcaaagtgctgcctcgtaccacttaaactccattcgtatctacctcaaaggcttaaagcctttatcatgcatcctccaacctcccattccctactccctactcttcaaatagtatttattcaaataacagcagcaaatagtaacagtttaacccataaccacataaaaattcagtgaactggactccaaataatctaaaaaagcataaacagataaattaaaataaataaacagaagaaagccttgttctttctttaaccaaagaaagagaaataatagaataaagaaataaatgcgtattccatgtcaaccagtggtggaggaggatagccact

SEQ ID NO: 7919 - DNA, 403 bp, Glycine max
  unsure (1)..(403): unsure at all n locations
  Clone ID: jC-gmfl02220089g11a1
aaaaaaattgtcatagattgttgacattaaaggcatggcacaaacacctgcaccagacaattcaattctttaatcatcattcacaacctatctaaaagcatggggcttctgtggctgcacataacataccctatctgaggagagactttttctgagcatggggtatcataaaaggtgatgattagggtagtgggtcagttttctgccgccatgaactatattcagatgtttaactccaaaaacagccacatgggccagcaaagcagctatagtgggggtgtacaatgtgtttcggactgataaaataccaataatgttttcttaaaaaaattgtacaaactctcaatgggggaactataatttgattctcgaaaatgcaatngattgtaactttaagtatatg

SEQ ID NO: 7920 - DNA, 444 bp, Glycine max
  Clone ID: jC-gmfl02220089g11d1
ctggggattgggtttatgtttgttatcttttacattgtgctttttattaacgggacaaagttgttgacgccaaagaacgtgaaggaccaaaacgccggaacctccataaacaaaggtggtgtcacccacacagacaccggcaccatatgccaaagcaacagcttagggggaggagtaaccgacacagccactggccccccccgccgtaagagcttcatgcggcccatgggggcttcttaggcggaaaaccccggaaaatggcaaaggggggaaaaaaacggcccccgaaccccaaataccccccttgaaaaccccccgagccaagaaaaaggcccccccaaaaaggggggaatgtgatgcccccccaagaaccccaggctcataaaacggggggaactgtaatgactgaagaggcttttcctcgggcaggggtaaaactcgagg

SEQ ID NO: 7921 - DNA, 591 bp, Glycine max
  unsure (1)..(591): unsure at all n locations
  Clone ID: jC-gmfl02220089g12a1
gtttctatctctttttgacgcgcacttgaagatttgaagtacttccacaaagggggtaacctttttcctccgttgaaaacgaggggaagaaggtttctcaactgcccttttcacacctcaacttcccgccttcttcacttgcttctcgaacttcttcccttttgaagctattaatactagttccttattcagtttctagatatcttaggaagaggagcacagaaaaccacccctctctctctaagcacagcctaagatgtcttactcatgatttcctgctatctcaaattgctgctacaagcaagaagaagtggagtctgattgaactctgaagtgggcagaatgcgttttgaaatcaagtggaccttgagtgcttaccgtagtgtacaattttgaattgctttgccaatattgctgggtgaattgatacagtgggaggcaatcaatagttgtaacttggatattcttaaggaaatgtaaacttgataagttggagctccaccaaagtagtaaagatacattccanagatgatgaagaaacaattgacaggcatacggngtgattctncccctacaatcgcaatccgagtt

SEQ ID NO: 7922 - DNA, 441 bp, Glycine max
  Clone ID: jC-gmfl02220089g12d1
attatattatctttttttttttttattactttggtttgggaacattttttttatctttttcaaagggggaaccatgtaaatcactgagtagattcaccgccgaatgaacccaacttgaaaaccctaaacaacagcggcaaccaatgcgtaacagacacaaacaccaacatcttatcccagggagccttctaaccctctgtaagcccggataccgcaaagggcctgatctgaacggagatgctcctaaaaaagaaacccaccaacacagactgcgaacagggccaaaaaaggagggggaaccccggaatggggaaaaaaacatcttaagagcttgccaccgttgaaagcaaggcacgaagcctgcaaaatttcccctaaaccggaagcgcccactggcattacaggacccaaaaacctcaaaaactgaagccccaagggggg

SEQ ID NO: 7923 - DNA, 498 bp, Glycine max
  unsure (1)..(498): unsure at all n locations
  Clone ID: jC-gmfl02220089h01d1
gacagaaacaaaaaccaaacttttccatatgtaaatatttttagcatagaattggataacattaacatcatatttctttgaacagattctcttgtaagcatcatttcacatgatatgataaaattacaacaaaaattctgataaacataactgggcaaaaatgaaggaatgcgctttgagcaagaaccataaccttatgtcggttattcaggggaggacattacaactgataagtacaaattgccaacccaagatgtattccaatcctttgtgactatagctcttctatctccaattcaaatttttaactcttctgatcagggtggaatgggcgtataaatgcagaattcatttgccaaacttttagtgaggctgtcacagtggcctcggtagcattgttgaacaagaacaacctagcagctccatagattgcctttngtggataaacccgagatgtcacaaccgtccttccaccttgagcaaagctttcaacaatag

SEQ ID NO: 7924 - DNA, 426 bp, Glycine max
  Clone ID: jC-gmfl02220089h02d1
ggctatatatatatatatatatatatatatatatatattatgggacaaattttcattttgaaaggccaaatatatacaaaaaacaaaaacataaaagcatttcaataacaatatatcaactatgctccctgcttttatttcttctttaacacccttttcttaatagcttttttttttcttctcttattcacgccaatgaacaatgagaatttttctccctttgcactaggaaatctataaacaacttgtagtgggttgtccaattattccttggcagtgctggttctttgccctgatgatgccattagcacagcaacagccacaataaacataaacaacatactccctagcagtatatatggccttcttgatgaatttctggactccccaaacagaaccacgccccaaaaagtgcttacaagtgga

SEQ ID NO: 7925 - DNA, 377 bp, Glycine max
  Clone ID: jC-gmfl02220089h03a1
gctaggagcactctacagagaaggcacagcttccttcctcaactccatggtgaacaacaagttcccttacactaccaaccaagtcagggacaggtttgtggcctcactcaactccaacaaggccgcagaagcacaagcccagctcttcaagatggccaatgaaggaagaatgaagcctagaccatgatgagcaagatagattattaagtaatcttaattagtttaattttgtgtgttgattcactctaagaacatttatatttaagatttctgttagtttgtatcatttaaggctcttacatgtgttcattaatatgtcttgagatggatatcatgtttcttcgaaatttaatgcaaactttatggttttgggtttg

SEQ ID NO: 7926 - DNA, 377 bp, Glycine max
  Clone ID: jC-gmfl02220089h03d1
caaacccaaaaccataaagggtgcattaaatttcgaagaaacatgatatccatctcaagacatattaatgaacacatgtaagagccttaaatgatacaaactaacagaaatcttaaatataaatgttcttagagtgaatcaacacacaaaattaaactaattaagattacttaataatctatcttgctcatcatggtctaggcttcattcttccttcattggccatcttgaagagctgggcttgtgcttttgcggccttgttggagttgagtgaggccacaaacctgtccctgacttggttggtagtgtaagggaacttggtgttcaccatggagttgaggaaggaagctgtgccttctctgtagagtgctcctagc

SEQ ID NO: 7927 - DNA, 492 bp, Glycine max
  Clone ID: jC-gmfl02220089h04a1
ggactgttcagtttgttgattggtgtccaactggattcaagtgtggtatcaactaccagcctccttctgttgttcctggtggtgaccttgccaaggtgcagcgggctgtatgcatgatcagcaacaacactgcagttgctgaggtgttctctcgcattgaccacaaatttgatctgatgtatgccaagagggcctttgttcactggtatgttggtgagggtatggaagaaggagagttctctgaagctcgtgaggatcttgctgctcttgagaaggactatgaggaggttggggctgaaggagcggaagatgatgaggaaggagaggactattcataaatgaaggttttattatcaatgtaattgtttcgagtaaaaagggtatatgcttcgttacattaccctgaaccagtattgttcgttcctttttggttttactcctgtgtgatatagttctcattattcaaactgtgaagtgatatcatcattatgc

SEQ ID NO: 7928 - DNA, 459 bp, Glycine max
  Clone ID: jC-gmfl02220089h04d1
ttttctgtgacttttttttttttttttttttttttttttttttttttttgaagcataaggatgatatcacttcacagtttgaataatggaaaactttatcacacaggagtaaaaacaaaaaggaacgaacaatactggttcagggtaatgtaacgaagcatataccctttttactcgaaacaattacattgataataaaaccttcatttatgaatagtcctctccttcctcatcattttccgctccttcagccccaacccccttataggccttttcaaaagcagcgggattctaacaattttatagagaacccaccttattccatacccttaccaacataccagtgaacaaaggcccttttggcatacatcagatcaaatttgtggtcaatgcgagagaacaccttaacaactgcagtgtttgtgctgatcatgcatacagcccgttgcaccttggcaa

SEQ ID NO: 7929 - DNA, 286 bp, Glycine max
  Clone ID: jC-gmfl02220089h05a1
gttgtcggataatagtgttctatgatataaactgttgtgaatgattagatgtgttttggtagcagtgtgaatggcagattgatcagtatgctactaatgggaatcaggtggtatggcaaatgatgaagataatttgatatacaccaaaaactaaacctgtgactaagcaacaaattcaacctcaatcagatacatatagatcttcctcatattttgaaagaatacactattgtatggagccattgagtaactgtgattacttccgtaaacacggttaacttatgca

SEQ ID NO: 7930 - DNA, 555 bp, Glycine max
  Clone ID: jC-gmfl02220089h05d1
tgtatactgcgatggccaaggagaggtggagaaaatggctggtgtgggcggcggaggtgggggggttcccattgcaaaggaaattcagcctcccctggtgccctgccagctccctgcaccccagggagcagactgactctgggaaagcgggcaggttatggcggctgatttatcgcaggcccagctgccttcccgcacctctcgagctccctgtgacctggcttcccagcaacccctattccccaaataacctctggaggggcttaatgaggggaggctggatacctccatcttccccactgccctctcctttctcccatgtccacctcttgggagtggaatttatgtcgtctccccagagactgtgctgaaagtcaagatgtctgagccaaagactccttagagatctgctagtccagaaagacaaatcagcagccctttgctgttggttttgttctgcttctcagtctgcacagttaataaaaactaatatatagacttagttgccaacaatttaaacagaaataggctgcacactaaaatctgatttctgat

SEQ ID NO: 7931 - DNA, 540 bp, Glycine max
  Clone ID: jC-gmfl02220089h06d1
aggagatttcagaccaatgtgaggtttagaaaatggctggtgtgggcggtggaggtgggggggttcccattgcaaaggaaattcagtctcccctggtgccctgccagctccctgcaccccagggagcagactgactctgggtaagcgggcaggttatggcggctgatttatcgcaggcccagctgccttcccgcacctatcgagctccctgtgacctgtcttcccagcaacccctattccccaaataacctctggaggggcttattgaggggaggctggatacctccatcttccccactgccctctcctttctcccatgtccaaacacctaaaacggaatttatgttgactcaccatagactgtgctccacgatgagatgtctgagccaaagactccttacagatctgctagtccagaaagacataacagcagccctttgctgatgtttctgttctgcttctcagtctgcacagttcataaatataccgtctccgaattatgtgccaacatttaaacagaaataggttgcacattaaaat

SEQ ID NO: 7932 - DNA, 406 bp, Glycine max
  Clone ID: jC-gmfl02220089h07a1
ggaccagcaagaatagtggttctgctacctgcaagcgtgggtttgttcagttctgttatgagcccatcaagcagattattaacacttgtatgaatgatcagaaggataagctgtggcctatgctgcaaaagcttggggtcaccatgaaatctgaggagaaggacctcatgggtaaagcattgatgaagcgtgtcatgcaaacctggcttccagcaagtagtgctctattggaaatgatgatatttcatctaccctcttcatcaacagcccagaagtatcgtgtggagaacttgtatgagggacctcttgatgatcaatatgcttctgctatcagaaattgtgatcctgaaggtcctctgatgctctatgtcttcaagatgattccaacatctgataaggggagaat

SEQ ID NO: 7933 - DNA, 408 bp, Glycine max
  Clone ID: jC-gmfl02220089h07d1
caagcaaaattcgcaaaataataatttgaaccaacaccgatgcaaaatcctattagagcaaaaatacatcgatgcaaggaccaaataacagcattacaacattcacgggcaaaaccacaaacaaaactaacagaaattaaatctaaagtagcattgttcacaagagaaaataaattcgactaagttcaaagtaaaataattcatgaaacaaatttaaagcttgtcttcaaactcggagagaggagtcatctgttccttcaagcccttccttttgcgaatgtcagtgacaagctgtgcagcttgtgatccagcctccaatgggtcagaagacatcatgtcccagtgatcaaacacacattgtgggaaggcctggcctgatgttgcagcccttaatgtgctcgagaaacc

SEQ ID NO: 7934 - DNA, 508 bp, Glycine max
  Clone ID: jC-gmfl02220089h08d1
gaacgataaaaagtcactctttcataggaattctacaatatttcgtttaattataggtgcaaatagcaaactactcgaaaagtggcagaatgtttgagaacagaataacaaagcagttagttgtaccaccatgctttgccagcttcagtaaaatgacaaacatcagatctattctctatactaatctgctcaagacaaggaaaaaaaacacttctcaactggatccatcatccaataccagatccaaatctgttcgatacatgaaatgacctggcaaaatgagttacaaattaggggtgattcagttttgcattcaatcaaagctacagatgaaaagtgggcaaaaagaaaatacataccacaagtcaccgtatttcaactatccacgttaactaaaaatattgctcgatatccaaaatcccaggaatcatcaaaatagcatatgttagcatttgattcttccttttttattgaacttcctaaatcccatacaagacactaacatcta

SEQ ID NO: 7935 - DNA, 459 bp, Glycine max
  Clone ID: jC-gmfl02220089h09a1
ctcgagccgaatcggctcgagcgccatggcatcaccagcaagaaccttctttgccttcattctcgccgtcgtcgctctcttcttcgccgccgccaatgctcaagacctctccccggctccgagtcccgatgccggagcggcgggatccgtttcgagctccgtcgccatgatcggagcttcggttgtgctgtcattgatggctatcttgaagcattgaattcgttaatttcgttgggtttgtacaaaattgattcgttttatatacagagtggtgattatgagctttggtatctatacttataggtataccggagagagattatacagtatctaatatacttattgttatttggtttaggacttagggagaataagaaggattttatcctttacattggaccccgattctttttcaatttttgttatgtaataatatattgcgattgatgatttatatat

SEQ ID NO: 7936 - DNA, 417 bp, Glycine max
  Clone ID: jC-gmfl02220089h09d1
aaaaaaggaaaaacccactataaaaaccaccaaccaccattatcttttccccacccaaacgtgaaaaaaaaacccggcccaacggaaaggaaaaaacccctccaattccccctaagccctaaaacaaaacacaatcacacttttaaaacccgaataaaccctccccgcgttccccaaaactataaacccccaagcccaaaatcccccccctgtttataaaacaactcaatttttaccaacccccaccaaattaaccaattccaggcttaaaaaaaccccccaagggcacgccaacccaagcccccaacttgcaaaccgccctcaaaacggatcccccccttccggctttggaacccgggacccggaaaaggccctgccccttgccggcggcaaaaaaaaaagccccccccggaaaaa

SEQ ID NO: 7937 - DNA, 386 bp, Glycine max
  Clone ID: jC-gmfl02220089h10a1
gtcaatactcattggattagtaaatgcttagaatcaagacattatacaaaacaacccaaaagaaacagaaaaaaggtatctcactaaatgagtaacatggctgcgccttatgtattcatacaaatcattagctgttatacaacacaattcattgggtgaaacaataacaatcaggtgagttctaattctcccttttgctttatgtctaagccaattatcactacttataactcttacttccaaccattgtgcagaatcaaactatagaagttacaactacaagtcatgaaagcaacgaagaattgcttcatctaagctgcatatacactgcactctatactttatcttcattaaaggctccatctggggaaccatgcattatttta

SEQ ID NO: 7938 - DNA, 586 bp, Glycine max
  Clone ID: jC-gmfl02220089h10d1
tcgcgatctagaactattagagactgaaataacaaaaaagcaatggatctcagagagggtcaaactcaaccaattttggatcctaaccaaccctctcatgtatatcatctggctttggatattggaggatctcttgccaagttagtatacttcacaaaagatgatgatcatttggttgatggcgaggagggaatatctcatagaaaggctttggaaaaatccaatggcagtaagcaatatcctgttctaaatgggaggctcaattttaagaaatttgaaacaagcaagataaatgattgtatagagtttatcaagtccatgaaacttcacattggaggtagtcagccacaagaaaatcctggaagtcagtcaatagctattaaggccacaggtggtggggcgtacaaatatgcagaccttttcaaggaaagactgggaatcatttttgacaaggaagatgaaatggattgtcttgttgcaggagcaaattttcttcttgaggtggttcaccaggaagcatttacctatatgggtgatcaaaagcaatttgtgcagattgatcagaatgatctgtatccctatcttc

SEQ ID NO: 7939 - DNA, 441 bp, Glycine max
  Clone ID: jC-gmfl02220089h11a1
tttgctttcttcctcaaaaccaaacatgtcgaacacatgcggcaactgcgactgcgctgacaagactagctgcaccaagggaaacagctatggtgttattgtagagactgagaagagttacatccagactgttgtcatggatgttccagcagctgagcatgatgggaagtgcaagtgtggcactaactgcacttgcacggactgcacctgtggccattaaggaatatgtatgaaaatgtaattgccatgtgtttggcaatacaaatatccaaataatgtaatcttcgcatgaataaatgtgtgtgctgttatcctacttcaggtcttggtagtcatgccatctgaataatttaaggtcctgtctagttaatatacaaccaatggtgtggcattctatggtttattagactaaacaagcgtaaatttaccgtcaataattcc

SEQ ID NO: 7940 - DNA, 458 bp, Glycine max
  Clone ID: jC-gmfl02220089h11d1
actacgcctttttccatacagttttactatactctttagacccggtttatttttctctttcgaactatcatggtttttgcccaatcagtataccgcggataccccagtacaaactcgtcatcgtcggtgacagcggcacaggaaagacaacgtaagtgaaaaggcatcataccggggaaaccagatgaatacaaccaaccatgagagaggtcatacgagattgatgacagcagcggacagattcgcttctactggtgggagacagctggacatgagaagctaggaggccccacacatggagatcatatacatgggcaatgcgcgattataatgggtgaagacactgcccgtctaacatacaaaaatgtccctacctggcaccgggatctttgccgggtctgtgaaaacatgccaattgtgcttttgaggaacaaggtcgatgtcaagaacaggcaagt

SEQ ID NO: 7941 - DNA, 558 bp, Glycine max
  Clone ID: jC-gmfl02220089h12a1
acttacaccacttgctgaacgtgtgagcttcatcacagaacaagttgccttttacactggtcccacagtcggaggacttctgaatgctacatgtgggaatgttactgagctcataatagcaatatttgcccttagcagtaacaaaattgctgtggtcaagtattctctgttgggttctattctttcaaaccttcttctggttcttgggacctctctattatgtggtggcattgcaaaccttaaagtggaacaaaaatatgacagaagacaagcagatgtgaactcacttatgctgttgttgggattgttgtgctacttgcttccaatgctgttcaaatacagtggtgcctcagctgctctcactgtagacccttcactccacttgtcaagagcttctagcattgtgatgttgattgcatatgtagtctacattgtctttcaactgtggacacacaggcagttatttgatgccgaagatgagggtgaggatggtgaggacggtgaagaagaacaagctgtgattggattatggagtggcaattgcttgtttggtaggga

SEQ ID NO: 7942 - DNA, 534 bp, Glycine max
  Clone ID: jC-gmfl02220089h12d1
caagaagaaacaagcattaatagaatttttatttctcacacaataaatacaagagattctgcaaactgaaaaagggatttcttactaaagcaaactcaaacaagaacaacttccactcatttggcatctaccgtagtagaacaggatcaaaagcagctctctgatagaacacacgtatgtattatattgaacatcttgcacagtggttcatttctcacagctattgcaacttaaaatacttgcaaagcttctgcaaattccaaactttctttttctcccttctttatggatatgacaaagtgatcagatcatgaaacaataatcaatccattgaatttgaatctgatttttggtttggatcgatgccaccattcttcatcttaggaagggacaacaaataggccaaagcctactaattaagcgcttaaaactgcattagtggttggtttaagtgtgatgttagtatcatcagcttgattatcaaagggtgctctttgtacgaagaagcatgccccaataacaatgtagcacagc

SEQ ID NO: 7943 - DNA, 306 bp, Glycine max
  Clone ID: jC-gmfl02220090a01d1
aagcaataataatatttgtcatggtggtacacttgttttgccaaataatctcttgccaagaccaaaccatccttcttttttgagcttgatgaacattatgccatcacttggttaccaatgggaggctaataattcagctcatgatgttaatattggtcaatggcaaaaccatggatttcttaaccaaacagatgtacacagcatcaatgtggttccatttccatcaacattggctctatcaactgggagtgatactactactacttctcagattttggtgtgtcctcctcatggagcaacaacaca

SEQ ID NO: 7944 - DNA, 534 bp, Glycine max
  Clone ID: jC-gmfl02220090a02a1
tttggctttgagaccattcctgaagagtgcgttgaagcaacaaaggaatacatccatggcgaacaatatagatcagactccaaaacagttaaccaacaagcttacttttatgccagagacctcgaagtccatcccaaggacacatttgtgttcagtatagatggcaccgtactctctaatattccatactacaaaaacatggatatggggtggagaaatttaactcgaccttgtatgatgaatgggttaacaagggcaatgcaccggcactgcccgagactcttaagaattacaacaagctggtgtctcttggcttcaagattatattcttgtcaggaagaacactggacaaacaggccgtaacagaagcaaacttaaagaaggctggctaccacacatgggaaaaattaattctcaaggatccacaagatccttccactccaaatgcagtttcatacaaaacagcagcgagagagaaactgataaggcagggatacaacattggtgggatcattggagaccaatggagcgatc

SEQ ID NO: 7945 - DNA, 538 bp, Glycine max
  unsure (1)..(538): unsure at all n locations
  Clone ID: jC-gmfl02220090a02d1
aagaaccggaagaggaaaaactagaaaagatcccaacagtgagaagccgagcgattttgtttaccttccaagagatgaagcatttggtcacttgaagtcatcagattttctcgcttatggaatcaaatctgtatcccaagatgtcttgcctgtcttgactgatgcattcgatggaaatattttgagccttgagtttgataattttgctgaagtgcacaaactctatgaaggtggagttacactacctacaaactttcttagcaagatcgcccctataccagtgatcaaggaaatttttcgaactgatggcgaacagttcctcaagtatccaccacctaaagtgatgcaagtggataagtctgcatggatgactgatgaagaatttgcaagagaaacgattgctggtttaaatccaaatgtcattaagattatagaggagttcccactaagtagcangctagatacttcaagcctatgtgatcatacctgtantatagcanaagaacatttggagcctaactangtgggctcactgtga

SEQ ID NO: 7946 - DNA, 576 bp, Glycine max
  Clone ID: jC-gmfl02220090a03a1
gcaggtttcttgtcttccggtttctggtagatcaccacttgggttgggagaaaagaacagacaatggaagcgagttgagagctacctcggttgaacatcatcgaatcgaataatcacttttacacatgacttatccttctattccgatttaagcccctaaacgaactatcgaagccacttcaaaaactactcttagattgcttcgatggtcgatcactacaacaagctggttaaactagcggcgagggctttctacgatgatctaacgagtaaaggagagaatcaacccaaatcgggaaggagtgataacagaggaatcgctgtggtgattctcgacgctctcacaaggcgacaatgggtccgagaagaagacttggcaaaagatctcaaattacacacaaaacagcttcgccgaactctccggttttttgaagaggagaagatcattactcgagaatataggagagagacagcaaaaggagctaaaatgtatagtgctgctacagctgctacagttgatgttcagctgactggaaaagagggagaagacacgtcaagtcgcacacgcactcttac

SEQ ID NO: 7947 - DNA, 480 bp, Glycine max
  Clone ID: jC-gmfl02220090a03d1
actcacgccaaataattcacacatttggtgtttattttttaaattatacaccatgagatccggactaacgcggcaaatcaggcatgctaaatacagttttggctaccaggaatgaaataagacaacttctccaggaatgaaaaaaaaaataaaaaatcttaccatgcattatttaaatgtgtatggcaacgattattgcattggtaaactaattcaattggataagtgatgccttacaaagaaagccattgtagcacgcattcagtagtacaacaaagcattagattttacttcccccagaaacaccaaattaaacttctggtagaaaaaatatatattgtaatcgagtttcccaccgttgaggccgccggaaatataactgaatagtagcattattgtgaggagacatcagtcatataactgctgccatttgttgaatataagtatatgccatcaaaaattatattttgtgaaccttac

SEQ ID NO: 7948 - DNA, 588 bp, Glycine max
  unsure (1)..(588): unsure at all n locations
  Clone ID: jC-gmfl02220090a04a1
gtccttacttatatgcggatgatctgattgaagtcttgaagaaaaaacatgcttctggaacgtataaaaacctagtattttatctggaggcatgtgaatctgggagtatctttgaaggtcttcttcccgaagatatcaatatttatgcaaccacagcttccaatgcagaagaaagtagttggggaacatattgccctggggagtatcctagtcctcccccagaatattcaacctgcttgggtgatctgtacagtgttgcttggatggaagacagtgacagacacaatttacgaacagaaactctgcatcaacaatataaattggttaaagagaggactatatctggagattcatactatggctctcacgtgatgcagtatggtgatgtacggcttagcagtgatgttctcttccattatttgggtacagatcctgctaatgataatttcacttttgtggacgaaaactccttatggtcaccttcaaaaccagtcaaccaacgtgatgctgatctcatccatttttgggataagttccgcaaagctcctgagggttctctcangcaaaatgcagctcagaaacaagttt

SEQ ID NO: 7949 - DNA, 543 bp, Glycine max
  Clone ID: jC-gmfl02220090a04d1
tgttttttttttttttttttttacaaataataaatacaatgtcgccattaatattaaacaataactttgacatcataaattcttccaaaataattatacaaaagtgacaagggaaaacccgatctgccagttgcctactgaataaaaacacacatcattactatgtgttggcatacacgcatgaccttgtgccttgtcatgagtgaatattccaaagcaattggtcctttatgcctccttaatccttatgccacaaaatgctatcatcccttgaaagttgtaattgcttcttcagaaatagatttatacaaaggtagttgcaatatctatttgccaaactaaaaatgtaaagacccttcttcccaatcctagtagtgtcccaattgtatttacaaaggcgggacaaaatatgtatatacaagtacaatcatatagcataatgtaacaataatcatactttggtctttactggtgcacattacaggaattattatgcactgaaacccctttgcagagaactccaaggattggaaggaatagaga

SEQ ID NO: 7950 - DNA, 564 bp, Glycine max
  Clone ID: jC-gmfl02220090a05a1
cacaacgcaaccgttgtccctccccttccgccgaggaacacaaacaacaacctcaacttaacgcattgtgtgcatgatggaggagatgaaagtttctcggcgggtggagtggtggcagaacatgatgttccccgttcggagggtttggtttgtcgttgccaagcgcctcggcattcgcaaaactgggttactgaagctaagtaatgatgtgagggcatgcgaatatgaggacattcaagtgatgtgggagatactaaacagaaacgaatcagagtttggtcgttcttctagcactaggaaaggcaacaacaagaaggggcattgctggaaattattgaggtgggcaaggtgtgctccatgcatgtgccgcacatgatcatgattgctgtgtacgtgagaagaaaaaaatccaacctatgtgttggtgtggtttttgctgcttcaatcatgaataaaaaaaaagggttctgaagggtttgtgtagatcacggttcttctttccttttgaatcaaccaactcaaccatatgtaaatatcaactgcattcaccaagttcgatgtgtg

SEQ ID NO: 7951 - DNA, 464 bp, Glycine max
  Clone ID: jC-gmfl02220090a05d1
ataataactacacatatttatataccttcttctgcagaatgcagatatatagttttctgatacaaaaaccaagctggaattaagcctgagatagacacgattcatggatctctaaaagcaatacatgaacgtctggttgaacacataccaagatgatgatgatgatgatgaaacacagcagaaactacacatacaacaatttcgataccacactaattaagcacatggatggagtatgagatggtcacacacatcgaacttggtggatgcagttgatatttacatatggttgagttggttgattcaaaaggaaagaagaaccgtgttctacacaaacccttcagaaccctttttttttattcatgattgaagcagcaaaaaccacaccaacacataggttggatttttttcttctcacgtacacagcaatcatgatcatgtgcggcacatgcatggagcacacc

SEQ ID NO: 7952 - DNA, 361 bp, Glycine max
  Clone ID: jC-gmfl02220090a06a1
gcagtcctcttcgctctccgctcacgaaaaacacaaatctcgcgccgattggataaagcagctcaacgatcctctcgaggccatcgatcccgagatcgccgacataatcgaactcgaaaaggcgcgtcaatggaaggggttcgaacttataccttcggaaaatttcacgtcgctgtcggtgatgcaagcagttggatcggtgatgacgaataaatacagtgaaggatatcctggtgctagatactatggaggaaacgaatacattgacatggctgagaccttgtgtcagaagcgtgcacttgaagcttttcagctggatccagcaaaatggggagtcaatgtgcaatcattatctggatcc

SEQ ID NO: 7953 - DNA, 513 bp, Glycine max
  Clone ID: jC-gmfl02220090a06d1
aagaaatcaacttttgacatggacaattctgaatacatgactgaggatcgcaaacaacaggtcctaaaccaccaaatagaagcataatgttgatcacttcacagtttgaataatggagaactatatcacacagcaggagcaaaaacaaaaaagaacgaacaataatggttcagggtaatgtaacgaagcatatacccttttaactcggaaacaattacattgataacaaaaaaaagccttcgattatcaatagtcctctccttcctcatcatcttccgctccttcagctccaacctcctcatagtccttctcaagagcagcaaggtcctcacgagcctcagaaaactccccttcttccataccctcaccaacataccagtgaacaaaagccctcttggcatacatcagatcaaacttgtggtcaatgcgagagaacacctcagcaactgcggtgttgttgctgatcatgcatacagcacgctgaaccttagcaaggtcaccaccaggaacaac

SEQ ID NO: 7954 - DNA, 295 bp, Glycine max
  Clone ID: jC-gmfl02220090a07a1
tgtgtttcgggcaatagctgtgtagctactgacgtcgcatgtacgcgtgcacgcgcccgtgagttcggcttctgcctagtgtattgccgttctaaattttatattgtgtgcccttttctatgtattaaccttggtattggatttttctacgaaaatgggtgatttacattggaaatgaaagatgcctagttccaaaacaccaggactctttctctgcgacaacaagtccttaccctctttggtactaccgttcgggaccacagatatctatgccgtcgcttctttcgtttgcgcc

SEQ ID NO: 7955 - DNA, 453 bp, Glycine max
  Clone ID: jC-gmfl02220090a07d1
catatccatttggtattatcgttattatcccacaggtatccaagaaaagtcttggcggcatccaagcttggaaaatacgttggttcaaggaaaatctgagtcaacgagtcagccgaatcgcaactcaacccaactcggttaccgttagcctctgaacttcccatcaccaccgtcaacacctgcttatacgcgtagaagaatctcttcatcgccgtctaaatcgcctgcattgcctgcaacaagtgaaccttctcgaactcgctcttcgaaacgtagagcttcatcgccgcctcttgaatccttggtcctccctttggatccacctacacctgcaatatctgcggcaccttgtgcctcagatctctgcacatcttcgtcagttccactaactcattcgatctgaagcagaacgatgccgtttcgccgctcgaggatttcaccgagagttgattc

SEQ ID NO: 7956 - DNA, 473 bp, Glycine max
  unsure (1)..(473): unsure at all n locations
  Clone ID: jC-gmfl02220090a08a1
ctaactgctactcgctcatcccgtggaggtttcgctctctcagtttcttttccccaaattggtttttcatctaacaatttactttgcagaaccgtaaccctaaccccttcccctaccttgtaaccttcctttcgatccttcacctcgcagataatgggagaaacaaaggacgaagcatacgaggaagagcttctcgattacgaggaggaagacgaaaaggcccccgactccgccggagctaaagtcaacggcgaagctaccaagaagggctatgttggaattcacagttcgggattcagggacttccttctgaagccagagcttcttcgggctattgtggactcgggatttgagcatccatctgaagtgcaacatgagtgcataccacangcaattctcgggatggatgtaatttgtcaagcaaaatctggaatgggaaagactgctgtctttggtctctctactctgcagca

SEQ ID NO: 7957 - DNA, 519 bp, Glycine max
  Clone ID: jC-gmfl02220090a08d1
gcgggccgccctttttttttttttttttttttttttgagagcaagaaacaagcttacttcacaagattatacaacttattagttaagcaaaaattactcatgctctcgtagaggtatttccagatcatgacagagacaacgcaatccggaagcaagacttaatagaagtactactaagtaaaaaataaaataaaagcccttcatagttaacatatcctttaactttgtgttttcttgaatctaaagcacaataaaaacattaaacacccatagtggatactcaaaagtatagtgaactctttactttgccaatgatccaagctcatggctcgaagttctcatgttcatcttcaaactcctgctggttctggttcccgttgtagttgccacctctgttgttggaccagttgttagtgttcacttcccttgatgagtcaccatagtttggtggattgtacttctcggcggcaacgtcatgaaagtattttccacccttcaaaaaccttgtgtcactcattc

SEQ ID NO: 7958 - DNA, 530 bp, Glycine max
  unsure (1)..(530): unsure at all n locations
  Clone ID: jC-gmfl02220090a09a1
agtctgcggccgccctttttttttttttttttttttttttgtgctcaaaaagagctctgaaatctgaagttaatattcaaatgatcaaagttgaaaaaaatgcacacacatgacctctatttatagcctaagtgtcacacaaaattggagggaaattcaaatttcacttgaatttgaaattgaatttgtggagccaaactttggagccaaaatttcactaattatgattagtgaattttagttatggttcagcccactaatccaagatcaattccaagattctccactaagtgtgcttaggtgtcatgaggcatgaaaagcatgaaggacatgcacaaagtgtgactatatgatgtggcaatggggtgtagtaagcaaatgctcacctncccctctaaaatttaattggattgggcttctaccaattcaattaaatttatttccaaccacacacatcaaatatccacttagtgcatgtgaaattacaaaactacccctaatacataaactagtctaggtgccctaaaata

SEQ ID NO: 7959 - DNA, 476 bp, Glycine max
  Clone ID: jC-gmfl02220090a09d1
cactcaataacaactaaattttaggtaattcacttgtatagaagaggttagaattcctaccaggtatacagtagctttctcttagtgcaacctgctcatggagtacaatttgtagatccttgaacaagttattctgtataaatcgattggtgtcaaaatttacaaatcaaaaacaaataaaagaatctgcatcactacttgtttgattttgctgagtagctaaaaattcagttaaagcatttcaagaaaatgtctgcattagtccctttccttccagtaactgttggaatcatgagaactctaacccacattaggtaaactacatcttgaagattctgctccacccaacaaccccatgggactagagattatctttaaaccactttaaagctccatttgccacagatccagcaaagtccttcaatttattccatacatcgttttcatcttctgatttttcagttttttcttcgact

SEQ ID NO: 7960 - DNA, 189 bp, Glycine max
  Clone ID: jC-gmfl02220090a10a1
agctcaaaatgactttttgcattccaagcagcacagcgctagtatagcaaacattgctaaacgtttatcatgttatcatgaccaaaaatgctacgatattctccacggaggtataagctcatatagctaaccacctcaaaaagccaaaaactcatttcttataatgaatggagtaaactcctactcagt

SEQ ID NO: 7961 - DNA, 510 bp, Glycine max
  unsure (1)..(510): unsure at all n locations
  Clone ID: jC-gmfl02220090a10d1
ctcagacaacccctcatttttatttacagaagcagcaacaatgtaaaatgggaacggccatggtggggaccgaatctaatccgccaaaattagctagcaattgtctctacatgtaccaaacataacccagaaaaaacacctcccaattaaataaatccaaacaccttctaccccctaaccaaatatcccttctatccctacaaaactgctggctgctttttagctctctctgaaacagcctaaaaaacagattaattttttaagaaaggaacatttgtcaatcacaagaattgcatttacaatcaatttccctcaatcaagctcttcaatctattacgggcctcttcagacaaactgcaagctttgaatcttctccttnggggtggacatgattcaacaatgctttcaatgggcgacaagcatacaacaattacagtgagattatctgatgtatttaggcgcaatgcttccttgactagctctccggcacattgctgtgggtcatcatgc

SEQ ID NO: 7962 - DNA, 585 bp, Glycine max
  Clone ID: jC-gmfl02220090a11a1
cttatttttactggattgcatattgtaaatagtttcattaacccgttgttctactttcatcaaccagaagaactaactcggcgaaaaaaaacccaaataaaaaggagacagacatgagcgattatctcaaagagaaaggaggtcccaggttggttatcatgggagagaccaaacaacttgttacccttttgacacgatttcaagcggcaatgaaaatgatcaaggacatagtggaaaaaagtagatcgagtaaaaagagcaaacgattactgaggaaaaccctcaagaatatgactcctctgctgcaggaaatcaatcaatacaatgaacacttggaaccaccccgagaagaaatcaacactcttatgaaagaaaaagatgcagtggaagagcttgtgtgctattcctgctccaggagtatttggtggaccaaatttctctcttggcttccgctctacggggacggactttggcataacaagaataatccccttgctgcagatgacaaccaagttaagtatatcaaaaacacactgtatgaggtgaaagaggttcttgagcttctagacatagagaatttcagca

SEQ ID NO: 7963 - DNA, 538 bp, Glycine max
  unsure (1)..(538): unsure at all n locations
  Clone ID: jC-gmfl02220090a12a1
cacaaggcagaaagcaagctcatcctagagttttaaaaatggcagcagcctcctccatggctctctcttccccatccttggctggcaaggccgtgaagctgggcccatcagcccccgaagtcgggagggtcagcatgaggaagaccgtcaccaagcaggcctcctccggaagcccatggtacggcccagaccgcgtcaagtacttgggcccattctctggcgagcccccgtcctacctcactggcgagttcccaggtgactacggctgggacactgctgggctttcggccgacccagaaaccttcgccagaaaccgtgagctcgaagtgatccactccaggtgggccatgctcggggccttgggctgcgtcttccccgaactgttgtcccgcaacggggtcaagtttggagaagctgtgtggttcaaggccgggtcccagatcttcagcgagggtgggctggactacttgggcaacccaagccttgtccacgcccagagcatnctcgccatctgggccacccaagttatccctaatgg

SEQ ID NO: 7964 - DNA, 343 bp, Glycine max
  Clone ID: jC-gmfl02220090b01a1
tgttttctggatgttaagggatactgtcgcgaagagaggagccacgaagggcttggaatgggtggttctcttgtctaccaaaaatttgccaagacttgtgactgcggttcacctagatcaactctgaagtgctggaaagaggaagatgaagaagagtagttttcttaagtgtctttattatgtccttgcgaaaataagtccggttttccagacagtgattgcttttctttggtgttctttcccttttatgttagaccattgttagggcgtttggaccttttattgttctactattaccatttgaacatcgaatggattttaataaatcactttgtatgcgtgc

SEQ ID NO: 7965 - DNA, 315 bp, Glycine max
  Clone ID: jC-gmfl02220090b01d1
ggcagaaatcctttctatgttgcttaagaagttacctacttatagcaagagaatctagctctattggttgtgtaaggtaaaaaaaaaaaacgcataaccatgtcaaccaaattgattgaaacaagccttagccttatggtatggcttgtaattgcaacatcagcaatagcacaatctgataaccccccagttcttgacacagaaggccaccctcttgagcctggcagagattactacatcacaccagcggtaacagacattggaggccgtgccactatagtagacaacggcacatgccctttatttgaggtcaag

SEQ ID NO: 7966 - DNA, 590 bp, Glycine max
  Clone ID: jC-gmfl02220090b02a1
caatttttgttcattcagagctttactcactcctttgcacgtctcaatctgagtcttcacttcattgtttttgtgattctctgtctcaataatggcagcacgcttgcaatctgcagctgtactttgctggtgttccctatagggaaagatgaaattgaagtctaagaaaggatggaaatctattgtaccacttcgtttgaaaggaaaatcagcaacccattttttgttatttcgcaaagtcaattctgctggctatggacctggcaaaacaccagtttatctgaatgtgtatgacatgacacccatgaatggttatgtgtattgggctggtcttggtatccatcactctggtgtagaagttcatggtgtagaatacgcgtttggagctcatgactacccaacaagtggtgtttttgaggttgaacctcaccaatgcccaggcttcaagttcaagaagtcaatattcataggaaccacatctttggattctactcaggttagggagttcatggaacgccagtcagcaagatacaacggtgacacatatcacttaattgtcaagaactgtaaccacttctgcaaagacatct

SEQ ID NO: 7967 - DNA, 410 bp, Glycine max
  Clone ID: jC-gmfl02220090b02d1
gtgacaagttccattctgagtttcctagattcctgacagggttttaaggttgtgggtacttgatgttgggaaaaaaggtgtggcctttactctcattggagaatgtctgaatctgcttggcactgtcgttgaagttgaaccatgaaaaaattagcttttataagaggcagtaatgtgcctttgggaatgtgagcatgatttgcaaatggggttgctctgaatagtttcacaagagctctcagcctctcaagaaggaaaaaaaaggccttggttttttttttttggagaaagtgagaatgaaaaaagggcaagggaatttcttttcaacatttttttttattccggaaaaaagtttttttttttcctttcttctgaagagtctttgatagttatggaagattttatatgct

SEQ ID NO: 7968 - DNA, 566 bp, Glycine max
  unsure (1)..(566): unsure at all n locations
  Clone ID: jC-gmfl02220090b03a1
aagaaaggcaagtaccatttttatcaatcttatcacccttttgcattgcacctacaaaagggccaccccttcttcccttctcaacttgtacttcatctaattcaatactacaacttctgaatcacttagttgaattgaattatcttcaaaatgagagaaatccttcatgttcaagctggtcaatgtggcaaccaaattggaggcaagttttgggaggtgatgtgtgatgaacatgggattgatgccactggaaattacgtaggcaattcccatcttcaacttgagagggttaacgtgtactacaatgaagcaagtggaggacgctatgttcctcgagctgtgcttatggaccttgaaccagggaccatggatagcttgcgttctggtccttttggaaaaatattcagacctgataatttcgtgttcggccaaaatggagctggtaacaactgggctaaagggcattatactgagggagctgagcttattgattctgntcttgatgttgttcgaaaagaagctgagaactgtgactgcttgcaggggttccaaatttgtcactcact

SEQ ID NO: 7969 - DNA, 466 bp, Glycine max
  Clone ID: jC-gmfl02220090b03d1
gacgagtacactgcggccgcccttttttttttttttttttttatcaaaacaaaatccgtaaaaaatactactcaccccacatctcatatgtacctagcattaactatacaaacacatcctttcctttcctttcccttaccatcaccatatggcatataccaagtgttttgatttgcatttctcatgacatcactagaaatcattaaatagtaataattttgatcaatcttcacattgcatctaatcaaaatttgttattgtatattaaaaattttgattaatgtaacagtgaaaattgagtcgaccatgatgacgtggtaatctagattatataataatttcttccggagaggctttaatgaggctctcatgcagccatggcttcctcgtcatcgatctcgttctcgccttcttcgctggcggcggcgtcttgatactgttgatactctgccaccaagtcattcat

SEQ ID NO: 7970 - DNA, 446 bp, Glycine max
  Clone ID: jC-gmfl02220090b04a1
agcccttttcattttttttccctctattaacttttcatttacaaaccatttatttaccccacagttccgggtatatttttttcttcttttccttttctctctttatccacctcacaaatctctatccctccaacccctaaatatcccccgactaccacatccttcaacaaaacaaacatatcaccaaccacacacactctatctctcacaccaaacaaaacgctcactggatcaattcacacagctatagcaactaaaaatactagcaaagcttccgcaaaccccaaactaccttttcctcccttctttatggatatgacaaagtgatcagatcatgaaacattaatcaatccattgaatctgaacctgataatccgcccgcaccgataccaccattctccaccctaggaagggacaacaaataggccaaagcctactaattaacc

SEQ ID NO: 7971 - DNA, 481 bp, Glycine max
  Clone ID: jC-gmfl02220090b04d1
tgccgtcaagacactgtccgtattattcccgagtcgacgagtctactactccggggccgccctttttttttttttttaatgtcttggaaacatgcatttatcataacagttactatacctagagcttaacagtaagagtaaccttgtttgaacgaaaagtgtgaaggtgacagcctccataaggaagacgaaattcacaattcatatgtataaatcagcaaaccttgctaggaaattaagcacaaatttcaggtcaagtcagcagctttcgtgcaatagtaaagtcctgatcaacttcctttctggatgcttcccaaagtcgatgttcaatccccaatttcctcagttcagaaagtccctgctcagcatcaacggcatcatgtgaggtaggtgaatgcccacttcgaccaatccaaaaccgaagacgttctttggcaatgtcctccttttaccatgagccttggctcttctccaaaaatat

SEQ ID NO: 7972 - DNA, 578 bp, Glycine max
  Clone ID: jC-gmfl02220090b05a1
gcttctccttcttttgggaaaagattaacaataaaagtgtggagtactgttgatagcaaagatgtttgggatcttcgacaaggggcaaaagataaaggggacagtggtgttgatgccaaagaatgtgttggacttcaacgccataacctccatcggtaaaggtggtgttattgacacagccaccggcatcttaggccaaggcgtcagcttagttggtggagtaattgatactgccacttccttcttaggccgtaatatctccatgcaattgatcagtgctactcagactgatggcagtggaaatgggaaagttggaaaagaagtctatttggaaaaacatcttccgaccttgccaacgttgggagcaaggcaggatgcgttcagtattttctttgaatgggatgctagttttggaattccaggagcattttacatcaaaaactttatgactgatgagtttttcctcgtcagtgttaaactcgaggacattccaaaccatggaaccattgaatctgtttgcatctcatgggtttacaactttcaggagtacaaaaagaatcgcattttctttgcaatga

SEQ ID NO: 7973 - DNA, 518 bp, Glycine max
  Clone ID: jC-gmfl02220090b05d1
acaaagtgaaagtgagaacacactttattatatgaaaaccgagagcatccaaatacaatagtgcagaagttcaggcaataattacgcatagacatgcataaagtctatgttattcagaagtacaacatagataaggaaaccacaaactctttttaattagatagagatactgttgggaattcctttgaaagtcaacccttcctcacttgaacgatggagcaaagtgtatggcagctgaactggcccagtccggtttctcagacttggatcactgttccttgcattgatttttccttcaattccagtcagtttgcttccaaaccttttgaaagcttctaatgccttcttatcagtagtccaatttggagtctccctctctccaaggtatatctcatcagaagcatgccttgacaatatctctatcactgaaagatcaataagggtctcaaacttgggtgtgattgttctcagataagccttttgaggattcttcaccatctcatcatactctggggttc

SEQ ID NO: 7974 - DNA, 341 bp, Glycine max
  Clone ID: jC-gmfl02220090b06a1
tccatgttcatatggcactggaaaactccacaaggagggaactaaggcagaggaaacttagaggaggaggcaaatgtcaagcctccaaccccattgacgcttgctggagatgcaataaagactgggccaatgaccggttcaggctagccaagtgcggcaaagggttcggaagacgggccaccggcgggctcggtggtcccatctatgtcgtcaccgataattccgatgacgacatggtgaaccctaagccgggaactatccgtcacgctgtcacccaaaaaggccccttgtggatcatcttcggacacagcatgatcatcagtttgaggcaagagctgatg

SEQ ID NO: 7975 - DNA, 495 bp, Glycine max
  Clone ID: jC-gmfl02220090b06d1
cgattaattatggaaaggtagctaggcattaatctgcgttaaaaacagaatccattaatagaaaaataattgtccaacttcaactagctcaaacactcgagtctccaaaaacaggagaagatctacacccctgaagcaaataatcttttccttttcttaaaaggaagaaaaaagaaaatcctgaaaacagagtgcacctaaaatgaaactaagcccaaaatttatctggggggatgatgatactaaacagggcgccactttaaaataaagattcaaccatttcaagtttctcgccttggcctccgacgcgcagcattagatgcttcctctttctggttctccttctctttggttccttcattctctccactaccttggttattggaagcttctgtgcgttctggtttcttctccacctttgcaggtttcttgccaccaaatatgagtctgaagaaaattgacacgaagacaaccagaacagctacaagaattcca

SEQ ID NO: 7976 - DNA, 289 bp, Glycine max
  Clone ID: jC-gmfl02220090b07a1
aacaacctaaacaaaggggatgttgcccgcaaagaagacgtggaaagggtcctccgcggttccgactgcgtattccaccttgcggccttcggaatgtcaggcaaagagatgctccaatttggtcgcattgatgaagtcaacataaatgggacttgccatgttatcgatgcttgcctccacctcggcatcaaaaggcttgtctactgtagcacaaacaatgttgtctttggcggtcaacagatcatcaacgggaatgagacattgccctatttcccaattgatcaccatg

SEQ ID NO: 7977 - DNA, 474 bp, Glycine max
  Clone ID: jC-gmfl02220090b07d1
tagtcggcggccgccctttttttttttttttttttttttcaggaatgacccaataacagtcgttatgatttgtatatatcagaataacaaaatatacataaactgtaatttttgtttttttaccggccacaatgataagattttatttctatcataattctatgtgttttggaaacacattgggcaccaatacagaataatcaaaagggggcttaatttatccctctctcttttcaagccttctccttagatggaactgttccatctgttcctgcaagcattgcatatttgctcttcctagtcaaattggtgcactcaaatcccaaagtccctgcaagaaccctttgaatgtagtttgcaacttcgatcgctgatttccctccactgcatgtgagctccttgggaagctggttcaagaaagtgatctcatatgttggcataggattcatgaacacaaagtaggggtccaacaac

SEQ ID NO: 7978 - DNA, 446 bp, Glycine max
  Clone ID: jC-gmfl02220090b08a1
accatcaaaacaaaaaacagtactcatcaaaaacaaacagcaacgaaaatgttaccgccgatcaagaacccagttttgaaggctacggctacatgaaatcggcggacacttcaaaatataactggtaaaacaaacacctaagactctgcaaagataaactactgtaaaggaacaagtttttttgaaaccacgttgatgatcacatgtgctagcaaaattgccaaaatgcaatcacttcttcttggcggcagcctttgtgaccttggctccggtggggtctttcttctcaacactcttgatgactccaacagctacggtctgacgcatgtccctcacagcaaaacgaccaaggggaggatactcagagaaagtttcaaccaccatgggcttggttggaaccatcttaaccataccagcatcaccattcttcaaaaatttgggctcct

SEQ ID NO: 7979 - DNA, 334 bp, Glycine max
  Clone ID: jC-gmfl02220090b08d1
cctaataagaaaacaaataattccaattcatatatgaacatttttgcctccttatttcttgaaaatgtggaattggaattccccgaggaattccgatctcatttcctttggcttcaggataggcctaataagaaaacaaataattccaattcatatatgaacatttttgcctccttatttcttgaaaatgtggaattggaattccccgaggaattccgatctcatttcctttggcttcaggataggcctaataagaaaacaaataattccaattcatatatgaacatttttgcctccttatttcttgaaaatgtggaattggaattccccgagg

SEQ ID NO: 7980 - DNA, 465 bp, Glycine max
  Clone ID: jC-gmfl02220090b09a1
cgcgctttagagtacctacatgaagtttgttcaccatctgttgttcataagaatataaagtcggccaacatattgcttgatacagattttaatcctcatctttctgacagtggattggcaagctatattccaaatgcaaaccaggtattaaacaataatgctggatctggatatgaagctcccgaagttggtttgtctggtcattatactcttaagagtgatgtttatagcttcggagttgtcatgttggaacttcttagtggacggaaaccgtttgatagctcaaggccgaggtctgagcaggcgttggttcgatgggcaacacctcaactccatgatatcgatgctttggctaaaatggttgatcctgcattggaaggactataccctgtgaagtccctttctcgatttgcggatgttattgctctatgcgttcaggcggagccggaattccgaccacctatg

SEQ ID NO: 7981 - DNA, 476 bp, Glycine max
  Clone ID: jC-gmfl02220090b09d1
cattcaaagtgcagggagctgctatgcctatatccctgaagccgatactgatactgatacatagctagctagcctagctgtagatcaagagaaagaaattgaaagcattacaacttagtgcaagatttagataagcctataattaaaatcaacttattatcatatcataaccaaccttcaaaatgagaatcaaacctcttgaacttcaacagcactggcaactggtttaacttccttgagttcttccttaacttgtttcacttccttgtgttcttcctccttttccttaacttccttaactggctcttcaatctcgaaagccgagacggggaatgtcctgaagagccccgaaggagtcttgaaagtgatcttgccagtgggaggatcatcaacaaagatctcactgagtgtgatccaaaccaagagcttcttggttttcacaccagtgagctttttgatcttaccaacctcaacat

SEQ ID NO: 7982 - DNA, 269 bp, Glycine max
  Clone ID: jC-gmfl02220090b10a1
gggacctaggaggtcagcctggtcttcgctcaatctgggagaaatattatgaagaggcacatgctgtaatatttgttgttgatgcttcttgtccgtcacgctttgaagatgcgaagtcagcactggaaaaggtgcttctgcatgaggatctacaaggagcccctcttttgatattagctaacaagcaggatattcctgaagcagtatcagctgatgagcttgctcgatatttggatttaatgaagctggatgaaagagtttccatgttt

SEQ ID NO: 7983 - DNA, 506 bp, Glycine max
  Clone ID: jC-gmfl02220090b10d1
gaggcagcaaccacgcgtctgtaaattgctattcaagcattgaacattaaagtagaaatttcattgttttatctaacttcatttaccataccagttcccctaataaaacatgaacacataaactgaaattaatgcctacttttgtggcgaaccaatataccaacaaggtgcttaatatttgttttttctgctgctatgctcatcaagccaagatataatatcaccaagcacgtgaaatatagtttcatcaggttcaccttcaagtagagtatggaaagcatccttatagaggcagagtttcttgtccttcactttagctttctcatacaaagccttactagctgatggatcagtaattatatcagcctctccatgcatgatcaacaatggcagagaaacctagcaattgaaattcttcagtggatttcattgacacacggaaaattccaccagaaacatgtgcaatagctcaagaaagtgttaccttaaaataacatgtgcaatag

SEQ ID NO: 7984 - DNA, 476 bp, Glycine max
  Clone ID: jC-gmfl02220090b11a1
attccttcaccacctcagccgagcgggaaattgtaagggatgtgaaagaaaagctttcttacattgcccttgactacgagcaagaactggagacagccaggaccagctcgtctgtggagaagagctatgagttgcctgatgggcaggtcatcaccattggcgatgagcgtttcagatgtccagaggttctgttccaaccatccatgattggaatggaagcttcaggcattcacgagacaacatacaactccataatgaagtgcgatgttgatatcaggaaggacctctatggtaacattgttctttcaggaggaacaaccatgttccctggtattgctgacagaatgagcaaggaaatttcggcattggcacccagcagcatgaagatcaaggttgtagcaccacctgagaagaaatacagtgtcttgatcggtggttctatcttggcatctcttagcaccttccagcagatgtgg

SEQ ID NO: 7985 - DNA, 480 bp, Glycine max
  Clone ID: jC-gmfl02220090b11d1
ttttttttttttttttttttttttttttttttttttttttttttttttttttttttttttttttttttttttttttttttttttttttttttttttttttttttttttttttttttttttttttttttttttttattttttaaaaaacagatatccacaaaaaacaaaaaaaaaaaaaagggggaccaaaagaaagaaaaaaaaaaaaaaaaaataaaaaaaaaaaaagccccccaaaaccaaagggggaaaaaaaaaaaaaaaaaaaccccggggggggattttataaacaaaaccaaaaaaaaaaaacccccacacccccaaaattttttaatgaaaaaaagacactattacccccccacccttttgaaaaggggctaaaatattacaaaaaaaaatccccccccaaaaaaggggggaaaaaaaaaaatacccccataagggggggaaaaaaaaaaattttccccccacggagttttt

SEQ ID NO: 7986 - DNA, 507 bp, Glycine max
  unsure (1)..(507): unsure at all n locations
  Clone ID: jC-gmfl02220090b12a1
aagttataaaatttaactcaacagaaccactaaacaggattgagttctggtaacaggtaagattcttctcctaacaagacgaaacgtattttacgcaacacataaaaataaataagaaaattgttttagtgatctatgtcgccattattatccatagctagctagctagctaaagggaatttatgtgggcgttgactgtgccaacagggatcatagggtgagggtctcgctcatccaatcattcctttgttatctgcactagtgagtgtcgtcttctgataaaacgacgtcgtcgtcacacagccttggttagaagaagaagaagaagaaggtatgggagacatattctacggcaacgatgaccaccgagaaatgaatgattgtatgtataaggaggatgtgatagaaagcatgagaaagcaaagggaaatcaaagaactcaagcgcagacaaaacaacaacaactactgctgctgctacttgtacttncttcgatgctntgatgac

SEQ ID NO: 7987 - DNA, 421 bp, Glycine max
  Clone ID: jC-gmfl02220090b12d1
cccccccccaaggaacaggacaatttaatattttattattaacccccaaaaccggcttttttttgttcaagacgggaaaaaccccttaaattttgggctttgcaccaaccggaaaacggggggagggaataaaaaaaaacatggaacacccctggccggttgggggccccacccaacaggggcccaccctttgtcccaatcaagggggaaaaggggggggggcccaatccctcctaaaaaaggcttaactgttcttttccttccaagggggaaaaacctgcgggttttgctcagggcttccaaaaaaggggggggtctgcaatcagggaaaaaaccccgtgggggcccatgggggaagggggcctttggcccaaaaaaaaacccttcccgggtttctggggggcccccccaaccctaaaaa

SEQ ID NO: 7988 - DNA, 582 bp, Glycine max
  Clone ID: jC-gmfl02220090c01a1
cttgtttctttcgtttctttgttgctctttctctagctagctaagtccgttcgtgatcgaaaagagaaaaagatcatggaagaaagtctagtaaaaaaacatgaagaagatagagtagtaagatggggtgtttatagtgaagaactgagaaggatctgtgaaatagcagggcctatggtggcagtggtttcttcccaatatttgctgcaagttgcgtcaaccatgatagttggtcatttaggtgaactctatctatgtagcgcagacttagccatttccctatcaggggtcactggtttcagtcttcatatgggaatggctagtggactggaaacaatttgtggacaggcttatggagctcaacaatatcaaagaattggaatgcaaacatacactgctatattctctctcatattggtttctattcccgtgtgtatcctttggatcaacatggaaagcatactagttctcataggccaggaccctctaatttcgcatgaagcatggaagttcacaatttggctagtttcagcactttttgcatatgcaattcttcagccggtagttcgatatttccaagtc

SEQ ID NO: 7989 - DNA, 413 bp, Glycine max
  Clone ID: jC-gmfl02220090c01d1
gggacagctaaaaattgtgtgtttaaactaggtgacagggtaaaatatagttcatcttctgggggcttgtatcagcttcagacaatttcttcaaagggtccagctaatggaagtcgggggaaggttgtcttactttttgatgataatcccttgtcaaagattggcgtaagatttgataaacccatacctgatggagttgatcttggaggtttgtgtgagggtggtcaaggatttttctgcaatgtcaccgatcttcgattggaaaacagtggcattgaagaacttgacagattacttattaatacattgtttgaggttgtggttagtgagagcagaaatgcacctttcattttgttcatgaaagatgcagagaagtctatagtaggaaatggagatccattttcatttaaaag

SEQ ID NO: 7990 - DNA, 599 bp, Glycine max
  unsure (1)..(599): unsure at all n locations
  Clone ID: jC-gmfl02220090c02a1
tttcattccaaaatcttcatattcatcaaactcatcaaaatgaatctgtaccactcctccaccaccaccaccaccaccaccatcttcaccgtcatattcctcctccttgcaatattattcactctcacaccccacaaggccaacggtgccacgtgtcaccctgaggaagaagcgggcctgttgggcttcaaatccggtatccgatccgacccgttcggcctgctcagttactggatatcgggtacggactgctgcacatggaccggagtagaatgccactataacagcacccgggtccaaagatcattcttaacgggtcaaaaacccgaaaccatcttatcgggtaccatcttacccaccctctcaaaactcaaactactcgatggactctacctcataaacctcatcaacatttcgggtcccttcccaaattttcttttccaacttccaaatctccaatttatctatctagaaaacatcaatctctcgggtcgaatacccgataacatcggtaaccttacccgactagatgtactcagtttaactggtaaccggctcatcngacccgtaccgagctcaataacccaggtgactcagct

SEQ ID NO: 7991 - DNA, 483 bp, Glycine max
  Clone ID: jC-gmfl02220090c02d1
gaggcgaagaagatgggtgtgcagatggagtgaggcttgttcagcttctaatagcatgtgcggaagcggtggcttgtcgtgacaaatcacacgcttccatattactatccgaacttaaagcgaatgctttagtgttcggatcctcattccaaagagttgcttcctgtttcgtccaaggcctgatcgagaggctcaatctgattcagcccatcgggcctgctggccccatgatgccctccatgatgaacatcatggacgtggcctcagacgaaatggaggaagcattcaggttggtttatgaactgtgtccgcacatccagttcggacactatttggctaattccacaatattggaagcctttgagggtgagagttttgtccatgtcgtggacctaggcatgagcctgggtctacgacacggacaccaatggagaggtctgatccagaatcttgccggtcgtgtaagcggcgaacgtgttcgtc

SEQ ID NO: 7992 - DNA, 530 bp, Glycine max
  Clone ID: jC-gmfl02220090c03a1
ctgaaaccaaagccacaagctgcgacatcagaaagacattggcgagaatggaagacagtattgaccacttggctttcgagaggaacaaggcgcagttcgatgttgacgagatgaagatcgtttgggcgggttctcgtcaagactttgagctttccgatcggatttctcgccttgttgccagcgatccggccttcagaaaggatgacagaaccacgcttggtaggaaggagttgtttaaaaacaccttgagaaaagcagcttatgcatggaaaaggatcaacgagctccgtcttaatgaacaggaagcttataagctcagatcctttgtggatcaacctgcttttacggatcttcattggggaatgtttgtgcctgctatccaaggacaaggcactgacgaacagcagcagaagtggttgcctctagcttataggatgcaaataatcggttgctatgcccaaactgaacttggtcatgggtccaatgttcaagggctagaaacaactgcaacatttgatcccaaaacagac

SEQ ID NO: 7993 - DNA, 512 bp, Glycine max
  Clone ID: jC-gmfl02220090c03d1
agacatcaagtatcgttaatgtaataaataaatgagtttgttccagttccagttccagatacacctaattgcgatggtaattactagctggcaaacacaactttattaagagttgtaaatcagaatagtctgggtaaatttcttagatgccaaaagcatcattgccacaaaattaactacagcctagcattacgtagttgctgcttaagcatcggttgaatatactctttaaagccatcaggaacaactgaatcattcaaaggatccttccatgcctcctcgtacaacttcggatacacatttccatcgtaacgtccaagaattgaaccaaggtagtgatcagtgtagttaaatgcatcaacaagcgcaattgcattaggacgaacctgtgaatacaagtttctcagctgctcactggcaagtgatccttggtttgggttaatgcagccagtggaaagaaaatcacccagatgcttatgaagtagaaaccaagcataaatgctgcaaagaac

SEQ ID NO: 7994 - DNA, 580 bp, Glycine max
  unsure (1)..(580): unsure at all n locations
  Clone ID: jC-gmfl02220090c04a1
cacatacacacatcattctctctctccttttgacctaaatcatcttctgctgattccgcgcatttttctgtgacgaattgctcccaaattgtactcacctttcgagactcaatggtgctttgaattacttttttttttaattgctattgacgtcagtctaattcgttgattttctggcggtgaattgttgtcgatcaagaggtttcggttaacagtgctcgtgattttggtactattgcaattaggagtgattgcgaaggtgcactgcatgttcgattgttgaggagtgggggtcctctgttccgaggattcccgtcgctggttgttcagattcgaagttggctctaaattttcgttggggaaatgtttgcttcggttgcggatggggcatttgaggggagtggagtttcaggaccctttttgattccacagcgctttgtttggccttatgggggaacaacggtgttcctaaccggttctttcaccagatggtcgaaccatatagctatgtctccgatggagggatgcccttgctgtgttcaagttgtttgcaacttaatgccgngttttatcagttcca

SEQ ID NO: 7995 - DNA, 538 bp, Glycine max
  unsure (1)..(538): unsure at all n locations
  Clone ID: jC-gmfl02220090c04d1
gaaaacaatttcgttaagatgtttaacggagaaaaacgatcctcaatttacagatttttctctccagtttctatcctaaaacagtatacgagggcaacagcaccaaggaagactggggatagctcagaaaagcagtgcaaatagaacaaacgagttccttccaatgccaaccacagctatttccttcatataagccggccaatatatcccaactagcctaacaagaatctgaacacatcgcttaaagaaataatcccttccacacgcttgctgccagcctccacagccacaagtctcctaaccccaggattagccaaccgctccatcactttgtaaagcgaatcagatctcaaacacatgtgacatctgtgaccattgtaaagcccataaggagaagttgcatcttgtcccaaaagcaatgcctggtgaatactaatttcatcgagagatatcctagcataagctntatctttagccaatgcagtaatatcacttcttggataaatgtcaagtaacgaatcattattatccacaatcg

SEQ ID NO: 7996 - DNA, 566 bp, Glycine max
  Clone ID: jC-gmfl02220090c05a1
aacaccatcatctacaacgcctcgatccacacagttctactctacgctctaaaccctctctctctctctctctcgatctatcatggctttgcccaatcagcaaaccgtggattaccctagtttcaaactcgtcatcgtcggtgacggcggtacaggaaagacaacgttcgtgaaaaggcatcttaccggtgaattcgagaaaaaatacgaaccgaccattggagtggaggttcacccattggatttcttcacaaactgcggaaagattcgcttctactgttgggatactgctggacaagagaagtttggtggcctcagagatggatattatatccatgggcaatgtgcgattataatgtttgatgttactgcccgtctaacatacaaaaatgtccctacctggcaccgggatctttgccgggtctgtgaaaacatcccaattggtctttgtggtaacaaggttgatgtcaagaacaggcaagtgaaggcatagcatgttaccttcccaggaagaggaattgcagtattatgagatttagcgaaagcaactacatttcgagagcctt

SEQ ID NO: 7997 - DNA, 587 bp, Glycine max
  unsure (1)..(587): unsure at all n locations
  Clone ID: jC-gmfl02220090c05d1
aaaaaaaaacagaggaatacattaacgtcaagcatcgttgtcagaatccgttttaagcacaactcaaatatgaagctagataaatctccagacaccacatgacgttataaagtgaccgtttacaagaaaacaaaggccaaaatacataaaccattcacgccaatggaatgtatacgaatatgtacgtaatgttttcgacattgttcactgaatattaaattgacttcaccaaactagtcgttttaaataggaggaaataagccaatatcatttcttgttggagggacaaactcgagaagcaaaatagcacttggcacaaacagccttgtttgctctttcccccgtgtctctctgttcaagagagccaaatcacacaaacacacgcactacagcccttggccacaaggatatgtcaaactattgggagagatttttaattaaagcaaaatgattaaatttctgatactcaaatccgcatccaaaaaatgtcaacaatacacccncccaaaatacatatcatagcatacgcagtaacacgactcagaanaagcacaattttactcaaaagatcatcatcatcgtcagga

SEQ ID NO: 7998 - DNA, 378 bp, Glycine max
  Clone ID: jC-gmfl02220090c06a1
cccaaagatcttttctctttcgatattttatctctctctcttttcctcatggctgagaacttggacgacggcgagttctggctcccgccgcagttcctcgccgacgacgacgttttgccgacaccctttgaagcaaagttcccatctttgcccgacgacactgttttgttcccctccgagtggccgtacggttccccagttgattctaccgttggtggctccagtgagaccgagagcgacgaggaggagcaactcgtcgctgagttaactcgccgcttaactcgctcctctcttcaatctgataccaagtctgcgggtcggtttgtgtctagttctccacaatccacgctgtgcgcgttcgaaagtgggtgtggttgc

SEQ ID NO: 7999 - DNA, 426 bp, Glycine max
  Clone ID: jC-gmfl02220090c06d1
ggaaattaaacaaattggttacattttaaaaacattcacattaggggatcaattcccgcttttttttaccaccagcaaaattccccaacattttcaaatacgacaattatcaaataaaaattttaaaaaaccccgagaaaaaaaaaaagggatttcacttcgaatcccccttgaaaaaaaaccctaaactctttttttttttttaattaacccacattaaagctttaacgggaacccaaaaaccaaacttaaaaccaagggaacaacaccaccaccggaccttccgccgttacgtttaacggggtcgttactattattggggggcacattggcagggttatcgggagaatcagcaggggccttaaaatcatccgccggggcattaaccgccttttttttctttttccccttttttgccggggcaag

SEQ ID NO: 8000 - DNA, 402 bp, Glycine max
  unsure (1)..(402): unsure at all n locations
  Clone ID: jC-gmfl02220090c07a1
tgtgaatcaagaaccgctctgctatggctgctctgcaatacttggaatcgctgcgtaattcgcaccctgagctctccgattggtacaattcgctggcggatctgtaccagaagaagctctggcaccagctcactctcaagctcgagcagtttgtggctctcgccgtcttccaggctggtgatgctttaatacaattatatcacaatttcatcacagactttgagacgaaaatcaaccttctcaagcttgcacattttgctgatatagtttctcggcagtattctgaaaaagaagctgctgttggttatcttggaggggtcattcagaaacttcaagacactagggagcagcgcatagaagaacctattctttacattaagatgcaaatagcantattcaagc

SEQ ID NO: 8001 - DNA, 557 bp, Glycine max
  unsure (1)..(557): unsure at all n locations
  Clone ID: jC-gmfl02220090c07d1
tagtcggcggccgccctttttttttttttttattgatatttgatattacatcaagtctttaataattttaagatttagatgtctgccctccacattacacaattttaagatttgtcgtgtacatcttcattttcatttaaaatgaaaaattttaagaactctagttccatttagccattcattatctagagaaaattatcttcacttgtagaggcagagagcccgccattttttcacctgatatgctgccatccccccaaatttaactcggaatttggacttgcagagattccaattataaccgtgctacgtatgagtttgcttgggttacatatctaacccagcgataaggattatgtgcttttgatttctttgctatttgcaaatacttcacctgaagccttgaagcattgtacataggtacggtgaaagtcatgctgacaggccctgcttctttcatgatatttccatgtaactcctgtgaaaatgtcagctttgctcgtaaagtatgttcagatccaccaacaacctttntcagaccccattccagtctttta

SEQ ID NO: 8002 - DNA, 323 bp, Glycine max
  Clone ID: jC-gmfl02220090c08a1
gggggaaaaaatttccccccccaaaggggggggaaaaaccccggggaaaagaaaaaaagggggcagggcgggcccccccccccctgtggcccccaaccaaaaggaaaaccccccgccctttcgggggccaaccccccaaaaaaaaaccccggggggggggggggggcccccccccctggatgaacgggggccccccccggggaaaaaatcccgggccccggggaaagggcccccggcctttttgagggaacccccccggaagccccgggggggcccaaacccccgttccccaggggaaaaaagggggccctttggcccccggg

SEQ ID NO: 8003 - DNA, 451 bp, Glycine max
  Clone ID: jC-gmfl02220090c08d1
cggcggccgccctttttttttttttttttttttttttttttttagaacttttatgaagagggctttcttgtttctccataagcacttcattaagcatttgtaaccataactcttcaaagggcttgtgaaaactctgctgaaaccaatccaaaatttctgaaaataattcccttggattctccttacacaccattctgagcatagcagagctatcaatcagcctgctctttaacttgctcaaaagatttcccacccttttttgaccaaatgcttctctcttcataatactttcagggggggctgacatgtattttctaacagattttaaacatggacacacctggcctttaagcaaagcataggcaaacacttgcacctgatgttcgccattgctaatgggcaatgaatgctttcgaagctcccaacaggaacgcccaaaggttgggattac

SEQ ID NO: 8004 - DNA, 301 bp, Glycine max
  Clone ID: jC-gmfl02220090c09a1
gtgctgaggtagttaaccaagtcataaaagaggttggagggaagattactcggcaaccagggccaattcctggccttaatacaaaaaccacttcgtttttagatccagatggatggaaaactgtcttggttgacaacgttgatttcttggaagaactgaagtgaagagcaagctttatatgaaataagtagtcctgctgcttttgtatgaataagttgtctcgcattttatcattgtgcgttttgtatcagtaccagtcatcaacttgttttcttgcttttatgggttcttttgttgactt

SEQ ID NO: 8005 - DNA, 470 bp, Glycine max
  Clone ID: jC-gmfl02220090c09d1
ctaaaaaaaatctaaagcttcgctaacttgtacatttcccaacgtactcacgggaaagcttacacaggctgacatgcacacagaaccacacatgcaatagacaaagaaaaacagagaaaataattaaaaagatgctatggcaatattgcatgactttgaatacaaggcagatcagaaaattatgtagtttgaacaagtataccaatattggccctcatagagtcataggacaattatgttgtccttggcctttgggtatacaacaacttgatgaaagagaaacgaaagaccattccttcactacatcgatcttctcaacttgtttttattcatgcatgagttatgcaattccataataattaattatatattaactaactatctgcacacttgaatccatctggtggggtcttgcccagtcaatgagaagctgaagagcaatggggatgatgatatgatgtaagaatctt

SEQ ID NO: 8006 - DNA, 333 bp, Glycine max
  Clone ID: jC-gmfl02220090c10a1
cccaattcttccccctccacccacccagcatatctctctattcctatttattagcacccctcacattaccttgtgtcaccaactactttgactcctttaccataccattacaataattatcaaacctaaccagtaaaaatggtgaccgtggaggaaatccgcaacgctcagcgttcccatggacccgccaccatcttggccttcggcaccgccacgccgtccaactgcgtctcccaagccgattaccctgactactacttccgcattaccaacagcgaacacatgactgatctcaaagaaaagttcaagcccatgtgtgaaaagtccatgata

SEQ ID NO: 8007 - DNA, 433 bp, Glycine max
  unsure (1)..(433): unsure at all n locations
  Clone ID: jC-gmfl02220090c11a1
ggaatttggcaaaaagtagccatcgccccaacgatcccatttcccttgacttctctacgtgaagatccttgtgtcacatagagctagttaaaatgtcagagggaaatgcagggaaaggaaagagaatcgccatcattggcgtctcaaccttattgttggtggctatggttgtggcggtcacaattggggtcaatctcaatgagaatggttccaacaatgatatagaggacaacaagaaaaatcatgttgcttcttccataaaagccgtccaaaccctttgtcatcccacanattatgagaaagaatgcgaggaaagccttatagctggggctggaaataccacagatcccaaagaactcgttcaaattttcttcaacatcaccattacaaaaattggtgataactcaaggaaactatattttgcatgagattg

SEQ ID NO: 8008 - DNA, 400 bp, Glycine max
  Clone ID: jC-gmfl02220090c11d1
caggttgaacattgtagttagccttcatagctagattgcaatcaaatgtggacactaacaaggaaatgtaagagcacaaagaatctggctccagaaaattgtggtcacctaggatagttgtctctatgacttcgaaattctaactaaccaactcccctttacacaaactttcatcatcatcattcatctaaatccaccattggatttgacaaagtgaggactaatgtagctgttcactttcccagcttagcttagagacaactctttcatgttgtgggaaatattcctccatctctttgacaagctcttttggggttggggcagaaacaattatatggcgagcagtggggctgatgaagccttccttccccgctttgtcaataaaagacaaaaaggtttt

SEQ ID NO: 8009 - DNA, 557 bp, Glycine max
  Clone ID: jC-gmfl02220090c12a1
gcctcttcgggtgttctgcgtttttgcgaatccgatttggcctcaattccgccattcctttttggattcgtctttttttttcttcttcttctttttcatggaccgcagagtctatcaccatcgtcctgctcctccggcacatgcttctccccctgaatactttgtcctccaggggaacacaacttataaagacgatctatatttaaggaagaggacagggatgcgtcggtggctttgttgcacatgtcaggtggaagagtcttacccatcaaatgaaaatgagcacctgaaaagcccaaggaattatggagatggaaatcaaaaaggctcaaaggtgtcagctcctgtcaagcctgaaacacaaaaggcacctccacctattgaagctccagccttatctttagatgagctgaaggagaagacagacaactttggttcaaaggcattaataggtgaaagatcgtatggaagggtgtattatgcaaccttaaacaatggaaaagcagtggctgtgaaaaagcttgatgtttcatctgaaccttgatcaaataatgagt

SEQ ID NO: 8010 - DNA, 369 bp, Glycine max
  Clone ID: jC-gmfl02220090c12d1
ccaaaaaaaggttaaagcctaaaaatttgggggggggggggacccccccaaaaaaatgccccttttaaaaaaacggggggggcccccacaaaaaccggggggggaaacccccaaaaaacaaaaccccttcccggggggggacatttaaaccccgaaaaatccccgggggaaaagggcccattttgaaaaaaaaccttggtttttttaaccccgggtaaaatttagggggcccgttttggggaaaaaattccttggcccccaaacctttaaattttgtcccaaaaaaatttcccgggggctaaagggggggggtcccccccccccaaggaggttttttttttcccccccaaaccctggggggaaattggg

SEQ ID NO: 8011 - DNA, 566 bp, Glycine max
  unsure (1)..(566): unsure at all n locations
  Clone ID: jC-gmfl02220090d01a1
gtggtaagtaaatagtagtaacctaacccttgcgtttgcgagtgaggctgaggttgggtttggaaggcaaaggctggtgttgtcccaatccaagagagaagtaaagtaaagcaaaggaatggcgaacatagacatcgaagggatcttgaagcagcagcctgatgatgggcgcgttccgaagacgaaaatagtgtgtactttgggccccgcttctcgatccgtggaaatgactgagaagcttcttagggctgggatgaacgttgctcgtttcaatttctctcatggcacccacgactatcatcaggaaaccctcaacaatctcaagactgctatgcacaacactggtatactctgtgccgtcatgcttgacactaagggacctgagattcggactggttttctgaaagatggaaaacctattcaacttaaggaaggacaagaaatcaccataactactgattatgacattaagggggatcaggagatgatatccatgagttacaagaagctgcctgtccacttgaagcctgnaaacaccatattgtgctctgatgggacgattactc

SEQ ID NO: 8012 - DNA, 464 bp, Glycine max
  unsure (1)..(464): unsure at all n locations
  Clone ID: jC-gmfl02220090d01d1
gaaagaattcgagctttctcatttggaaacatgtgaagtctgtaccggtactggagcaaagataggctccaagatgagagtatgttcaacttgtggtgggaggggtcaggtgatgaggactgaacaaacaccttttgggttgttctcacaggtttcagtatgtccaaactgtggaggggatggtgaagtcatatctgaatattgccgtaaatgcaacggtgaaggacgaatacgggttaagaaaaatattaaagttaaagttcctcctggtgttagctcaggcagtattctaagagttacaggggagggtgatgctggaccaagagggggtcctccaggagatctttacgtatatcttgatgtgcaagagatacctggaattcanagagatgacattaatctcgtctcaatgttatcaatcagttatctagatgctataccgggggctgttgtgaaggtaaaga

SEQ ID NO: 8013 - DNA, 502 bp, Glycine max
  Clone ID: jC-gmfl02220090d02a1
agaaatttcccttcttagacaacctccacattttctcctttgtaaaaagacacttgttagcattgccacatctcttaggcttgagtttattcctcaagtaaaggagttgttggatgagggtttggttcgcaagagattaaatctctgtgctttgttggtgcccaaaataggtattattaggcgccaaatcccaaaaataggtggtgcgatgaatgccttgggtggtgcaacactcttttgtaaaatcactcgtgcacccaacatcttcatgattcgtgtacatagggactcgttaggtaggtttgatcttattgatagtttcaatacaaacttaggcactcatatgggacaccttaggttcgtcatatgcattggtaggaataatcatcatgaaaattctgaaccaggcatgcactattgctatactcttcttaatgctttaaactgtgatcaatgggctcccatgaaccctaagagaattacggtcattcctgagtggccc

SEQ ID NO: 8014 - DNA, 295 bp, Glycine max
  unsure (1)..(295): unsure at all n locations
  Clone ID: jC-gmfl02220090d02d1
gaaaaagagaaaaagaaaaaggagaaagacctaattttgtcactgtaattcttcttcttcaaagaaaaccccaatttcgaacgcttcaaattcaattcaggaaaccctagtgattaatttcgttgcgaaacggcgattcaagattatcgtgagccagaagatggtagcggaagcggaaattatctgtcagcagaacattccgatgttggacgtgaagtatcatatttgcgtggctcangaacacaacgtgaaggttgaggtttcacccaaatcaccttcacctcctgttccgatc

SEQ ID NO: 8015 - DNA, 557 bp, Glycine max
  Clone ID: jC-gmfl02220090d03a1
ctataatgcctctagtactgactttaatgtttggaaagatctttgaacatttttcatattttttttgtttctaaatctgaaatgtatctgagcctcaaaaaatacttgctctacctctgccactttctgagtacaatacaacactgccatggctgcctcagtctccactattggagctgtcaacagagctccactgagcttgaacagctctgaagctggagattcggttcccagttcagccttctttggcacaagcttgaagaaggttactgcctcaagggtccctaacgtcaagatttcttctggaagtttcaaaatcgttgcggcggagaaagagattgatgagcaacaacagacaaacaaggacagatggaaaggtcttgcctatgatatttcagatgaccagcaagacatcacaagaggaaagggtatggctgattccctcttccaagctccacaggagactggaactcactatgcagtcatgagctcttttgagtaccttagcactggacttaaacagtataacttgggataacaacatggacggtttttac

SEQ ID NO: 8016 - DNA, 463 bp, Glycine max
  Clone ID: jC-gmfl02220090d03d1
gtagtaaaacaccttctattatttgaagccacaaagttcagcagaaccacaatgaacaccaggaaatattaattgattatctcaagtgttttttttagtagtgagacaatgtaactcaaaattataaaggataacaatccaatatgaacaagataaattatttgattatatcaagtcatagcttctcttcaagtggagaatgcttaggttctcagggtgtgtataagcaggttccatcatcacttcttgcagttgggtcgaagtttgaggcatttggatcagtacaaccttcaggaacgggaatttttacttgctgggctgctttgccatagaaagttcctcttttgatggcatcctgattagcatcaccaagagcagcctcgttcaagtacttgtctgccagttgtactctcttcacattctcttgttcttggacaagcatgttaccatactccaagagctt

SEQ ID NO: 8017 - DNA, 530 bp, Glycine max
  Clone ID: jC-gmfl02220090d04a1
gaaaatctgctcctcggagaaaatttgctagtagtaccccacaaccaccatgaccacgatcaccaccaccaccaccgccaccgccgccaccgcaacaacaattgctccgacgacgtcgtttcctctctgcaccacttgaatgaatgggcaattgcggtaccagagaggaatctgctgtggtttccaacgctcaagttgttcagcagcttcaccatgcgacgtcgttgggcgcgagtgcgaggagccagaatgcaggtagcgagaagaagcacggtcacggtcacggtcacaggcacaatctgagcgagtgcgcttcggatctgagcgagtcctgttccacaccgcacggtaacaatagcaacaacacgctgctctacacgcacgtgatcgccttcacgctctacgagttggagaccataacgaagagctttcgcggcgactatatcctcggtgagggatgcttcggcaccgtttacaaaggttacattgatgagaacgtcagagtcggactcaaatcgctccctgtcgct

SEQ ID NO: 8018 - DNA, 479 bp, Glycine max
  Clone ID: jC-gmfl02220090d04d1
aaccttaaaaagcttgaaaatgaccctccatctttatttctttaaaacaccaataggccatttcaaaaagatacgagcgtgcagacaatctaaccgggtttgacagagaaatgttaactaagattgtcttatcttaccctcattttacctaataatctcaaataaaatacatcattaggtacttgcgtgttcgggtcgtcttactcttgcactgctgatgttgtgaggagcccgttatattagttctgatgccgcgatgattacaagtacacagattttcacacactaattcccacccagatgaacagaagaccaaaaattgatacaaaaatgatccaccggggcttcttgtcaccatattatcatatcatgtacaaagaaacaaatacaaggatgcacccacattttaacaacaaacaccattttcttgagataaagcacaccagacatggattcatggcatgcgattatcatctgac

SEQ ID NO: 8019 - DNA, 493 bp, Glycine max
  Clone ID: jC-gmfl02220090d05a1
gttctttgtctcgcaatcttcactattttcaccgagcatttgcattccacattgaatatggctgaggctacacaatctaatgctgagttattggagtggcctaagaaagataagcgccgcttcctgcatgttgtgtatcgtgttggtgatcttgatcgcaccattaagttttatactgaatgttttgggatgaagcttttgaggaaaagagatattccagaagagaaatatgccaatgcttttcttggatttggccctgaacaatcccattttgttgtggaattaacatataattatggggtgacctcatatgatattggaactggctttggacattttgctatcgcaactccagatgtttacaaattggttgaagacatccgggctaaaggtggaaatatcaccagggagccgggtccagttaagggtgggaagtctgctattgccttcgtgaaggatcctgatgggtatgcttttgagctcatcaaagatc

SEQ ID NO: 8020 - DNA, 412 bp, Glycine max
  Clone ID: jC-gmfl02220090d05d1
accaaatatattgaagtactgttggatatcactgtagactgtctagaatctcaaccaaacaggcaaacacatcagagaaaccatactgaacactactacttcactgataaacacgagctgatcacttattcatataatagcattagtactatgaaaagccagaactctttactccagctccttcagaaaatcttgattgtcaaccaaaacagttttccatccatcaggatctaagaaagaagtgatctttgtgttaaggccaggaactggtcctggttgccgagtaatcttccctccaagctcttgtgtgactatgttgacaacctcagcactcttgtatacatcatcagtaccaatagcaacctgtgcataagcatttcccttggtgtattcagtgacaccataagtatat

SEQ ID NO: 8021 - DNA, 469 bp, Glycine max
  Clone ID: jC-gmfl02220090d06a1
cttgtaccattggtgtgattcgaattcacagggatactgcaactcggaggacgaaatcagctagcattgggacaactgcagagattcgacaatttgggcgtctgggggatggttctctgaatgtggttacccgtggacaacaacgatttcgcctaagacggtcctggactgatgtggaaggagtgccttatggagagattcaagttattgaggaagatctgccactcagaattccaagggatgcttttggcaaatcagcaccattgagtaatatgccctgtagccaaggtgtctcacataatttgtctccaaagtattcccatgttaacatgcaaaggtcaaaaaatgaggaaaatgattcagaaccaaattcagaagagagttttgagagtgagctctcactgatgggaaggaaaatccatctattcagttgtggctccaagtatgtgcatgatactatggatgaatc

SEQ ID NO: 8022 - DNA, 446 bp, Glycine max
  Clone ID: jC-gmfl02220090d07a1
catcctcatccaccttcgttagatttccccctcaacattttttgtttttctctccatcccaattatcgccacctcctctttcttcaaatttcaatctcagaggatgggtggtgaggaattgtgtttgatggagaactcagggaaagggaagaggctgtggaagaaggtgaagtaccagctggtggagtaccactccttgcccggttatttgagagacaacgagtacattctcggtcactatcgatccgaatggcccatcaggcaggttttgttgagcgcattcaccatccacaacgaaactctcaacgtttggacgcatttgatcgggttcttcatatttctggcattgaccatatacactgccatgaatcttaattcgctacagcagtttcctgacatgctcaagaaggccgacctgcacaaattacaatcagaaatcttgacgt

SEQ ID NO: 8023 - DNA, 499 bp, Glycine max
  Clone ID: jC-gmfl02220090d07d1
aatgtcttggaaacatgcatttatcataacagttactatacctagagcttaacagtaagagtaaccttgtttgaacgaaaagtgggaaggtgacagtctccataaggaagatgaaattcacaattcatatgtataaatcagcaaaccttgcaaggaaattaagcacaaatttcaggtcaagtcagcagctttcgtgcaatagtaaagtcctgatcaacttcctttctggatgcttcccaaagtcgatgttcaatccccaatttcctcagttcagaaagtccctgctcagcatcaacggcatcatgtgaggtaggtgaatgcccactccgaccaatccaaaaccgaagacgttctttggcaatgtcctactctataccatgagccttggctcttctgcaaaatatgtcagccaagccttcttgaaaagaacatcctcagattcctctggactcaattcaaatgcttgcataaacctagggtccccaggtgatttaatatc

SEQ ID NO: 8024 - DNA, 402 bp, Glycine max
  Clone ID: jC-gmfl02220090d08a1
ataaatagttgaatccaaacacttttacaagggtttttgttgaagcaactttggtataagcttcatatttgtacagaaaaaatctgtatataaattatacaaacatcaattagatttaagagtcaacctgaaggggcacagctactggtaattctgctaaagagcagcttttatcatataaagatatgaacataaaagaactatcagcatttccgaagagaaaatgaggagctatgcctttaaagctttacccgccaaaaaaaaaggcaaaatggaactcaaaatttcattttatttaattttttggtttacaaacaatttcaaggacccattagtattctccctatgttctgagggcaaggataagcagaatggtttaaagatggaccatcacttggattt

SEQ ID NO: 8025 - DNA, 490 bp, Glycine max
  Clone ID: jC-gmfl02220090d08d1
actagtcggcggccgccctttttttttttttttttttttttttttttttttttttttttaaaaggggcaaaacaaaagtcataaagtagcattaacaaacaaaacccacagcaagcaaattagaaagaaagaaaatccgaaaaaatttgacttgaggccaccacaccttgcaagatagacatatataacacaccgcatggcatatacaaagggttttctgatgcagccatgggttagtactcgacctcggcctcgtggtcattgacggcggtggcattttgatactggtgatactcggccaccaaggcattcaagttgctctcagcctaagtaaactccatctcatccattcccttgccagtgtaccaatgcaagaaggcctttcttttgaacatgaccgtgaactgctcggagacgcggtgaaacatctgctgaatggaggtggaatcccccatgaagggggaggacatggacaaacccgtgggaggga

SEQ ID NO: 8026 - DNA, 489 bp, Glycine max
  unsure (1)..(489): unsure at all n locations
  Clone ID: jC-gmfl02220090d09a1
atttgctttttgttttatttcattgcaaccatgtttggctatgcagcagcaataattgcagcaatcctcttcttccaatacttcttccataggagacgatgttgcaaacaccccattttgacagaataccctatcattggcatgctaccacaattactcttcaatttatggcgtgcccatgattattcaactcaggtgttgcaacgacatggtggcactggtgagttcattggaccttggtttaccaacatggactatttggtcacttgcgaccccatcaacgtccaccacatgctgagcaagaatttccacaactacgtcaagggacccgagtttcgtcacatttttcaggccttcggagacgggattttcgccgctgattctgaagcatggaagtacagcagggatctcttccattctctcttaaacagaaaagcttcgaggtttttgtagcgaanaccattcacaacaaggtgcataatggtcttc

SEQ ID NO: 8027 - DNA, 480 bp, Glycine max
  Clone ID: jC-gmfl02220090d09d1
atcaaagacgccccataaggggccagatttattcagttgcccgcttatcttgattcccttattttgccacaatcaaacacacaagtgagaatgctttaacagtttgagacttgggaaagtccaaatgaactaccaagtaagaatacaattatataacggaaattacagcctgggcatttgccttcaactacacaataacttggacttttaaaatatttaatatcattcttttgtgacagccaccttcgccttcgcctcagaggaataatcatgccgcaatttgcgtgaaagttggtataagcctgtccctgccattgcaatgtttacactaaacaggttccaattttttggggtgattacagtgctgtaacgagaccagataattccagtagctgtgaccgctatttgctgaggataggaaagtttctcgggtggttttgagaaatcagcaatgttggcaatgctgatgccccaattaaa

SEQ ID NO: 8028 - DNA, 438 bp, Glycine max
  unsure (1)..(438): unsure at all n locations
  Clone ID: jC-gmfl02220090d10a1
gagagacgcttcgcaaatctcaatcgaatctcagaaaaatgagagaaatcatcagcattcacataggtcaggccgggatccaggtcggaaactcctgctgggaactctactgcctcgaacatggcatccagcccgacggcatgatgccttctgactccaccttcggtgtagcccacgacgccttcaacaccttcttcagcgaaaccggatctggcaagcacgtcccccgtgctgtcttcgtcgacctcgaacccaccgtcatcgacgaggtccgctgcggcacctaccgtcaactcttccaccccgaacaactcatctccggcaaggaagacgccgncaacaacttcgcccgcggccactacaccgttggcaaagagatcgtagatctgtgcttggatcgcgtncgcaagctcgccgacaactgcaccggcctacaag

SEQ ID NO: 8029 - DNA, 387 bp, Glycine max
  Clone ID: jC-gmfl02220090d10d1
agccccaaaaaggggaaaatattatggggaaggggagtttgcatttggcatgccagggacaaaaaacaggtttggtttcctaacccggaccggaattggccaaggaatctgcaaaagcttacccatttccttggtcttttaaaaagtaaaccccacgaaaacctcccaagagcaaaagtttgccaaaaccatccctttggattggcaggaaccatccttttagcccgggcccaagcataaagggccccagcaatttgggcacctgtgccccaaaaaaacccccaccttgtgacccacattggcccaaagacaaaatgacctggacccctgaaaagggacctgacccctatggcagggaaaaaagcgccacaaaacagggggaacctt

SEQ ID NO: 8030 - DNA, 442 bp, Glycine max
  Clone ID: jC-gmfl02220090d11a1
caccaattctccaccctctcattgaaaaaaaaacaaccaaacaaaaaaaatcaatcattttattttatttttctacgaaaatggttgatttacattggaaatcaaagatgcctagttccaaaacaccaaaactctctctctccgacaacaagtccttaccctctttgcaactacccttccggaccacagatatctctgccgccgctccttccgtttgcgccgattacgactactatctccgtcttcctcaactcagaaagctttggaactccacttgatttcctaatttggacaaccgaaccggtcttaaacccattttggcaagcttttgaaatcacggtccggtttctttccattgatctctccgatcccagaccttactccaaccacagagaatggactcgccggatagagtctctcatcatgcatcaaattgaaatca

SEQ ID NO: 8031 - DNA, 413 bp, Glycine max
  Clone ID: jC-gmfl02220090d11d1
agactaattcaaaatattggacccatacaatcacaaaatacgatgggaaagcttggtatgattcctagttattacaacaagatggcaaccatcaatcttaatcgagcttcaattttgcaaaaaggttaaattattgaaattatatcaccaattaaagaaatagctcagaaacatacaccaacaaattgtctagttttaaataatcaaaggtgcaatccatctaactcaggagaaactgactgaagggggttaaaaagaaatgataaaaatctgaagaatattattttccttttctgccattgtatcaacacaagcctttgttcccatttacatgtcttggggatcttgattatcatcaccccctctgttggatccttcttgatcagttccaaacgtccttttgctcatgttag

SEQ ID NO: 8032 - DNA, 556 bp, Glycine max
  unsure (1)..(556): unsure at all n locations
  Clone ID: jC-gmfl02220090d12a1
atgagggtaaccaatatgagttaagtgacacaaagtacacagaagaagaatacaacaacaacaacaacaagtatcacaattcctatcagaacaacaaccagaagtactacaacaacgatgctgccaatggcatatactcctacaacaacaacaacaacaattacaatgctaacaataacaggtacaatacttacaacaacaacaatgccgttaacgggtacaatggtgagaggcaaggaatgagtgacacaaggtttttggagggtggaaaatactttcatgacgttgccgccgagaagtacaatccaacaaactatggtgactcatcaagggaagtgaacactaacaactggtacaacaacagaggtggcaactacaacgggaaccagaaccagcaggagtttgaagatgaacatgagaacttcgagccatgagcttggatcattggcaaagtaaagagttcactatacttttgagtatccactatgggtgtttaatggttttattgtgctttagattcangaaaacacannagtaaaggatatgttaactatga

SEQ ID NO: 8033 - DNA, 176 bp, Glycine max
  Clone ID: jC-gmfl02220090d12d1
atacatacttctaaatattgttccctaactatctcgcaatacaatggggacacttgcggggaaatctaagaacaccaacaatatggctcccaaaaattgtgatcacccttgaattttgccaatatgacttactattgctaacttaccaccaccctctgaactaacttccatactta

SEQ ID NO: 8034 - DNA, 538 bp, Glycine max
  Clone ID: jC-gmfl02220090e01a1
ctcagtctctgcgcgtgccgctgaggattgcgaacgagagacctatctcgtatactcgcagagtttaagatatcatgggcaatgaaaaggtatcacatcaacattgtcatgattggacatgtctactttgggaatgtaactaccactgtgaacttgatctacaagcttggaggtactgacaagcgtgtgattgagaggcccgagaaggaggctgccgttatgaacacgaagtcattcaagtatgcctgggtgctcgacaagctcaaagctgagcgtgaaagatgaatcaccattgatatgtgctttgcggaagtttgaaaccaccatgaactactgcacggtcattgatgctcctggacatcgtgactttatcaagaacatgattactggtacagccaagacgacttgggctgtccttattattgactccaccactggtggttttgaagctggtatttctaaggatggacagacccgtgagcatgctcttcttgctttcaccctaggtgtgaagcaaatgatctgttgctgtaacaag

SEQ ID NO: 8035 - DNA, 531 bp, Glycine max
  Clone ID: jC-gmfl02220090e01d1
tactcctgatatcagaaaaagaaaaaagaaaaaaatgtctctagtgactgcagagatcaaagccaaagcagaggtgtatcatggagatgaactctgccaagagaagtcaaagttgctgctaaaggaggtagggctacctaatgggcttttgccattgaaggacattgaggaatgtgggtatgagagggatagtgggtttgtgtggctgaagcagaagaagagcacaaaccacaagtttgagaagattgggaagctggtttcctatgctcctgagatcactgcctatgttgaggttggtaagatcaaaaagctcactggtgtgaaaaccaaggagctcttggtttggatcacactcagtgagatctttgttgatgatcctcccactggcaagatcactttcaagactccttcggggctcttcaggacattccccgtctcggctttcgagattgaagagccagttaaggaagttaaggaaaaggaggaagaacacaaggaagtgaaacaggttaaggaagaactcaggaagtt

SEQ ID NO: 8036 - DNA, 56 bp, Glycine max
  Clone ID: jC-gmfl02220090e02a1
atcctactattcggctgccgtccttttttatttcattcttttttttacttttcctt

SEQ ID NO: 8037 - DNA, 489 bp, Glycine max
  Clone ID: jC-gmfl02220090e02d1
cggcggccgcccttttttttttttttttgagaaaatttccattgtattcagtttccttgttttgaaaaaactgaaactattggcacaaccattataactcaacgaggtagggtaatatacaaaaggaaacaaaaccaaatttgattcccataaaaaagaaagaaagaagaaaaggcaaacccgaaaatctgagtcatttggcagagaggatcacccactgttgtaagcacacacacttttccacacgtataccatttacagctacattcacaaaaatttccctgttctctcttgagaccctttgttggtggaaagaaaaaaaaaagtaaaccaaagctcgccacttaacttccctttgttactttccttttcggttacactttttttttcttcttttctaaaactggtttctttccttttccggaaacactgtcctcagttccgttcgttaatttgttggttcctcgagagatctcgagaaatcctatg

SEQ ID NO: 8038 - DNA, 533 bp, Glycine max
  Clone ID: jC-gmfl02220090e03a1
ggtgtctttaatttcacagtttcatagcaattatcgacaaaaaatccaaaatttccactcacatctctctttgtttatgacatctcaaacatttatctactctctacccactttctcagttccaggtaagcaagagaaacaatactcatctttattacagggttgtgtgaactgaagagggagggtactggtttgcggaggcagtgacacttctgcaagcctagaatcctctctcctagttttttgtgaaaacagatagtgtggtgcttttggaggatccttttctcaaagcttgcatgtaacactatctacattttggtgatcagttgaagtgtggaaaaaatcttaagctaaaggcaatttgggaagctggaacaatgggttctgtttgttgttgcttgagttttgatgattttgaagattatgtaaatccaaatagtcctgtatataggaactgtgtgtgtctcagttgcttgatacagaaccttttgattgtggtatgttcctcctgtttcctgtctccttgcggcttc

SEQ ID NO: 8039 - DNA, 425 bp, Glycine max
  Clone ID: jC-gmfl02220090e03d1
ccatctaaaattaaatattcttttttttttaacggttttggacatgcggaaatttttaaacccaaaaacaagggggattagaatgaactcacaacaagggttaaggaaacttttcatacttactatccatgacagacccttaatatggagtattcacaatggctataagcttatattcttccatgcctaaatggctgacttcatccacaacacaaaccttgtaatcaagggaaagtcgtttcattgaataccatcacctttccacaaacaggacagttggcacttttttccatccactcataaatgcacccaaggggaaaatgatgagagcatttgggcattatcttgggattctctttagggttttcttcaaaacaagttggacagacatcctcctcctttgaggatgcttatacaagaccaac

SEQ ID NO: 8040 - DNA, 553 bp, Glycine max
  Clone ID: jC-gmfl02220090e04a1
aaaaacatgaagaactgaatttatattttcatgacggcatgagaattaaagatttaattaaattaataattcacaactgtattctatcctaaatgagcaaagaaattcatgatttgatcaaagctccaccttcataggttaatagcgtgtttgaatttctatttatacaactcacgtgaatcacaaatataacttttaattgcttttagtctatcttaatgtgaaaatttaaattacaaattttaatctaaaaccacactaatttcttgtgttaggtcgtagataaatatcataattaattgtgcattccttcatttttcaatttcaacttaatttatcacgtgattggtcctgtgcaccacagcactgatgtcttgtccgtagtcaagtcatgaatttatatcaatatagaaattttttgtttttcttaagatcaccatgttcgtttgatttttattgaaaaacatattcggctaggcaatatatggctcactagtccccaccttaccgactacaaaacagtggctacatgatggtattaaaccatgatttt

SEQ ID NO: 8041 - DNA, 497 bp, Glycine max
  Clone ID: jC-gmfl02220090e04d1
agtaattaatattagtatttattatttatatacaacacgtgagactcccaatctctaagcatggacactaaaagggtaagaaactctaaatctaaaccacttaatccctacaacaccacacttaaaccgtggtagagagctcaatttggttcccttctgaattgctatcccctttgtcatggacctgaattggcttgtaggtgtacaatttggcacaaaccaagtagtaaataagattgagaaactgcaatatggtgataagccagtaaaagtactccaacttccctttgttgaggttgttgtcagggagccaatttgacccattagacccagcactgaacttgtggaccaaagtaaccataatggtactcacatagttcccagcagcgatagcagtccaaaataatgccatggcagtgctcctcatactctcaggggcctggtcatagaaaaactccaagtgtccaattgacataaaggcctcagccattccatga

SEQ ID NO: 8042 - DNA, 540 bp, Glycine max
  Clone ID: jC-gmfl02220090e05a1
ggcggggctgcggtgcggcgcgtggcgcgtggcgggggaggcgaacaacctgggcggctggaggacgattccggaggaatgcacggagtacgtgaaggagtacatgaccgggaaggggtacgcggtcgacctcgaaatggtctccaaagaggcggaggagttcgcgaggagtgtgcctctcggcggcgacgggaaggacgcgtggattttcgacatcgacgagactctcctctccaatctcccctattatgccgcacacggatacgggcttgaggtctttgaccacgagaagtttaacaattgggtggagaagggtgtagctccagccattgaacccagtttaaagctctatgaagatgttttgaatctgggattcaaggttattctactgacaggacggagtgaaaggcacaggagtgtcactgttgataatttgatcaatgctgggcttaaggaatgggaccagcttatactaagatactcagatgatcaagggaaacgagctgtactctacaaatcagagaagaggagtgagatgga

SEQ ID NO: 8043 - DNA, 437 bp, Glycine max
  Clone ID: jC-gmfl02220090e05d1
atgaattatttgcaatgatattcagtatacgaattgatccactttcgttatgtacaattcaaacagcaattatttgcaaatgaatgagacatttactatggaatgtaatacatgggatttggaagcttgaaggaccgaacagatactgaagaacctaataaatcgctccactggtcaccagaatttccaagaatcctgtatccatctttctccatctcactcctcttctctgatttgtagagtacagctcgtttcccttgatcatctgagtttcttagtatgagctggtcccattccttaaacccagcattgatcaaattatcaacagtgacactcctgtgcctttcactccgtcctgtcagtagaataaccttgaatcccagattcaaaacatcttcatagagctttaaactgggttcaatggctggagctacacc

SEQ ID NO: 8044 - DNA, 516 bp, Glycine max
  unsure (1)..(516): unsure at all n locations
  Clone ID: jC-gmfl02220090e06a1
aagattttatccaattgaaattttaaaaatgactgggataaacttaagaattcaattattgaaattgaataagtaaacaatttaattggattggtcgaatggtatcaaaaaaatggagtactaactcccatttcttatttattattgaattaaccgatcaacttgctttgttatcgaacatttctttttgatttcaaaaattttccggaaaaaatttgaatctatttttatatgcgaatcaatcctactacttctggtcctgaggtttctgcgcttgaaaaaaaaaatctgggacgtatcgcccaaataattggtccggtactagatgtagcttttcccccaggtaagatgcctaatatttacaacgctctgatagttaagggtcgagatactgttggtcaacaaattaatgtgacttgtgaagtacagcaattattaggaaataatcgaattagagctgtagctatgagtgcgacagaaggtctaatgagaggaatggaagtgatngacacagga

SEQ ID NO: 8045 - DNA, 404 bp, Glycine max
  Clone ID: jC-gmfl02220090e06d1
aaaaaaaccccccaattttaaaacccttttttggaaaaaggggaaaaaatgggttacggaaaaaaaaaccaggggggaaaaaaaccggaaaaaaacaccattaggggggtttaaaaaacaaaaaaaaaaccggggggggaacacacccccaaaggggaaggggagtgggaaaaaccaggggggacccccgataaaaaaattggggccccccccttattaaacccggggggggggaaaaaaaggggcccacccattgaaacgggggggggcctctagaatttaaaaaggggggaggggggtgttccaaaaggaaaaaaaacaccgggtttaaaaaaccgtaaaaaccctttattttataaagggggggggcgaaaaacccccccacaaaagaggggaattttttt

SEQ ID NO: 8046 - DNA, 495 bp, Glycine max
  unsure (1)..(495): unsure at all n locations
  Clone ID: jC-gmfl02220090e07a1
gtgacaagttccattctgagtttcctagattcctgacagggttttaaggttgtgggtacttgatgttgggaaaaaaggtgtggcctttactctcattggagaatgtctgaatctgcttggcactgtcgttgaagttgaaccatgaaaaaattagcttttataagaggcagtaatgtgcctttgggaatgtgagcatgatttgcaaatggggttgctctgaatagtttcacaagagctctcagcctctcaggaaggaaaaaaaaggccttgtttttttttttttggagaaagtgagagtgaaaaaaggtcaaggaaatttcttttcaccatctttttttatacgggaaatagtttttttttttccttttcttctggaagagtctttgatagttatggaagattttgatatgctgtgaagagtttgccaaagttctctttgttagcaagtgatattggtttgtgccttatgctcaaacctgnaagtcaatggtggag

SEQ ID NO: 8047 - DNA, 453 bp, Glycine max
  Clone ID: jC-gmfl02220090e07d1
aaaataatactttattattaaaattaaaattgattacatgatgattggatcgtggacatacaaatttattcccaacaaattccccctcccaaatgatatagattgaaccaagggactttcagctatttattctcaatactaatataaaaactagcaacgtatgcatcagaccttgctcttaacatagtttatataaaaatgctaacaacacattatcttatacactcttttcaatacattttttttattgcttgaaattttttagatatcacaaaaatatatgggtcctagatcttattttcatgattttgtaattttttattatttgtaacttatggtagaatatgtgtcaagagaagtgtgttagagagtgtgttggtagtacttctctaatctatatagagaccattcactggtaatccaccatcaacacaaatggtctgtcctgatatg

SEQ ID NO: 8048 - DNA, 438 bp, Glycine max
  Clone ID: jC-gmfl02220090e08d1
ggataacttgatattattttattacatacatgcatagatagcctgctctcaaataagtcggcaggaacaaagatagagagattcaacgatcttcaaatttcacatttgccagaaatatataacagaaaagaggggtatgggatatgagttaagttttgatcacattcaactacactatcccaaaccgttactcttaagactttgaacttcacttgtactctaggatcatgttgttctcaggagctaatccaacacaagccctcaggatgttttccagcatagctcgctgctttgacaacgcattcaccactggtgtacccggtggaaccagaggggccttggtcaggtaactaaggatggtcgcaactgggtggaatgagtggaattttccctcattttcagctttaaactcgattcgagtgctgagctcagcaagaa

SEQ ID NO: 8049 - DNA, 424 bp, Glycine max
  Clone ID: jC-gmfl02220090e09a1
gctcaatctacatacattataactggcacagacactaacaatgacggaacgataaatgaagcctgtgatgatgcacgatgcctcagggccttgccatcttggcatgctgacagctgcttaagcctctaaagcgctatcgcataccacgctattgaatgcattgctcggcacgcagactcaaagaccctggccatctaaaatatgctcgagcataccgcaaggctacggatagtctgacaccgctacatgcacctggcgagctcgacgcctagactctcagtacataccctgctcatgttatgcatgttatgtcatcatctaagtccaatgagaacttacatctgctgtacgacacctataccactgttcgtacacactcagtatcgtctgacaatgcttatatccagcttggtgcagatcgctc

SEQ ID NO: 8050 - DNA, 524 bp, Glycine max
  Clone ID: jC-gmfl02220090e09d1
atcagccaaatagaattatatatattaagataacagtaccaggggtactgtggttacaatagagttaaagaaaacgtagtgaatccacctgccaagctactcagcttggggaaatccacccactcaggagattacataatcaggccccttggcttgtgaaccctcctaaactacatccccgccattagaacccatcctaatctgctgaaaagcatattggtaaattggtggaccaataattgtagtgaataatgaagtctttctccgatgctctaagccacgaccacaacaggaacagagcatcatccattagcttagcagcgttaaatgattcattcgagaaaaggatcttatttctgtgctgccatattgaccacgttaatgccacccaccagcacttccacctatgatttctttttcctccattcatcccgttttgatgctgcaaaaaatggtacctagggataatggggaatgcccctactattccagtccatgctagagtatcccaccttagagctaga

SEQ ID NO: 8051 - DNA, 501 bp, Glycine max
  Clone ID: jC-gmfl02220090e10a1
gtgctggggcacattctcactctcgtttaccaagagcgagatatctatttagatctctgaaaaacagagtttcatttcaattcagtcttattattagggtttgccgattgagagagaaagagaaatgggagaacgaaaaggaatcccaatggctttggggctcttggcgatgatcctcttcttcattgcttcctcttcctctcacctcgttcgcgcttccgatgacgccgacgacgcgatcttctacgagtcgttcgacgaggattttgatggacggtggattgtatccgacaaggaggattacaatggtgtctggaagcatgccaagagtgatgggcatgatgattatggacttcttgttagtgaacaagccaggaaatatgctatagtcaaagaacttgccgagtctgtcagtcttaaggatggaacagttgttcttcagtttgagactcgccttcagaatggcctcgaatgtggtggtgcatatattaaatatcttcg

SEQ ID NO: 8052 - DNA, 469 bp, Glycine max
  Clone ID: jC-gmfl02220090e10d1
aaaaaagaaatttctgaagtgaataaaaatggccgtatctaagaaaattccagatacatagtttggcatcactctaaagcgtaaaaacagcctgtttccaaccaagttaccatgtctctaggtatgcaggcatagaactaacaatttctaagccaagtacaagggactgctctttccagcaatcattcaaaaagcaaatgaagcatataaagttagctacattcattgcccatgtcacttggaagtctcttcatcttttgtcgccttaggatgtattcccttcaacttaagaaattgttacaaagaacagaaaccaaattaaagaaaaatcacgatccaattagatcaggtgtttcagcctcaatggacagcaatgcagtgtgaacttttccagtccaactgtccagtcgatcccgtaaggatttgatctgttgaatacccagaactcttggctgcacccaggaaacat

SEQ ID NO: 8053 - DNA, 412 bp, Glycine max
  unsure (1)..(412): unsure at all n locations
  Clone ID: jC-gmfl02220090e11a1
gcgtgctcggtgctgcccaagttctacgccgaagacgtgcacccggagagttggagagtgttcaactctttcgggaagcgttacattgtcacggctagtcctagggtgatggtggagccgtttgttaaggcgtttctcggggctgacaaggtgcttgggactgaacttgaggccaccaaatcggggacgttcactgggtttgttaagaagcctggtgtgcttgttggggagcataagaaagtggctctggtgaaggagtttcagggtaatttacctgacttgggtctaggtgatagtaaaagtgattatgacttcatgtcaatttgcaaggaagggtacatggtgccaagaactaagtgtgaaccactaccaagaaacaagcttttaagtccaattattnttcatgagggta

SEQ ID NO: 8054 - DNA, 297 bp, Glycine max
  Clone ID: jC-gmfl02220090e11d1
aacaaatgaacccataaaagcaagaaaacaagttggggactggtgctgatacaaaacgcccaatgataaaatgccagacaacttattcttacaaacgcagcaggacctacttatttcatataaagcttgctctccacattagatcttccaaaaaatcaacggttgtaaccaagacagttttccatccatctggatctaaaaacgaagtggttttttgaataaggccaaaaattggccctggttgccgagaaaacatccctccaacctcttttatgacttggttaactaccttacaac

SEQ ID NO: 8055 - DNA, 393 bp, Glycine max
  Clone ID: jC-gmfl02220090e12a1
cctcggggaattccaattccacattttcaagaaataaggaggcaaaaatgttcatatatgaattggaattatttgttttcttattaggcctatcctgaagccaaaggaaatgagatcggaattcctcggggaattccaattccacattttcaagaaataaggaggcaaaaatgttcatatatgaattggaattatttgttttcttattaggcctatcctgaagccaaaggaaatgagatcggaattcctcggggaattccaattccacattttcaagaaataaggaggcaaaaatgttcatatatgaattggaattatttgttttcttattaggcctatcctgaagccaaaggaaatgagatcggaattcctcgggggtaccgagctcgaatt

SEQ ID NO: 8056 - DNA, 272 bp, Glycine max
  unsure (1)..(272): unsure at all n locations
  Clone ID: jC-gmfl02220090e12d1
aacatgtacattaatgaatatgattatatataatttaattaattaacaaaattataaacataaattattaatatatgtattattataatttaaataataattaatattataanaaagcggacgttggagtcatttacgggattacgagctaaatagtcggaaggacgacctttattttaattaattaatttttttttttttattattttttaatattaaatgaaaatttattgggggaattttggggtggtaataaaaattaaatatttttt

SEQ ID NO: 8057 - DNA, 604 bp, Glycine max
  Clone ID: jC-gmfl02220090f01a1
gattccttgaagatacacaaacagctgatggttcatggtatggaaattggggagtttgcttcacttatggctcttggtttgcacttggaggtctagcagctgctggtaagacttacaccaattgtgctgccattcgcaaagccgttaaatttctacttacaacacaaagagaggacggtggatggggagagagttatctttcaagcccaaaaaagatatatgtacctctagaaggaagccgatcaaatgttgtacatacagcatgggctcttatgggactaattcatgctggacaggcggatagagaccccatgcctcttcaccgtgctgcaaagttgctcattaattctcagttggaagagggtgattggccccaacaggaaatcacgggagtattcatgaaaaattgcatgttgcattatccaatgtacagagatatttatccaatgtgggctctagctgaatatcgaaggcgggttccattgccttccactgaagtttaatttagaatggtttgagcacgaaaaggcaaaggcattttcattaagattgaggcatattaagtgtgtgtaatcaagcttaatcaattttttcatattcctat

SEQ ID NO: 8058 - DNA, 531 bp, Glycine max
  Clone ID: jC-gmfl02220090f01d1
agtttagctacttacctcaatctttctcatgggaaagtttgccctagccaatatcctcttggtccttctcttgaacttgagcactttgctcaatgttcttgcttgtccctattgcccttacccttctcccaagcctccaaaaaagcctcccgttgtgaaaccaccggttcacaaaccaccaaaaccatgtccaccacccaagtcatctccaaaaccaccccatgtacaccctccctatgttccaaaacctcctcactaccctaaaccaccagttcatccacatccaccccatgtcccaaaacctcatccaaagcctccagtgcatccccatccaccttatgtcccaaaaccaccagttgtgccagttacaccaccatatgttccaaaaccaccaattgtgaaccctccctatgtcccaaaaccgcctgttgtgccagttacaccaccttatatccctaaaccaccagttgtgacaccaccatatgtccctaaaccaccagtggtgccagttacaccaccatatgtccctaa

SEQ ID NO: 8059 - DNA, 568 bp, Glycine max
  Clone ID: jC-gmfl02220090f02a1
tccaaatacaaacatggcaatgaagaagttcttgtgggttgttctgtccctttctttggtccttggagtggccaatagctttgattttcacgacaaggatttggagtccgaggaaagcctgtgggacttgtacgagagatggaggagtcaccacacggtttcgcgaagccttggtgacaagcacaagcggtttaacgtgttcaaagcgaatgtgatgcatgtccataacaccaacaaaatggataagccttacaagctgaaactaaacaagtttgctgacatgaccaaccatgaattcaggagtacctatgctggctcaaaggttaatcaccatagaatgttcagagacatgccacgtgggaacgggaccttcatgtatgagaaggttggtagtgttcctgcttcagtggattggaggaagaaaggtgctgtaactgatgtaaaagatcaaggccattgtggtagttgctgggcgttttcaactgttgtagctgttgaaggcattaaccaaatcaagacgaataagctagtctccttgtctgaacaagagcttgtggactgtgacacc

SEQ ID NO: 8060 - DNA, 534 bp, Glycine max
  Clone ID: jC-gmfl02220090f02d1
gtttttcctgcgctagaactgtcggctattcccgggtcgctcgacgagctactagtcgcgccctttttttttttttttttttttttttttttttttttatcttcaaagtgatcaaatcatattgcaatctggactctagttgatctattgctatctatataaatgctttaaagtaaagttatcattttgcatgaaactcttggccatagaaaggagattacatgagaaattgctagcactcaaatcatataaaatatttatttctttgggatgtaataagcataaatatattgatggatacactggcattgaatctgagatactaatagaaaacaacaaccaaagctaattagagtatgattttgtgggaagcattcaaacttcaaagttcatctttaggagatgatgaaggtcctgttggattattggaggagtttttgattgggtaggaagccaacatagctatgccacaaagtccctcctttttagatatgttcctttgcattctgatgtaaccctgttctccccattctg

SEQ ID NO: 8061 - DNA, 601 bp, Glycine max
  Clone ID: jC-gmfl02220090f03a1
caactatgatcaagtcactgtcccacaatccaaaaaacgccaattccaccgcattcacaaggcactttgccaaaaaatctggtgtttttatcaagatcatggcttctgctacacccacagcagctcctatcacctttggattcaagaatttgttggaaacattcactgttgatgtgcatagagcagagaacaggccactgaatgtgcccttaatagccccttttaccattgctacctctagattggccaaggtggagaacgtggccataagggttgagttgagcaatggttctgtggggtggggcgaggcaccaattttgccttttgttactgcagaggaccagaccactgccatggccaaggcttctgaggcatgtgccttcttgaggagatgtcctgcactcactttgggttccatgttgggggagattgctggtattcttccagggcatcaatttgcttcagttagggctgggatggagatggcaataattgatgctgttgcaaataggattcgtgtgccattgtggaggctttttggtggggcttcaaataccataaccactgatattacaatcccaattgtttcttcagctgaagc

SEQ ID NO: 8062 - DNA, 467 bp, Glycine max
  Clone ID: jC-gmfl02220090f03d1
caataattaaacctatttttaaaaatttgctgtatttccatgttcatatcatattacatccatatctcatatatatcatatgcggttcctagcttttagcaagtaggaactagttattccccaatcaaaaaaaaaaagaaaaagtaggaactagttactatttggtgcaagacctcgaaggcagtttcttttacagaaaagggtgaggaatcgaataagttaaatacatagcaattggggtgcttataaaaataaaaataaaaacatagcaattgtggataagtattggctactcattccggacaagaaatcttcacgtatggttgtactgtaaccacagtttcacaccttaattaggcaatttttaaccaacttgtccatttatgcttttccagattcttgtgttggcataattatcttttacattaagcaaggttgtcccagtgaaggaatccaccatgtcccct

SEQ ID NO: 8063 - DNA, 530 bp, Glycine max
  Clone ID: jC-gmfl02220090f04a1
aggaatcgcaacagcaaaagaaggtggtctcattgtttgtgatacttccaagggtttgctcaaggttacagaagaagatggttttagtgttcttgtttcacacgtaaatggttctcagttaaggtttgcagacgatgtgatagaaggctcaaacgggaatgtatattttagtgttgctagtacaaaatttgatcttcaagattggtatttggatgtgttagaggcaagacctcgtggacaagttctcaagtacaatcccacatcaaatgagactgttattgttcttgataatgttgcatttgccaacggcgttgcactctctaaggacgaagattatcttgtggtttgtgaaacttggaaatacaggtgtttgaggcattggttagaacgagcaaacatatgcacaacagatattttcattgaaaaccttcctggtgcacctgataatatcaatcttgctcccgatggatccttctggatcgctttgatttcagttgacttctgaaggatttgagtttgttcacaacttc

SEQ ID NO: 8064 - DNA, 508 bp, Glycine max
  Clone ID: jC-gmfl02220090f04d1
actaacaaaatgtgaacagagaatatgcattatggaacaatattctcctacatgtgcttggtctaaatcatacatatccatcatgggatgcttctttcgcttgatccaagctgaggcacacctttattcaaggagggctaaacttgactattctatgcactatacaatggtaattttccaacaaagttggaattaagactaccaaggtaaaggtggtcctcaaactccacagctgaagtcacaaaattaatcaccttcccatcactatcatcaagctttcttattatcctgccattagttgccacattcaccaccgttgctttcttcttgcagccattgacaaggttaattagccttggaaacgatgcaaccaagtgcttagttatcttgtagttgtggacaaactcaaatccttcagaagtcaactgaatcaaagcgatccagaaggatccatcgggagcaagattgatattatcaggtgcaccaggaaggttttcaatgaaaatat

SEQ ID NO: 8065 - DNA, 485 bp, Glycine max
  Clone ID: jC-gmfl02220090f05a1
gttcgagacccttattgacatttcagtgatagagatattgtcaaggcatgcttctgatgaggtctaccttggccaaagggataatccaaattggactacggattcaaaggcattggaagctttcaaaatgtttggaaactgactgggatctattgagggacaaatcacacagaggaacaatgatccaagtctgaaaagccgacatgggccagttcagcttccatacacattgctccatcgctcaagtgaggaagggatgagtttcaaaggaatttccaacagtatctccatctaaaatgtgtgtgtggtttgcttatctatcgtgcttctgaataaaatagacaatacttgtctatggttattattggctgtatgtctgtatttggatgctctcgatcggcttgcatgtaataagagtgttttcactgtcactcttgattccgatcatcttaattattgttactagtaataatgtggaagctgta

SEQ ID NO: 8066 - DNA, 450 bp, Glycine max
  Clone ID: jC-gmfl02220090f05d1
caaaaacaattgctctattatttaacctagaattaacaaacgtacagcttccacattattactagtaaacataattaagatgatcgaaatacaaagtgacagtgaaaacactcttattacttgcaaaccgatcgagagcatccaaatacagacatacagccaataataaccatagacaagtattgtctattttattcaaaagcacaatagataagcaaaccacacacacattttagatggagatactgttgggaattcctttgaaactcatcccttcctcacttgaacgatggagcaatgtgtatggaagctgaactggcccatgtcggcttttcagacttggatcattgttcctctgtgtgatttttccctcaatttctgccagtttgtttccaaactttttgaaagcttccaatgcctttgaatccgtagtccaattgggattatccc

SEQ ID NO: 8067 - DNA, 472 bp, Glycine max
  Clone ID: jC-gmfl02220090f06a1
gtggtgccttatcgctgtggttttcatcgtcttccttctcttatatttcttttttttttttttgtcttcgccgcacgccgaaacaatggccggaaaaggagagggtcctgctatcggaatcgatctcggaaccacctactcttgtgtcggtgtgtggcaacatgaccgagttgaaatcatcgccaacgaccaagggaacagaacgacgccgtcttacgtcggcttcactgataccgagcgtctcatcggtgatgcggctaagaaccaagtcgccatgaaccccatcaacaccgtcttcgatgccaagaggttgattggtcgtagattcagtgactcctctgttcagagtgatatcaaattgtggccttttaaggttattgctggtgctgctgacaagccaatgatcgtggttaactacaagggtgaagagaagcaatttgctgcagaagaaatctcttctatggtgctcatc

SEQ ID NO: 8068 - DNA, 515 bp, Glycine max
  Clone ID: jC-gmfl02220090f06d1
ataaaaacaaactttttaacttaccatagttcaattattttgtggacatcatcatgctaagatgttcactcatgacaacacatacaacaaataaaatcgccaacttctttcaagtaacatagtactgtttacactaaacatgcaaatactactacagcaacttgaatacacattattatccatattttaaacaagattattacacatgaaacagtcacggccattggtctaacatttatagaaagaggtcataggagcaaattgaacgaaaccagcttcagttaacatcaactcgaggaacctcaaactttagatttggaatcatagtttcaaatgcttcccatgaaccaggtcatgtcttaggagctaatagaatgaagccagtttaagttaacctcgactcgaggaacctctaacttcagatttggaagcatagcttcgaatgcttcccatgaagcagctgtctcttcatcacataccaccaacttcaaattctcaagattggttactgagta

SEQ ID NO: 8069 - DNA, 409 bp, Glycine max
  Clone ID: jC-gmfl02220090f07a1
aagtaacaatctcattcttgctttattgaggcctgtcatgcgattcacaatgcttcaactgttgaagaatttgagatctcattcccaaggaagggcgatcagtgacgctgatatcctgtactggctgaacttaccaatgaacaacagagttagaacttctcacatctagagcttcgagcagaagagcttgactactgaactcttgacacttgagcttctgagtgctgtctatcctaaggctgtccatctgcacctggtcatcatgggtctacgctatgatgagacgaggttgaacgcctcttatatatacagcgttgcacactagctgcggcgttctatacacgtgatacctcatgatattacggcggttaagcagatgatgatcctcactcttgcggtcagcataatg

SEQ ID NO: 8070 - DNA, 391 bp, Glycine max
  Clone ID: jC-gmfl02220090f07d1
gtaaaaagcaagtaacattaagttggattgggatacacaagataattcacattatctgaagtacattgcaataacatatacttcaccaaacacaaatctaaaaactctcaaaagtccacaagtcatccttttctttcatgctcacttgccggggacgaagttggtggcgtaggcccaggcattgttgttgactgggtccgcaaggtgatcagcaaggttctccaatggacccttaccggtgacaatggcctgaacaaagaacccaaacatagagaacatggccaatctcccgttcttgagttccttcaccttaagctcagcaaaagcctctgggtcatcagcaaggcccaatgggtcaaagctgccaccagggtagattgcgtcagtgacc

SEQ ID NO: 8071 - DNA, 387 bp, Glycine max
  Clone ID: jC-gmfl02220090f08a1
ggaacaagggcgcataatttattaaagccacgaaagagaaaacaacatagtgaagtctcttacatgacttgttgacacacagctgaaacaacataaagtgaagctagtgcccctatttgaacgcatcttattacatatagatagataggagcaagctagattgccgagcggagatggaactactgaatgtagtacaggggatttggacgctgactggtcctgctttcgcctctgtggcctccgaggagatcgctccattggtctccaatgatcccaacaatgttgtatccctgccttatcagtacctctctcgctgactgatttgtatgaaactgcatttggagtggaaggatcttgtggatccttgagaattaatttttcccatgt

SEQ ID NO: 8072 - DNA, 490 bp, Glycine max
  Clone ID: jC-gmfl02220090f08d1
aacataggacactgagaaatcctgtctgattcaaacgaaaaacatgtttaaccaaatccaaaacgcactatcaaaatgataacattattattcaaccttccaacctttctcaatgtagaagagagagagagagagagagagagaacttatctgagcatgcgttccctttagcgtagcaatcacactatcacttcaggataagctcttacccttgaaaaaaagccattcttttgtagacctttgcttggtatccatatagatcaaactgaatggaaaatcagaaaattaaccaaacataactttgactaaaacgaaatgtttgttcaaaccgcaaaacgttgaataaaaagatgtcttgcaactataataatgaacttctcacactgccctcatgatatcaatccataacttgtgaggagaagaaattttgacaactttattttgcactatttgtgcatcacttggaggcaaatcctggtctttttgggaa

SEQ ID NO: 8073 - DNA, 548 bp, Glycine max
  unsure (1)..(548): unsure at all n locations
  Clone ID: jC-gmfl02220090f09a1
cttcatgagacatcacagagtcagtctatcatatcagacttagacaagtacttagaagaaccaatctttccacgcaattccgattttaacatattgaactggtggaaagtccacatgccaaggtacccaattttgtctatgatggcacgtgatgttcttgggactccaatgtcaactctggcgccagaattggcatttagcactgggggcagagtgctagattcttctcgtagttcactaaacccggacacgcgagaggctttgatatgcacccaagattggctccaaaatgaatctggaaatctaaatccatctccaatccattctgctctacctcttctcatcgaatgaagttaattttttcaaggtcttattgaagaagcatcttagaattgtcgaggtctcctttgaagtgatctagcctttgcaaatattctgtgaagatgcatngtatattctagaaataccatgtagattnttaaatattatagatctnctttctataagtggtntaatggactagcacacggctgaatctgatttggaaa

SEQ ID NO: 8074 - DNA, 493 bp, Glycine max
  Clone ID: jC-gmfl02220090f09d1
aaaagttaaaacatgcatgattgcatttattattttggtttccattatactaacacaactctctttattaatgacaaatacaaatacattcagccactccaaatacatgacttaagcatacacaactgattaaggaatctggttccttcaatttcacatttatttaaaaccaggaacagtacttaagcaaccatagggtccttagatagagatactgttgggaattcctctgaaagtcaatccctcctcactagaaggatagagcagagtgtaaggcattttagctggcccatagcggtttctcaatgtctcatctttgttcttctctataagcttcttttcaatctcttcaagcttctttccaaacctcttaaatgcctctaatggaccggcatcagaagtccagtagtcaccaccatctctctgcccaaggtagaactcatcagatgcgtgccttgacaagatttctataactgtaaggtcaatgagggtc

SEQ ID NO: 8075 - DNA, 495 bp, Glycine max
  Clone ID: jC-gmfl02220090f10a1
ctcaacgttcgtcaaatcggtggaagaaatcccttacaacatctccgtaattcagatcagtaaggttctcccctctgccgcagcggaagcccctgcacccgcacccacccaacaaaacctcaccaacattatgtcaaaacacggttgcaaagtcttcgccgacactctctctgctcaacccgacgctctcaacaccttcaatgacaacctcgacggtggcttaaccgtcttttgccccctcgacgacgcgtttaaagcctttctccccaaattcaaaaacctaacaaaatctggtaaggccgcgcttcttgaattccacgctgttccggtttaccagtccaaagctactctcaaatccaataacggacttcagaacactctcgccactgatggcgccaacaagtttgacttcaccgttcaaaacgacggtgaagatgttactctgaagacgaagcttacaactgccaagatcaccgacactttgattgatgaaca

SEQ ID NO: 8076 - DNA, 561 bp, Glycine max
  Clone ID: jC-gmfl02220090f10d1
gcataacatccacatgatttttaattaaaaataaaaaatacacaattttgttgcaggaatgagagggcaacccttgggactataatcttgagaagccacttcggcttccaaaatagtatcccgacttccagagcaaaacacaaggctaataatacaacttgaataacaagatacatgcaggcagaagaaaaatgtttctagtatgtcacgatagaccaaataaaatttttattgctgactagtgacttgtgtgctaagggttctaagtgcgtacataatccctatggctgcataaacatcccctaccggaatcacaaattcacatcagttggaggagtgtatactagcacatacttactagttacataacagcagagtattcaaccactgttcgttcatagatgcatatcaaatcaacaaccttgaaggtcacgccacctgagataaactaaccctgcccgataatgagcgtatgccccagccaccaccaatatatgaaacaattggtgactgtgtccggcaatgtcaaatttcccaggcatccatcgttctggaaatcta

SEQ ID NO: 8077 - DNA, 490 bp, Glycine max
  Clone ID: jC-gmfl02220090f11a1
cagtttttcttctgactgggagtggcaacgcaatttcatccactctgcaccttatcagtatggtttaatctcccttttttttttgttgaattaaatgaatgcagatcgtggtgaagctcaaaaaggaagcgctgagacatttttccgaaaagtaaagttctggaaagaagatgctgagggagatgctccacctgtttttaatatagacggtgtgaactacttccacgtaaaggttgctggattgctatttgttgctactactagagtcaatgtctccccttctcttgttttggaacttttacaaagaattgcacgtgtcatcaaagattaccttggtgttctcaatgaagattcctttagaaagaacttcgtgctcgtttatgaattactggatgaagtcattgattttggttatgtgcaaacaacatccactgaggatttgaagtcatatgttttcaatgagccaatagtgattgatgctgcacggatg

SEQ ID NO: 8078 - DNA, 235 bp, Glycine max
  Clone ID: jC-gmfl02220090f11d1
ttaattacttttcttttttttttatttttttacttcttaactaaacggagtgccaacaaaggtgggttgcttttgggttaaaaccccctttttaaccccaaatgtcaacaaaaaacccatttctttttctttaaacctattcccctccttgtgaaaacatctaccacatttttatttttaccccccctttctttaaccccctaccattttttctaaaataccccccccccataaa

SEQ ID NO: 8079 - DNA, 519 bp, Glycine max
  Clone ID: jC-gmfl02220090f12a1
gagaaaagagccaaagaaaattgcagtactccaggtgcactctgtgttctacctctgtatgccatgcttcctgcagcagctcaacttcgtgtatttgaagaagtcggggatggagagcgccttgttgttgttgccacaaatgttgctgaaacatctttaacaatcccagggataaagtatgtggttgatactgggagagaaaaggtgaagaattatgatccctctaatggcatggagacatatgaagtacaatggataagtaaggcatctgccgcacagcgtgcaggcagatctggaagaactggacctggacactgttaccgtctctattcttctgcagcctttagtaatgaatttcctgagcactctcctgccgaagttgagaaagtacctgttcatggtgttgtccttctcttgaaatccatgcatattaaaaaggttgcaaacttcccatttcctacttctcttaaagattcttctctgcttgaggctgagaattgctttgaagctcttgaagca

SEQ ID NO: 8080 - DNA, 522 bp, Glycine max
  unsure (1)..(522): unsure at all n locations
  Clone ID: jC-gmfl02220090f12d1
agaagtataataaggtaataaagtgtatagtaagaataatgaataaattataataaagtagataagtataagttattaaaaaattatattataattaatttattagaanagatggggttgtagtcttttangggttacgagataaatagtaggaggaagcactttatatttttatatttttttaattttttttaattattgtaaaaataaaaggaaaattattatgggggaatttgggggtgtaaaaaaaagggattataagagggaaaatttatattaaaaaaaaaaaaagggggaaaaagttaaaaaaaaataagaactgtttaaagaaaaaggtaaatataatggtggaagagatatatttgttttgttggggagaagaaaataaaaaatatttttgtatttagatagatgtataaagagggaaaaaaaaataattgttttgataaaaaaaaaaaaatttatttttggggaggggaagcggttaaaaactttttgggaaaggggggtattttatttttc

SEQ ID NO: 8081 - DNA, 547 bp, Glycine max
  unsure (1)..(547): unsure at all n locations
  Clone ID: jC-gmfl02220090g01a1
ggtgatttggatgaattgaaccctaggagcaacataacaactgggcttcaagcatcacaagttgacaatagaggtagtggacttaccgttgcagctgagcgagtatctgatgatggatacaactggagaaaatatgggcaaaaacatgttaaaggaagtgaatttccacgcagttattacaaatgtacacatcctaactgtgaagttaagaaactatttgaacgctcccatgatggacaaatcactgagataatttacaagggaacacatgatcatcctaaacctcaaccaaaccgccgttactctgctggaactataatgtctgtgcaagaagacagatctgataaagcttctttgactagccgagatgacaaaggatccaatatgtgtggccaggggtctcacctggctgagcccgacggtaaaccagagttattgcctgtagcaacaaatgatggtgatctagatggtttgggggttttgtcaaacccgaataatgatgaggttgatgatgatgatcccttctcaaagcgaagaanaatggacg

SEQ ID NO: 8082 - DNA, 574 bp, Glycine max
  unsure (1)..(574): unsure at all n locations
  Clone ID: jC-gmfl02220090g01d1
gctgaacccgtttcgctttcaatcgaagggaagaacaaacattcaattcatggcagctgcaaagcttcaagctttatggaatcacccagctgggcctaaaaccattcacttctgggcacctacctttaagtggggcatcagcattgccaacattgctgatttctcaaaaccacccgagaaactttcctatcctcagcaaatagcggtcacagctactggaattatctggtctcgttacagcactgtaatcaccccaaaaaattggaacctgtttagtgtaaacattgcaatggcagggacaggcttataccaactctcacgcaaattgcggcatgattattcctctgaggcggaggcggaggtggctgtcacaaaagaatgatattaaatattttaaaagtccaagttattgtgtagttggaggcagatgcccaggctgtaatttccgttatataattgtattcttacttggtagttcatttgtactttcccaagtctcaaactgttaaagcattctcacttggtgtntgatgtggcaaaatagggaatcaagataagcgggcactgaatatat

SEQ ID NO: 8083 - DNA, 418 bp, Glycine max
  Clone ID: jC-gmfl02220090g02a1
ctagttcaagatcgcgagcggccgcccttttttttttttttttcccgctcaggatcagtgtcagttatgcagtttttaaccttaaaagccttcttatgccttgagtcaacaagggcaatcagcatccgttgagaatttgatgacaaggatcatggcataaacctcattttccttaataaccttccttgtgattggaggattccctttccatgtctaaggaaaagatgtgcttgatcatgctgtgcatttcgtactgatatgtcaagaacttcattcccaattaatagctgctagctgtcttcataccatttcacatagctatctttgcttttacaattatttttgccatcatgatttataattacttctcaaattttacataatacactatcattatttaaacttttcatttttatta

SEQ ID NO: 8084 - DNA, 589 bp, Glycine max
  Clone ID: jC-gmfl02220090g02d1
tgttccttaataccagccagatactcagcacgtacccggaattaattccctttccttcggcttcaggtattcggcggccgccctttttttttttttttttctaaaatgttactatcatataaagttgcaaagtaacgacatcattctttcagaaagtaaaaagggatggaccgtgaagaagttccccacttgtcaaccattacctgcccttggacgaaaatttatgatcggaaaatacagaaaacaaacttatttacactgatagttttttatgaccattaataagacagtcaaaaacatatattgtgacctgagaataaacactacattagtgtgccaggcgctgcttcatgtatatacggatgaaatataaggagaggaaaaaaaagaatgagccatctcagcctttgctgcaccctacgcacatccttccttacaattctgaataaaaaggaggatttcccatgaaaatctggcttaaggaagttcagtcctcatcactatcatacacaaccgccatccgccgatgggtggttattttccttggagaagagtcatcatcagattcaaatcccttccttttggcact

SEQ ID NO: 8085 - DNA, 583 bp, Glycine max
  Clone ID: jC-gmfl02220090g03a1
gtgaagatgtagagaataatgaagcagacaggtttgattggatttgtatgggtcatgaccccccgttgatggaatccaatcaaacctgtctgtgaagatgtagagaataatgaagcagacaccttaaaatcaagtccaaacccagatgaagttgctacatctattagtgttaatgaaacctcttctgtaaagttttctgccaagtccagtttgaagacatcctcaaggcatgatcttgctatggttttcacctgcaaggtctgtgaaacgagatccattaagacggcttgtcgcgaatcgtatgagaaaggtgtagtggtggcaagatgtggggggtgtaataaccttcacctgattgcagatcaccttgggtggtttggtgaaccaggaagcgttgaggacttcctggctgctcgtggagaagaagtgaaaagaggttcagttgacacactgaatcttacattggaagatttagctggaaggaaaccttgaaagatagaatttgaccaagtgtatgttctgcatagggtgtcactgaaaagttggaagtgcaagggaggtaacaataggtggttttggaaac

SEQ ID NO: 8086 - DNA, 553 bp, Glycine max
  unsure (1)..(553): unsure at all n locations
  Clone ID: jC-gmfl02220090g03d1
cataaattcctttcttggctaaattttgcacatgaaggtgtatcatggtctaaaaacattcctttggcaggcaccaaaaataattgataaagcaaacagtacattgaatatgttgctttttaatattactagcataattatagacagaagagccgagtttacaaaaccaactattgttacctcccttgcacttccaaactctcagtgacaccctattgcagaacatacacttggtcaaattctatctttcaaggtttccttccagctaaatcttccaatgtaagattcagtgtgtcaactgaacctcttttcacttcttctccacgagcagccaggaagtcctcaacgcttcctggttcaccaaaccacccaaggtgatctgcaatcaggtgaaggttattacaccccccacatcttgccaccactacacctttctcatacgattcgcgacaagccgtcttaatggatctcgtttcacagaccttgcangtgaaaaccatagcangatcatgcctttgagatgtcntcaaactggacttggcagaaaacttta

SEQ ID NO: 8087 - DNA, 577 bp, Glycine max
  Clone ID: jC-gmfl02220090g04a1
gcaagccacaaaaaggtcaagggttgctttgctgcaaggctagacaaccttgatgacgatctcatggaggatgatgtcatcacacatgaagagtttttccctacaaaatcaaactccaccctccaatttgaccatggaagctccaatccctcattggcctcttcctccaagagaaaatccaaagtgcatgaatgctccatttgccataggagcttctcttcgggacaagcattggggggacacaaaaggtgccattggatcacttcaaatgctcctgacacctccacattaacaagatttcaacaattccaagagcacttggatcaaatacccaaatttgatacctcttccgagcctcttgatctcaaattagaccttaaccttcctgcaccctctaatgaccttgcaagaaggaatgtgaacacagaattttacttgcagccttgggttgcatcaaaagatgctaaagatgataacaataatagccattgtcaaagtctccataaccctaatacaatgttgatgttgacaatgatgaggacaaaaacaacaacaacaacaactcaatgcataacat

SEQ ID NO: 8088 - DNA, 512 bp, Glycine max
  Clone ID: jC-gmfl02220090g04d1
attaatcagaataaatcttgatatcaaaaaaatgaaatttacagaagatatcaaaaaattgtaagttatatgtttttttgatgatttgataatctccgtataagtacttacgttttctatgtttatatagtaaaagaagaaaagagaaaacttcaaggcaattgccaaatgcgatcctcaaaatgctttgctttgtcaaaatatcttcagcagttatcagtttcctcatcagtagcagttgaactgatccccacctgcaaccatggcgaagaactgccaccagctttcatgtcctttagctcactcagtttcgccaacttgatcttactatcagcttcattatccatgttttgcattgagttgttgttgttgttgtttttgtcctcatcattgtcaacatcaacattgttattagggttatggagactttgacaatggctattattggtatcatctttagcatcctttgatgcaacccaaggctgcaagtaaaattctgtgttcacattcct

SEQ ID NO: 8089 - DNA, 448 bp, Glycine max
  unsure (1)..(448): unsure at all n locations
  Clone ID: jC-gmfl02220090g05a1
ctccacactactacatcactttactttactctaatcactactaactcttctctatcttccatctatcgccaacattccctccgtcttctcattatttactcattctatatccgttatctatccatatatttaatagatatgcggctctatcttnanntnncncnnantcnnnaannntnnnccnnccacaccataccttctatttccagttgacctatgatgtcagcctggtcttcgctcaatctgggagaaatattatgaagaggcacatgctgtaatatttgttgttgatgcttcttgtccgtcacgctttgaagatgcgaagtcagcactggaaaaggtgcttcggcatgaggatctacaaggagcccctcttttgatattagcttacaagcaggatattcctgaaccagtatcacctgataaccttgctcaatatttggattta

SEQ ID NO: 8090 - DNA, 222 bp, Glycine max
  Clone ID: jC-gmfl02220090g05d1
aggaaaggaaaataattcattcaaaattgaacgggacaattaccatttaaaggtgccaaaagttttccacgggggaaaagccaaaaacccttcggggcaacccattatttcacaaaatggttatacaagggctgttaaaaaaaaaattgctttaaaaaaaaccgggaactgggccctttatatgaaacggggggattacaaccttgggaataaatttcaagg

SEQ ID NO: 8091 - DNA, 478 bp, Glycine max
  unsure (1)..(478): unsure at all n locations
  Clone ID: jC-gmfl02220090g06a1
ctcgagccgaatcggctcgagctcagaattctctaaaagagatctttttctgctctttgaagaaagaagggtctttgcttgattttggagatgtctctgctctcagatctcatcaaccttaacctctccgataccaccgagaaggtgatcgcagagtacatatggatcggtggatcaggaatggacctgaggagcaaagcaaggactctcccaggaccagttagcgacccttcagagcttcccaagtggaactatgatggttccagcacaggtcaagctcctggtgaagacagtgaagtgattttatacccacaagccattttcagggatccattcagaaggggtaacaatatcttggttatctgtgatgcctacactcctgctggagaacctattcccactaacaagaggcacgctgctgccaaggttntcagccatcctgatgttgntgctgaagtgccatggtacggtattgaac

SEQ ID NO: 8092 - DNA, 435 bp, Glycine max
  Clone ID: jC-gmfl02220090g06d1
gataatccagctaactcatactcaaaatgaaccagtcaaaaacttatcaatggatatgaaaagaactggaccatttaaaaaaaaaaaaaaaaaacccaactttcctcactttttgcaaataaatgatcactccaacaagagaataccatgaaaaggataacaaaagctaaaatgaaagggttacaatctgcaatgcattgcttccagacaaatcatgatgatagtagtctttcgcttaaataaccctatttttaaaacagttttaaaagcactttttgggcacaattgatggaccaaactcggcatattctgcctttgcaatccacatttgctggaaggggctaaaagatgccaagattgaaccaccgatccaaacactggattttctttccggtggggctacaaccttgatcttcatgctgctgggtgccaatg

SEQ ID NO: 8093 - DNA, 497 bp, Glycine max
  unsure (1)..(497): unsure at all n locations
  Clone ID: jC-gmfl02220090g07a1
gttcaaatgatctttgatgctttgagctgtgatcagaagaaaatgttaattcatattgcctataacctcattggacaagaaaaggcaatagttgaagacagacttcatcgtctttttggtgtttgggcaaaagatggtattgacatgttgcttcataaatctcttgtaaagattgatgagcaaggtcaggtgacaatgcaccacttgacacataacatggtaaaagatatggagtatggcaaaaaagaagaccaacctgcatcaaattatgggagcatgtgtgatttgatggaattggacaaaaacgggtatgtcatggaagaaatccaaccttcgtctaatgattacgaaccaatggaatatgaatatcaaaattgttctacctcctcttcttgagatccttcatgatgttatttaagatctgcttccctcttttccaagatggacgagaggcggcacatnctgtntntattgttttattctgaggagggcttaat

SEQ ID NO: 8094 - DNA, 323 bp, Glycine max
  Clone ID: jC-gmfl02220090g07d1
atgaaaaaagttcatgtaaagcagtggattagatgaggaaataaaaaatttcatgatcgagttttgtacgatcaatgaaatacacaagaaattgattaagataagacgaatagtagcttagctagtcacaaggagatgaaaggatgatcgatcagaagttgatgaaagcacggagaagcgtgagaaagtcatcaaagcatcgaaggaagtacaagtagcagcagcagtagttgttgatgatttgtctgcgcttgagttctttgatttccctttgctttctcatgctttctatcacatactgcttatacatacaatcattcatt

SEQ ID NO: 8095 - DNA, 249 bp, Glycine max
  Clone ID: jC-gmfl02220090g08a1
gaccatctgcagtcaattgtctgtgcataaaattagattgaagttgttggtgcatcattttacatgctaatgtatacaaaaattaaaataataataataataattcagcacagcaaatggtggagatgctcatttataaagtttcttcgtcagcttgaaaaggatcattcttagtcaccacaataaaaaaaaattaaaattaaaatttgttaaataacaggaccgggttaacagctaaaaacaagggaa

SEQ ID NO: 8096 - DNA, 375 bp, Glycine max
  Clone ID: jC-gmfl02220090g08d1
acaacaacttagtttgtacctttattccataaattaataaaataaaaaagagacatgtatatctttccttggtcttatacatcgacatacggtagctccaattattagccaacattacaggaaaagaaatttcaagcacacaacacaaacacaaattaattgaagatacacatttattatgctctctcaaacacaactgggagcacattaccatccaaggccaagaaaatcttcttattctcacgcaagccaccaacaatgccacagtcaaacttacagaaggggcacacatcaataggacaccaaccaatattataaacacctttaacttgggtctccgaaatcctaaagtaactaccaacacctactacaaca

SEQ ID NO: 8097 - DNA, 541 bp, Glycine max
  unsure (1)..(541): unsure at all n locations
  Clone ID: jC-gmfl02220090g09d1
gatgtataatcaactttaatttacactatttcaaatccaaaaaggaaaaaagaaagttacaatatacttggtctacttcttgccatcaagatacaatagtcaccccgttgatagttgtcccacataaattagtaatgtccaaaagcactattaccttgtaaagcttttttaaagggaactataagtagtcattttatacatctttgataatcatacaaaagccatctttatcaatgtaccatttgactagtttcattggtctccaaccattgttcacattttatcttccacttggcatagaggagcatcttggaattgcttcagctttggaactgcattgcactgaagatattgaggcagagggtcttaggaggggtgtaacagccctacttgaagtttcattagcaatgggagaaggggtagctgtaacagcttttacttgttgtaattctacttcaggagtatcaattaattgatcatcttcttcaatggacaagacagtgcttgtgtctgtgtgattgngggagtcatcggtgaacat

SEQ ID NO: 8098 - DNA, 290 bp, Glycine max
  Clone ID: jC-gmfl02220090g10a1
gtgacaagcttacattttgagttttctagattcctgacatggttttaagggtgtacgggcttgatgttgggaaaaaaggtgtggcctctactctcattgtagaatgtatgaatctgcttggcactgccgtagaagttgaaccctgaaaaaattagccattataagaggcactaatgtgcctttgggaatgtgagcatgatttgcaaatggggttgctctgaatacttttacaatagctctgaacctctcaggaaggaaaaaacatgccttgtatttctcttttttggata

SEQ ID NO: 8099 - DNA, 555 bp, Glycine max
  Clone ID: jC-gmfl02220090g10d1
gatgtataatcaactttaatttacactatttcaaatccaaaaaggaaaaaagaaagttacaatatacttggtctacttcttgccatcaagatacaatagtcaccccgttgatagttgtcccacataaattagtaatgtccaaaagcactattaccttgtaaagcttttttaaagggaactataagtagtcattttatacatctttgataatcatacaaaagccatctttatcaatgtaccatttgactagtttcattggtctccaaccattgttcacattttatcttccacttggcatagaggagcatcttggaattgcttcagctttggaactgcattgcactgaagatattgaggcagagggtcttaggaggggtgtaacagccctacttgaagtttcattagcaatgggagaaggggtagctgtaacagcttttacttggtgtaaatctactttaggagtatcaattaattgatcatcttcttcaatggacaagacagtgcttgtgtctgtgtgaatggtggagtcatcggtgaacatgccatgtcttctct

SEQ ID NO: 8100 - DNA, 504 bp, Glycine max
  Clone ID: jC-gmfl02220090g11a1
gaaaaagtgtctctctcacactcggtctgagactaactaacgacttaccagtaaagagacattaattaatttgcaaaaagaagaagcattgagattgggattgggagatggagcggaagtggagcagtgaatctggtgggaatgtgatatcgtcgccatcacactcgcgtaatgggcattctcgctcctcttcgctcactatccccggaggaggaatttcaaccgtcaaaaggactcagaatgttgctgccaaagccgccgctcagcgcctcgcccaggtcatggcttctcagactgccgacgacgacgacgacgacgaagacgatctaggatttcgctacactgctcctccacctctctctctttccaggagctctgctagatctccatctcctgcgttagctcggaacctcgtagaagaatcatcaatgtatcttcgcccagcaccacctgctgctggtaataatagaccaccgctaagcctcaggactccagctcctgttc

SEQ ID NO: 8101 - DNA, 516 bp, Glycine max
  Clone ID: jC-gmfl02220090g11d1
caaaaagaaagaatcccaggcgaggagaaagatggaggggaaggagcaggatgtgtcgttgggagcgaacaagttccccgagagacagccgattgggacggcggcgcagagccaagacgacggcaaggactaccaggagccggcgccggcgccgctggttgacccgacggagtttacgtcatggtcgttttacagagcagggatagcagagtttgtggccacttttctgtttctctacatcaccgtcttaaccgttatgggagtcgccggggctaagtctaagtgtagtaccgttgggattcaaggaatcgcttgggccttcggtggcatgatcttcgccctcgtttactgcaccgctggcatctcagggggacacataaacccggcggtgacatttgggctgtttttggcgaggaagttgtcgttgcccagggcgattttctacatcgtgatgcaatgcttgggtgctatttgtggcgctggcgttgtgaagggtttcgaggggaaaacaaaata

SEQ ID NO: 8102 - DNA, 549 bp, Glycine max
  unsure (1)..(549): unsure at all n locations
  Clone ID: jC-gmfl02220090g12a1
caagtaccatttttctcaaccttatcacccttttgcataaaagggccaccccttcttcttcttcccttctcaacttgtactacaatttctggattgaattatcttcaaaatgagagaaatccttcatgttcaagctggtcaatgtggaaaccaaattggaggcaagttttgggaggtgatgtgtgatgaacatgggattgatgccactggaaattacgtaggtaactttcatcttcaacttgagagggttaacgtgtactacaatgaagcaagtgggggacggtatgttcctcgagctgtgcttatggaccttgaaccagggaccatggatagcttgcgttctggtccttttggaaaaatattcagacccgataacttcgtgttcggccaaaatggagctggtaacaactgggctaaagggcattacactgagggagctgagcttattgattcagttcttgatgttgttcgaaaagaagctgagaattgtgactgcttgcaggggttccaaatntgtcactcacttggaagtggaactggggtctggat

SEQ ID NO: 8103 - DNA, 381 bp, Glycine max
  Clone ID: jC-gmfl02220090h01a1
aaacaactcattttctggctcacttttttctacttataatagtactttccggtccacggcgtccattaattccacaagccgacaatgtttgcaactgaatgaatgcacactttgtccttgtgtcatgatgaattgcaatcctatctatctatcaaagtttcatcaaatttattaatgctgcaacttatgctgcagaataaaaatgaacttataattcaactagaatataattttattaaaccacacgttcataatattatgcaaatttactattagcaattgatgaatgagataataagagatgcctgctatgctgcaagggtccagacaaagttatatcatctttttacacattcccgaatatcataacttcgatattca

SEQ ID NO: 8104 - DNA, 620 bp, Glycine max
  unsure (1)..(620): unsure at all n locations
  Clone ID: jC-gmfl02220090h01d1
gccgactaaatctaatctcagaaggaggcaaatagagataaacgacagtttatgcccgttttgcagatctcagcaggaggatgcagctcatctctttttcaactgtcccaaatctctagctctatggtgggaatctctagcatggactggaatagtaggggcattccccattatccctaggtaccattttttgcagcatcaaaacgggatgaatggaggaaaaagaaatcataggtggaagtgctggtgggtggcattaacgtggtcaatatggcagcacagaaataagatccttttctcgaatgaatcatttaacgctgctaagctaatggatgatgctctgttcctgttgtggtcgtggcttagagcatcggagaaagacttcattattcactacaattattggtccaccaatttaccaatatgcttttcagcagattaggatgggttctaatggcggngatgtagtttaggagggttcacaagccaaggggcctgattatgtaatcctctgagtgggtggatttccccaagctgagtagctttgcaggtggattcactacgtnntctttaactctattgtaaccacagtaccctgtactgtatctaatatatataat

SEQ ID NO: 8105 - DNA, 526 bp, Glycine max
  Clone ID: jC-gmfl02220090h02a1
gtccattctccaaaacaaaatgaagagcctcctcttctctctcttcctcttcctctggttagcctcctccgccgtcgccaccgtccccgcccacaacatcacccgcatgctggccgcacaccccggcttctccaccttcaaccactacctctccgtcacccacctggccgaagagatcaaccgccgccagaccatcaccgtcctggccctcgacaatgccgccatgtcctccctcctcgacaagcacctctccctccccaccatcaaaaacgtcctctccctccacatcctcgtcgactacttcggcgccaaaaagctccaccagatcaacaacagcaccaccctcgtctcctccatgttccaggccaccggctccgcctccggcaccgccggctacgtcaacatcaccaacctcaaggccggcaaggtcggcttcgccgccgaagacaacgacggctccctccactccttctacgtcaaatccgtcaaggaaatgccctactacatctccgtcctccaaatcagc

SEQ ID NO: 8106 - DNA, 493 bp, Glycine max
  Clone ID: jC-gmfl02220090h02d1
gacataaaaaactaatgagttgaaaagtgtttatatgcacacatcccatagctggcaggtagcacaaaccggatctacccacactgaaaaaaagaggccaataaaataattcggaaaacagacaaacaacaaatacaaaacctataataaaaaaaagtacacatggcctcctacatgtcggtggcagcgttttatttccttgacatatattaaagaaagaaaagaatcttaattgaaacaagtgtatagtagcgacactccataatccatgtgggtgtttcatagagccaaaaaagccataattaaactgaagaagaccatgaagaatctcacgtgcaatccgcttactccattgctgtcttcatccgcagccttctgatcttccgaatcagcgtcgtcgtcggatggtccgtccgacggtgcatccgccgcatggctggatgtcttgttcttgttcttcttcttggcgggctttggcgactgggcaggtgca

SEQ ID NO: 8107 - DNA, 585 bp, Glycine max
  Clone ID: jC-gmfl02220090h03a1
ctctcactttcatttctacatccctggctctgttccgtcgatgacgatggcgtttagggtgcgaaaccctgacctccgctttctcattcttctctctctcttgtccatcacttccgccaaggtcttcttcgaggagcgtttcgatgacggatggggaaatcgttgggttaaatcagattggaaaaaagatgagaacctggctggggagtggaaccacacctctggccaatggaatggagacgctaacgacaaaggtattcaaaccagtgaggattacagattctacgctatttcagctcagtaccctgaattcagcaacaaggataagacactagtcttccaattttctgtcaagcatgaacagaagcttgactgcggtggtggctacatgaagttgctcagtggtgatgttgatcagaagaaatttggtggggatactccttacagtattatgtttggcccagatatctgtggttacagtacatagaaagtacacgctattcttacctacaatgacacataccacttgataaagaaagatgttccttgtgagactgaccaacttactcatgtttacacatttat

SEQ ID NO: 8108 - DNA, 540 bp, Glycine max
  Clone ID: jC-gmfl02220090h03d1
acgccccgctcgagctgtcctgattaattccactggcccggctcgacgagctcactgcggccgcccttttttttttttttttttttttttttttttttttttttttttttttttttttttttttgttttttttttttttttttttttttttttttaacaaacaaacatttttcttaaaaaaaatggccaaaaattagaatttcggggagcgccataaggggaaaccccattggccgaaccctaaaagggccccccccagggggacatttttgcccgggctaaaccgggaaaaagccaaagggggccccagccaaagcccccgcttttaccaaccggttcccccgggcgggttatctgggggaaacaaaaaacccccccccgggaaaaaaacctcccggaaaaaaacccccgggcaccctttaaccggttgggaaaccccccaagggccaacagggccccccccttcccggggggctcccccaacttccggctttgagacaaccacgggggccttgccgggtttaaaaggaatttcccctt

SEQ ID NO: 8109 - DNA, 556 bp, Glycine max
  Clone ID: jC-gmfl02220090h04a1
agccgttactggagtaaaaaatcagggttcgtgcggatcgtgttggtcctttagcgccgttggagcgttggaaggtgctcattttctttctacaggtgagctcgtgagccttagcgagcaacaacttgtggattgcgatcatgagtgtgatccggaagagcgtggagcatgtgactcgggttgtaacggtgggttgatgaccactgcatttgagtacacactccaggctggtggactaatgcgagaaaaggattatccttacactggaagagaccgtggtccctgcaaatttgacaagagcaaagttgctgcttccgtagctaacttcagtgtggtttcccttgatgaagaacaaattgcagcaaatttggtccagaatggtcctcttgcagttggtatcaatgcagtttttatgcagacatatattggtggcgtctcatgcccatatatctgcggcaagcatttggatcacggggttcttttggtggggtatggttctggtgcttatgctccaattcgttttaaggaaaagccttactggatcataaggaatcat

SEQ ID NO: 8110 - DNA, 458 bp, Glycine max
  Clone ID: jC-gmfl02220090h04d1
gcaataactataacagtgggtaatgatttgtggctagactagctagcatagagaattacagaataaaagcataaacatgtgcttagcagtttcctccttcataacattacatcgtgcaaattatttacatacatactatactggtgcccctaccacgtttaggcatccatccttatatttaattgttagaaacatgtatagcagcgacagttgagaccatcgagtccaccccacatacattgcgacctctgcagatcttgtaatatccctcttctccccagctctccccccatgaattctttatgatccagtaaggcttttccttaaaacgaattggagcataagcaccagaaccataccccaccaaaagaaccccgtgatccaaatgcttgccgcagatatatgggcatgagacgccaccaatatatgtctgcataaaaactgcattgataccaact

SEQ ID NO: 8111 - DNA, 146 bp, Glycine max
  Clone ID: jC-gmfl02220090h05a1
gcgggacatagaagctgttcctgtgtgtgaggaaaaaaaaaacaagagagagagagagagagaaagatggagaaagaaacagagatgaaggcaattcaagtttaagaggatttgtgtcttctgtggcagtagtccagggaacaaac

SEQ ID NO: 8112 - DNA, 368 bp, Glycine max
  Clone ID: jC-gmfl02220090h05d1
gcaaggcccaataagtccgggctttttaactttgaaaaaatcaataacaaacccccgaacttggccatattaaattattcttggacaacattttgctaccaaaaatccccaagggaaactaggaataataacaaactttcccggggatttccggggggtccttattggccacttttaaatcactaggccccggattagcaggatttatccctccaagggaaccctgggaaaaaaaacgggtttaacgggtaaacccggccccaatcccaatagccccccccactttaacccttttccagggggacttttccctttctccttaaactttttccccatttcatcccgaagggacaaaacacacccccttg

SEQ ID NO: 8113 - DNA, 248 bp, Glycine max
  Clone ID: jC-gmfl02220090h06a1
atatgattccacattggttggtgaagcagatactaattggtgtagcaaaagttcttcctaaaactaagttagttccacaaaaggaagaggttaaagataatatatttagagatgtgaacaagagaaaactggtgagtgtatcacatcgtgctggaattatattgaagttaaatagaggaaataatccgcgttagtttactctttttatataatatatttcttgagagagttgcgccacgggccctata

SEQ ID NO: 8114 - DNA, 329 bp, Glycine max
  Clone ID: jC-gmfl02220090h06d1
actggtgtacctttttgttctttgtttatatcttactctggtttttgttttttctaaatgcatctattcgctatttggaacggcggcaaaaactctgaagctgaaaaggcacagccgaaaaagtgccccaaacaaaagacctcatcagccccaaaagtagcacccgcgcagaaaaaacacgtctaccacccacagctgcatgcacagaaataaaactgagtcaaaaagaaaccccccccgctggttctgataaaaaaagctaaccggggcttgtcgctcaaccttcctttgctaccccccacaaaagagccccctttgggccccttggg

SEQ ID NO: 8115 - DNA, 497 bp, Glycine max
  unsure (1)..(497): unsure at all n locations
  Clone ID: jC-gmfl02220090h07a1
ctgaagcgtttgatgtaggagcaatcctctccattgccaggaggcaattatctagtgaattggaggctactcgaattgaagctttgcactggatatccacccttttaaacaattatcgtactgaggttttgcaatttctgaatgacatatttgacactctgctcaaggcactttcagatccatctgatgaggttgttcttgtagttcttgatgttcatgcatgcattgcaaaagactctcagcactttcggcaacttgttgtcttcctggtgcacaatttccgggtagacaattcccttttggagaagcgtggtcctttgataattcgtcgactttgtgtgcttttgaatgctgagagagtctaccgtgaactttctacaatattggaaggggaatcggacttggattttgcatcaataatggttcaggctttgaatttgatcttacttacantcgtggaactatctgagattcgagatcttttgaagcaatcactg

SEQ ID NO: 8116 - DNA, 355 bp, Glycine max
  Clone ID: jC-gmfl02220090h07d1
acccacacaacccaaacctattggtgcattatggctcaatgggtgtcagcagactcggcactacaagtgcgatgaaataaatacatggaatttaacaatgacaacaagaaacaagccaattcaatcctacacatccaatctcaaacaaaaattttaaaaaaatatagatgtatagatatatccgcagtatttgatgaaatctggagataactgaatcgaactgtgcaaacgatgcagacatctaagcgattttatttgcttaaactttctggagcagcaggagcgggagacttcaaaaatggttggagtgctttaacaacaatgctcatatttggcctaaactcagcttcatact

SEQ ID NO: 8117 - DNA, 339 bp, Glycine max
  Clone ID: jC-gmfl02220090h08a1
aaagtaaatatatatagtatatattgaaagttaaaattacaatttacttattaaattacataattattggaaaacttagcagtaaaaggaaattaaacacttgaaatcatcaacaacaaagcttactacacttatgctttgttgcagggtggcaaaggagaaccacagagacaatcattatcaacaaaagcacttgccggaaacttattcttgggaagctgaccaccatgatggacatagctaacattcaacttctcaagcccaacaacactgtttggaaccttcccaaacacccaattacgaagacaattccaaaaacttaaacctttcccaaaactt

SEQ ID NO: 8118 - DNA, 434 bp, Glycine max
  Clone ID: jC-gmfl02220090h08d1
tttttttttttttttttttttttttttttttttttttttttttttttttttttttttttttttttttttttatatttttattttttttttttttttattaaaatgtaaataaattttaaaaaaaaacaaaggaaataaaaagaaactaaaataaaaccaaagaaaacaaaaaaaaaggaaaaaaaaagaagggaaaaaaaaaaaaaaaaaaaaaaaaaaagaaaaaaaaaaaacaaaaaggaacaaaaaaaaaaaaaaaaaggagggaaaaaaaaaaaaaaggggagaaggaaaaaaaggactacaaataaggggggaaaaagaaaaaaaaaaggagccaaagggaggaagaaaaaaaaaaacaaacggggagacacaaagaaaaaaaaggggaggcccatatgttaaaaaaaaaaaagcacccaagaggaggc

SEQ ID NO: 8119 - DNA, 349 bp, Glycine max
  Clone ID: jC-gmfl02220090h09a1
gcacgcatacaaagtgatttattaaaatccattcgatgttcaaatggtaatagtagaacaataaaaggtccaaacgccctaacaatggtctaacataaaagggaaaaaacaccaaagaaaaacaatcactgtctggaaaaccggacttattttcgcaaggacataataaagacacttaagaaaactactcttcttcatcttcctctttccagcacttcagagttgatctaggtgaaccacagtcacaagtcttggcaaatttttggtagacaagagaaccacccattccaagcccttcgtggctcctctcttcgcgacagtatcccttaacatccagaacactctagcc

SEQ ID NO: 8120 - DNA, 307 bp, Glycine max
  Clone ID: jC-gmfl02220090h09d1
agaaaaaaaatggggggaacgccacccgccccaataatctaacaataaccccaaattgccccctaatgaaccaaaaaattccggggggacccgaaaacccaggccccaaaaaaagccaaaaatgccccaattaccccaagggccccccaaaccgggcaccaagttattcacctttttgaacccccgagcagcccaaaccaaaaattgcgggaaaaaaaccttttttcaccccaaaggtttagggggggaaaaacccaaaagtggggccccaaaaaacccacaccccccctttgaaaaccgaattttt

SEQ ID NO: 8121 - DNA, 626 bp, Glycine max
  Clone ID: jC-gmfl02220090h10a1
ctccccttccgccgaggaacacaaacaacaacctcaacttaacgcattgtgtgcatgatggaggagatgaaagtttctcggcgggtggagtggtggcagaacatgatgttccccgttcggagggtttggtttgtcgttgccaagcgcctcggcattcgcaaaactgggttactgaagctaagtaatgatgtgagggcatgcgaatatgaggacattcaagtgatgtgggagatactaaacagaaacgaatcagagtttggtcgttcttctagcactaggaaaggcaacaacaagaaggggcattgctggaaattattgaggtgggcaaggtgtgctccatgcatgtgccgcacatgatcatgattgctgtgtacgtgagaagaaaaaaatccaacctatgtgttggtgtggtttttgctgcttcaatcatgaataaaaaaaaagggttctgaaaggtttgtgtagaacacggttcttctttccttttgaatcaaccaactcaaccatatgtaaatatcaactgcattcaccaagttcgatggtgtgacatctcatactccatcatgtgccttaatagtgggtatcgaaaattgtgatgtgtagttctgtggttcatcatcatcatc

SEQ ID NO: 8122 - DNA, 328 bp, Glycine max
  Clone ID: jC-gmfl02220090h10d1
actggagacattcacattgcatagcaatttcgatattagactacaccttctgaacgagagatagcatagattgaatttactggtgatctaacacggcaaagggctataattgccggacatgatagcgtatcgaatgacgacttacacatacaggcttgggacccactaagaggcagttgagcggagtggggagaaatgaccatatccatttctgtattaccctccaagctagagacattatgatcgctcagaataagcattcctgtcaaaagaacacgatgtttccgtacagactattcacagacactattctataggcctatatact

SEQ ID NO: 8123 - DNA, 548 bp, Glycine max
  unsure (1)..(548): unsure at all n locations
  Clone ID: jC-gmfl02220090h11a1
atttgacaggttcatcatcataaccttcaatgaaaagaaatggctgaggcaagcattggcagcaaaagcagcagatggtctttacagggaatgacagctctcgtcaccggtggatccaaaggaatcggatatgctatcgtggaggagttggcacagcttggagccactgtgcacacttgcgctcggaacgaagctgaactcaatgaatccttaaatgaatggaacacaaaaggatacagagtaactggttccgtctgtgacgtggcgtctcgtgcagaaagacaagacctcatagctagagtctccaatgagtttaatggcaaactcaatatccttgtaaacaacgtgggaacaaacgtaccgaaacatacccttgatgttacggaagaagacttctcatttctgataaatacaaatcttgaatctgcttaccacctaagccagcttgcacatnctctcctgaaagcttcagaggctgcanacatcattnntatatcctncattgctggtgtgctatcaataggtataggatcccactatggtgcaac

SEQ ID NO: 8124 - DNA, 407 bp, Glycine max
  Clone ID: jC-gmfl02220090h11d1
aaaagtttctttatttcaagtgaagttagttagttatatttatatacacaatcgtgtcaatgagatcaattggtacaagccttagccttatggtatggcttgtaattgcaacatcagcattagcaaaatctgataaccccccagtcctagacacacatggcaaccctattgagcctggcaaagattactacatcaaacctgccataaccgacgttggaggccgcgtcactttgtttagcagaaacaatccatgccctctatatgtaggtcaagagaattctgatgcagcagagggcttaccccttttcttcaccccttttgcataacaagatgattttgtgaacgtgaatggggacttcaaggtgacattctcagctgcctcaatatgtgtgcagggcacaaattgg

SEQ ID NO: 8125 - DNA, 523 bp, Glycine max
  Clone ID: jC-gmfl02220090h12a1
cttcttctcttaaaagagcctttgctttttctttaggcctttccgaattaagtacttgtttcattttctctcgaagcaagaaaaatgttcatcgagagtttcaaggttgagagtcctaacgtgaagtacacagagactgagattcagtccgtgtacaactatgaaaccactgaacttgttcacgagaacaagaatggcacttatcagtgggttgtcaagcccaaaactgtcaaatatgaatttaaaaccaacacccatgtccctaaactaggggtaatgcttgtggggtggggtggaaacaatggctcaaccctcaccggtggtgttattgctaaccgagagggtatttcatgggcaacaaaggacaagattcaacaagccaattactttgggtcgctgacccaggcatcagctattagagttgggtctttccaaggggaggaaatatatgccccattcaagagcctgcttccaatggtaaaccctgatgatgttgtgtttgggggatgggattcagtaactg

SEQ ID NO: 8126 - DNA, 548 bp, Glycine max
  Clone ID: jC-gmfl02220090h12d1
tttatttttttttttcttattttttttttttttctttttattttttggagggaaaccaaaaaggggtaaaaagggttatctttatttaaaataaacatttacattattcccccaaaccaaatttaacttgcggggtagccagaccatacctgaccaaaaaatttttaacaaggcatttatcttttttaaactaaataggcgcctttttcatttaaatgggaaaacaacaccgcttcaaaagttcgcaaaaattctcatttaaaaatattttcaggggtgactttttttcttccaagctggggcaacatattttactaatatataggtaccaacatgcgaagtgctacaagaaagttgctttatttacataaccatgccgtgttacttgaacatgggtttcactaaactttggataaatgaacgcatacaaattaaacaaaagggtttggcgtattttctctggaagttgacagctccaaaacccccaaaaatagctgggttttaagttgtttgttcctgggtgtgaaaagaccatccatttgtgtttt

SEQ ID NO: 8127 - DNA, 297 bp, Glycine max
  Clone ID: jC-gmfl02220091a01d1
aaccaaaccttgcgaacccttataaattaaattcatgtgtcctcgggcatagaaaaaaatacataaaaattatttgttcacaacttggagaggagaccaaattgagtttcgggatttacaccatacgagattgtattatagcaattctgctcaccttagcagacgatgtcgtgcacacttgtggtgcaaagacctccaagaaagacaaatttttttggctagagatcagactggggggtgggtgaaagttctttttttaactctctttcaaataactgtttttccatagctagatgt

SEQ ID NO: 8128 - DNA, 404 bp, Glycine max
  Clone ID: jC-gmfl02220091a03d1
aataacaatcattctgtaataatttatgggccatggggatattgtttgcatcattcatattcatcataccgcatcatgattgcaaggaatgaaataccgaaattcattcttcatttaattctcttcaaattcaatataccttctactagtgaatgtaaatgacttagcaccccgtattggcctttttcttccttcagagtaactcgagttatgcttcggtattaccacaacatttaactggtaaatttcctaggcatgtcataaacctttatagaaaataacaacctcatataaagatattctaggcatatacagttcgcttcgaatatagaggccataaagttgtactatcttttgaatagttaagtccaagggaaccattttcaaacagttgtcatggattt

SEQ ID NO: 8129 - DNA, 318 bp, Glycine max
  Clone ID: jC-gmfl02220091a04a1
aaaaaacatgccttttaaccggcccaattttttttaaaaaaaaccaaaggggggcaaagttccaaccaacttaaccccccccaaaaaaaaagttacaaacaagtgggaacttttttttttctattttgaccccaaccaacaaattctttttttttttagctttaacaaggccaacaacaagtttgttttgcaaaaaacccaaactcttcctagcagggggggtggctaaaatctttggggcaagggggttttttttttttccaaaaaaaaaaagaaaaggccaccccccccccccccttttatgtttgttgtttttta

SEQ ID NO: 8130 - DNA, 340 bp, Glycine max
  Clone ID: jC-gmfl02220091a04d1
atacattaattatgtaataatttatgggccatagggatattgtttgtatcaaccaaaaacaatatcaccggatcatgatgcatggcatgaaaacccggtcttcctgtaataattataacctaaaaaacctatatacctgccaactacataaataaaaagcctatagccaatagtattggccttttatctcccttcaaagcaaatcgcgatatcgcttttgttatttccaaaacataatcactggaaaatttcgttaggctgacataaaacctttcatagaaaatcatcaaccctcatataatgatacttgaaggcactataaagtttcgcacttgaaaaa

SEQ ID NO: 8131 - DNA, 301 bp, Glycine max
  Clone ID: jC-gmfl02220091a05a1
aagtcaacaaaagaacccataaaagcaagaaaacaagttgatgactggtactgatacaaaacgcacaatgataaaatgcgagacaacttattcatacaaaagcagcaggactacttatttcatataaagcttgctcttcacttcagttcttccaagaaatcaacgttgtcaaccaagacagttttccatccatctggatctaaaaacgaagtggtttttgtattaaggccaggaattggccctggttgccgagtaatcttccctccaacctcttttatgacttggttaactacctcagcac

SEQ ID NO: 8132 - DNA, 575 bp, Glycine max
  unsure (1)..(575): unsure at all n locations
  Clone ID: jC-gmfl02220091a05d1
aaccaaaataatccattcaatgattcaaccgaacaatcaacaatacattgcgtaattttgataacatagtcaccaaacaaatgaaccatcttgttacaatgcaacatcaaattcaatgcccaaagaacaccacagatacatacatacacacatagaataacttttccttccctcaaccttggtagtgttaaatcaggtccacagcagctcaatatgtttcatcctcattcaatttattgagattgagaatatactacatgttacatccagtaaaatatcacatgagactcaattcatacaaacttatagacttgtagtagtaatagtagagggtatatcaagaaatcaaaactaaactacttcacttgcgatcgacaaaggtaaagcgcaatgaaaacactacctgccgacccaaatttgaatatcaaacatggaacatgaaagtaaacaaaaagagacagcaaagatacctaactaaagaaagcaaaaaactgaccagagattgtgaccctttcttgataccagancaacactttattagcataaaatcctttaggcatangtttatgcaatgc

SEQ ID NO: 8133 - DNA, 438 bp, Glycine max
  unsure (1)..(438): unsure at all n locations
  Clone ID: jC-gmfl02220091a06a1
gcctcatacattaacgagttaatattatattatttatattattagttagtttcaaaattattatatctttttatataactaagaaggtggttcggaacccangacttnacanaagaacggaaacggctcgagaaacacggccaaaaaaaaagaaatttcaaggggtgatttttgtctgctaagttgtaaaataggggtataatgggattggggtgatgtgagccgtatagatcttgtgagaaatcgacggttgaatgtatttatattggcggataaatgaagcgagtttatgtgattgagggttgacagtggggagaccagaagcaggcaccgttgaaaggataagctaaaaaaaccgtgggttgcatgtaaatattggtccgtttttcgttagcacctgccacgttagaatctactactaccattatggcgtcggaa

SEQ ID NO: 8134 - DNA, 565 bp, Glycine max
  Clone ID: jC-gmfl02220091a06d1
ccaattcattcattgcttaaaagtagccgagagagagaagcgaattataaaaaacaataatcaaccaaacctagggcgcaatttatcaaagtagtgattaacacatttgcaagccacgaagcaacatactcaactttcaaaaatctgacaataatgcagtcaactaaaattctgttctaacacctcaagaaatgcaagagttctgatattaacttgaagagcatcaaaaggccaccattctctttggcatcgaaagtgaaatatagcaactccagtcgtataccatacgaagtttaaagtcttctaccccttctaccactctttctacgtgtactatccgaaggaatgggagtaacatcctctatacgaccaattttcattcctgaacgtgcaagggctcgaagagctgattgagcaccaggaccaggtgttttggtcttgcttccaccagtggcacggagcctgatatgaaaagcagttatgcccagttccttacatctggcagcaacatactgtgctgcaagcatagcagcatatggagatgattcatctctgtcagctttaa

SEQ ID NO: 8135 - DNA, 532 bp, Glycine max
  Clone ID: jC-gmfl02220091a07d1
atatagaagacccatttattatccactaaacaaaaagttatcaagagaggaattgtgctacattgatttcaattccttgagataaaaaaatgtagctaactctaaagttaagtaatgaaataaaaataattaaagaataaagaagcacaatcattactttttaattaatttatattgcttgctttcgcaactcattacttttattgccaattaagtattgtctttttgtgcctatggtgtttcggcacgccaggaaagtaaggaattccagtaacctcaatccaatcagttccatgaaaaaacttagatggtgagaaccaacgtgctgcttttgaattgaggttccaaatcccagcccatttcacacgcttggatttgtctgaaccagggccaatgttgtggtactcggcatagaagcaagtatccataccagaaggaccctctagtccttgccatggcaaatacccaatcgcgtcaatcaaatcatcaatgtatgtgtccatgataatggtcctagagtaattcttccatg

SEQ ID NO: 8136 - DNA, 462 bp, Glycine max
  Clone ID: jC-gmfl02220091a08a1
atcggggatctgcagtactggatggacgagaactatctctatacctgctttgctcacaccggcgaggttacatcggttaaagtaattcgaaacaagcaaactagtcaatctgaaggttatgggtttattgagtttaatagtcgtgctggagctgagagaattcttcaaacatataatggggcaataatgccaaatggggggcagagtttcaggttgaattgggcaacttttagtgctggtgagaggtcgcgccacgacgattctccagattacaccatatttgttggtgacttggctgcagatgttactgattatcttcttcaggagacatttagggctcgttataactcggtgaagggtgcaaaagttgtcattgataggctaactggcccgaccaagggatatggctttgtaagggtttcagatgagagtgagcaagtgagggctatgactgagatgcag

SEQ ID NO: 8137 - DNA, 495 bp, Glycine max
  Clone ID: jC-gmfl02220091a08d1
ataagagaataaaaatcttttatttatatcacagtcgtacatatgatataagtaacatagggctaacacataaagagacacataaaaagggttacattatgggaacacccatgatttattaacccatagtataatgccaccagaccagaccagacctacaaagcataaaatatttaagacctaaactattacatgggaagaaaaatgcattaactgctttttgagtcaagggactttcacatgaccctatttaatgacacaatcaaagtccgcgatacacgagttaccctctgcgcattttcactggtaccaaattgaaacctcttgctgattctgaagagaatccattcctactccttgtatatcctacttgaaatcaaaggatgacacatcacaaggggaattaaacatcaaatggatatcattgttgctgtggctggtatcaaaaggagtgttcatgatcatgttcatgttcatggtggccttgaaccggtc

SEQ ID NO: 8138 - DNA, 425 bp, Glycine max
  Clone ID: jC-gmfl02220091a09a1
aaatcataatgcataatagagatcatttcataaataagtattcagcaagcaatttatggatacaaaaggcggctccgataaaatttaatgttattaagcaaacaaggggaaaaaagaaaaagagtagcagagtcggttttccacgagacgagaagagacacgcaactcgataagtatcacaaaagattacagaagaaaaggaacattctcttctcaactatatcctatttgttgctgttgctgaggtggttggtaaccaggataccccggataactgccatacatgttgggatcctgtccagcagcaggagcatacccataattttcataaccttgtgcagcatacccatagtatccaccaccagaaccagcaccaccattccactggtttggatctgcctgagcctgtttgtttgaaggactgc

SEQ ID NO: 8139 - DNA, 542 bp, Glycine max
  Clone ID: jC-gmfl02220091a09d1
atcgtaattcaatgttgcaattgaggtgcctagcttggataagcaaggctatcataatcacaaacacaaccacatgctctgtaaagatcatagacagagaataattgttgcccacaacgccaacacgcttgagaaagattcggggcacattaaccatcaaaatgggttacatagtcaagtgcatgcatacagacatagtaatagtagtattaaagtagataatgaaaacgaacatacaaacatatgtatgcatatgtaactatgtatactaaaatattcaattttgacagtgtaaacaatagcggccaaaatagttcatgaacatactcaacatagcgggttgaaattataaaatgaaagggtgtgaggaataataataacaactttacatagataattatgcatgcccatgtttccatcttcgtgtaaacaataatgcaaacggaaactgttcctgttaacaaaaggatcagtactactggtataatgctacattgacataatctactttgatgaaatggcatttcatttcttcctgagct

SEQ ID NO: 8140 - DNA, 391 bp, Glycine max
  Clone ID: jC-gmfl02220091a10a1
gcaaaataaaattcatttaagtttacaagttttaatccaaacatgccctaactagtagtaatgatcttgtacatagatacaagagatcgttattaattggaggccaagatcctctgaatatacaagatatgccattgtcttgcacaatggaaaaaccatttaaagaataacacttcatacaaataatcatattttcagtaacaaacaaatagaagtggtagaactactatcggtaaatttatcaattttccaggcagagaaccaagagtgaactcatgaggattgaattccttattctggctcggcttggtccatatgtatatatatgaattgcaattattcttagcctaggagcaagaatggggggacttatgggcctatacttgtgtga

SEQ ID NO: 8141 - DNA, 437 bp, Glycine max
  Clone ID: jC-gmfl02220091a10d1
gaaattgaattttcgggaactgtttgtatggttgttagttatgctgttaagtaaccgaagcctctgactgtctaaagggacattggctccccacggatgtgcccagagcaagattgttgcacctactgtaagcacaaatcaaatgccatccctaaaaatgaagagcaaagtaagcgtgagctgtttaacagaaacaaaggatcttcatgtgtgtccgaaatcaaaaataatttccaaaagcccgtgttctaaaatcatgatttctacacaaaaggctgaaatagacaccactgttcaaaattgcctagatgtttcctcaaggacgcagcccaaagacattgcatgggatcaatctattgataacaaagaatttctggataaagaaaactctgaatctgagccccaattttctggttgctcctctgtcctgggaaaaa

SEQ ID NO: 8142 - DNA, 412 bp, Glycine max
  Clone ID: jC-gmfl02220091a11a1
aatagtcaaataatattagttcccaaaataattaaggaaaattcaacatttacatcgcatactccattgaaatcacctctatgtaagtaattatgaactatgaacatcttgtttattgaacaagggtgaagtccaatcatgcccaatttaggaggcaacaagtacaacttatttttctttcagggagttctcaatatctatcacaaaccggtacttgacgtccctattgatgagcctctcaagagcttcattggcatactcgattggaattacctctatatttgggtgaatctcgtttgcagcacagaagtcaatcatctcctgtatatcttttgtaccacctgtaacacttccggctacagtctttgatcctatattaaggcttgcagggctgaatttgacttgacttggg

SEQ ID NO: 8143 - DNA, 562 bp, Glycine max
  Clone ID: jC-gmfl02220091a11d1
aatgaaattaaaatacaagaaattgaattgcctcatgcaaacaaaatatttacaaaatgaaaagaatttaaatcaagacaatcaaaatgctgtcaatttgaatttcctaaaaatctttaaattcctcatccaaacacatagttaaacattttccatgctccagatatacggttttgtgaaacatgaccttcaaccatagttgttattgccataatatctggcttaattccttttcccagcatctcatcatacaacatgcaagtttcttcatacctattcaacctgaagagatgttgtatcaagtctgtatatgtggaaatagtaggcacacaaccagattctttcatgcattgaaacacctcaagcgctctgtcagcatcatttcttcccaaatacccatttatgacaatcccatgaacccttccatcatccatatcccttctcttcataatatcaacaatctctaaagcatatgtaatcctgcctgccttacacagccttttaccaagttcttataattttcaggtccagatctaaatctttatttttgaggtcacgaatc

SEQ ID NO: 8144 - DNA, 417 bp, Glycine max
  Clone ID: jC-gmfl02220091a12a1
agacggagtaaaacacctattattatataatttttgggacaaacattattagtagcaccagcctctagcaagctagggcgttattacatttttcttttgtcacatttaactacgatgtttggaggtaaaagggccttattgagcacaaagcttggaagatccaaagcatcattgctgctaccatctgacaacttggaagcaaaagaccaagaaatcacatcatgggtttcaacggagccttcatgcaacccggtggtggcagagaacccaacgctcacccattcgggaagattactcttcaagttcactgtgtcagagaggatgtaacttgttttctttgaagggtggatcagagaagcaaccaagaggctcgtggcggcattataggtaacgagaatctccgccacttgtccattg

SEQ ID NO: 8145 - DNA, 526 bp, Glycine max
  Clone ID: jC-gmfl02220091a12d1
catccaaagaattactatgtcaatccatttatacaaggtaaaatttggctgctggctggccaatgatgaaaatttgtctatccatattttacagggtcatttcattgtacatgagaatttaattaagttcgcagaaggggttaagtacaggtagcatatattagagtactttagagaaatctggtgggcatgtactcatttatccggagaggaagacggtaaaactcatcatttctaacatctcccttcctattctggaaaggaccccaccatggaagtcctctgtccacagctgtttgtttgccttcaagtgtgttgtcaacaagagtcccaacaattatagccacagttggggcagaagagaatatggtgttcaaaatgtcattaaaccatccaccacctgttctaactggaccatgaccatccggtgcagtgttcatgacaaaatattgtggtattgatatcgcaaggaacaaggttaggcccagaacatagatatttcttatggaattggtatttgcaaact

SEQ ID NO: 8146 - DNA, 409 bp, Glycine max
  Clone ID: jC-gmfl02220091b01a1
gacaataactatcttcttacaaattttaaaaaaaaaaagaaaaaggaaggagggaggaaagggggaattgaatccaaaaaaaaaagaagagaaaaacaaaatgggcagggtttggacttcgaagatagcattggtgctttgcctgatgaaattatcggttcggggcgaggacccttacatttactacacatggaacgtgacctacggcaccattgccccattgggtgtcccccaacagggtatccttatcaatggtcagtttcccggccccgaaatcaacttcaccagaaacaacaacgtggtcaataatgtcttcaaaaacctagatgagcctctcttggttacatggcatggtgtccaacagaggaagaactcttggcaagatggcacattgggtgcccagtgacct

SEQ ID NO: 8147 - DNA, 407 bp, Glycine max
  Clone ID: jC-gmfl02220091b01d1
accatattattattttacaggggtttgtgatttttagaaacaaggaataccattttttatctaaatggggcaccaacaaaaagaccctacacttcagaggaacatggttcagaagtgcaaaagttgcatccaaacaaccatgaaggaaaataatgaagctattcccagattccgacctccatgaagccatttttagtggcacagcccctaaacatgccattgcaattgaaaccataatccactttccaaacgttggacacagaaatgagaccacccttcccttaatagagacggggcttgtttacaaaatccacggcttctttaaacttcaagcctttgggtttcattatcgctgttacaaaaagaacaaatgtgttaaatatgattttctgaccttcacccgtgca

SEQ ID NO: 8148 - DNA, 408 bp, Glycine max
  Clone ID: jC-gmfl02220091b02a1
ccgttgcttacttcctcctccaccgttggcgcgacaagatccgcagccacacccctctccacgtggtcactctctccgagatcgccgccattttctccctcatcgcctccttcatctacctactcggcttcttcggcatcgacttcgtccagtcctatatctcacgcgccttcaacgacgcctgggacctcgacgacgccgttacagattctgcctgttcctctccctgtccctctcgctcgaccgcaatcaccaagaatgccgctcacgggatgcctcgaacactccattcctctaggacgaccaggggagcgcctgcacacacggagtttgtgaagagccctgctacgcgctcgagtcccgcctgggcgactgtcgccgtgccgcggtgattcgacgcgcggcgct

SEQ ID NO: 8149 - DNA, 418 bp, Glycine max
  Clone ID: jC-gmfl02220091b02d1
gaaaaaatgatgcactgcaggtttccactggtccatcccacaagacatctgggtaaaaagaaaagaactacattttatctttttatcctaggggcagatattgaacatcctttagtatttgttgtaggagagctacaatcacattttcttcttcatttgcaagccaaacacaatatgaagcattgactgcaccttctctttttataagaagatacagaaaaagggggaaagaatattagggttggaagaaggtggaaaaattgaacaaaaaaagagatgctgctcatcatccagaaacaaaataaggttctgcctacccaggaattttgaaacagccacttgtggatcttttttctaaaagctcctgctaaagattttgaagggcactttgtagtgtgagttaatgtagcctccaact

SEQ ID NO: 8150 - DNA, 393 bp, Glycine max
  Clone ID: jC-gmfl02220091b04a1
ccaacaaagttttttcctttttcattaaacttccttttttaaccccaattgccaacaaaaaacctattttttcttttataaacctattcccctcctgtagaagactactactacattttcatttttaccccccctttctttaaccccctaccattttttctaaatcacccccaccccaaaaaaagattaaaaaaacacttttccccaccctaacaagcaaaagatttatcatcattatcagtttgtccactcctggggcagcctaatctcatgggacactggtggctgagatttgagggtgcgcttctgttgttgagaaaggacataattactcctctgcctggaaacagctgcaccattttccatgttggaactagcattaaatcgttgtaa

SEQ ID NO: 8151 - DNA, 128 bp, Glycine max
  unsure (1)..(128): unsure at all n locations
  Clone ID: jC-gmfl02220091b04d1
ggacccccccaactccatgtaacctcnattgcaanaacncgnnacggaattatatacccgccgtcgaccacgctcactagatcggtcggccgcaccttatttttttattttttcttttattttctttt

SEQ ID NO: 8152 - DNA, 373 bp, Glycine max
  Clone ID: jC-gmfl02220091b05a1
aaaagaaaagggattatttcctatttattttctcaagccaaatgcatttatacatcgttagattatttaatacatgcatacgaaacacgcacattggcttctacacatttttgtaataattttgagatccgaattctcacgtcaaattaaatttctctttttgctatctgtacctttaaaccatccttcataagaagaacaattgaagggcttggggtagcaacatgatccaccactcgaacacgatacttgtgcaaaatagcagctgccaccatcttcatttgaatgaaggatatttctttccctaagcaagtcctaggtcctgcattaaaagcaatgaatttgtaagatggtacataaacaatacctcctt

SEQ ID NO: 8153 - DNA, 446 bp, Glycine max
  Clone ID: jC-gmfl02220091b05d1
aatggtgtgctgacacataattagaaacttagatagtattaagaattttacactgataatatattgaatttgtactctccctcccccttattacattgaatatatggcaatctttttcagccaacaagtgaagcataaatctggtagagctttgtctctataattaaaagactgaaagaaatgcttgctgtccagctacatctgaagatctgcaggcatgtatcatagtgcatatatctgtcgtctctaggattttctctgcatggtcaaaaatcaagtgtccatactcgaaaaccattctcttgcacttatttgcatacttctccactgaattgcacacctttagtaacgtctcaattatctctagcttagtatcactctccttcaacttttccaatagagttgaaacagtatcttggcaaaactcacagctatcatcttgaact

SEQ ID NO: 8154 - DNA, 540 bp, Glycine max
  Clone ID: jC-gmfl02220091b06d1
aacagaaatgcagatacattcattttgtaataatttatatacaatattgatattgtttgcatcaaccaaaaacaacaaaccggtacatgatgcaaggcatgaaaaaccggtatacattcaaaatatagaagcaaaaaaacaaaaaactgctaactagagaagtaaaatgccgaggccagtagttttggcctttttcttacttcaaagcaaatcgtgttatgcttcggtattaccaaaacatatcactggaaaatttcctaggatgtcataaacctctatagaaatcaacaacctcatataatgatattttaggcatataaagttcgcattgaaaatagaggcactagagtagcagtatcttttgatagcaatcaccaagggaaccatctccaaacagttgtcatggattttcatgttgtataagggactacctatttcccagagtaccagttttgagcacacttggcatcaacagagaggtcaactttaagaatatttttgccgttaagggtttggacatgcactcaacaactatggact

SEQ ID NO: 8155 - DNA, 548 bp, Glycine max
  Clone ID: jC-gmfl02220091b07a1
gaacattcaattgcaagcttgcttgcacaaagcgccagttagttcaaaggaacgaggctcaaaattgcctgagctgtggccagccagactgatcaaagtgccttattggttgtcgagttcccaagttggagtttatggaaagccagcccctcaagatttcactgctgattatgaacactggaaacgtgtagtatccaagtcttatctagacgggatgggaattaaatggtcaaatgtacgcaatgtcatggatatgagatctatctatggaggatttgctgcagctttgagagatttgaatgtttgggtcatgaatgtggttacaatagactccccagatactcttcctattatttatgaacgaggtctttttggtatatatcatgattggtgtgaatcatttagcacctatcctaggacctatgatctcctccatgctgatcatttgttttcaaagcttaagaaaaggtgcaatttggctgctgtagtggctgaagctgatcggattcttaggcctgaaggaaaactattgttcgcgatactgtgag

SEQ ID NO: 8156 - DNA, 538 bp, Glycine max
  Clone ID: jC-gmfl02220091b07d1
gcaagaatgtgatcaaatttccttcacgctatggcaccatgttacaacagaggtcaccaatttaataaatataaataaaggatatcaaaattaatacccaacaggaaaaaagaatacatagatattcctaactaacatgatacatatgactcagtggaagtacagttaaacaggaatttcgagtagccaaaaaaccaagaattttggcatctcatctccatgcttaagcaatagcatactcgagcttttcctgctccttaggtcgccacttggacttttccacacataacaaaccctccttatccttggagtaagtcatgcgaacctttcactgcatagacctagccatgctctcaagctcttcaatgatctcaacagtatcgcgaacaataagttttccttcaggcctaagaatccgatcagcctcagccactacagcagccaaattgcaccttttcttaagctttgaaaacaaatgatcagcatggaggagatcataggtcctaggatggtgctaaatgattcacaccaatcatga

SEQ ID NO: 8157 - DNA, 434 bp, Glycine max
  Clone ID: jC-gmfl02220091b08a1
attccaaacccaaaaccataaagtttgcattaaatttcgaagaaacatgatatccatctcaagacatattaatgaacacatgtaagagccttaaatgatacaaactaacagaaatcttaaatataaatgttcttagagtgaatcaacacacaaaattaaactaattaagattacttaataatctatcttgctcatcatggtctaggcttcattcttccttcattggccatcttgaagagctgggcttgtgcttctgcggccttgttggagttgagtgaggccacaaacctgtccctgacttggttggtagtgtaagggaacttgttgttcaccatggagttgaggaaggaagctgtgccttctctgtagagtgctcctagcccatcagttcttgtgttggaaagtgcttgtggcaagctcaggccaggactgaa

SEQ ID NO: 8158 - DNA, 429 bp, Glycine max
  Clone ID: jC-gmfl02220091b08d1
catcttaaaagacttcatggttgattttgttcatgtggattacaatctttaaattcaaaataactgtttatagtaatatctaatctatgttaccacactatatatacgcctctaaccaactttatcattggagatgaaaacaagagcatattgtacaaaactagtcatgcacctattcagcagtcttaaaccacaaaagaacccatatatctgcccccattcaaatcaagggctttttatttccacatcttttcctaacaaaattgtttaaaacttgtgtccttgagaggccatgccttgaccttggtcaatctgcatgattgttcaacaaatagtgaagggataggtgtcttttcccatgggatgatcccaaaatcatcagtaaactcctgcattcctccaactaagatttgccatactagagcacct

SEQ ID NO: 8159 - DNA, 420 bp, Glycine max
  Clone ID: jC-gmfl02220091b09a1
aagtatcagccattataattgttattgatataggttataatatgagatgccaggaattaccatgacatacacttgtaagacatattgtatatctgctaacatagtataacttctgccagaaattcgttctcctgctttggaattggcttaaaataaaaataaccatagaagtcaaatttcaattaactacatctaccagaaattaaagaaaaaaaaaacattggacattccctccttctattgaacatggttgtattaccaaccatttttttttaaaaatcatgataataaaaacatttagcagtttcctatatacctgagatggtactcactaaccttttctattacaaaagatcttctacggagaataaagaaagatggaagttataaaaagagggaagggctgttatgcattcttga

SEQ ID NO: 8160 - DNA, 382 bp, Glycine max
  Clone ID: jC-gmfl02220091b09d1
gaaatcataaaattctatataataaagacaacatatataactgtatcctatagattacacacaacaatttcgagctttattctataaattaagaaaaagaaaatagacatgctatctttctttggacctaccaagtagctccaatcatttcacaactgttacaatattacaagatcagaaatttcaaacacacaattgaagctagcacatattagtatgctttctcaaacacaactgggagcacattaccatccaaggccaacgaaatcttcccattctcacgcaaaccaccaacaatgccacagtcaaacctacaaaaggggcatacatttgtaggacaccaacctatataatatgaaccttcgactggaggctcaagaat

SEQ ID NO: 8161 - DNA, 380 bp, Glycine max
  Clone ID: jC-gmfl02220091b10a1
ttttttttttttttttttttttttttttttttttttttttttttttttttttttttttttttttttttttatttttgggtaaaaattattaacctttttctaaagttgaaggtatatttggctaattaaaatattgttggctggagcaaagaaaggcaaaaaaagagccggggaaaaaaaaaaggaaaaaccaaacacggggggggggggagttacagaaaaaaaaaaaaaacccaaggcgaacgaacagggggaaaaaaaaaaaaaaacggggcgggggcaaaaaaaaaaaacacaattttaaaaggggaggcgagacagaaaaaaaagatcctccccaccgcggcgggggaaggaaaaccaaaggggggggcgggggg

SEQ ID NO: 8162 - DNA, 523 bp, Glycine max
  Clone ID: jC-gmfl02220091b10d1
agtatataattatgtatagcatagataataagattcatacaccccacagaaaaaaaaggtatattttaggtgccacccaggcctatactgctagcgtggccaaacttccgatcagaattaggaatgatcttgttccatctgatttagatggaacccaccttggttattcttgtgtacctctaccttgaacttctcttccttctgtcccctcttgactttgagaagcagattaaacttggcaaagtcatcaatgacctcagcctttgcatcagcaacctcatgaagctcatagggtactagtgaattagacctttgctggatagtcttgatcgcatgatttgctgcatcctgaacttgagggtcatgtgttggcacagattgccatccaggttggtgaccatcctttttgacaccaagatcagcagaggtaaatgatggtacatcaccagcaggctcgaactcttggagttctttgaaattcaaccatggcttcacccacaccttggcttcatagagcttcttc

SEQ ID NO: 8163 - DNA, 397 bp, Glycine max
  Clone ID: jC-gmfl02220091b11a1
acccgacaaaactcgtaatataaacctcatagccattatctgggggattttattttagggtttatttaattggacaattttatattttatttcattcggggcatattaatcctaaagccgctggtgattgtgtaattgcacccaccatatccagtgctacgcagggctggtcagtaggtacaaaatgacccgctccaaggatccaatagaattgggggtttttgtatgacttaaaaaaccctttgggcgttttgtcacttccacagtagaggggggttttgtttttttccaagaaattttgaagccctgtccactcgagttttttaagccaagcttcagtccccttggttgcacaaatgagatccacttgcccactgtacacagtcacgttgacccc

SEQ ID NO: 8164 - DNA, 394 bp, Glycine max
  Clone ID: jC-gmfl02220091b11d1
ggctatatcggccctactcggagccaattccgatctcatttcctttggcttcaggattggcctaataagaaaacaaataattccaattcatatatgaacatttttgcctccttatttcttgaaaatgtggaattggaattccccgaggaattccgatctcatttcctttggcttcaggataggcctaataagaaaacaaataattccaattcatatatgaacatttttgcctccttatttctcgaaaatgtggaatcggaattccccgaggaattccgatctcatttcctttggcttcaggataggcctaataagaaaacaaataattccaattcatatatgaacatttttgcctccttatttcttgaaaatgtggaatcggaattccccgagg

SEQ ID NO: 8165 - DNA, 362 bp, Glycine max
  Clone ID: jC-gmfl02220091b12a1
gggggccgggggaaacttttttttaaaaaaaaaaaacatggggttatcctcccccccaaaacaaggggggaatcctggcggtggattgaaccggacatatcctttattgcccctagggggaagaaaaataataagctaaaaagcggggccccgcccaaaatttttttttttgcaacaggggacaaacatatttccaaacgggtcccatattatgggggggccaaaaaaaatttttttttcccccaaaaaggccctaagcggggaaacttggaaacaagcaaaagctcagcttaggcggggggagcccccaagttttgcccactaaatttgtttttgcggccccaaaagggaggggacccaag

SEQ ID NO: 8166 - DNA, 410 bp, Glycine max
  Clone ID: jC-gmfl02220091b12d1
atgcactacacacagtacaagtagctatcatttaatcaaaagaaagggaaacgcgcgcacgcacaaaaacaaaccatgatttgctgccttgattgcatgcgtcattgggataaagacaacacgcccatgtacatctcaaaagggttggtttatataacagctgtctggtctctgcattacatcaacgataatggcttacacgttccaaatcacaactcagatctctatacagcagctttcaaccctaaaccgcattatctatttaattatctataagggccaaaccagaaatatgaacctggaaggttttatggaaaaagcactggtatgagtcttcaaaatgatgatccgtttcatcaaagatctcctcctgcaaaagctcttcaatgacattttccatgggaataatt

SEQ ID NO: 8167 - DNA, 381 bp, Glycine max
  Clone ID: jC-gmfl02220091c01d1
gcaaaatggaatttggttaattttacaagttttaatccaaacatgccctaacttgttttaatgaccctgcccatagagacaagagatcgttattaattggtggccaagaccctttgaatttacaagatatgccattgttttgcccaacggaaaaaccctttaaagaataaccctcttttcaaataatcatattttcagtaacaaaaaaaggggatttggagaactactatcggggaattaatcaattttccaggcggacaaccaagagggaacttaggaggatagaattccttattctggctcggcttgttccatatgtaaaaaaaggaaaggggggtatttttaccctttgagcaaaaaagggggtacccatgggccctt

SEQ ID NO: 8168 - DNA, 498 bp, Glycine max
  unsure (1)..(498): unsure at all n locations
  Clone ID: jC-gmfl02220091c02a1
aaaaagagaaaaggagaagtgaatttttgggaggcagaatgtgtcaagattgattattcgaacaaaaaggttttctgtcggtccaatattgacaacttggtgggaagtaacgaattttccttggactatgacttcttggttgtagcagtaggagcacaagttaacacttttaacacccctggtgtcaaggagaactgtcattttctgaaggatgttgaggatgctcagaagattagactgtctgtgattgattgctttgagaaggctgttcttcctagtctatctgatgatgagcgaaggtcaaatcttcattttgtagttgttggaggaggtccaactggtgtggaatttgcagccgagctgcatgattatgtccaagaagatctaatcaaactatatccaactgttaaagataaagtgaaaataacattgattcaatctggagatcatatctngaacatgtttgatgaaagaataagttcatttgcggagcaaaag

SEQ ID NO: 8169 - DNA, 425 bp, Glycine max
  Clone ID: jC-gmfl02220091c02d1
tttatttttatttttttttttttttttttactaaaacaaatacaaaaactaatgtggggcggggaactcattatacaagaagggcagaggacaccccaactagcaaaaaaggtaaaacctgattccctcaattataggtacattaaggggaggcaataaaagtcataaggacaagcaaaaacccaaaaattagtattattctggggtgaaccattcaccccaccctctccttttttcccaacaaaaaattaaaccgcgggagggggaaatttccttgcaaaaacaaacaagaaataactataaacaggggcctcagtgaggagaacaccatcccaattgatgaactgagaagggcttgagcacacagaggcattaggggggccaaatgtggcaaacacaaagaagaagtaaggggggtctcccga

SEQ ID NO: 8170 - DNA, 425 bp, Glycine max
  Clone ID: jC-gmfl02220091c03a1
gggttttagcgcagcttcttctatatttaaggaagatgggtaaggaaaagggtgacatcagtgttgtgggtattggccatgttgactctgggaagcccactaccactggccacctgatctacaagcttggaggcattgacaagcgtgttattgacagatttgagaacgaagctgctgagatgaacaagaggtatctcaagtatgcctgggggcttgataagctcacagctgagcgtgcaagaggaatcacaattgatattgccttgtggaagtttgaaaccaccaagtactattgcacagtcattgatgcccctggacacagggatttgatcaagaacatgatcactgggacatcccaagctgactgagctgttcttatcatagattacactactggtggccttgaagctggaattcaaaggatg

SEQ ID NO: 8171 - DNA, 411 bp, Glycine max
  Clone ID: jC-gmfl02220091c03d1
aaaaaaatatatttaatgacagattaacatatgttatttggtagagtacaattggccatcaagtcacatggttgaaagaatagccaaactttcctcctttattacaccttatttttctcaatcaaacaaatgattttaataaatccacatttatgaaaggatgtttgtgtataaacattaaccaatctattaatgtttttagtcatgaacgcatggcgtgcgcttagcacctaggaagatcagctggaggcggaggcactgataaagaaggagtgggcccattctcaaccttgaaagccatggctagcccccacggcaaatgagttttctaaatggcaatgcacaagccaaacacctggattatttgcttggaatttaacaacggaccatcctccgacggggacagaaatt

SEQ ID NO: 8172 - DNA, 412 bp, Glycine max
  Clone ID: jC-gmfl02220091c04a1
ggagggcgacccaaaaaaggtaaaaaatataatagtttagttaattgggacatttacattattcccccaaaccaattttagatggcggggtggccagaccagaccagaccaaaaaactcttaacaaggcatctaggttttttaaacgaaatagggagcttttttatttaactgggaaaacaacaccggttcaagagttcgaaaaaattggcatataaaaaaatgttgaggggggactttattttttccaagctgggggaacatattttactaatataagggtaccaacatgggaagggcttcaagaaaggtgcattatatacataaccatgcaggggtacttgaacatgggtttcactaagctttggatagatgactgcatacatatcaaactaaaggggttggcgtatttc

SEQ ID NO: 8173 - DNA, 296 bp, Glycine max
  Clone ID: jC-gmfl02220091c04d1
gataataattatttaacgactctctatcattataaattgggttgcggacaattttacatcaaatcacatgggagcaaaaatacacaaaccttccttctttatttccccccaatttaatcaaacacacccatggaatttactaatccccctttttggaaggtactcttccacataaacattttcccaaccccataaagattgacgagactaaactgtggcaagacacttgccttgtaggaaaaatcaccttggaggcgaaggcccctgataaagaaggaatgggcccatattgaacc

SEQ ID NO: 8174 - DNA, 414 bp, Glycine max
  Clone ID: jC-gmfl02220091c05a1
gcagcaagctggatatatacatttaatgatgatgaaatatttgtgcgaacagtggtatattcggcgcaacacaaatttaaaaaaaacttgcacttctatgattacataagatgcactacctgcatgacaactctacaaagcacctaggcgtttagcaagctagttggttacaacggtgggaaacaatacgtcgacttggaaacttaacaagagacttgtgcatgtccagcgtcttaaaagcaacaaacctataagtgcactcaatatcaattatgcaccagcacttaaaaggctttagcagttgtcaccaatcagatatgggaagaaccaaatacttcgttaatcatcccaggcactatctgctgctccctcttttttagaggctgtggcagtaatcatgaatttatattgata

SEQ ID NO: 8175 - DNA, 537 bp, Glycine max
  Clone ID: jC-gmfl02220091c05d1
ttcttttttttttttatatgactctggtgttatttttgactgtgcctaacaatttacacgatgcacttgatcatcctgcatggcgacaggccatgatcgatgaaatgcagaggataacattggcccatgacgcgacacatgcaccacctaataatcataattttacatctttacatacaaaatacaaagactttaaattttaaaaagaagaaaagagataaacagatcatcttaatgaaatgaaaccaaaacccacaaacattggcttgatttttgttgttgttgttgttcccaacttgattaagcatgaaccgtttgattgaatcacttggacttgaagggaatggccctgattacgacctggtggtagagtgctgcaagagctgcaccgatgaatggtcccacccagaagatccagtgttcatcccaaccaaggtccttgttgaagatgatagcagcaccaagactacgagcagggttgataccagttccggtgatggggatggtttgcaagtgaaccaagaacacagcgaaccc

SEQ ID NO: 8176 - DNA, 378 bp, Glycine max
  Clone ID: jC-gmfl02220091c06a1
tgcaaaaagaaagaatcttaggcgagtttaaagattgacggcaaggaccctgttgggtccctgggggcgaacattttccccgatagacattcgattgcgactgcggctcatagccatgacgaccttaaggactaccacgagccggagcctgtgccgtttggcggcaccgactgtgttcaagttatggttgttttcagagcaaggatagcatagatttgcggccaattttttgtttgtctacttcaccgttttaaccgataagggagtcgccggcgctaagtcctatctgaatacccgttgggactcaatgaattcgattggaccttcggcggcatgatcttccacctctctttctgcaccgctggcatctcattgggg

SEQ ID NO: 8177 - DNA, 423 bp, Glycine max
  Clone ID: jC-gmfl02220091c06d1
agttctatcggcacattctacgatcacataaaaattataacccggatctacgacctcacactactgcgggcgcgctcctttttttttctttatattactttttttgttatttttgattatgcataacacataacgggggaacattaatacatcacacattacataaaccagtttccaatacagtcacaataaaaccaggactttaaccctaaaccctaagcctacgaatttattgtaaaataataaccttaaatacacactaccgtgtctttaaactttaaccctaagtttttttgcccataagtctacgagctaacagaaagcccctgctccaaaagattaccctatcatcaggagtcgctccaaggctggcttctatcaaagagccccacgaggcatgcctcactggcatcctaaagaact

SEQ ID NO: 8178 - DNA, 578 bp, Glycine max
  unsure (1)..(578): unsure at all n locations
  Clone ID: jC-gmfl02220091c07a1
cttctctctttcaccaatcaacacaaactaagttcttccttctgttgaaagcgatagcaatggccacgaatccaatcgaagcggggaacggcgacgctgctcccaaccctaacgcgactaccaaatcctccgtgtacctgcaagactcggaggagctgaagcgagtcttcagccgcttcgacgccaacggcgacggcaagatctccgtctcggagttggacaacgtcctccgctccctcggatccggcgtcccgccggaggagctccagcgtgtcatggaagaccttgacaccgatcacgacggcttcattaacctctcggagttcgccgccttctgccgctccgacaccgcggacggcggcgacaccgagctccacgatgccttcaacctgtacgatcaggacaagaacggcctcatatccgccacggagctctgccaggtgctgaaccgcctcggaatgaagtgctccgtggaggaatgccacaacatgatcaaatccgtggattccgacggcgacggcaacgtcaacttncccgagttcaagcggatgatgagnncacatcgcgaaaatgctagc

SEQ ID NO: 8179 - DNA, 541 bp, Glycine max
  Clone ID: jC-gmfl02220091c07d1
cataggaatagttttcattcgatttctaaatatatataaatatatatatataaaaagaggaaacgagaagaaaagaaatagcggatcataacagacctagatttattagtcaagagattgtgcagcgaaagtgcctagcctatctataaaattcaaatccaaagggcctaatctgttttttcttcagcattgctagcattttcgcgattgttgctcatcatccgcttgaactcggggaagttgacgttgccgtcgccgtcggaatccacggatttgatcatgttgtggcattcctccacggagcacttcattccgaggcggttcagcacctggcagagctccgtggcggatatgaggccgttcttgtcctgatcgtacaggttgaaggcatcgtggagctcggtgtcgccgccgtccgcggtgtcggagcggcagaaggcggcgaactccgagaggttaatgaagccgtcgtgatcggtgtcaaggtcttccatgacacgctggagctcctccggcgggacgccggatccgagggagcgga

SEQ ID NO: 8180 - DNA, 409 bp, Glycine max
  Clone ID: jC-gmfl02220091c08a1
atccgcaaaaccaatcacattttaaaaggtaagagtattatttccatgataatctgatttaaaagtactccgcaatataaacagagtataccaaaaaacactcgatctacagctagtaactaaatcctccattttatgatacggataaacagccgaaagaaagaaataaagggcaaaacataaccctgcattaattggcggcacgttgagttgagcatgcattatttgactatgcagatctttatgacagaggcagctccaatacgatgcagggcaacaactgcatcaccaggcttacaaagggccctttctgttgcggacttaagagcagcttcgagaatgacctctgtggattctgcatcggtagcctttgcagatccctcgcccagtataggaatcaagcccctgt

SEQ ID NO: 8181 - DNA, 634 bp, Glycine max
  Clone ID: jC-gmfl02220091c08d1
gagcccggccggaattaccgtgccaccagctactactcggaggtcgcctcttgctttattttttcctcactttctcgcttcccaaacgcccctctctcttcttcaatggtccgaccagctcaccgacgaccagatcgccgagttcaaggaggccttcagcctttttgacaaggacggcgatggttgcattactaccaaggaacttgggactgttatgaggtcacttggtcaaaacccaactgaggcagaactgcaggatatgataaacgaggttgatgctgatggcaacggaaccatcgatttcccagagttcctcaacctgatggctcgcaagatgaaagacaccgactcagaggaggagcttaaggaggctttccgtgtgtttgacaaggatcagaatggtttcatctctgcagctgagctccgccatgtcatgacaaatcttggggagaagctgacggacgaggaggtggatgagatgatccgtgaggccgatgttgacggtgatggacagatcaactatgacgagtttgtaaagtcatgatggccaagtgaggaccattccaaccataacctaaatttgacagcatataaagagaagagggacagggcagataagttttgatgagaattc

SEQ ID NO: 8182 - DNA, 382 bp, Glycine max
  Clone ID: jC-gmfl02220091c09d1
ccaaactgttatcaaaagaagattttccgacatgcataaacgcagttgatagtttcatatttatagatttctataaatatcatatggtgatgaaggcggttaggccagtcaattgaccgtccacaggacctttaagcatggcccctatagtttccaatgcgaaatgggggccacatttttaacttagggaacccataggaggcccttgataagggatgatgttcatacggaaaaagaggatccacggccaaactgagggccccaaagctcaaaagatcccttaacaaagtgatagtatcctccttttagcgacaatgtattgtcaaccaagccttttttaacaaatggatatgttaaaaggttcccaagggaaacattcaca

SEQ ID NO: 8183 - DNA, 420 bp, Glycine max
  Clone ID: jC-gmfl02220091c10a1
gaaacataattgacatcaacacgaataaaaccgcacaaccattgaatagtgggaaagtaacaaaacgctttacttgaagcggacaatttcccatttatattgtatcactatcgtctaaataaatgactccataaagcacatttacagcagcacaaaatgcacagccactgccttttattaatccataaatcacttcatacatagcactgcattactaactatgacgttcacacttcaatggctgaccaacttaagagagtttgccttctcttgcagagaatccaggaggctgtcaaagctcttcttaaacgagtccactccttcaagttcaagctgggaaccaacaaagctccagtcaatacccaatttctggagagcattgtatattccttcagcttcagatgcatttgagtctattgt

SEQ ID NO: 8184 - DNA, 526 bp, Glycine max
  Clone ID: jC-gmfl02220091c10d1
cagagattatttctgtattttcatcaaatacaacaaatacaaagctgctgcatattacaagcacctaaatattttaccaaaaagacgggcttgagaaccattaaatcgccctacactgtattgagcaaataacaaaaactataatacaggggtgcagcaaaaagaggtgtttgccgctcacagcacaatctactacctgcctggtcaatcccctttccctccccatgattcatcctctcttgcaatactcccagtctgaccgccatacttgtcagaattggaataatgcattttgattgcagccacaggatctgagaccccactgcacgatcctcccacaagaatccccggtcttccaacaccattcattcccatcactcccctgctctgctgctgtaaacttgagattgcttcgaatccatttcttctctgcatctcagagaatacatcttggcagtgcttgacatctaccataaatggttgcacttttggaccatcccttctaaacaactgataatcaatcaca

SEQ ID NO: 8185 - DNA, 425 bp, Glycine max
  Clone ID: jC-gmfl02220091c11a1
cacgatacaatttaagcttatttttctaacctcaaactttaatgcatcatttttctaaattttgttacctaattaactacttaagtatcaagtacgattacacttttctaccattttgttccatctttgcccattgaagcatacaagttgcaaccgaatttgatcattactatgttttcacggtatagatagctctatttctcatttaccgtcacactctaataatcagggatggcagaaaagcggtatcctttagcacccctccatgcataatatgcaattcgagtctcataaaaacctgggagaaagctaaggaaccctagggctaaaaggccatatgcttgagacttttctccccccatatgaccagtgaagataaagtatgaaaggaacaaaagtcctgtaccaaggaataacaggaacag

SEQ ID NO: 8186 - DNA, 456 bp, Glycine max
  unsure (1)..(456): unsure at all n locations
  Clone ID: jC-gmfl02220091c11d1
ctgcataaaaatactagataatcctcacatctcaagacattttttacatacgatggtaaaccgtcacattacataaaaacttttattccatgcataataaaacacgcaatgattttgagggtttgaacagagtatttagtttggtagacaaagtaactgttcagaaaagttcttcatcaccctgaccatcctcctctctgaggacccacagagctcaacctgtcaagtactgagttgaaatcaacggcctgtccactctcctccatcctctggatcacacttgcaacatggtcacccctgaatcccatgctcaccagtttctcaatcaactcattgtagggatggttgcggacgaattgtgactggttcggatttcggaccatgaggttatgcccttgtggngggttctgaagggaagcacttgctgggggatatccaggttgagcaaaatgagga

SEQ ID NO: 8187 - DNA, 341 bp, Glycine max
  Clone ID: jC-gmfl02220091c12a1
aaacccccaggggtaagtaaaaaaacgtaaaaaacaggcccaaaatttttaaggggaaaaggaaaaattggggcccatctaattttggggggacaggggggccctttttttttaaaaaaggtaatttagccctttattttttaaaatgggttaaagaggacccttgggccggggtaaaggtacccctttaaaaaaaattaaaatcggggggggaaaaggggggtttccccccttaacccaaaaaaaaaaaaaaaatccggtttttgaaaaaaaaccacccaaggggaaaaaaacaaaccattggaagctaaaagggccccccaaaaaactccggggggcaa

SEQ ID NO: 8188 - DNA, 430 bp, Glycine max
  unsure (1)..(430): unsure at all n locations
  Clone ID: jC-gmfl02220091c12d1
acttagataagtccggtagaatagataatatgacgtgaaaaaaaaaatcaaaataaatgacgtatccatatataactactcagcgtatatacagtcaccaaaaggaaacaattgaacggagacaaacaccatcacatacagaaaataaattatctcccaaatcaggtctcaggcactgggtttacttccactcttatacatgttgtcaatggcattctgatagtatttaagcaactgtggcctcttcttcttgtatgttggagtgataaggtcacgttccatgtcaaatggaattgagtcaaggtgaactgcttttataaactcaaaacctttcaacttcttttccttcgcaatctttgagagctcttcaattatgtaactttntgctcgagcatcttcacagagagaattgaagtccatggatatacca

SEQ ID NO: 8189 - DNA, 566 bp, Glycine max
  unsure (1)..(566): unsure at all n locations
  Clone ID: jC-gmfl02220091d01a1
agtcaaggccactagtgttgtggctcaatggtggtccaggatgttcctctattgcttatggtgcatctgaggaaattggtccttttcacattaggcctgatggcaagtcactttacttgaacccttatgcttggaacaatttggcaaatgtactgttccttgattctcctgctggtgttggtttttcatattccaataagtcaacagatctgtatacatttggtgaccagaaaacagctgaagatgcatatacttttcttgttaattggtttgaaagatttcctcaatataagcatagagaattctacattgctggagaaagttatgcaggtcactatgttccccagttgggtcaaattgtttacgagaaaaataagggaatcaagaatccagttataaattttaagggatttatggttggtaatgctgttactgatgattatcatgattatattggcacatttgaatattggtggacccatggtttggtttcagattccacgtataggatgctaagaatngcctgcaattntggttcctctcagcatccatcagtgcaatgcatg

SEQ ID NO: 8190 - DNA, 415 bp, Glycine max
  Clone ID: jC-gmfl02220091d01d1
gcataatattgatcatttcatttttggggattgggcaagcaatttatggatacaaaaggcggctcccattaaatttaatgttattaagctaacatggggaaaaaataaaaagagtatctcgactccgttttccaccagactagaagagacacgcatctcgataagtatcacaaaagattacagaataaaaggaacattctcttctcaactatatcctatttgttgctgttgctgaggtggttggtaaccacgataccccgaataaccgccatacatgttgggatcctgcccagcaactggaacatacccattaattttcataacccttgtgcagcatacccatagtattcaccaccagaaccagcaccaccattccactggttcggaacagcctgagcctgtatgtttgaaagac

SEQ ID NO: 8191 - DNA, 547 bp, Glycine max
  Clone ID: jC-gmfl02220091d02a1
tagcaagatcgcccctataccagtgatcaaggaaatatttcgaactgatggcgagggggacctcaggggtccaccacctaaagtgatgcaggtggataagtctgcatggatgactgatgaagaatttgctagagaaacgattgctggtgtaaacccaacgtaattaaagatttttgaggagttcccaccacgtagcaagctagatacacaagcctacggtgatcatacctgtataataacaaaacaacattttggaacctaacttgggtgggctcactgtagagcaggctatccagagcaagaagctgctcatcttagatcaccatgactatctcattccatatttgaggaaaataaatgcaactaccacaaagacttatgctaccagaaccatatttttcttgaaaagtgaaggaactttgacgccattggccattgagttaagtaagccggatcctcaaggtgaaagaaatgggtcctgttagcgaaggctacgtgcctttgagcggaagagtgaagctaatatttggtattggaaaagcctatg

SEQ ID NO: 8192 - DNA, 427 bp, Glycine max
  Clone ID: jC-gmfl02220091d02d1
aagataaagacttcaaagttaccatattattatttcacatggttttgtaattcttagaaacaaggttaccattttttatctaaattgggcaccagcagaaagaccctacactacagtggaacatggtacagaaatccaaaagttgcatcgaaacaaccatgaaggaaaataatgaagctattcccagattccgacctccatgaagccattttcagtggcacagcccctaaacatgccattgcaattgaaaccataagccacttccccagcgttggacacagcaatgagaccagccatcccttcatcgagacggtgcttgatcacaaaatccacggcttcttgaagcttcaagcctttgtattccaacaccggtggcacctcacgcgccagcgtgccacgtatgatggcctcgcctttacccgtgcac

SEQ ID NO: 8193 - DNA, 480 bp, Glycine max
  unsure (1)..(480): unsure at all n locations
  Clone ID: jC-gmfl02220091d03a1
cccacaaccgaggtaaataagatcaatgataaagacgatagacacacatcagaacacagagaacgataagacgtgatagacaaacaatctaagaataagatatatataaaaaactctaaaaagaaagcgctcgagaactaccgggaaaaacccnnaaacggacccaaacaataaaaaacaatattacacactcattttcaaagattatggaacaagataggatacagaaggatgggcggaaacttggggggtgcacaaagtaaaatgaagcaagaggataagtaaggaaggaggacggatgaagaaaaggagaaaaaaattggtggtgaaaaatccaaacgataaataaaaattcgtagaggaagttcccaccacgtagcaagctagatacacaagcctacggggaacatacctggataataacaaaacaaacatttggaacctaacttgggtgggcttactgatgagcaggctatccag

SEQ ID NO: 8194 - DNA, 73 bp, Glycine max
  Clone ID: jC-gmfl02220091d03d1
cctaaaggaaccggaaggccccttcaatatatatattcatgggaatttgatctaaaaaaaaaaaagcacaggg

SEQ ID NO: 8195 - DNA, 499 bp, Glycine max
  Clone ID: jC-gmfl02220091d04a1
agttattccgatattcggacgcatcaacttgttatgaaatcacattgatagcctctactcgtgtcctagctcgtctaagagctagatttgcctcaattgtttgtctcttgccttccgccttattcaaattagcttctgctatttcaagagtttgctgtgcttcttgtggatcaatgtcactacccttttccgcatcatttactaaaacagtgatctcattattgtttattctagcaaaaccgcccatcagagccatcgttaaccattggtctttaagaagacgtattctcaaaatacctatatctacggctgtggcaataggcgcatgatttggtaatactccaatttgtccgctattagtagataaaatgatttccttcacttccgaatcccaaacaattcgattgggggtcagtacacaaagatttaaagtcatttcttcaaattgctctccatttctaagttcgtagctttcgcagtagcttcatcgatattacct

SEQ ID NO: 8196 - DNA, 468 bp, Glycine max
  Clone ID: jC-gmfl02220091d05a1
ccagacaaggaaagattttgatatcgggggcacgcaacccctttttccaaaatcagattcagccgggtgctagtccaataaaaacaactaatagaaaagagatctataaatattaaaaatctacattgttattctagaatatacaatgcatcttcacagaatatttgcaagggctagatcacttcaaaggagacctcgacaattctaagatgcttcttcaataagaccttgaaaaaattaacttcattcgatgagaagaggtagagcaaaatggattggagatggatttagatttccagattcattttggagccaatcttgggtgcatataaaagcctctcgcgtgtccgggtttagtgaactacgagaagaatctagcactctgcccccagtgctaaatgccaattctggcgccagagttgacattggagtcccaagaacatcacgtgccatcatagacaaaattgg

SEQ ID NO: 8197 - DNA, 533 bp, Glycine max
  unsure (1)..(533): unsure at all n locations
  Clone ID: jC-gmfl02220091d05d1
gaaatcataaaattctatataataaagacaacatatataactttatcctataaattacacacaacaatttcgagctttattctataaattaagaaaaagaaaatagacatgctatctttctttggtcctaccaagtagctccaatcatttcacaactgttacaatattacaagaacagaaatttcaaacacaaaattgaagctacacatattagtatgctttctcaaacacaactgggagcacattaccatccaaggccaacaaaatcttcccattctcacgcaaaccaccaacaatgccacagtcaaacctacaaaaggggcatacatctgtaggacaccaacctatataatatgaacctttgattggtgtctcagtaattctaaagtaatcatccctgcctgatgcagcaatgagcctccttccactctcactatccttctcagccaaattccaatttgtgccctgcacacatattgaggcagctgagaagtcancctgaagtccctattcaccttcacaacatcatcttc

SEQ ID NO: 8198 - DNA, 538 bp, Glycine max
  Clone ID: jC-gmfl02220091d06d1
gaaatcataaaattctatataataaagacaacatatataactttatcctataaattacacacaacaatttcgagctttattctataaattaagaaaaagaaaatagacatgctatctttctttggtcctaccaagtagctccaatcatttcacaactgttacaatattacaagaacagaaatttcaaacacaaaattgaagctacacatattagtatgctttctcaaacacaactgggagcacattaccatccaaggccaacaaaatcttcccattctcacgcaaaccaccaacaatgccacagtcaaacctacaaaaggggcatacatctgtaggacaccaacctatataatatgaacctttgattggtgtctcagtaattctaaagtaatcatccctgcctgatgcagcaatgagcctccttccactctcactatccttctcagccaaattccaatttgtgccctgcacacatattgaggcagctgagaatgtcaccttgaagtccctattcaccttcacaacatcatcttcttct

SEQ ID NO: 8199 - DNA, 581 bp, Glycine max
  unsure (1)..(581): unsure at all n locations
  Clone ID: jC-gmfl02220091d07d1
aacacggataatttattttagcatttcgtgtaccggtagtcgaagaaggtatcgtgcccttaagcattctcgttataatatacaatacaatgatgagcagctagcagcactaaatggctgatccagagagcaagatggctgaagcattcgccttagcaatcttgagtgtttttggatttagaaatggtatcagtctcctgtaagcatgtacacatccatccatgttagatgaacaaagaacctggaaaggataagccttctaaaaaattgctattaattatggcattactggctgatacaatcaaggcggtgcaccaagcgattcaacagatattttgactcacggtgtctaccttttccgagtaaagatttaaaaacacgaaggtaggcaaaacgggactgcggacttcccttactccatgccttcaggaattttacagcatctactacggacccaaactttgaaatatactacacaaagggttcactgaatggagtaaatgtgtgtgaaatcatcaaacaccaaagggcaagtgcctnctcaaatttcccaatttcccataggttattcatcagtttca

SEQ ID NO: 8200 - DNA, 412 bp, Glycine max
  Clone ID: jC-gmfl02220091d08a1
aaattaatctcagatttataaatatatctgatataaattgttcacggactcataattggaagtttacaatttacatgattaattaccaatgtgacttctaagacaacaaagataactcctttctcaatcaatcaacagtatttatttaccttaccccattcaaatccaattaatcatgaaccaatcactccactccatcttcaaaactcccaaataaagcctaacctaagagaagaaaagtgtaattacccccatgaaactatgggtcgaagtttcgaccatatcaaacaattctcaactcaaggtttggatatccagctcgagctttgtgtcgttcaaatagatcttgaagcgcttcaacaaattggctatgtattctggccacctcctcaggagttggctcgtaattttt

SEQ ID NO: 8201 - DNA, 485 bp, Glycine max
  Clone ID: jC-gmfl02220091d08d1
aatcataaataatagtattattaatccctttcaaataaaaaacattagaatacattaaattagctggagcattcaactcaactggtatacatatttattaaacatgatgatgttaattagagccttttaactgtacaggcctagttgagctggtacacctgtgccattgatccatgtcccttgcaagaaagcctcaaccgtgtacctggtagcctcatccctattgatgactttgcggccaggccaattaaccctagcagtggtgctagaaccagccccattgttgttgtactcaccatagtaaagtgtgcttagggcaaagttcccttcccaaggaagaaacccatcagggtgaattaggtcatcaatctgagtctccatgatgatggttcttgaatactccttccacggccttccgaggtagctcttgattgtgtctttgaggggtaccaagtcggtgtcggccttgatcacgcatttctgga

SEQ ID NO: 8202 - DNA, 450 bp, Glycine max
  Clone ID: jC-gmfl02220091d09a1
ctcttcttcgtctcaaacctcttcgttccttctattcattccatttcttccaaaatggccggggacccagatcgcgttctcgtcactggagccgcagggcaaattggatatgctcttgtccctatgattgctaggggagtgatgctgggtcctgaccagcccgtgatcctccacatgcttgacattcctccagcagcagagtcgttgaatggggttaaaatggaattggtggatgctgcattccctcttcttaaaggtgttgttgctacaaccgatgtggttgaggcatgcactggggtcaatattgcagtgatggttggtggattccctagaaaagaacgtatggagaggaaggatgtgatgactaagaacgtcttcatttacaagtcccaggcttctgcccttgaaaagcatgctgctgccaactgcaaggttcttgttgttgctaac

SEQ ID NO: 8203 - DNA, 392 bp, Glycine max
  Clone ID: jC-gmfl02220091d09d1
actaatacaaatacaaatacaacatattcctttgaactcatcatacatgatgtgcagaggacacaagttctagcaaaacaggtaaaacctgattccctcacttatagttacattagcagatgcattaaagtcataaggacaagcaaatcccaaatattaccattattcttgggtgaaccattcaccccaccctatccttttttcccaacaaaaaattaaacggaggttggatgaaacttccttgcacaaacatactagaattaactgtatacatggcctcagtgaggtgaacaccatcccaattgatgtactgagaagggcttgagcacacagtggcattaggtgtgccacatgtggcaaacgcagtgcagttgtaaagcggttcttgcgat

SEQ ID NO: 8204 - DNA, 418 bp, Glycine max
  Clone ID: jC-gmfl02220091d10a1
atcatccatgcaaaaactgtgattacttcctgaatttacattaaatgcatctaaaccttaaataggtatttgtacattgaatcttcaatctatgcatgacaatagaagtagccattttacaagctttcaccaacataaacactcccacctaaaaccatttaagcgttacaacttagttaaaaaggtttgccaatgtttctccaaggcttgcaatcatagagttgttccaacacttctcacttgggagtgaaagcagcaaaaatagtagcatggccaggatctgcaaggtgagcaaagaggttgtcaataggaccagtgccagtgtaaatgtgctggaaccatgcccccatcacagccaacatggccaacctcccattcttgatctcctttgttctcaactccttgatcttctcaggag

SEQ ID NO: 8205 - DNA, 515 bp, Glycine max
  Clone ID: jC-gmfl02220091d10d1
agtatataattatgtatagcatagataataagattcatacaccccacagaaaaaaaaggtatattttaggtgccacccaggcctatactgctagcgtggccaaacttccgatcagaattaggaatgatcttgttccatctgatttagatggaacccaccttggttattcttgtgtacctctaccttgaacttctcttccttctgtcccctcttgactttgagaagcagattaaacttggcaaagtcatcaatgacctcagcctttgcatcagcaacctcatgaagctcatagggtactagtgaattagacctttgctggatagtcttgatcgcatgatttgctgcatcctgaacttgagggtcatgtgttggcacagattgccatccaggttggtgaccatcctttttgacaccaagatcagcagaggtaaatgatggtacatcaccagcaggctcgaactctaggagttctttgaattcaaccatggcttcacccacaccttggcttcatagag

SEQ ID NO: 8206 - DNA, 490 bp, Glycine max
  Clone ID: jC-gmfl02220091d11d1
gaggaaatgctcagtaatagcataaattgggtacagcttgccatattcatagtatataagttgcacagtcgtgcacagttcaaccgcgggaaagtcctggggatcaatatcaaacacaattgaagtgcattgaccaaccagatcatggaacaaattgctgcaacttatagaaagactaaccaggaaattacgaactctctaacagatgtttgtaaatctaagagaccatggcattggtttcatcttcatcagcttctcctgtttcattgaacatgtactgactttggtactccattaggtactgtgttgatcttttgacatccaaaaacagattgtaaacccgatttatatcatccaactccactgtcttcccctttcgcttttggcatgccaatgcagctgctgtgattagatgaatagcatatctcaaagatgtttctacacctattttggttaacaaacactttgcaccttcactcatgtctacgtc

SEQ ID NO: 8207 - DNA, 366 bp, Glycine max
  Clone ID: jC-gmfl02220091d12a1
aaaaaaggccaaaaaacctttttttcaaacaaaaatattccctttaggggctttaacccaaaggcaacaggggcccaaaaaaaaaaatccctttttttcttttttgggttcccctcaaaccgacccccagaaaagcctttatgggaaaccccgggggtttttttacaactaaacccaacaggggggggggggtttttggggtttttgggccgccctagttactttccacaatcccctagttcttgggggccaaccttaaaaaaacaatttttccccatgcccagcaggaagggggaccttttttttaattaacccccaaaactggtcccgttaaacgggtaggggttaccaccaaccttggaaaag

SEQ ID NO: 8208 - DNA, 397 bp, Glycine max
  Clone ID: jC-gmfl02220091d12d1
aaatcataatgcataatagagatcatttcataaataagtattcagcaagcaatttatggatacaaaaggcggctccgataaaatttaatgttattaagcaaacaaggggaaaaaagaaaaagagtagcagagtcggttttccacgagacgagaagagacacgcaactcgataagtatcacaaaagattacagaagaaaaggaacattctcttctcaactatatcctatttgttgctgatgctgaggtggttggtaaccaggataccccggataactgccatacatgttgggatcctgtccagcagcaggagcatacccataattttcataaccttgtgcagcatacccatagtatccaccaccagaaccagcaccaccattccactggtttggatct

SEQ ID NO: 8209 - DNA, 484 bp, Glycine max
  Clone ID: jC-gmfl02220091e01a1
attaaaagaaattacaaggggtgatttttgtctgctaagttgtaaaaaatatgtataataggattggggtgatgtgagccgttagatcttgtgagaaatcgacggttgatatgtatgtatattgcggtataatgaagcgagttgtatgtgattgcaggctgtacagtggggagaccagaagcaggcaccgctgaaaggataagctaagaaaaccgtgggttgcatgtaaatattgtcgtttttcgttaagcacctgccacgtttgaatctactactaccattatgcgtcggaaattaattgctctgttgctgactcaaatatatattactagcgtgtttgattttgagcaagtgaatgtaaaatgctaaataattaccgtaattagcatcagtatgctatgttttgttaagccagatctgccttcaactttggcaattggttaatctttttctccctctgttaaatgattaatatatattaaaa

SEQ ID NO: 8210 - DNA, 414 bp, Glycine max
  Clone ID: jC-gmfl02220091e01d1
aagtatcagccattataattgttattgatatagggtataatatgagatgccaggaattaccatgacatacacttgtgagacatattgtatatctgctaacatagtataacttttgccagaaaatcgatctcctgctttggaattggcttaaaataaaaataaccatagaagtcaaatttcaattaactacatctaccagaaattaaagaaaaaaaaaacattggacattccctccttctattgaacatggttgtattaccaaccatttttttttaaaaatcatgataataaaaacatttagcagtttcctatatacctgagatggtactcactaaccttttctattacaaaagatcttctacggagaataaagaaagatggaagttataaaaagagggaagggctgttatgcat

SEQ ID NO: 8211 - DNA, 359 bp, Glycine max
  Clone ID: jC-gmfl02220091e02d1
tttatttacttctccctttaaattattttgcacaatagagagcacttgatatttggggaggggggaagcaaaaaagggatacaaaaggcgggccccaacaaatagaaagtgattaagcacacaaggggaaaaaagaaatagaattgcgggggtccggaaccccacgaaaacgagaagagacacccaacgtcgatgagaatgacaaaagattacagaagaaaaggaacattcccaactcaactatatccaattagaagacgatgcagaggtgggaggtaaccaggagacaccggataactgccacacatggagagaaccagtgcagccacgggggcagacaccaatattccagtaaccgg

SEQ ID NO: 8212 - DNA, 414 bp, Glycine max
  Clone ID: jC-gmfl02220091e03d1
aatagtcaaataatattagttcccataataattaaggaaaattcaacatttacatcgcatactccattgaaatcacctctatgtaagtaattatgaactatgaacatcttggtaattcgaaccagggtgaactccaatcatccccaatttaggaggcaacaagtacaacttatttttctttcagggagttctcaatatctatcacaaaccggtacttgacgtccctattgatgagcctctcaagagcttcattggcatactcgattggaattacctctatatttgggtgaatctcgtttgcagcacagaagtcaatcatctcctgaatatcttttgtaccacctgtaacacttccggctacagtctttgatcctatattaaggcttgcagggctgaatttgacttgacttggga

SEQ ID NO: 8213 - DNA, 498 bp, Glycine max
  Clone ID: jC-gmfl02220091e04a1
gacaataactatcttcttccaaatataaaaaaaaaaaagaaaaaggaaggagataggaaagggttaattgaatccaaaaaaaaaagaagagaaaaacaaaatgggcagggtttggacttcgatgatagcattgttgctttgcctgatgacatcatcggttcggggcgaggacccttacatttactacacatggaacgtgacctacggcaccattgccccattgggtgtcccccaacagggtatcctcatcaatggtcagtttcccggccccgaaatcaactccaccagcaacaacaacgtggtcatcaatgtcttcaacaacctcgatgagcctctcttgttcacatggcatggtgtccaacagaggaagaactcttggcaagatggcacattgggtgcccagtgccctatcgccccaggcaccaactacacctaccgctttaggttaaggatcaaattggaacttacttctactacccgaccaccggcttgcaacgc

SEQ ID NO: 8214 - DNA, 70 bp, Glycine max
  Clone ID: jC-gmfl02220091e04d1
gagtaaaacacctattattatataaggggtgggggaaacattaatatttacaccagcttctaccaagcta

SEQ ID NO: 8215 - DNA, 460 bp, Glycine max
  Clone ID: jC-gmfl02220091e05d1
gaagacttaataataaaacactccagagtttcatattactcatcccattcttagggaagttctggagtatatgtcaacattgttaaagaccaagaatgtataaaaataagaagaagaattttaagttatatatatatttggctaatccctacttgataatgaaagcttcattatttgagtcaaactttgatgccttcattttgtttgagtggaaacataggttctgagagatggtgactgagtgagaacatcaggtgcaatagtagtgttctgtgctccactcttctgctgcattctcctcctagcaaggtaccctctcacccaaggcgtaacatcctcgttgactttgatcatgatgaagaaaatgatgcggtagatcacaatcatgctgaagatcacactcaggtttatccactttgatctgttgacatcaatttggaatactttctccaagatgtat

SEQ ID NO: 8216 - DNA, 555 bp, Glycine max
  unsure (1)..(555): unsure at all n locations
  Clone ID: jC-gmfl02220091e06a1
gggttttagcgcagcttcttctagatttaaggaagatgggtaaggaaaaggttcacatcagtattgtggttattggccatgttgactctgggaagtccactaccactggccacctgatctacaagcttggaggcattgacaagcgtgttattgagagatttgagaaggaagctgctgagatgaacaagaggtctttcaagtatgcctgggtgcttgataagcttaaggctgagcgtgaaagaggaatcacaattgatattgccttgtggaagtttgaaaccaccaagtactattgcacagtcattgatgcccctggacacagggatttcatcaagaacatgatcactgggacatcccaagctgactgtgctgttcttatcattgattccactactggtggttttgaagctggaatttcaaaggatggacagactcgtgaacatgctctgctttcattcacccttggtgtgaaacagatgatttgttgctgtaacaagatggatgctactacaccanagtactccaagggccagtatgatgaaatngtgaaggaag

SEQ ID NO: 8217 - DNA, 289 bp, Glycine max
  Clone ID: jC-gmfl02220091e06d1
gtggttattgttgtgtttagttttttttggaaccgcaaagtagggaggacattgaaaacgcaagccaactacggaggggaaaacccctaaaacatggtgggcttagaaaaagggggagcgggggtggtcaaaagcccagcccattaaaccagaatggtaaaaggggttttggccccgggtgtcaaaaacccaattatgggaacaaaatttgggaaatgatgggggggactttaaactttggccgaaaaacaagctccctaaaaacgaggacccaagggccagaaaccca

SEQ ID NO: 8218 - DNA, 458 bp, Glycine max
  Clone ID: jC-gmfl02220091e07a1
ccgttgcttacttcctcctccaccgctggcgcgacaagatccgcagccacacccctctccacgtcgtcactctctccgagatcgccgccattttctccctcatcgcctccttcatctacctcctcggcttcttcggcatcgacttcgtccagtccttcatctcacgcgcctccaacgacgcctgggacctcgacgacgccgttacagattctccctcttcctctccctctccctctccctcgcccgcaattaccaaaatgccctcacgggatgcctcgattatattatcctccgaggatgacgaggagattgtaaactccgtcgtggaaggcgtcacgccctcctacgcgctcgagtcccgcctgggcgactgtcgccgcgccgcggggattcgacgcgcggcgctgcagcgcctgacggggcagtcgcttgagggcctgccgctgaggggttcgact

SEQ ID NO: 8219 - DNA, 486 bp, Glycine max
  Clone ID: jC-gmfl02220091e07d1
acccttaaacagaaatacattcattaattagataaagacttgagacaatgggatctcaagcttaattgacgggcactagcggacaagagaatattcatcaacccattcggctacaatgatagatctgctaagcatattatatagggggaaaagaattagaatataacacgtcaaatgtcttggttgaggagaaaaaaagtgttaacacccactgaatggctcggcagaagaagcaatgaaaagaagaaatgatccagaaggggacagggaagatctagagtataactctactttcctctctgcaaataataaaagatctaaacagacagcaatgcatagccaaacgtggatgccaacaatctaatctaatgtttctccattttccttgcctaaatccgcttaccctcaatggatttattgtagagtccagaattaatgactgcaaccacgttcctgacctcaagatgatgatattctggctacatc

SEQ ID NO: 8220 - DNA, 394 bp, Glycine max
  Clone ID: jC-gmfl02220091e08a1
ggcgccaaactattatctcaaaatgatatcatttagttgcaaagttttattaaacaataagagtttattttgggacatatttgctactgggaagattttgataatttggtacaagcaaagggcgaaggtttcaaatcattaacctgggcaaaatctgtcatttcaaaagcttatttttcaagaaatatagctcacttcaacccaaagagatattttgccaaagagattgctgattccctttccaggatcactttgttttacaatagactctccaaccaatatagctttaacaccagcttcctgaacataggcaatatcgtccggggtaaagagaccagattccccaaccataattatgcctctctcggggattattttgcctcgctctccttca

SEQ ID NO: 8221 - DNA, 178 bp, Glycine max
  Clone ID: jC-gmfl02220091e08d1
aaacagggatttttatctttttattattggtataggtaaaaaccactgcacgataccacaaataatggcaaagaaataacctgtacccttactatgggcataaattaattcctcctgaatttattcagctaggcttttctgagtagaccagaacattgaaccagttgaaaatcagtat

SEQ ID NO: 8222 - DNA, 452 bp, Glycine max
  Clone ID: jC-gmfl02220091e09a1
ctttatctgaatgggatcaaataggcaccataactcacgttcccacaatctacttctaccgtcccacctcacaagacaaagacaacgttaacaccgttgcttccaccttgaaagacgcattaagcagagccctagtgccgttttatccactagctggtcgtttacattggataaacaagggtcgtttagagcttgattgcaacgccatgggggttcatttcattgaagctgaatcctcactaaccctagaaaatctcggtgacttttcaccctcttcagaatacaacaaccttgtccccaacgtagactacaccctcccaattcacgagctacccgtggttctcattcaactaactaacttcaagtgtggtggttttagcattagcttaaatacttcacatgctgttgcggatggaccaagtgcattgcacttcttgtgtgagtgggcaagg

SEQ ID NO: 8223 - DNA, 429 bp, Glycine max
  Clone ID: jC-gmfl02220091e09d1
acccataaaaagggggcactaacacataaaattataggactgatccaaaattcaatatgcggcccatggtctaattccatgactaaaactgtaaagctcaaatatactatcctcctaaaaggattagatgttgaaatccaagttattccaatgaaagacaaactttttcgagtgatagtcccttggtatcttaaaaggagcattattcaaaattgaagctacacttctgcgggcaaaccatgggaacctactaacaaggacagtatccaagaaggagcaatggattctaatttaggcatgagtaagccaatgccttgtactgaaaaagcttttctgcggtcaagtccaacttattccttgagaactcatcaatgggaagtccttgaactattgtgcattccccattggcacaagtgacatggaatgaat

SEQ ID NO: 8224 - DNA, 427 bp, Glycine max
  Clone ID: jC-gmfl02220091e10a1
aacagaaatgcagatacattcattttgtaataatttatatacaatattgatattgtttgcatcaaccaaaaacaacaaaccggtacatgatgcaaggcatgaaaaaccggtatacattcaaaatatagaaagcaaaaaaacaaaaaactgctaactagagaagtaaaatgccgaggccagtagttttggcctttttcttccttcaaagcaaatcgtgttatgcttcggtattaccaaaacatatcactggaaaatttcctaggatgtcataaacctctatagaaatcaacaacctcatataatgatattttaggcatataaagttcgcattgaaaatagaggcactagagtagcagtatcttttgatagcaatcaccaagggaaccatctccaaacagttgtcatggattttcatgttgtataaggg

SEQ ID NO: 8225 - DNA, 553 bp, Glycine max
  unsure (1)..(553): unsure at all n locations
  Clone ID: jC-gmfl02220091e10d1
aattcatcaacatcaaatcaatcactacttcactatataattggtatttgtagcactaatggcaatgcaatacttcaagaattgtggaagaaaaatccccttctttttatacattaatcgtttccttcattgtctcaaatcttcaaatccattaacttgacatcacatcaataactcctttgtgagatattcatcgagctgagagcatagaaatggaagcagtagcattagatgtggaggaaccagttgaggtagaggtttctgcccgagtccttaagttagtttctacaaaaacaggcatagaaggccttatttgccccagtgagttcttgcttttgagaaaagctactatttcagacattgttggccttgcagcagctgatgcttgagtgcaaagcaaagcaatctctatgattttcttcacttcttctgcatcatagtcttcagggtccaacaatgtcttgtcaaccaactccaaatgcatatcttgcacgtatagtttccatgccctttgaangangaattcaccatcagtatctggcctcaattcact

SEQ ID NO: 8226 - DNA, 380 bp, Glycine max
  Clone ID: jC-gmfl02220091e11a1
ctggaccttgggaatttgggggattgtgggacataaaaaactcaccatggggggaaccggcaaaatgccccacctgggggtggggaaagcataacggcattcgccctagcccaagtacaaccgtcaccgaaacccaacttccgaagaacctaaacggcaagccctaaccccaaggccgggcgccgcctttggggctgcccggggaagcccccacccaagggatgggggccgacaccgctggagctaccacagctccgaccaaaggcccaaaagggtagctggaaccgccccccgaggcccaagcggtggacccggcgcaaactccccaacgttcaaaaaagaaccatgcttgcttgggaattggaccggtgacaaaggaa

SEQ ID NO: 8227 - DNA, 470 bp, Glycine max
  Clone ID: jC-gmfl02220091e11d1
caaagcagtgtgtgtaggcctactttatatatgcaacatcaacaaactaagctaagaaactgcccttttttccttctctctttatctcccaaaaaaaaaaaccaattaaagaatatcttagggtacttaaaatacaattcagcacatatttctgcattagtctctttttatgtttcaatgcttaatgacataagcattgctttcttcgtcccatatttctccatttggcaaccactttgtgtgctttcaaatatagaaccctgctccccctccgtgtcacaaggcaagaattgcagggcaacaatatgcatcattgccaatagtatatctctgcttaaacttcagcaagagatactacattttggcttcaccttctctttgctaactggaatgccctcttcaagaaatgatttgcagctctgtcatttctactgcacagcaccctcagtattgcgtttggatctgaccta

SEQ ID NO: 8228 - DNA, 429 bp, Glycine max
  Clone ID: jC-gmfl02220091e12a1
cttacccaaaaccataaagtttgcattaaattttggggaaacatgatatccatctcaagacatattaatgaacacatgtaatagccttaaatgatacaaactaacagaaatcttaaatataaatgtttttagagtgaatcaacacacaaaattaaactaattaagattacttaataatctatcttgctcatcatggtctaggcttcattcttccttcattggccatcttgaagagctgggcttgagcttctgcggccttgttggagttgagtgaaggccacaaacctgtccctgacttggttggtagtgtaagggaacttgttgttcaccatggagttgaggaaggaagctgtgccttctttgtagagtgctcctagcccatcaattcttgtgttggaaagggcttgtggtaagctcaggccaggactg

SEQ ID NO: 8229 - DNA, 465 bp, Glycine max
  Clone ID: jC-gmfl02220091e12d1
aaaataatagcagtttcatattgtcttccctacaaacaacaggttacataaaaacggaaacaaacagaaccagttttatagaacagtaatggaaactagatctagccggaacagaaccatcccctcaaaagagacaatcaaccggcaacaggaagttgcggcatgttatacatcttcaagccaccgcaatacattaccaagttcaaaatcacatatcatgttggccatactcctcctcctactcttcctcctcatactcatcctcatcagcagtggcatcctggtactgttgatactctgacacaagatcgttcatgttgctctcagcctcagtgaactccatctcgtccatgccttccccggtataccaatgcaagaaggccttcctcctgaacatagcagtgaattgctcactcactctacggaacatctcctgaatggaagtagagttgccaatgaatgttg

SEQ ID NO: 8230 - DNA, 476 bp, Glycine max
  Clone ID: jC-gmfl02220091f01a1
gaacattcaattgcatgcttgcttgtacaaagcgccagttagttcaaaggagggaggcttagaattgcctgagctgtggtcagccagactgatcaaagtgccttattggttgtcgagttcccaagttggagtttatggaaagccagccccttaagattttactgctgattatgaacactggaaacgtgtagtatccaagtcttatctagacgggatgggaattaaatggtcaaatggacgcaatgtcatggatatgagatctatctatggaggatttgctgcagctttgagagatttgaatgtttgggtcatgaatgtggttacaatagaatccccaaatactcttcctattatttatgaacgaggtctctttggaatatatcatgattggtgtgaataattaaagacctattctaggacctatgatctactcatggtgaacatttgttttaaaagttaagaaaaggtgcaatttt

SEQ ID NO: 8231 - DNA, 405 bp, Glycine max
  Clone ID: jC-gmfl02220091f01d1
atccgcaaaaccaatcacattttaaaaggtaagagtattatttccatgataatctgatttaaaagtactccgcaatataaacagagtttaccaaaaaacactcgatctacagctagtaactaaatccttcattttatgatacggataaaccgcagaaagaaagaaataaaggggaaaacataaccctgcattagttggcggcacgttgagttgagcatgcattatttgactatgcagatctttttgacagaggcagctccaatacgatgcagggcaacaactgcattaccaggctttcaaagggccctttctgttgcggacttaagagcagcttcgagaatgacctctgtggatttttgatcgggagcctttgcagatccctcgcccagtataggaataaagccc

SEQ ID NO: 8232 - DNA, 136 bp, Glycine max
  Clone ID: jC-gmfl02220091f02a1
atcggtgatctgcagtactggatggtctagaactatttctatacctgctctgctcacaccggcggggtaacttgggttaaagttattcaaaacaagcaaactactcaatctgaaggtgatgggttcattgagttta

SEQ ID NO: 8233 - DNA, 449 bp, Glycine max
  Clone ID: jC-gmfl02220091f02d1
gtgagaaaacagctagccaagatcaaatgtcctctacttgtgatattcagggaggtagagatatgcactgtcagaattccattagcaatgctggccatcagctccctattactgggaatttatcagaccatgttgatgctgttagcattctccagggatatccctttcaagttcctttgaagaaagaaatgaatggcgatatgaattgcagcagttcagcaactgaattgccttttctgccccataagattgaacaggatgatgatcatatcaaaacattccagtcgtcagattcagataaaacatccagaaatggtgatgtgaaactgtttgggaagatactaaccaatccttcaaccacacagaaacctaatgtgggtgctaaagggagtgaagaaaatggcacccatcatcctaagttaagcagcaagtcttctaatctgaaattt

SEQ ID NO: 8234 - DNA, 394 bp, Glycine max
  Clone ID: jC-gmfl02220091f03d1
acccgacaaaactggtaatataaaccttatagccattatttgggggattttattttagggtttatttaattggacaattttatattttatttcattcggggcatataatccctaaacccgttggggattgggtaattgcacccaccatatccagtgctacgcagggctggtcagtaggtacaaaatgacccgctccaaggatccaataaaattgggggtttttgtatgacttaaaaaaccctttggtcgttttggcacttccacaggagaggggggttctgtttttctccaagaaattttgaagccctgtccactcgagttttttaagccaagctttagtccccttggttgcacaaatgagatccacttgcccactgtacacaggcacgttgac

SEQ ID NO: 8235 - DNA, 319 bp, Glycine max
  Clone ID: jC-gmfl02220091f04a1
tttattttttttttttttttttttctttttattattttttttttacattttttttttttattgggggtattttggggttcttcccccccccaaagaacgggaaaatttctttatttaatatttacccccacaatccgcttttttttgttaagagagggtaaacacccttaaacttttggcttgggcacaaccggaaacacggggaagggaataaaaaaaaccttggacaccccctggcccgtttgtggcccccaccaacggggcccccccctttttcccatctaaagggtaaaaagggagggggccccatctccctctt

SEQ ID NO: 8236 - DNA, 378 bp, Glycine max
  unsure (1)..(378): unsure at all n locations
  Clone ID: jC-gmfl02220091f04d1
gggcccgaggtcagtactgntnncaaaccgttggagaaaaccccgcacagctactatcggggccgccctttttttttttttttttttttttttttttttttttcccactttttggtttgtaacctatatcattagccgggggatacctttttgaaataaaatgccattttatttttccccaatccgggcggttatcctcagcccctgagaaggggtaatccccccacccttccagggatacacaaggttggccctttgcccaaacgaccccctacaatgatccattagaattggggcttttttttacttaaaaaaccccttggttggtgtgcccttacacagtagaggggggcccagaatttctccaaaaaattttaa

SEQ ID NO: 8237 - DNA, 526 bp, Glycine max
  Clone ID: jC-gmfl02220091f05d1
aacataaataattgcctgtaaaacaaattccgaaaaaatattttggagtaacacatagtagagtcgttgtatatatcgtaaaatcaaactgtacacaaatttgcagaaatcacatgtaacaaataatcgtcagtgtaaaacaaattcatataccaacatgcatgttgtaaaggtggcaccagttaaagaattgtgacacctgtgaagaggtattgatgtgtgtatacttgcatattcccatctcccatggatttggacatttggtcgagtgtatacttgttaaaaatgatgccaaaattcaccttacagggatatacaaagttgtaaaggtgaattcatgctatttgatatataacttcactggcttcagagcaatggtgtcaattcataacccaatttacagtccacaaagctagcataataagctctcaactgtcaggaacctgtctgcgatggaagaagaggtggctgtgtacctttgaaaaggtggcaagctctgttggtgcgacaaccaatcttaaccact

SEQ ID NO: 8238 - DNA, 468 bp, Glycine max
  Clone ID: jC-gmfl02220091f06d1
gctcttttttttttttatctgctttttttttttttttttttttttatttttatcaaattgggggaaccttcaaaaaagggcacccataataatgaataaatatacctgatttacaaattcccaaagatttttccttaatttgctccagatttcatttacctcgggaggaccttaatgacagactcataccaattgtaagactttacgaacctaacaagacagttgctcattttccccctgccaaggtttcttttattgaacaaaagggataaccgctaaaatgtaaaaaaaatcctgcccatctgaaattttccataagacccatctcaaaaacacgatgggctcagacctcttatttcccccaaagtaccatttcaacttgattgagttttaagcctgtaccctcttttctttgctctctgcttaggacccttttacttaaatatatttttaggcaaaaatgggttt

SEQ ID NO: 8239 - DNA, 510 bp, Glycine max
  Clone ID: jC-gmfl02220091f07a1
aaaaagagaaaaggagaagtgaatttttgggaggcagaatgtgtcaagattgattattcgaacaaaaaggttttctgtcggtccaatattgacaacttggtgggaagtaacgaattttccttggactatgacttcttggttgtagcagtaggagcacaagtaaacacttttaacacccctggtgtcaaggagaactgtcattttctgaaggatgttgaggatgctcagaagattagactgtctgtgattgattgctttgagaaggctgttcttcctagtctatctgatgatgagcgaaggtcaaatcttcattttgtagttgttggaggaggtccaactggtgtggaatttgcagccgagctgcatgattatgtccaagaagatctaatcaaactatatccaactgttaaagataaagtgaaaataacattgattcaatctggagatcatatcttgaacatgtttgatgaaagaataagttcatttgcggagcaaaagtttacaagagat

SEQ ID NO: 8240 - DNA, 421 bp, Glycine max
  Clone ID: jC-gmfl02220091f07d1
tttgttttttttttttttttttttttttttttttttttctttttctatttttttacttttgttttattattattttttttggaatgaaaaccacgcattttggggcaaaaaggaaacttggcacccccctacccccgagctcgaagccccgggaatttattaaagagcgcccctgcaaacgggccccaaatgcctattccagaaacctatttcagctagccttgggcccaaaattagccggaaacaaaccgggggtgaaatcaaatcacatttgaacccccgccacaatccaaaatctttggccgaaaagcctgggccgcataccgggggagccaactcacatggatggcggggaactcactagccccaagccattggggacacctgccctgggaaccccattactgaagaagccttcgcg

SEQ ID NO: 8241 - DNA, 426 bp, Glycine max
  Clone ID: jC-gmfl02220091f08a1
aaccaaaccaggtgttcctttataaattaaattcatctgtacacgggcatagaaaaaaatacataaaaattatttgttcagaacttggagagtagaccaaattgagtttcgggatatacacgagacgagattatattataacaattcttctcaccttagcagtcgatgtcgtgcacacttgttttccaaagacctccaagaaagacaaatttctttggctagagatcagacttgaacaaatgttcgtgttcttcttttagctctctctccaatcgtgtatttccatagcgagatttctggtctatccaaccaataatatcggagaatacaatctgcaaattttgtggtggctctccatacaatagaccgtgccacatttctggatacgactttagtgtcttatctgagcttgccgcctcatcatat

SEQ ID NO: 8242 - DNA, 496 bp, Glycine max
  Clone ID: jC-gmfl02220091f08d1
ttggtttttttattttattgttctttttttattttttttttttgacacgataagccagcttcaactagattagagggcaacagaaagttggccaatacaattcccaaaggggctgcacagccagaattagaccgagaaattcagggtccaaaaaaatcaaatccatgccaaacttgtaacaacccgacctttacagggtcttaggcagtttttgccaaggacaattaatgtgactaccaggtaaacacctattattgcctaataacctataggcttcaacaaatagaaaacttagtgacaaaacaccattcgcagccaccaacaatgcatgttctcaatcacagaacgcgccaagtgatgaccgctcaccacgaatcctttttgccagctgaatatccttgggcataatagtcacacgcttggcgtgaaaggcacacaagttaatggcctcaaagagcccaacaaggtttgcctaatgagactgttgcaatgcaag

SEQ ID NO: 8243 - DNA, 418 bp, Glycine max
  Clone ID: jC-gmfl02220091f09a1
gaaaaaatgatgcactgcaggtttccactgctccatcccacaagacatctgggtaaaaagaaaagaactacattttatctttttatcctaggggcagatattgaacatcctttagtatttgttgtaggagagctacaatcacattttcttcttcatttgcaagccaaacacaatatgaagcattgactgcaccttctctttttataagaagatacagaaaaagggggaaagaatattagggttggaagaaggtggaaaaattgaacaaaaaaagagatgctgctcatcatccagaaacaaaataaggttctgcctacccaggaattttgaaacagccacttctggatcttttttctaaaagctcctgctaaagattttgaagggcactttgtagtgtgagttaatgtagcctccaact

SEQ ID NO: 8244 - DNA, 331 bp, Glycine max
  Clone ID: jC-gmfl02220091f10a1
atgggggggggggggaaaaaaacccattaaagggcgggcccccaacccatttaaaaaagggggggaaaagggaaccggccaaaaaaaagccccacggtaaaaggggatttccacgggggcaaaattgggaggggcccataaaaaaaacaaatttatttggggggccccaaaccccaggggggactagaatttgggcagaaaaaaacccccctttgggggagaaaatttccccggggaaaattgccccaggggggggggtattggccttcaaaacaaaaaactaccgcgggatctttggggggaaaaaaaagagatttgggaaccccttggg

SEQ ID NO: 8245 - DNA, 464 bp, Glycine max
  Clone ID: jC-gmfl02220091f10d1
aagcttaaaatgaaagggcttaacattaatacttctcacattacataaacctgtttcaaatacagtcacaataaaacaaggactttcaccctaatactaagctgaaggaatcgattgcaaaataataacccttagaaaacactacggctttgtaaatcataaaccctaagctctctcgcccctaatcctacgagctagctgaatgtccttgggcataatggtaaccctcttagcatgaatagcgcagaggttggtatcctcaaagagcccaacgaggtaggcctcagcggcttcctgaagagcggagacagcgctgctctggaagcgtaaatcggtcttgaagtcttgagcgatttcccttacgagcctctggaaaggaagcttccttatgagaagctccgtgctcttctggtacttccgaatctccctcagagccactgtccccggcctgaaacggtggggct

SEQ ID NO: 8246 - DNA, 414 bp, Glycine max
  Clone ID: jC-gmfl02220091f11a1
aaataacaatatggagaaattaaacataaaatcctgaaaatcaaacatgatctatacatattcatgtatgtacacagctgggtcattagcctaatcaagaaatgcaattctgactcatacaaccagattcaattgacctacaggttctgctctacatgatatgataaacccaaaatgtcccaaggtctagcttggctaacaaaataatgtacatgtcaatgtcacagctctaatttatttattttcgccaggcgattgatctaaatatggtacaacaagctgatgcacttagacatgcttaatcattactgtcactgccactgctggtgtccagaaagctatactctctccatctgctgagtttaatcaacacagttccccggctctcttgcctacattcaatggcttctctat

SEQ ID NO: 8247 - DNA, 522 bp, Glycine max
  Clone ID: jC-gmfl02220091f11d1
gtaaaaagcaagtaacattaagttggattcggatacacaagataattcacattatctgaagtacttcaccaaacacaaatctaaaaactctcaaaagtcatttcgttctttgacgctcactttccggggacgaagttggtggcataggcccaggcgttgttgttgacagggtcagcaaggtgatcggcgaggttctccaatggaccctttccggtgacaatggcctgaacaaagaagccaaacatagagaacatggccaatcgtccgttcttgagttccttcaccttaagctcagcaaaagcctctgggtcatcagcaaggcccaatgggtcgaagctgccacctgggtagattgggtcagtgacctcaccgagggggccaccagcaatacggtaaccttcaacggcacccattaggataacttgtgtggcccagatggcgaggatgctctgggcgtggatcaggcttgggttgcccaagtagtcgagcccaccctcgctgaagatctgggacccggccttg

SEQ ID NO: 8248 - DNA, 579 bp, Glycine max
  Clone ID: jC-gmfl02220091f12d1
ccaaatgtaattgaaacacatcctattcatattgattttattttgttacaaaatacaattgaaactcactgaacttttagcagatggtttccacctttgcatttgatcacagtggcttcaccagtctggaagaacgtattgaacctgtaacattctaagggattgcgcttatactatccctcagagtgctgtttgcagccctttggtccataatgcttagtgccacgcctgacaatcgctttgcataagtagcagtaatggcgttggcatgcccagcaaaacaagtgattattatttccaatctttggattatattgacgacaactaggacacgccaagccatgttgaggaaagagctcagcctgtagttgtcctaccgcctggcgatgattaatgcgctcttcccaggaatcaaccatttctcgtgggaacaattcacatgaaccatccctgaaatgtccatatggatctgatgcatcaattgctttgttgcagcggtaacagaagtattgttcacagttaccacatttcattctgttacaaccttcagttcgagaaattgcatgtcacaagaagggc

SEQ ID NO: 8249 - DNA, 421 bp, Glycine max
  Clone ID: jC-gmfl02220091g01a1
cttctctctttcaccaatcaacacatactaagttcttccttctgttgaaagcgatagcaatggccacgaatccaatcgaagcggggaacggcgacgctgctcccaaccctaacgcgactaccaaatcctccgtgtacctgcaagactcggaggagctgaagcgagtcttcagccgcttcgacgccaacggcgacggcaagatctccgtctcggagttggacaacgtcctccgctccctcggatccggcgtcccgccggaggagctccagcgtgtcatggaagaccttgacaccgatcacgacggcttcattaacctctcggagtttcgccgcttttgccctccgacaccgcggacggcggcgacaccgagcttcacgatgccttcaacctggacgatcaagacaagaacgggcttatattc

SEQ ID NO: 8250 - DNA, 452 bp, Glycine max
  Clone ID: jC-gmfl02220091g01d1
ctcttcttcgtctcaaacctcttcgttccttcgattcattccatttcttccaaaatggccaaagacccagttcgcgttctcgtcactggagccgcagggcaaattggatatgctcttgtccctatgattgctaggggagtgatgctgggtcctgaccagcccgtgatcctccacatgcttgacattcctccagcagcagagtcgttgaatggggttaaaatggaattggtggatgctgcattccctcttcttaaaggtgttgttgctacaaccgatgtggttgaggcatgcactggggtcaatattgcagtgatggttggtggattccctagaaaagaaggtatggagaggaaggatgtgatgactaagaacgtctccatttacaagtcccaggcttctgcccttgaaaagcatgctgctgccaactgcaaggttcttgttgttgctaaccc

SEQ ID NO: 8251 - DNA, 438 bp, Glycine max
  Clone ID: jC-gmfl02220091g02d1
ctcgagccgaatcggctcgagcgcactcgttctcgtcgtggaataacgacatgaagtcaagcaatgtggtgatgtcgccgacaagtaaggtgaagcaggctctagggctgaagatgttgaagaggtcaccatcaaggagaatggtgtcgggtggcagcggtggaccgtcgtcgccggtcggcggaagtagtccttttcatcagtccgggtcaccgttgaggccacgacggccgatgacttctgcagagatcatgagacagcagatgagagtgactgagcacagcgataaccttctgaggaaaaccatcatgaggaccctcgttggccaagcaggaagaagagcagaaactatcattctccccttagaacttctaaggcatgtaaaaccttcagaattcagcgattccaatgagtaccacatgtggcaaaagaggcagc

SEQ ID NO: 8252 - DNA, 466 bp, Glycine max
  Clone ID: jC-gmfl02220091g03a1
caggttgaacaaagtagttagccttcatagctagattgcaatcaaatgtttacactaacaaggaaatgtaagagcacaaagaatctggctccagaaaattgtggtcacctaggatagtagtctctatgacttcgaaattctaactaacaactaccctctacacaaacttccatcatcatcatcatctaaatcaccattggatttgacaaagtgaggactaatgtagctgttcactttcccagcttagcttagagacaactctttcatgttgtgggaaatattcctccatctctttgacaagctcttttggtgttggggcagatacaattatatggcgagcagtggggctgatgaagccttcctccaccgctttgtcaataaaagacaaaaaggtattgtagtatccatcaacattcagcaatcccaccggtttatcatggatgccaagttgagcccatgttatcac

SEQ ID NO: 8253 - DNA, 422 bp, Glycine max
  Clone ID: jC-gmfl02220091g03d1
acgatacatatttaagcttatttttctaacctcaagcgttaatgcatcatttttctaaataaagttccctaataaactacttaagtatcaagaacgattaccctttggtaccattccgttccaacattgcccttgaaaaaaacaagctgcaaccgaatttgatcattactatgatttcacggcctagaaagctctatttttgatttaccgtcacactttaataatcagggatggcagaaaagcggtatcctttagcacccctccatgcataatatgcaattcgagtctcataaaaacctgtgagaaagctaaggaaccctagggctaaaaggccatatgcttgagacttttctccccccatatgaccagcgaagataaagtttgaaaggaacaaaagtcttgttccaaggaataacaggaac

SEQ ID NO: 8254 - DNA, 205 bp, Glycine max
  Clone ID: jC-gmfl02220091g04a1
actaattcttttttttttttactttttttacagccccccctttatcttttgtggggctattgggcatttttttttccaaaaaaaagcttcaaactcatatatttaagggggccactaaacccaatacaaacatgtccctgttaaaaaccccgaatctcccccccccaatacttttttataatcccccaaattaacccttacccct

SEQ ID NO: 8255 - DNA, 573 bp, Glycine max
  Clone ID: jC-gmfl02220091g05d1
atataacagctgtctggtctctgcattacatcaacgataatggcttacacgttccaaatcacaactcagatctctatacagcagctttcaaccctaaaccgcattatctatttaattatctataaggtccaaacaagaaatatgaacatggaaggttttatggaaaaagcactgttatgagtcttcaaaatgatgatccgtctcatcaaagatctcctcctgcaaaagctcttcaatgacatcttccatggtaataattccaacagcttcttcttcttcagggagctttggaagtggacttccatctatctctaaaatatccgagtacatattttttgaccattttctgctccgagaacccctatttgatgactcgtttgtatttggaaagcttttccacttgtggagtggcatcttgggtttcaaagctttctctttgggaggcttttcaccatcaatatccaccttaacatctctcaccgagtcatttgcattattttgggcagactgctgctagtcttgtcacaccgtctgacaacaacagccatgtgactatggcccttctgaaactca

SEQ ID NO: 8256 - DNA, 523 bp, Glycine max
  Clone ID: jC-gmfl02220091g06d1
atgtagcaattggtaagcatcaattgagtaatttcttatgcagtgtttgttacaaaaaccacataacaaggtgttttctgttgaaggatgcagcatctagactagttccccctggcaacaattcctaggctgacctgctccacttctggccttactgttatctgaaaccagtaaagcgattggtataacactcaattcctggattccagtaaacaacacaaaaacatgctactctacactaattcctcggcaagagtaactccacatactgcatccaaaatccaatgatttacaatctgagcccccgatggcgtggccttcaatagtatgatgtggccatcgagttttaaaggataaatattttcatcataatcacagcagtgcctccacatgagtaaaccaagaaccatgatctcctctaccatcaagtattatctaccaactcgcgtgataatatatcgtcctttttctagatcgtatattgtcttcaactgaggtttcctccacctagatatagaccatg

SEQ ID NO: 8257 - DNA, 523 bp, Glycine max
  Clone ID: jC-gmfl02220091g07a1
caagatcgcccctataccagtgatcaaggaaatttttcgaactgatggcgaacagttcctcaagtatccaccacctaaagtgatgcaggtggataagtctgcatggatgactgatgaagaatttgctagagaaacgattgctggtgtaaatccaaacgtcattaagattcttgaggagttcccaccacgtagcaagctagatacacaagcctacggtgatcatacctgtataataacaaaacaacatttggaacctaacttgggtgggctcactgttgagcaggctatccagagcaagaagctgttcatcttagatcaccatgactatctcattccatatttgaggaaaataaatgcaactaccacaaagacttatgctaccagaaccatatttttcttgaaaagtgatggaactttgacgccattggccattgagttaagtaagccgcatcctcaaggtgaagaatatggtcctgttagcgaagtctacgtgccttcgagcgaaggagttgaagcttatatt

SEQ ID NO: 8258 - DNA, 570 bp, Glycine max
  Clone ID: jC-gmfl02220091g07d1
ttgatttttttttttgatgaaacatgcgtgatagccttaattgcttactcttcgatctgttataaaaacagaatacagtaaacacgagaacattcaaccaccccaaatgtaacttgaccatacgtaggtagacgaaggaatcatatgcctcctatttcacagtattgaaaaacaggcagagtagtacagcaacctcaatgagagagcccttagatagagatactgctgggaattcctctgaaagtcaatcggttctcactagaaggatagagcacagtgtaaggcattgtagctggcccagtgcggtttctgaacggctcatccttgttcttctgtataagcttatgttcaatctcttgaagcttctttgcaaacctgttgaaggcctctagtggaccagcatcagaagtgcagaagtcaccaccatgtctctcgccaaggtagaactcatcagatgcgtgccttgacaggatttctataattgtaaggtcaatgagggtctccttcttgccagtaataggtttcaaaaactgcttctcagggttctttagccaagcagcatactcagca

SEQ ID NO: 8259 - DNA, 367 bp, Glycine max
  Clone ID: jC-gmfl02220091g08a1
aaaaaaaaaaaacacccccccggggggcttaaaaaaattatccccccccggctaaaaagaggggttaccggggggggaaaattctaccccccggatgataaagggccaaattctgggggcaggcatttatgcctcggggaccctttttatgggttcagggaccgcttttatgccttcccgacaaggggggggccttcacctttaaaaaccttgggccaaaaaaaaagggccccccccccaaaagaggggggggggtccctatgggggggtcaataagattaacaaaaaagctaagggggccttggcgggccttagaaaaaaaaaaacctgtttaaaacttgcttttggaaccccgggggtggcattt

SEQ ID NO: 8260 - DNA, 416 bp, Glycine max
  Clone ID: jC-gmfl02220091g08d1
tttattttttttttttttttatttttttatttatatttttatatatatatatatgtgggtggttttttctgttgctgtttaagacttaaagtaagtatatatataattaacagggacaatatattgtacatgcgaatcgaatgaaagctcgcagaaggggcgaagtacaggtagcgtagagtgaagtcctaaggaaaacacagggggacatgacacaccttatacggagaggagaacgaagaagaatataaggtctaacagcaccaccccaagtccagaaaggaccgcaccatggagctcctttgtacacaggtagaggtctgccttcaagggctgacggaacaagaggcccaacaattatagccacacttgaggcagaagagaagcaagaggtcaagaagcctcagaacgatcag

SEQ ID NO: 8261 - DNA, 414 bp, Glycine max
  Clone ID: jC-gmfl02220091g09a1
actaatacaaatacaaatacaacatattcctttgaactcatcatacatgatgtgcagaggacacaagttctagcaaaacaggtaaaacctgattccctcacttatagttacattagcagatgcattaaagtcataaggacaagcaaatcccaaatattagtattattcttgggtgaaccattcaccccaccctctccttttttcccaacaaaaaattaaacggaggttgggtgaaatttccttgcaaaaacatactagaaataactttatacatggcctcagtgaggtgaacaccatcccaattgatgtactgagaagggcttgagcacacagtggcattaggtgtgccacatgtggcaaacacagtgaagttgtaaggtggttctcccgatccacagcaaacgttgaaggtct

SEQ ID NO: 8262 - DNA, 485 bp, Glycine max
  Clone ID: jC-gmfl02220091g09d1
aagtaaaagcatggatttatatatatttttttccacgttgagtacaagagattaaattacctaaaagaaaatatcacacactgaaagaaaggaaagtgcttgaaaatactaaagggtatttaccaatggctcttgtcttgaaaagaacctttaatctacataataggatcaaagaacaggttgcaataaaagcacaagcaattgccattattgacaatatttttattattcttataatttgctcttcattttgaactcatcatgaagaagaaattaaattgactcaaatagcggggttgctcctgaatgatccaagagccttagcagcacctgctctcaagatgaattggtggtagaaggctgcaatggctgctccaataaatggtccaacccaaaagatccaatggtcatcccaggccttctgctggttgtacatgacagcagctcctagactcctagcagggttaatgccagtgcctgttact

SEQ ID NO: 8263 - DNA, 426 bp, Glycine max
  Clone ID: jC-gmfl02220091g10a1
aaaaaaatataattaatgacagattaacatatgttatttgatagagtacaattggccatcaagtcacatggttgaaagaatagccaaactttcctcctttattacaccttatttttctcaatcaaaccaaatgatttagaaaatccacattatgaaagtatgtatgtgtataaacattaaccaatctataaatgtttttagtcatgaacgcatggcgtgcgcttagcacctaggaagatcagctggaggcggaggcactgataaagaaggagtgggcccattctcaacctcgaaagccatggctagcccccacggcaaatgagtttccaaatggcaatgcacaagccaaacacctggattatttgcttggaatctaacaacggaccatcctccgacggggacagaaattgtgttacgtatctgagg

SEQ ID NO: 8264 - DNA, 371 bp, Glycine max
  Clone ID: jC-gmfl02220091g10d1
ggaaccaattaaaaacttaacaaaatttaaaaaaaaaaggggaccgttttaaaaaacagctttggtgccccccgggaaataaaagcatttttcaactggagcaatattgcaagggctgaaatagcctacacaaaaggggagccacacatataaggatgctttctcaaacacaactgggagcacattaccatccaaggccaacaaaatcttcccattctcacgtaaaacccctttatgggcacaattaaacgtccaaaaggggcatacatctgttggacaccaccctatataatatgaacctttgattggtgtctcagtaattctaaagtaatcatccctgcctgatgcagcaatgagcctccttccactct

SEQ ID NO: 8265 - DNA, 427 bp, Glycine max
  Clone ID: jC-gmfl02220091g11a1
gatgataataagcaaacatttctctattattataaaatggtttacaaacgagtttatctgaaatttctcaagatctaaaatacatagagcacagttttttttttccaaactaaagaaaaacagcaaacttttgaaatcactttcacgatgtgtagttgtacttgtacacaataataatttctaacaacataaataatgacgagtctttatgtgacaagagatatgccttgtagaattaatgcatcagctagaacttggttagcagcttgtgaaggatggacactgtcccaaaacacatactgtgtggcattagaacaagttcctggtgattttggattacacaacaaggatgttgtctctacagtcccggtaccacagcatcctctgtttgcctccacaaaaccagattttgaaggggattgaacaa

SEQ ID NO: 8266 - DNA, 455 bp, Glycine max
  Clone ID: jC-gmfl02220091g11d1
aaaatatgaatacacgggcaatgaaattttaaggacaacccttgctgtaatggaaatcgtttacataagatgatgatttattctagtttgcactttgccatgccagctatcattgttgaaacatgcgcgagaacacttaacagcaatttatacaaacagaatttcttcattaacacttaacagcaaacacgagaacattcaatcaccccaaatacataacttaaccatacataggtagatgaaggaatcatattccttctattcacttttattgaaaaccagggaaagtactgcaacaaccatagagcccctagatggagatactgctgggaattcctctgaaagtcaatccctcctcactagaaggatagagcaaagtgtaaggcattttagccggcccactgcggtttctcaacgtctcgtccttggtcttctgcataagcttttgctcaatc

SEQ ID NO: 8267 - DNA, 451 bp, Glycine max
  Clone ID: jC-gmfl02220091g12a1
ctttatctgaatgggatcaaataggcaccataactcacgttcccacaatctacttctaccgtcccacctcacaagacaaagacaacgttaacaccgttgcttccaccttgaaagacgcattaagcagagccctagtgccgttttatccactagctggtcgtttacattggataaacaagggtcgtttagagcttgattgcaacgccatgggggttcatttcattgaagctgaatcctcactaaccctagaaaatctcggtgacttttcaccctcttcagaatacaacaaccttgtccccaacgtagactacaccctcccaattcacgagctacccgtggttctcattcaactaactaacttcaagtgtggtggttttagcattagcttaaatacttcacatgctgttgcggatggaccaagtgcattgcacttcttgtgtgagtgggcaag

SEQ ID NO: 8268 - DNA, 387 bp, Glycine max
  Clone ID: jC-gmfl02220091g12d1
gaaacaaaggaaggatcatttttaaaaaatttttttttgacaatttacaacaatttgattctgatataatttttcaagaaaaggggggtgcaaatgagccagaattgcaacattgccttaagcaacgggaacccacctgttttttttggggccatttgcccatcaatttgggaacaaggggggcttaagccagaaatgtatggatctttcatgtaatatgcccatgcttctggtttaaaaatgaattgacggggttccaaaatttaatgccaaaaacttgctataaggggttcctgaaaaaaaccgcatcaacttggcatggcccaaaaatgcatgggaaaaacccaagtttaggcatgaatatcaaatgccctaatcccaggtttt

SEQ ID NO: 8269 - DNA, 377 bp, Glycine max
  Clone ID: jC-gmfl02220091h01a1
aaaccatgcagcgcacggcgttggcgacagatgaaccacggcggcgctccggcgacgcggagggggagaaggtgttcaaggggagcgaggtgttcggtgacacgtcaccaaattacttgaagaccattttggcccttggcgtgtggctcggaaccattcatttcaacgtcgcgttggtgctcttcgcaatcttcttcctctctctccacaaagcacttttgcttttcggtttgcttttcgtgctcatggtaattcctgttgatgaaaagagcaaattcggtcgaaaattatccagaaaaaaaaattgggtgtgtttcaagtacatatgcaagcacgtttgcgcttactttcccatcacgcttcatgtggaggacatg

SEQ ID NO: 8270 - DNA, 412 bp, Glycine max
  Clone ID: jC-gmfl02220091h01d1
ccctcctcctttctcttttggcggggaccgtgtttttcaaaaggatctcatttatttgccaagcattattaaacaataagagttttttttggcccctatttgcccctggtaagaaatttaaaaattggcaccccccaaggttcaaggttataaaccattatcctcgccaaaattctccatctcaaaagctatttttctctcaaatattctttactttaacccaaatagaaattttgccaaaaagattgctggctccctttccaggatcactttgttttacaatagaccttccaacccctatagctttaaccccaccttcctgaacataggcaatatcccccgggggaaaaaaaccaaattcccccaccataattatgcctctctcggggattattttgccctcgctcttcct

SEQ ID NO: 8271 - DNA, 446 bp, Glycine max
  Clone ID: jC-gmfl02220091h02d1
attttcctcccttgacaacatggtggtgcaagtgcaacacaatctcctcttagtcataactttcttgatgttgttgtggtcatggtggagccttttgggtgcactaggagaccctcaaacccatttaatcaacaaggggtgtagccaatacaacgcaaccgacttgtccaacttcaaccaaaacctaaacgcaactttggatgaccttagagcacaggttagcaaccaaagcaagcactttgccacggctcaagaagctagaggagcagaccctgtctatgccatgtttcagtgtaggaactacctctccaccgccgactgcgccgcctgcttcgtggttgccaccgcccaaatccgcaattgctcagccggagccaacggtgcccgggtcatctatgatggctgcttccttaggtatgagagcaatggcttctttgaccagacca

SEQ ID NO: 8272 - DNA, 405 bp, Glycine max
  Clone ID: jC-gmfl02220091h03a1
ggggggggaaaaaaagggattttttttaaaaaccccccccaatttccaaaaaaaaaaaattttttggaaaaaaaaaacccccaaaaaaggggggtttttaaattggggggaaaaaaagggtttttttttaaaaaccttcccaaaatcccccaaaaaaaaaaaccccaatcccccccccttttttttttcaacaacgggccccaaacaaaggaatttccccccaaaaaaaaaaaaattttttaaaaagggggggggaaaatccccccttttttttttttttaaaccccgggaaaaaatattttttatttttatcaaaaaacccgggttattaaaaggaaaaaagggttttttttaattccaaaaccctccaaaaaaacccccaaaaaaaagtcccttgggcccctt

SEQ ID NO: 8273 - DNA, 522 bp, Glycine max
  Clone ID: jC-gmfl02220091h04a1
agactaatacaaaatattggacccatacaatcacaaaatacgatgaaaaagcttgttatgattcctagttattacaacaagatggcaaccatcaatcttaatcgagcttcaattttgcaaaaaggttaaattattgaaattatatcaccaataaaagaaatagctcagaaacatacaccaacaaattgtctagttttaaataatcaaaggtgcaatccatctaactcaggagaaactgactgaagggggttaaaaagaaatgataaaaatctgaagaatattattttccttttctgccattgtatcaacacaagcttttgttcccatttacatgtcttgtgtatcttgattatcatcaccccctctgttggatcctccttgatcagttccaaacgtcctcttgctcatgttagttcgctgcactaatcgaaccagcgcttgaaccacttctgacataggtggtcggaattccggctccggctgaacgcatagagcaataacatccgcaaatcgagaaaggga

SEQ ID NO: 8274 - DNA, 299 bp, Glycine max
  Clone ID: jC-gmfl02220091h05a1
agtcaatgccactattgaaagaaattacaaggggtgattgatgtctgctaagttgtaaaaaatgggtataataggattggggtgatgagagccggccgatcttgtgagaaatcgactggtgctatgtatgtatatagcggtataatgaagcgaggtgtctgtgatcgcctgctggacagtggtgagaccattaccatgcaccgctgaatggataagcatatagaaccgagggtagaatgtaaaaatcgtctgctttcgttgagcacctgccacgattgaatctactactaccactatgc

SEQ ID NO: 8275 - DNA, 419 bp, Glycine max
  Clone ID: jC-gmfl02220091h05d1
ggggatcaaaaccccatattttggggcaaaaaggaaaccggaaacaacaaaagcccccaagggaaaactaaaatcaggtttaaaactgggcccacaggaaaaaggggccaaaagggggcccaacaacctatttccctaacattaggggcaaaaattaaccagagaaaaaccagggggcaaaataaaccctacctgaaaccccgccaaaaaagaaacctttgggccaaataaacctggccaaaaccccggggggccaagtaaattggctggttggaaaaaccgaaaccccaagcccttggggggtgggacccctgggaaccccatctccaggaaattttggaagtgcctggtccccaccccggggggcaaattgccccaaagggccaaaccgggaggggggaaacccttgacggccaaaa

SEQ ID NO: 8276 - DNA, 527 bp, Glycine max
  unsure (1)..(527): unsure at all n locations
  Clone ID: jC-gmfl02220091h06a1
aaaagcatttcacaaagagaagacacagtggatcgtggtttcacttcatttcagaccaaacatggtgcagtggcataggcacgtttttccctttcttcgccacattcacaagcgagtattggaaccccaggccactcattcagcttcaagccttgtaatttctcgcttagcctcttctctttcacaaggtcagttggggaggagaacatggacaacaacaactttgccctgtttttcaagacccgtttttctcactttccaacatcagggaatatcaagttctgctcagttgctggcaaattcatcagaggaaacacctgttntgtcacctttagccccagtttcattattgagtagttcaaaaggtgaagaccagaagcagaaagttgttactaagccagaaaaagttcaagcgatattaaaggcaataaaacagagtccaaagaaggtcaacttggttgctgctctggttcgtggtatgcttggtaaagatgcattgatgcaggtggaattgacaataaaacgag

SEQ ID NO: 8277 - DNA, 447 bp, Glycine max
  Clone ID: jC-gmfl02220091h06d1
gtccaaaagacaactatcctgattatgaatatcctaaacaatcaaattacaagataaataaaaaataaaaattatgaaacaagcaacatacattgggaaggcagtgtccacaaattccgacagaagggaatatcaacatcccacaacgcaatcgaccccatcccaaactaacacaacttattttccccccaaaagaaaaaatggctcaggaatcataacatctatggggtctactttgcgactaaccgaccaactcaaaatatgaggaactcaaacatactcaatcctttattatatttatgctgcatagaagaaatgtggatttgggggggagaaagcatagaaacaaataaattgctgatgacagtagacactggttgagaaggataccaaggtatacgaacttgcttgcttaatcatcaattgccagcatctcggctataaaac

SEQ ID NO: 8278 - DNA, 429 bp, Glycine max
  Clone ID: jC-gmfl02220091h07d1
ttgactttttttatttttttttttttttgttttctttttttttttgtttttttttttttttttttttttttttttttaccgggcacatagctcccaccctttgaacccacagcgactttatcaagtcctactgcagcaccagccagtacccagccctctgcatacagtccctctacgtctacgggtgcaccatgcagcaagacccccacgagctcgttcagacaggcctctaactctccctcaaccacaccgaggggaccaaaacactcgtcgcaaaatgcctcacatacagaggcctcataccgagagaatacgctgccttgaacgactgggctgaagaaatcagtgacagcgtcgaccggataaccggtcgctgaggaactcaacccgggaaagcgcagggtgaggacttcacgtggcacatcagca

SEQ ID NO: 8279 - DNA, 420 bp, Glycine max
  Clone ID: jC-gmfl02220091h08a1
tttttttttttttttttttttttttttgggttttttttttttttttttttttttttttttttttttttttttttttttttttttttttttttttttttttttttttttttaaaaacccggaaaagggggggggggaaaaaaaaagggttaaaaaaggggaagggggttccggggggtacaaaaggggggggggcgaaaaaacaaggggggggacccccctttgggggcaaaaaggggcaaaaaaaaaaaaaaagggggccccggcccctaaaaaagggggggaaaaatcccaaaaaaagggcccccccaaaagatttttgggggggaaaaagggccccaaaaaagggggccccttttttttttaaaaaaaagggaaaggggggaaaaaattcttttttaaaaaaaaaaaaatgcccccgg

SEQ ID NO: 8280 - DNA, 294 bp, Glycine max
  Clone ID: jC-gmfl02220091h08d1
tttattttttttttttttttttttttttttttttttttttttttttttttttttttttggtccgaacaaaaagcagctggatttaaaacaccttaaatactggcaacaatgggcccaaatcatgcacttacggaggccctattatattaaaggaggccggatacatagagtccacgatgacacctgcactattcaaaacgaaattttcatgcacacagagaccgatcttttcatggcaaaatcaaaagttgtgttcccataatgagccttgctgaaaaaatacttgaaataggc

SEQ ID NO: 8281 - DNA, 430 bp, Glycine max
  Clone ID: jC-gmfl02220091h09a1
aagagaaagacaacaaagttaccatattattatttcacatttttttctaattcttagaaacaaggttaccattttttatctaaatcgggcaccagcagaaagaccctacactacagtggaacatggtacagaaatccaaaagttgcatcgaaacaaccatgaaggaaaataatgaagctattcccagattccgacctccatgaagccattttcagtggcacagcccctaaacatgccattgcaattgaaaccataagccacttccccagcgttggacacagcaatgagaccagccatcccttcatcgagacggtgcttgatcacaaaatccacggcttcttgaagcttcaagcctttgtattccatcaccgctgccacctcacgcgccagcgtgccacgtatgatggcctcgccttcacccgtgcacgat

SEQ ID NO: 8282 - DNA, 416 bp, Glycine max
  Clone ID: jC-gmfl02220091h09d1
atcaaataggcaacacctccaaaaaagggcccccacaaaaattaataaataaaactgatttacaaaattccaaagatttttcctcaatttcctccaaattacaattacaacgggaggaccttaatgactgacacataacaattgtaagactttacgaacctaacaagacagttgctcattttccccctgccatgttttcttttattgatcaaaaggcaaaaccacaaaaaaaaaaaaaaaatcctgcccatttgaaattttacataacaccaaactcaaaaacagagtagcacagaccacttatatacacaatagtcctatttgaacttgattgagttttaatcctctaccatcttttctctgcttcctggattagctctcttttgtttatacatatttttagttcaaaatgggtt

SEQ ID NO: 8283 - DNA, 360 bp, Glycine max
  Clone ID: jC-gmfl02220091h10a1
accaaaggaaaaggaaggaaaccttcaaataaaaatttatgggaaattggaataaaaaaagaataggaaaggggtgtcccattatggcccccccccggaaacatgaaaaatgaacccgcgctaattaattaacccctcgtctaaatctcaagagggaacaattttggaccccccacgggggggccctgatgaagatcccaaaaaaaaaatcttttaactggagaaaggggggggcttaggcatatccttgacaattccccaaacaagctgggtctttgggagggtgtacccatccctaagggacctgttgggaaacaaaacactcacgtacaattggtggcccaggaaacgattctttgc

SEQ ID NO: 8284 - DNA, 397 bp, Glycine max
  Clone ID: jC-gmfl02220091h10d1
atcccatctcctgcaatccaaataatcgtcaactagtttgagtttaaatccccttacatttgaaaagaaagacaaaacaatgataacttctgagagttttctttgacaagaacagataaagatagcaacgtttgattttgggtgtgtgtgggtggtggggggagagcatttaaaaattatattaaagtgataccaaagctcaacaaaaatgatggcacaggaaacatgtacaaaaaaaaaagcattgtagttagatataaatacgtcaaccaaaagtgacaccccccacccaacttggcaatattaaccatttagcgtgttctcttgacttgccgccaattattcatttctttccttacagcttcctagcagctgggtttgagtatgacaatattag

SEQ ID NO: 8285 - DNA, 530 bp, Glycine max
  Clone ID: jC-gmfl02220091h11d1
gtaaaaagcaagtaacattaagttggattcggatacacaagataattcacattatctgaagtacttcaccaaacacaaatctaaaaactctcaaaagtcatttcgttctttgacgctcactttccggggacgaagttggtggcataggcccaggcgttgttgttgacagggtcagcaaggtgatcggcgaggttctccaatggaccctttccggtgacaatggcctgaacaaagaagccaaacatagagaacatggccaatcgtccgttcttgagttccttcaccttaagctcagcaaaagcctctgggtcatcagcaaggcccaatgggtcgaagctgccacctgggtagattgggtcagtgacctcaccgagggggccaccagcaatacggtaaccttcaacggcacccattaggataacttgtgtggcccagatggcgaggatgctctgggcgtggatcaggcttgggttgcccaagtagtcgagcccaccctcgctgaagatctgggacccggccttgaccacacg

SEQ ID NO: 8286 - DNA, 397 bp, Glycine max
  Clone ID: jC-gmfl02220091h12a1
gattcagcaagtgcgttttggaagcattagaccgaaatacttcgagatggcccgtacaaagcaaactgttcgtaagtcaactggaggaaaagctcccaagaagcatcttgcaaccaaggctgcacgtcagactgtaccaacaactggtggtgtgaagaagcctaattcctatcgccctggaactgttgctcttcgtgagattaggaaataccagaagagcactgcgcttctttttaagaagcttactttccatgaggttggaaacgtgaaattgcccaggattaaaggactgaactgcgtcaacagagccatgctgtgcttgcattgcaagaggctgttgaggcttacctcgtcgggctttttgaggacactaacttgggtgccattaacgacaagc

SEQ ID NO: 8287 - DNA, 450 bp, Glycine max
  Clone ID: jC-gmfl02220091h12d1
agcggaagatctgaaaccgttattgggactcgggaccacttgataacatacataatctgactcattacacgggacacatataggcagagtcgggtctgaaagcgaaaaatcagtcgctcactgatcatagactacaactgtgctataagctatggcgatgtataggacagggtacacgtggtgactagtgaagaggagaggaccactgtttgaggtgtcaggagcctgtactaggaacatgatcctacataccatggacctttgttcagaacgggatatctatgagggggcactcaatagtcgaccttgggccataatcagggcccagggagtgaaggctgtcatgagatcatagctcatggcagaccaatcctatgcgtgcacctgatttcctagtgcttgagatcgatcgcacttggataaccaggggcgtccaaatggagaagatgc

SEQ ID NO: 8288 - DNA, 93 bp, Glycine max
  Clone ID: jC-gmfl02220092a01a1
gtaaaatcatttcagtgtacagttttcaccatcaactttgcccatcgatttactctttctttatgataattgttcttgttatggtgagcaagc

SEQ ID NO: 8289 - DNA, 93 bp, Glycine max
  Clone ID: jC-gmfl02220092a01d1
gcttgctcaccataacaagaacaattatcataaagaaagagtaaatcgatgggcaaagttgatggtgaaaactgtacactgaaatgattttac

SEQ ID NO: 8290 - DNA, 450 bp, Glycine max
  unsure (1)..(450): unsure at all n locations
  Clone ID: jC-gmfl02220092a02d1
aaacagaaatgaaaaatgatgattagctcgattcaattttcactacggcagtggcagaagttcagtatggtgaattttgaatacgtacttttccatctgcttttcatcctttatacaagagaaatgtagtataatatgacgcagccataaagagcactcaatcattaatacagaagatagttacggagcctgtacacctggtgtctttcttgcctaaagttgcagttcagcttcttcaatcatcaaaaggtgaataacgtgatcatttaaacttcagagccagagggctctgtggacaacgatgagtctgtgccataattccaaaggctcttcaactcacctcttatacatcccaatatgactgtgacacctagtgtgcatggaacaaggtagagaagtgcaggttgtccatttncattcatcagatatagtcccatatatgtcaaaacg

SEQ ID NO: 8291 - DNA, 535 bp, Glycine max
  Clone ID: jC-gmfl02220092a03d1
aaaaataatatcgaaataaactatacaagtgaagagtaattttcaccttactgtacaaaatcataaaatcatttgaccattttttttacatgtacaacataataatctgtctaaagaagacttttttttttattttatatatattaactttctgtcaaaaaatcactgttctccatattacgaatctttgattatttctaaactgtgaaataaaaaattatatgaatggatttagctacaaactagatttaggcaaaatacgaactagtcctcgaacaactgctcccatggctgtgtagaaaatgtgtagaatttgccttgcccttgtctcccttttaacaactcctattgcaaaagaatgatctatagaaagttatttgttttgttatattcctaatcacggtcttgaaagctcccaagtgaacaacaaacatgtaaatatgtagatgagaaaattgatggacaaagcattagatttggactccataaccatttctgggactgggagataaccttgtaatccaatgttgaaaac

SEQ ID NO: 8292 - DNA, 212 bp, Glycine max
  Clone ID: jC-gmfl02220092a05d1
ggcaaattaaggagtttccattaaatagccaaaagcaaaattcccattgcttctcccatcatcagtctatggtatatgcatactgaagacagagatgaagtggttgatccaaaaaggcataaatcgtaaatatgaaaagcttattgaatgaatccaaataggttcctaagacattggaatggctttaggggcctgcatggaaatgagggaat

SEQ ID NO: 8293 - DNA, 436 bp, Glycine max
  Clone ID: jC-gmfl02220092a06d1
aaaactcaaaaacaaatgtaacggtaataatgaaaaatacaaataatttattcagctgttccttcatgattcacccatacatgaacgatgattactttgtttagctggcatagacttgcatgtaattactaattacacctcatcaattaattctgagaagcaataatggtgctatacattacattacaggacacatgtataatggacagaagcgtggaagacaagccccacacacgaaccatcatgtctcagcttcacgacaacgacactttcctcagctcactctccttcacaaacagcccatggaacccgtacggcacccgccgcggaagcctcaccgtcgtcacaacatctagctccggcgacttcgcgtccatcaccaaaaacctcgactcccccttcctctcatcgtgcacgtaactcaccaagtacccat

SEQ ID NO: 8294 - DNA, 496 bp, Glycine max
  Clone ID: jC-gmfl02220092a07d1
gaaatgaggatggttttttcatataaaaagcacacaacacttgcaagtgggatacttctacgtcttaaatggataaatacattcgtggtttcaaaaagtaaccagagctacaattataacagcttatttacaacacgcttaacaaatttacaaagaaaatcctccagaaagcgtaattagactgcttcggcaaagccaacttggagatttccatagtcaaagacggtgtgatatgccctcatgaaaacatcgccaagaatccacaatggaccctttggaggaggaacatcaaaagcaataaacccactaaggcagacttctgtaatgccttctccaggtcttagaatatactgctctggtgtgaggacaaaagggttatttccaattgtgaacgtaatgtttggcatcttggaaagactattacagcttatcactgactctccagatggacttggcagggtctcacacaggtgattcacatagttgaatactctgt

SEQ ID NO: 8295 - DNA, 569 bp, Glycine max
  Clone ID: jC-gmfl02220092a08d1
tagcggggatttgcgctggtacatcgttgcagtgccgcctgcttgggggggggggggggatgaaacacgaagaagttagaaagtatggggtaggcaaaatagggtataaatagtgtgtaggggggggagagagtgtgtgggtggggataggagaaagttgaggagatgggggtggggtggggggtgggtgtgtgacaccgaccaagcgaccagaatagagcaaagcggcagtaaataggggttaggagacagtcatactcaacaataaacgatggtagaaattgggaacagcgggcacctgggcgtactgcaacgtaacgaataggtatagtgagcaataaactaaatataacccgagagagaacctgacctttaagactgggggctatgcaagagcgagccgaatttagctttacgatcggttatatttgtgggaggggcatatatgtcgctaggagaagtggagctgaaggagatagaggagtagctataaagctaactggagaggagagagtgaaggcctaggcaccgactcataagttgggtgccaggtgttggtagtgttgcgg

SEQ ID NO: 8296 - DNA, 562 bp, Glycine max
  Clone ID: jC-gmfl02220092a09d1
gattgacttgcgatttgccgtgctacatgtgtaggagtaccgcctgcttggggggggggggggggaaggggaaactaagagaggctggcagggtaggattggggaagaggtaagactaactaaagaaaggtggataaaccaaaaatgaagtactgaggttaatctgaagaaaagtaaaaggaaacaaagtgtaaaaagactggttgagacttaaaagggataatggctggtgttatgaaaggtaatacaaaaagaatttgacaaaaatagggtattagagagagggtaaattgagggcaccaagttgtgccgccagagctatagccacgacggctgcgatagtggcacctatgttatgttagtaaaatcacgtgaccgaaggagacgcatcggggtgcggcaatgtgaataactgattagaccggtccgtactaagatttataaagacacttgtgcgcgttccctgaaaccagagcttactaagtgtcttaaagacagtgagtgtggcattggcggtagaattacaagcgcacgtaaaaagagcgataaacgtgctacctgt

SEQ ID NO: 8297 - DNA, 330 bp, Glycine max
  Clone ID: jC-gmfl02220092a10d1
ggcgggggtttgcgtgctacatgtgtggagtggtgcttgtttgggggggggggggggctgtgaaatgccgaaaaggttacagtaagaaccaggctcctcaagttctaaacaggtaataggtaggacccaaaataccacgccccaaaaagaaccccccaccccggcaccaacaagtaaggctggattcacttggttgggcttgttgggagtgtgtttttttggtgtgggtgggtgttgttgttgggtggttagtgtgtgtggtgttgtgtgtgtttgggggtgtgggttggtgtgtattttctgacaggtgatgggtggaggttaggtatg

SEQ ID NO: 8298 - DNA, 483 bp, Glycine max
  Clone ID: jC-gmfl02220092a11a1
gcagctgaatatttgagcgaactcactttaaacagtggcaaagagtttagggccaaggtcgaggagagagatacatctggagggaaagcgaaagggcagggtactgggacagtgcttgcggtaactctagtagctgtggattcggagatcagtgttaatgctgccatgctacaggaaggacttgctaggctagaaaaaaggaataggtgggacggaaaagaaagacaacaggcccttgacaatttggttccgttccagggcgaagctcgaaccagtaggcgtggaatgtggcagtatggagatatccagtctgatgacgaggacactgctcctcctgctagaaaggctggtggtagaaaatgagtgtattttaagaggggagataagttataaaatagacattttcaaagaaaatgagcaagttataggcatgaacattttaattcaaggtagaggaaaaaaatgccatatgtaatccttagt

SEQ ID NO: 8299 - DNA, 487 bp, Glycine max
  Clone ID: jC-gmfl02220092a11d1
cggttgaccgggccgtggcgtgctacatgtgtaggagtgccgcctgcttggggggggggggggggggcaaatattgcttagagctattggggaggagaaaagaacgggaaaaaaggcgtgtacttgattaataaaagcgaagttggacgaacggggcggggcggggaaaggggcggccgacctgcacataaaatagaatggatgaaccaggatagagcctagggggggttgtgattggcaaggaaaagcggtagcttgagaatggctgtaggggtgggcaaaagcgtgaggggagaatggagtgttttgtggaaaagatatgtaggggtgattattacttgggtgactaccaccactacgcgttgtcgtagtacatgccagagtgttagatgcctataggttatcttgatgccggtcactggtctttgccaatccaattaaaggcgtaacccttgcggcgtgggtggggttctttattgaggtgggg

SEQ ID NO: 8300 - DNA, 579 bp, Glycine max
  unsure (1)..(579): unsure at all n locations
  Clone ID: jC-gmfl02220092a12a1
atacactcggcacctctatcaaagccgctgatgtttatcttgcatcggcattagtgaagcttatttgtctagctacttttctcaaggtatcagagagcgatagctttgatccgtatcaggagtttttgaaggcgttaataggttttatagatgttgctgggctttattttgccttgacccagttgactcacaggaacatctctcagaatcataaatttcaagcagttggacttggctgggcatttgctgactctgtgctgcatcggttggctccactttgggttggtgccagaggattagaatttacttgggattacattcttcagggccttgaggctaatgcaaatttggtgttgagcatatcccttgctgcacttggatctttgatgtggcttcgaaaaaataaacccaagaccctcatccctattatatatttgagtgcacggattgtagcaaccatgccatctatcacaagctatctgaggcgtggattgaggtggcactttcccaaagtggtctggtctgagctcttcacatccctggtgatggctnttattagctggcaactgttttctgatg

SEQ ID NO: 8301 - DNA, 507 bp, Glycine max
  Clone ID: jC-gmfl02220092a12d1
ttgcggggatttgccgtggtacatcgttggagtgccgcctgcttgggggggggggggggggggggggattctaacaaactcgcggaaaggaaggaaagtaaatgccgaacaaaaacaaatgaaaaggcagaaaaatagggagccaagggaaacaaatactaggctactgcttaaaaaactacagcatttgccagtaaaatgtgacttacaaaagacggaactaccaggtcagtacgagcgaagcactgggtgtatatgcaaccgtgtgcatagatacaaaatacggcttactggagaaaacttagtattacccagcgcaacactgtaaaattcattatgggcccaaacgcttattttaagttatcttgtacagactggcgcagacagcctagccggctgataagtttgctatgtaaagagagaagacccagcacccgtggcccgggaggggggtcaacttatagcaaacagttaacgctactagcccagagctgtaatattaaaggg

SEQ ID NO: 8302 - DNA, 541 bp, Glycine max
  Clone ID: jC-gmfl02220092b01a1
aaatataataataatatatatatatatatatatatatatatatatatatatgtttttttttccttctcttcctgcttaggactttaagtaattatatatataattatatttttatatatattatatatactctaaagttggaagctttttattcttatgtatgatggttgtgttgtgtgagttctcaagggaagcaaagtcctatctttcacacctttcagtctcaaccgtgggaagaagaatctagggtttaacagcaccaccccaagtccatcaaggtctgtgctttggtgcttctttttttttttgttttgttttgttttttctttctcactgggaaattgggtcgattttttttttttgtcggaaggaggatatgctgcaacttgtgaggtaccctcagtttgttctgattccaaggttgttccttgttgccaaaaaacattgctttttttcttcatgagttggaattctgagactttaacctgaaattctgtttctgtggctcccttgctggtgaaaaaatgggattttttttcat

SEQ ID NO: 8303 - DNA, 282 bp, Glycine max
  Clone ID: jC-gmfl02220092b01d1
gaatgaacacatacgagttcacaaaaaaaagggggaaatttataaaaaaatacagaaaaaataaaacagaattgagtaagagggaaggaaacatagagaaaattttagcaatcagataataagaagccagtagtagtgcaaaagtcccttgccaagagtgttggaaccccttttagttaagcaggtaccttctcccccttgagtggcttcaccacttcccatgtgaagtcagggtcatctctgccaaagtgtccatatgcagcagtcttcaagaacctgcca

SEQ ID NO: 8304 - DNA, 506 bp, Glycine max
  Clone ID: jC-gmfl02220092b02d1
agttcaaaaacaattgctctattatttaacctagaattaacaaacgtacagcttccacattattactagtaaacataattaagatgatcgaaatacaaagtgacagtgaaaacactcttattacttgcaaaccgatcgagagcatccaaatacagacatacagccaataataaccatagacaagtattggctattttattcaaaagcacaatagataagcaaaccacacacacattttagatggagatactgttgggaattcctttgaaactcatcccttcctcacttgaacgatggagcaatgtgtatggaagctgaactggcccatgtcggcttttcagacttggatcattgttcctctgtgtgatttttccctcaatttctgccagtttgtttccaaactttttgaaagcttccaatgcctttgaatccgtagtccaatttggattatccctttggccaggtagacctcatcagaagcatgccttgacaatatctctatcact

SEQ ID NO: 8305 - DNA, 463 bp, Glycine max
  Clone ID: jC-gmfl02220092b03d1
gttcatgctcttggatgtttaacgaaatgtgacaaattaagggagtaataaacgaaggaaaggagatgtacagtgtacagatgtgaaatgtagcccaaaattccaaaattcttgcatgggtaaactaagactttacaaacttaagctgtgacctgaacagactttgtgcggggggaaaaagaatatactaaaacgtgtataagctatacactaagcttgaaattttaatatgcaacgtgtctaatctactcaagttggccttattttttttggaagctgggtccccatattcgaatgggataatcatcacttgcagatgccaacatttgtgggattttggggttccaacttacacaggttacagtcatgaagtgcccagattgaacctttacaggcctggagttccggcagtttcaaatgtatacctgtgaattcttactaccactggcgataaacgtgttat

SEQ ID NO: 8306 - DNA, 541 bp, Glycine max
  Clone ID: jC-gmfl02220092b04d1
ttttggccattcatgaatgaagctatagacttcaatattaacgttatcaaacacgatataccctacattagaactgttctaatgtcaaactaccattgaaaatgctgtccaaagtagccccttgagaaaaggtgcgaaggccagaaaacttgacataaaatctcagggatcaggtggaaatgaaaatggtgaatcacttatattaacaggactagtgtgggttatctatatcacactttcaacggttgcatattcagattgtaaactatgcttatgtccgcctccttactcgcctgccattcggattaactgattcagcagctgccccatctgctaaatcttgaccatatatgctactgccacttctctttctgcttaatgtctggcctgagttatcatccactgatgcaaatgtctccagcaattccaacagcattgaggggcagctctctttcaaatgcacaaaagcttccgactgcattacagctcccaagtttgcaggatttgcaataaattttaaacagattgccttaagctgtgg

SEQ ID NO: 8307 - DNA, 527 bp, Glycine max
  Clone ID: jC-gmfl02220092b05d1
acagacaaaagcattaatgtgttattttcctcatactcaagattcagcaacatataaagggtttttgggcctaggcctccttagtaacaaaaaacaaaccacaaagggtcaaaggataacaaaatgcagccactaaggcaggcattgggaaagattgcacaaaatctctcttgatatcattttaatcagtaggaaaatctgttacggctagtcctgagggacctacgttcttgctgatggaagcacattttttcctgccccagaagcaacattgatctcaatactgtcaaaaatgtctgatcctgattttgtaccgtccttaattggcaattcatggccctcactgtttccttctttggttttgttcaatttgtctttgctttttccccataccacggtgtaaagtccactcacaatgataatagctccaatcacacttcccaaataaacttgctcagccaaaacaatggatcccaatgcagcagtgataatcatacatagagggctgaaagaagtcacaaacacag

SEQ ID NO: 8308 - DNA, 539 bp, Glycine max
  Clone ID: jC-gmfl02220092b06d1
agtaaaatagacgatgtaaatgaacatgtttaaaaattaatgtcagatgtagcttttacaacatcaagactcaagtaaaccaaaaacataacaaatttgaatactatgacacattacccagttgattatgttctaagatacgcaaccaatacaatagccacgataaggtgtaaaaattgcacgggaagacctcacaccattcaactcttgaaagaaattcaatcatcgacactcatgaggaaaatgattgtagcgctctatcaaaactttcttcagctgatgatacccgtttgaccaatacatgctctgggtgagaaagtttcagctggctgaatgatttgttagatggtttgccgagatgaagacagcatacaactagattggctagagtttctggatccctggcatccttgttaagagcttcaaccaaaagggtctcagcttcgtcgaagttgcccatgtgcatgcagcaaacagccttgccattcaagagcaagctggtggactgatacctctgcgacaaatcctggaagatcaga

SEQ ID NO: 8309 - DNA, 327 bp, Glycine max
  Clone ID: jC-gmfl02220092b07d1
cgggatcttgcagacagagtagaattaggtcgacagcgccctggtagtcggccgtcgtcgttcctatcttttttttttttgtctttttatgaaaacataattacatggttaacagaccagggagtacttcaaaatacaaatggctaattaaccaactaaaagtaccaactcaatttagaaagtcctaagaaactaactgataatgggattgctttcgttcaacccctgcacaaacttcaaactttaactaagaggtagactcatagtattagagggaaaagtatttatatccgggattaaaacagccctaaattgggcacatgggaa

SEQ ID NO: 8310 - DNA, 563 bp, Glycine max
  Clone ID: jC-gmfl02220092b08d1
tgccgggaatttgccgtctacatgtgtagcacgtgcaccttcttggggggggggggggggatcgaaggaaaacgcctaggagccaagaagaagagtgaccacaaaacataaatgaatagagcgagaaaatgactaaagctaaccaacggataaaatatgatatttcctgaaaaggctaggaaggtacgtacttgaaaaataacgataaatggtgcaagaataacaaaggaaagcattgaaaaaagctattgatacacgttagatagaggtgccgctagtgggttggggtttacttaagcgatcagataaagatagtggtgtgattggtgctttagtggttacatgataagtggtggctgtcggggtaggcaacagtgttataggtaattggcctagtggtggcctgactaatggctacctgttcatacgtatggtataccatcatagttaaacccagtctaggcgggtagatggtttgatcgttcgtacaacgcttagcgtcttaaaaacctacgtgtggagtgtaactggttgaactggtggctagctaggtaatatagata

SEQ ID NO: 8311 - DNA, 515 bp, Glycine max
  Clone ID: jC-gmfl02220092b09d1
tgcgggggatttgcctgctacacgtgtagcagtaccacctgcttgggggggggggggggcgtgtaaaacgagaaagaaaacgaagaagaggtgagggttataagggaggcagagtaagagctgaaaataggcatgagcgacaaaataacaagggatatcggcatttaacgtggggcgggatattgctcgtggctagctccaccgtgcgcccgtttatagccttcctaacaccgatggttggttcggtttcctcttcgatcaaggcgactgtctttttcgtcgtggcgttattacaatttcatttccagaattgccagagcttttctgtttcaaaagttttcgctaccttcaaatacttggtaatcctcttcgcccagcatttgcagacaattttgtcggcaatcccggtcgtatccggtttcttaaaactcgcctgatcgggagaattagcttcgtaactttcatcgtcttcggacctctaaggaatcctccgcttgcgcccttcgaactccctg

SEQ ID NO: 8312 - DNA, 545 bp, Glycine max
  Clone ID: jC-gmfl02220092b10d1
catgccgggaatttgcctgctacacgtgtagcagtaccacctgcttgggggggggggggggggggggcaagaaaatgttgaataagggcgaggaagcaaaagatgggataagggtactatagagatatgcttagcaagagaaggggctatctgagaaggagtgggtcttataaataagccacgacgctgtaataaactataaattaataagaagaatacggggacggctaggaagggatataacaaacgaaaggaatcgaagacctaatatagcgcgcgtatcggtagcaccagtaggggagaagcagagctaataggcaaggaaagaggtgtagctaagccagtaggtgccaccaaccttggcacccaaatcgtgcagagtacgctaagaaggcgaaagtagcgaaggtggggctatttaatccagtgggcttgcttttcgcctcgttacgcaggccttacgccaacaacaacgggcccaaggcaacgggtgcgagcaactgcgcaagccccttggctgttaagttcggggtataactttattt

SEQ ID NO: 8313 - DNA, 390 bp, Glycine max
  Clone ID: jC-gmfl02220092b11a1
gacgttcttgagtgtccaataatcattggagtttggaatggatgatcaagaatggctacatttaagttttaaaaaaattcctcttgccgtgtgcaccctctattcctatcatattatgcccttttaatatttctcaatatcaattatgatattgatatcataattaatgtctacgtatagatctttaacgttcttcacttccggaaaggcagaaatatcaaagttgtagaccctttcattagtgaaaacggttcaaaataatgaaagtctcttctctgtttttaacataaaaaaaaaaaaaaaaaaaaaaaaaaaaaaaaaaaaaaaaaaaaaaaaaaaaaaaaaaaaaaaaaaaaaaaaaaaaaaaaaaaaaaaaaaaggggcggcccc

SEQ ID NO: 8314 - DNA, 469 bp, Glycine max
  Clone ID: jC-gmfl02220092b11d1
tgacgggcaatttgccgctctacatcgtgtagcagtaccgccttgcttggggggggggggggggggggggggggggggggggggggggggggggggggggggggggggggggggggggggggggggggggggggggggggacccgaaaaattcacaaaaaattgggggggggggaaatttcgggattagagcaaaccccttttaattgggagggggttttttggttccaacccaaaaattggaaaaagtggggttcccattgggaggggccggttaaaggttgaaagccggggccaaaaagggaaaacccctaaagggcagaccaaaaaccccccttttttccaaaaccaagggggggaaaattgaaaacccttttgggggccatagtttggttaaatttttaccggggggccttttttaaaaaacccttggactttaaggttccctgggttggttttccttggccaaa

SEQ ID NO: 8315 - DNA, 625 bp, Glycine max
  unsure (1)..(625): unsure at all n locations
  Clone ID: jC-gmfl02220092b12a1
gggcattgctgagcttgtgaaccacccagagatccagcaaaagttaagggatgagattgacagagttcttggagcagggcaccaagtgactgagccagacatccaaaagctcccatacctccaagcagtggtcaaggaaactcttcgtcttagaatggcaatccctctccttgtaccacacatgaacctccacgacgcaaagcttgggggctatgatatcccagctgagagcaagatcttggtgaatgcatggtggctggccaacaaccctgcacactggaagaagccagaggagttccggcctgagaggttcttcgaggaggagtcgcttgttgaagccaatggcaatgactttaggtaccttccctttggtgttggcagaagaagctgccctggaatcattcttgcattgccaattcttggcatcactttgggacgtttggtccaaaactttgagctcttgccttcccctggccagtcacagattgacactagtgagaaaggaggggcaattagcttgcacatactcaagcattccaccattgtgggcaaagccaggtcattttagacttcaccacatgatcatgatcatatgatcaatccccctaatnnnttctttttcttt

SEQ ID NO: 8316 - DNA, 504 bp, Glycine max
  Clone ID: jC-gmfl02220092b12d1
gtcgtttcgggggatttgccgttctcgtgctgcatgtgtgcagtgccgcctgcttgggggggggggggggggcctgtgctgataataagaaacggtgatgagaagcaaatacaccagggacacataaaacgcgaccgagaggacaaaattagtgtaaaattcgctagcatggtaacggtacacaggtataagatttaggactaccttaaagagagagcatagggggccaataattttaggggtaactaggcagataagatacacgaaacaaaacccaaaacaaaaaacaaaaaaggaaccccaggcagtagagcagtagcagtagcgccgccacgtgaaaagcattggcctgggcttataagccgccaagctggcacgagcgctaactgaaaggctttgttgggtgtatgacgcgtaagtgcgcatgccttagccccacctaacactgtaaacggggccattaagatcgttaacgcagcttagcaaggctaagctaacaagcag

SEQ ID NO: 8317 - DNA, 568 bp, Glycine max
  unsure (1)..(568): unsure at all n locations
  Clone ID: jC-gmfl02220092c01a1
acagtttccatctctctcacaaaatgacaacaatatcaaattgctcccttctcttcctcttcctcttcctctccaccctccacatagcttccaccctctcaacccccaccaacttcatcaagtcctcctgcagcaccacccagtacccagccctctgcatccagtccctctccgtctacgcctccaccatccagcaagacccccacgagctcgtccagacagccctctccctctccctcaaccacaccgaggccaccaaaaccttcgtcgcaaaatgcaacaaattcagaggcctcaaaccgagagaatacgctgccttgaaggactgcgctgaagaaatcagtgacagcgtcgaccggctcagccggtcgctgaaggaactcaaattgtgtaaggcgaagggtgaggacttcacgtggcacatcagcaacgttgagacgtgggtgagttcggctctgaccgatgagagcacttgcggcgatgggttcgccggaaggcgctgaatgggaagataaggaggcgattagggctagaatggcaatgtngctccgttactagcaatgctctc

SEQ ID NO: 8318 - DNA, 507 bp, Glycine max
  Clone ID: jC-gmfl02220092c01d1
catacaaaaacagaactcatatttcacatttgatcagaagcaacacaagatccatatctctataaaaactcacaattacatacaccacacaaaacacaaaattaaccattaaccaaccacatagaactgtttgttctttttttttttcccctcaaaggaaaaaacgaaaacaaaaaacaaaaactttcttcccaactccccctagtgttgtgcagcatactgattaataagcgagagagcattgctagtaacctgagcaacattgaccattctagccctaatcgcctccttaatcttcccattcagcgccttcccggcgaacccatcgccgcaagtgctctcatcggtcaaagccgaactcacccacgtctcaacgttgctgatgtgccacgtgaagtcctcacccttcaccttacacaatttgagttccttcagcgaccggctgagccggtcgacgctgtcactgatttcttcagcgcagtccttcaaggcagcgtattctctcgg

SEQ ID NO: 8319 - DNA, 534 bp, Glycine max
  unsure (1)..(534): unsure at all n locations
  Clone ID: jC-gmfl02220092c02d1
agagagaattatttttatttctaaagttatagtggtgaataaattaagaacacatttcaactatagacaattcaagtgcgctatttattactggaacatatgtctgcctggaatagattaagattctatagctagcaataagaaaaaaaagtaagcataaactgcgcccccttgacaaatttgtattagcagatgtcaacaaaaaggacaaatgcaacctggattcggtcatccactgtataaccttcaatttagtaccctcattattcatgctacattacactttcattttccccaaaattcaaaagaaaaatacagatcaaacaagatcatcaacaaataaaccaataataagcctcccaaagttccaaaaagactaggaaaccaagttaacaaattaagccttaaaatatatctcttttaagaccctaatgaagatgaagatgttaatgtgaagagaggaaggaagcccttagacacacgcacacacacacatatatataaactctgatgagatgatgatatngattcaca

SEQ ID NO: 8320 - DNA, 586 bp, Glycine max
  unsure (1)..(586): unsure at all n locations
  Clone ID: jC-gmfl02220092c03d1
gattgaaaaactgccaatggcatttcccattgcaaatatacgactgtacaacatatgaacatgatattaacttgaaaacttcgaccccctgtaccactcaattctattttaaaataggtcctaacctaaaaatgtaatacattgtattttgtcccctccccactgaagcttctcaaccaaatccaaaaccctcacttgcttcgtgaattgccagcagtaacctctcttctaaatggtgtttagatggatactccggcaaatctaattgattgaagcaagtatgagcagaaggcaagtgatcaggacttccatatgctttgtgtatctgaaacttctgggagcctgaaattccttgaagagcgctaaagccttccaaaggcaccttggatgtgcctgtcacaaattgcaacagtcgagctttgacttctttgctcaaaccttgaacaacctnccaaaaccattggataactggcgatgcagcactatatccagaatattccggatttgctctcaagtcatccaagtcaatatcaggaagtccactgatcaacattccagctctttgcattgatatcgatatcactcc

SEQ ID NO: 8321 - DNA, 413 bp, Glycine max
  Clone ID: jC-gmfl02220092c04d1
gcaaaatattacattgcatatactctcaatcgaagatatattgtaatctttaccaattgaaattttatgacaccaacccatctatcccattttgaaaaattccaaatatgatatacaacctcaaataaccatagactttcaaatctctaagctatctaagaaactaaaatggttctatgcaaggtataaacctatactagagtaaaattccttctttctttacactaagattttatcactacttccaagaaacaagcacatggattagaagaaaatatgagagacccatattaccaatgtcaccaactatgacctatgccctgttgaatggcttatttaggccacaaagtctggtagcaattgtgcagctaacctcttggggctctgcatggtgatactctcaaatgctgctg

SEQ ID NO: 8322 - DNA, 368 bp, Glycine max
  Clone ID: jC-gmfl02220092c05d1
ggatctgaagagtgttgagcaggtgatactgtcacattgtttgcatcaagcagagaggcagttcctgcaaagatactttgcaaacctgtactggaagtagggagactggaagtaatattctttatgacagaggaaggaggcagagatcctttgactgaacctagcttaattgtatctgaggcaggtgatgcagaaatatgggtgctattgtcaggtgcaggagttggagaaccaatccatggtccttgaaggggggtttgggacatccaaagtgtgttatgtccaagaaaattcctcacaggagtagtttgatcagggtgtcatggagtaattgcttgtggattatccatgacagaaccttttgcaat

SEQ ID NO: 8323 - DNA, 521 bp, Glycine max
  Clone ID: jC-gmfl02220092c06d1
aaaataaaaagataacataaattaaaaggtatactaactttcatcacccccgtataacaataaataccttattcgtgtgttttgacacaactattagttatgctattctatttcctgggttaaaacatggtagaaaataaattacaaagaccaacttgccaattacaaacagcaggtgatatactcagtggtagaaaatgtacttgaccacagagaaggcaatggagatgtcctgggacagctgaatgtcacacacaacatgttcattcccatttccatgattacaaaattgttgtaggagaaaatctctcattctcgaagaacttgaaaaaagttcattattttctgattcaagaattatttttcagaaactcatggttcctattctcacatttacgtcatgaatctcactgagaggtgcacaactatgatttaagattattttcagaaaaacaagaagtaaaatatagtaataaaaactttagcttagataattattggagattattttagacaattga

SEQ ID NO: 8324 - DNA, 511 bp, Glycine max
  Clone ID: jC-gmfl02220092c07d1
agaaaataggaaagaacgaaaagttcacacaaaaatagtagacagtggaatgcagcaataaattatacatatccagaccttgatacaatcattaaaaatatccactaaactattgttgtgcctttaaagatcttgtcttgacacaattttgagtcaagcgaacaggttctaacaactaggtggatctgccaagcaaacaccagggtcaggagaaaaactgaaagagcccttttcaagacccaacgaccttcttttcactttactctgcagcagtttcgtcactgtcatctccttcatttctgatatcaggcagtgtatcaagatcggttcgagcctcggccacatcctcgtggatatgagtatcagaagaatcgattgcatcttgttcagctgaatccatagtttcgttggcagagaaagagtctgatgtttcatcagtttcacctgtttgtgtgtcacctttgaacatctcatcttctgtggcatcaacatttggattttcatttgtttc

SEQ ID NO: 8325 - DNA, 298 bp, Glycine max
  Clone ID: jC-gmfl02220092c08d1
tcgctcgccgagaggatgttgtccgctctctagcatcgtgtagtgggtagcaaccttgctttgtggcggtgggggaggggtgggcacttgaggtgatggcagattgcgactcaggtagcagaagggataaacgcccggggataaccccggtaactaatgggctactgactgattgtccctgtagcttggtaagggagagatgggaagctagtaggcagggtcgccagggagctagctgagggggatagcgagccagtcgccccactgatgaggggatagaggagagagctgtagcccc

SEQ ID NO: 8326 - DNA, 435 bp, Glycine max
  Clone ID: jC-gmfl02220092c09d1
ctgccgggagatttgccgttctgcactgttggacgtcccctgctttgggggggggggggggaagacagaacaaataaagatatcaggaaggtgggggaggttaaacgtgagtacaaagtatgattaggaattaagtagtgtataatcgatgaacataccagaaactggaaggaactccaacgaaagccaaaggaatataaaagaagaggatctagttaccccggcatgagaaactaaactaacgggttgggtgtacaaacgggacgaaatagcgcggggcgccactgcaatggaggacaccgccaaagaacgagcccgaccgaacaaaagcaggaccgcatatcaatattggccgattcgcacaagggttttaagcactgttttgggcttacaattcatcgattgcttggtaagcgccttagtgggcagcaaaac

SEQ ID NO: 8327 - DNA, 552 bp, Glycine max
  Clone ID: jC-gmfl02220092c10d1
tgccggggatttgccgctgctacacgtgtagcagtgccgcctgcttgggggggggggggggggaatgtgagtacaagagggggaggggccacgctggatagtgggagggaagaagtggtcggccaacacgataagtaggaaggaggggaggggagggggggtactacgacggatcatggggccaggggatagagactatggccttataatatatacaccaggtggtggagctgcgcgaatgttgcctaatatggtacgagtaagcgtggttgggggtaggttggcgcctaaggtttacgtaaaccaagaaacaacaggactaacgagaacagttaagctactaaagcttagaggtagattaccctataagtgatcattactattcaagccaagaaatgtaaaagtggcgttagaaacagtgagcgtctaagggaaaaattgtgtaccgagaaatgtggtgccagtgggttaacttggaccagtgtgagcaaggctttagctaggtatagagaagaagcgtggcctgccaagggtcgacttagtgaatagcta

SEQ ID NO: 8328 - DNA, 528 bp, Glycine max
  Clone ID: jC-gmfl02220092c11a1
ccaaagcgaaaccctaaccctaacggagagatggcggagcacttggcatcgatattcgggacggagaaggacagggtgaactgtccgttctacttcaagatcggcgcgtgcaggcacggcgaccggtgctcccggcttcacacgaagcccacaattagcccaacgttggttctgtcgaacatgtaccagaggcccgacatgaacatgaacatcatcaccaaccccgatcagccccagccccaatctctcgaccccgataaggtccaggatcacttcgacgacttctacgaagatctctttgaggagcttagcaagtacggccccattcagagcttgaatatttgcgacaacctcgccgatcatatggttggaaatgtgtacgttcagtttagggaggaagaccatgcagccaacgccctcatgaatctgactgggaagttttattcaggtcgacccatcattggtgatttctctcctgttacggattttcgagaagctacttgtaggcagtatgagggaaatgtatgc

SEQ ID NO: 8329 - DNA, 537 bp, Glycine max
  Clone ID: jC-gmfl02220092c11d1
catgccaggaatttgccgctctacatcgttgcagtaccgccttcttgggggggggggggggggggggggggggggggggggggggggggggggggggggggagtaaagccagtctggtagttgtctaataaccgaaatgtcttctgggggttagggggtggttgtttggccacaataggataaggcaactacaaaaggaaaataggcagctgagccagcggataacccgtgagtatgaaaggcataaggttaaaggcaagaaaaataagcccaatgcaagttagggaatgtaccctaaatcataaacctataaattacaggatggcttatgtggcagactaaaggggcccttaaattgtaatccgccgcccctgagagtgcagcaggattacaggtatgcttaggggcgctaatatgtgccgtggcagaagtagtaggccgggggccaggccgttgccgatgaagggttttggccgttggtgtttgcggttaggctgtaaggggactgtgttgggtgctatgaggggtgtgcagtcc

SEQ ID NO: 8330 - DNA, 535 bp, Glycine max
  unsure (1)..(535): unsure at all n locations
  Clone ID: jC-gmfl02220092c12a1
gagttctggaccaacagcaatgacgaatgtggagctcgttgcgacgaacagatgaattttgtgaagaattttaagggtcatgctcagattcttgagaggggtggttacaccttgttcactccacactacataacatggttttgtccaccacccttcattcttagcagtcagtgcaagtctcaatgtataaaccgtgggagatattgtgctccggatccggagaaggattttggagaaggatatgaagggaaggatgtggtgtatgaaaatttgaggcagttgtgtgttcatagagttgccaatgagagcaaccgttcatgggtctggtgggattatgtgacagatttccatgtcagatgttctatgaaggagaaaagatacagcaaggattgtgctgaggaagtcatgaaatcattagatctgcctatggataaaattaagaaatgcatgggtgatcctgaagcagatgtggagaatgaaagtgctaagaatgagcaacangtccagatcggtagaggatctcgccgtgatgtca

SEQ ID NO: 8331 - DNA, 534 bp, Glycine max
  Clone ID: jC-gmfl02220092c12d1
ttgagcttggccgagtagagttgtcccatgtgtagcattagcacctgcttgtctttggggggggggggggggcttaaaggggccgagtaagcgtcgtagagctgcgatgttaatagtatatccagttggaggtgtaagtgaaccgcgatagcgatagtgtaaggtgtaaaaatgtgagggataaatgcgccaaaagacaaggaggttggcgacaaaagggtgcggagcgaggctaagcggtatagaaggagttgatacgaaaagatgcagtggttggtctgcgtaaagccaggtaaagttagagacttacggtgagggagaagttggtgtgtaacgccaggagctacgctaatcccggttgggcatgagggggactgtaggagcgagcgtggatatcctcttggcggcgtcgaaacctgcactggtactagcaatgataggaggggctgccgttacgcctagcgaggcgcatagcagacttagcagtgtacacgttagcgaacattccacttgagagggcgacaatatcgaatt

SEQ ID NO: 8332 - DNA, 515 bp, Glycine max
  unsure (1)..(515): unsure at all n locations
  Clone ID: jC-gmfl02220092d01a1
ctagtttcttaatttatcactccgctccttccctccacctatttcctcccttgttcgctttccacccatcaaacaaaaacagagtccccaccccctcctcttaatttcattcatcacaacacactagctagtgtgtgtttgtgtatcattctcataaacacacatatagtaaatccatcacaccctactttgagttcccaccttggttttggatttaagctatggtgtaaggttactttgcgtgataaaaatttctgggtgtttacctcctagattaacttgatttcctaatcaacgaagacgtactgatataacaagaacatgtgcgaatcanaatcagagcagatgcatgatacggaaaagcagacagaattaggtgggttattaacangacgaggttcgactaggacaataatgtgggatgtgataggagaagcgaaatccctgtgggaggtggcattcccgacagcactcactggtctaattttctacgcgcgttccatggtctccatgct

SEQ ID NO: 8333 - DNA, 481 bp, Glycine max
  unsure (1)..(481): unsure at all n locations
  Clone ID: jC-gmfl02220092d01d1
cacaaattccctttaataataagtaagaattattacaaaagaaaaagaatattacaccgtcaatcaacaatcatcataatttttttttttatttcatcaagagtagttgttgttgtccaaagtggcaatcaacggttgtttgtggccgtcggatccttcatcaagggccgtaagtaactgggcccgacaggcctggtactcccaatcggtggtcccaatcatatacaacatgaggcccgcacaacaaacctgggccgacaataggcccagccagagcccacagaacccaacctcgagccagaacgcaagcccaactgccacgggcatccccaccagataaaacgctcccaggttcacattcgccgncacgttcggcctcgccgtccccctcaccaccccgcaccccaccgtctgcgggcagtttcccagctcgcacagccccagaatcggtaagcgccgccccgtcagccgcagaatcccc

SEQ ID NO: 8334 - DNA, 551 bp, Glycine max
  Clone ID: jC-gmfl02220092d02d1
gaaccactaaattatagctaattagctaattatccattaaacactgtcagagcaatccgaatggaaaaaaagagaaaaaacatagccaactccgttccgcatgatataaaagcttaatcaacctcctccattttgctgccctcagcatcagcttcagcctcctcctccagtgggggcatatcagcatcagcttcagctgcatcctcgtcgatgctcagtccaagcttcaacattctgaggatcctgtttccaaaagtgttgggttcctcaaggctgacaccagaagtgagaacagcagtctcgaacagcaactgaacaaggtccttcacggatttgtcgctcttgtcagcatccgcacgctttctgagctcctccataattgggctctcagggttgacctccattgtcttcttgcttgacatgtatcctgccatgctgttgacccttagggcttgagctttcatgatcctttccatgtttgcagtccaaccgtattctccagtcaccagacagcttggtgaatcaacaacacggtcccagactacaacctt

SEQ ID NO: 8335 - DNA, 532 bp, Glycine max
  Clone ID: jC-gmfl02220092d03d1
ttgctgagcttgtgaaccacccagagatccagcaaatgttaagggatgagattgacagaggtctgggtgacagtgaccaatgggttcaacatcctactacgaaagacaaagttaacatacaaataaatcgagagcccgtcatatattatagtatgaagaataaaataactgcatctaacgcacatacaacaacaacacagtttcagactctttgtaaatcagctgaaagggcgtcccggatctcagcctaagggctaaacgaatggcaatcgagctgaagctttctgtgtaagctctccagtaccaagctcaaccacaagccataactgcatgaatgcaacggtattgacttttggatccatatcttcggtgctgccggaaaatgcctacctggtatcatactgggcatgtccctgccaggctagattttgcgaaccaaagtggcattagatttgcttgtgtcaatccatcgcgtgatcactcaagcctttatgaagaatcatcttccattgtccacacaaaaccaggcatg

SEQ ID NO: 8336 - DNA, 431 bp, Glycine max
  Clone ID: jC-gmfl02220092d04d1
accaagcaatttcgaataaatgttcacaacttcacataaagctccaaaagtaccggaacaaggcaagttccacgaaaagaactaccatacacagagcacgaggaaaaaaaaaacaacacagacaaagtaacataacagtgcaaacttctaatcaataatcttctccttcatcaccatcttcttcagttgcctctgcaccgacttcctcataatctttctccagggcagcaagatcttcacgagcctcagagaactctccctcttccataccctcaccaacataccaatgaacaaaagccctcttggcatacatgaggtcaaatctgtggtctatgcgagagaagacctcaacaacactggtgggatcggagatcatgcacacaggcctctgaacccttgcatgatcaccgccaggaacaacaagttgaggc

SEQ ID NO: 8337 - DNA, 343 bp, Glycine max
  Clone ID: jC-gmfl02220092d05d1
gggggaaaacccctttgggggggaaaaaaaattggccctgaccaccccaacaggggcttggaatgaaagacccccccattatttttaaggtccagaacgacccccccgataaaaaaaaatagaaaaaaacccccgtataccccccggaaaaccccccatttaaacggaaaagaccccttaccaaagccccccccctaaacccatgggcccacaagggggcccccaaaacggaaaaaatttcccccccccttttccaactttggccccccctgtttaattttccccacccttcccaacgtttctgtactgggaacgttggccccaaaaaaaggggccacccttt

SEQ ID NO: 8338 - DNA, 544 bp, Glycine max
  Clone ID: jC-gmfl02220092d06d1
ggaaaataaatggcaatttcatttcattatcatgtccagtaaaaccattccaacaaaccaaatgcaactgtaatgacttttacaacatctttaattcaagtgcgtaggtgactcaccagcactcaaacatatactaaagtggacatatgtgatacaactatataaaccactgctcccgaacttactattttaactaagagtttaacattgtttccctctaatagtaactgagtccatttactttaaattattatgcagtttttaatcccccctctccctttcctctcttcgaactatacatgatttccttacacggtgccgacacccatttatcatgggacaagaatatcacctgttgcagttataacattacatggggattcaacgaaaagtaccttgctcttcacaaaaaccagtgctatgatttagggaatctgaatatatccatgagaccaagcctcttcccatattctataactaaccaagccacaaaagataagtatgccaaaagataacaagcgcgcctgatgagaacagcattgac

SEQ ID NO: 8339 - DNA, 543 bp, Glycine max
  Clone ID: jC-gmfl02220092d07d1
gcagcaaaattcttattattttcaatacttaactgatggcaaattggcaatgcttttgattttgcaaatactagcaaccatctaagccggacatttttaactgctcagcccacagtaagaaaattctgtatgatggataagataagccaacggctacaccatgacaaacattactactgtcaaactaaataaacgacactaaccgaaatcaaatatcattctcaataatcaataatgtgtgagatcaaatcaaatggcttcacttatcgaggaggggaagggggaggcggtggcaggtttgattttgcaaatcccacccatgcaacaatgccgactgccagaattatccatccaaatatgtcatacttcagatcactgctcttctttttcttctgagtctgaaaaataatcaaacaaaataggtaatgaatgagcacacaagtacgaagatcagagtctatctatctccaatgtgatttttgtagcacaaggagtgcttacccaaaatgcagatatcataaataactagcagtccaagagcca

SEQ ID NO: 8340 - DNA, 160 bp, Glycine max
  Clone ID: jC-gmfl02220092d08d1
agtggccggagaatttgccctgctacacgtgtgcactagcaccttcttgtcgttggggggggggaaatcggacatagtaatagaaagttggcataaacggctggcttacatgaccgggctgataatagctaagaggaccaaccagctatcaacgatttcc

SEQ ID NO: 8341 - DNA, 583 bp, Glycine max
  Clone ID: jC-gmfl02220092d09d1
catgcggggggtttgcgtggtacatgtgtagtagtaccgcctgcttgggggggggggggggcagtggcactgaggaattaagtggcggataacgttagctgtgaaaaaggtagaggcgactaaggattgggcgcaacaagtacaccggaaaagcacgcacccctagcttattgggcggcctaagttggcgaggagacctagaacgatgaagaaaaccagcgagtacgcggtaattattgggttgtaaaggccagccttgaatggtgctaccctgaaagcagttgtgtttaatattgtcaccctgggcagggttgtgcacagcctggagttcaccctgcgagatgggagtgcgcacttggccatggcggaatgtggcccagaccgggccacgccagggtagtattgggccatgctaaatatcgtgaattgtattttcctggtcacgaaggaggttagtgaaaattgtgttagtagtgctaaaccaactgcgttgctgtaacgttttggtacgtatgaacggcaagccgaaactgacgatggtggtagaggtgctaatagtgaaagtggcaagcgcgctgttggg

SEQ ID NO: 8342 - DNA, 534 bp, Glycine max
  Clone ID: jC-gmfl02220092d10d1
ttgccaggcgatttgccgctgctacatcgttggagtgccgcctgcttggggggggggggggggggggggggggggggggggggggggcaaacgaaagttgttagggaggtaaagctaaaacggctaaatggctgataggcctaacgcaaagggtgggtgaggcagagtttataatgggaattccagacaaacgaaaagttgttagggaggtaaagctaaaacggctaaatggctgataggcctaacccaaagggtgggtgaggcagagtgagacggggggccacctggcctggcccaaccccagcggtgagcaggacgggtacggatgtttctacgttcgtgggaattaaggtggtgaacttgggtggtacgtgggtgctcctactgtgctacgtaggtgttcgtaacttgttaaagcaaaggtgaacaggctgcccataattatagctggggttgcccaggatgctaattttagctggcggactgacttactcaataatagtaaaagtagtcgcactcgtgaacgtgcccact

SEQ ID NO: 8343 - DNA, 421 bp, Glycine max
  unsure (1)..(421): unsure at all n locations
  Clone ID: jC-gmfl02220092d11a1
ccgcctctggtctcttctcttctcgcaagcggagccccaatttctccttcacgaaccctaattcactcttcccattcgaaatctcgatcaccttttcgattcaacctttctctcctcgctaatctcttcgttcgcctcgcacatcaaggtgaggggattgaaattgaatcctcagaaggccgcttccggcgggaggggtcggatggctggcaaccattggggtcaccggaagggcagggtctaaacccctgggtatatggcaaagtgccatcggctatgatccttatgcacccaatagggaagacaggaaggattcttctcaaaatctgccaaatgcagagcctgatgctgagaatgcatatgctagcttccaggggcttctacagcttgctaagatcacaaatgctganggggatgtatc

SEQ ID NO: 8344 - DNA, 569 bp, Glycine max
  Clone ID: jC-gmfl02220092d11d1
tgccagcaatttgccgctgtacatgtgtagcagtaccgcctgcttggggggggggggggggggggggggggctaaaataattacttagcaatggaagtgtaaatcacacgaaaacgtaagagacgtacacgagggcaatagttaaatgtgcaaagtaactaaactaaccgataagggaaataactagaggagaccgcgagcagatagcaaaagggacaaatagtaccacctagaaaaggcatgatcctatgaagtaggtagtagttttagccgcatcctgttggtgtgggttgcagggaggcatagtttgatttggttggcaagtaggagagttatggcaagtacgcgtacagcagcagcacctttgtggcggtgggtctggcgcttggtgaagcaaagtggtacaccaagtaccagtgcagacatcctggtgttggtgttgtggtgttggttgatgtgggtgagcttgctctggagatgtcgtcgtggtagtgcaacaaggcgtttgtggttgttgcccggtttcttggtgtggttggtgctggtgggtggtattgcaagtagttcaa

SEQ ID NO: 8345 - DNA, 503 bp, Glycine max
  Clone ID: jC-gmfl02220092d12a1
aaacaagataaaaaaatcatgttagatatgacttctagatagttattatatattctaattagtaatttgtgattggatcacgacataaaaattctttaactgtcaatgcaaacattatttactctttttgtaattagaatagaaaactttcaaatgaacccctgaacaaagggatgtaacatcctgaaattaattgaatgtgaaaagttggagatgagcttattatcgtttaagtggcttatatgctgctgctagtatggtgacggactaagcacaatcatgtaactagttactaactattggacccatctaactaacccaatatgtggtagtaataatgaggctatgaatttgaaattgttattgaattgattgtatatggtgtggacttgcaagttgcatcacaaccaaggagcttggaactgttatgcgttcattggggcaaaacccaactgaggcagagcttccagacatgatccatgaagtggatgctgatgggaatg

SEQ ID NO: 8346 - DNA, 477 bp, Glycine max
  Clone ID: jC-gmfl02220092d12d1
tgaccttgccggaggatttgccgtgctacatgtgtaggagtgccgcctgcttgggggggggggggggggggtatgaaaacattaaccaagaaggacggtgatgtaggtatagttagagtggaccacaagttagagtatataagcctggggtaacgaaatgaacagctagcgtaaagagtagtataagaggtagtagtgggaaaaaaagcaccacgcctacaaacgcaacacataggaataggataatttgggggggccagaaaaggataacataaatgaacaaccggtacggttatgatacttgacgactaccatggcttatgaaggcataggggaaccggccaggtaaaaattagtaaagaaaaagcgaccaacaacaaaccgtaaccatgatgatagtatgcggagattatttaaatttggccttggttgttgattttgggggggcgtcgggttggggaagtaatagggtggtag

SEQ ID NO: 8347 - DNA, 587 bp, Glycine max
  unsure (1)..(587): unsure at all n locations
  Clone ID: jC-gmfl02220092e01a1
ttagaattttgtattttttttataatttatttaattattttctccctacaaaatcttgatctctctgctgttgtggagtggtgttgtgttaatctcattcacacattcacagttatactctctctctctttgtcgcttggatcactgatctcatctcaattttcagatatgtcgacatctgataagccagaagtggtggaaaggggtagcaaggatgaaaaacacaaggaagatgatcaagaggaggggaagggtggattcattgagaaggtgaaggatttcattcatgacattggtgagaagattgaggaagctattgggtttgggaagccaactgctgacgttactgcgattcacattccatcgattaatcttcacaaggcagatcttgttgttgatgtgctcatcaagaacccgaatccggtgccaatccctctgattgacatagattacttggttgacagtgatgaaaggaagctagtttctggattgataccagatgcgggtaccatcngtgcacatggagagcagactgtcaaaattcctgtcactttgatntatgatgaccatcaagcaacatatgctga

SEQ ID NO: 8348 - DNA, 454 bp, Glycine max
  Clone ID: jC-gmfl02220092e01d1
caatagaactgtttgatttataccagcaggctaatagaaaccacacacatgacacaaccctcaaaagaagccatagtcaattctcaattccggaatgacaaagcaaaaccccaccttttagataaaataaataaaaccggccacacacaaagttccaaggcaaatgatcttttatctcgcattaaaacagcactagattggcatgatcatcaattaagtccaacaagaaagtttcaagagaaaacacaagccggactgcagcagcatatattcactaaaatactgatactagcacataatttgaatggctatttgaactctcaagatccataaaaattgcccatcagaactcagaaagtaatgcctgcttttattaatagctagtaatagcctgctacaattcttcaatcctcatcatcgtcatcgtcatcataatcacgatcttccttctttt

SEQ ID NO: 8349 - DNA, 553 bp, Glycine max
  Clone ID: jC-gmfl02220092e02d1
aaaagaaaacaaaaatacatgttaaacaaaccatcaagtactccaaattacaaatagctaattaaccaacaaaaagtacaaacacaaattagtatgccagaagatctaactgaaaatggaatgcttaggtcctactctagcacaatctccaaaatttaactaagaaatagattttttgtattgtaagtttcgtattattgcccgagtaattcagtcatacaacatgaccacatgggaacaattaaggcaacgccaagggatgaggtgaaagcagttcaggtggcacaagagtaaagaacataagaaaaaatcttacacaacagcatgggagtttttgaaggcaacaaattagctccaagggcccttctttcctgatgattcatcttgatcacctatacactgcagagattatgcaatggttgtgtgctcgaacttattatcaacaattttggctttgttggcaaacctaatttatgctcgcaaacagccagcttgtgatagactcgtcaacatctcaaatggtatacagagtccatgcagcaacactggttta

SEQ ID NO: 8350 - DNA, 420 bp, Glycine max
  Clone ID: jC-gmfl02220092e04d1
aactggagaaaattggtaaatagaattttcttttctaatactactatcatgaaacaatttcattgtattaataatgacatatatcataattattttagtttcgttcaatatcaccgaagcctaggacaaatatgcggattcctttggcatttaggttacaaagcgagtatcccttgattagttcaattcttggtttggatcagtccacttcgttaaatgcaattttgctctttcagcctctttgtcccagtcgcatcgaattgtaatgaggctcaatattaatgtctgagttgctgtgccaccaaaaatcatccctgcccagattcccataactccttgattgaagacccaacccatcaaaattccaagaggcaccccaataatatagtagcaacccaaatttatgtatgcaacatatga

SEQ ID NO: 8351 - DNA, 477 bp, Glycine max
  Clone ID: jC-gmfl02220092e05d1
agggtacatagaaagcaccatattttattagaataatggccatgtacatgtacatgtacctgtttaaaaataattatgattacataaaaatcagtattatatatatcaaaacatttttcagggattaaatgatggggttgaatcagtttcaggaggataaaatatctgatacattttcctatcgatgaagttcctgtatggatcctcctccctcttcttgatcaagtaatttaaattgtgttcaacttctgacttaatctgcaggtacatttggttggcactttctctgtcttttagcatcttatccatgccttttgttcttatgggcttcccaaatagaaagtaaaagcgacctggtatctttggtagaagcaccggaaaagagagattttggcttgccaccttgccacttggttcatctctaaacttaactgagtcacggttcatatttcctatttgatcgttgactatggggat

SEQ ID NO: 8352 - DNA, 530 bp, Glycine max
  Clone ID: jC-gmfl02220092e06d1
ataattaccaacacatgtcatccctcatatttcttatataagcaacacacgttaacatcactgttttgttgtgagcaaggtttcagctcccaacaaaaaaacacaaggactaatccgtgaaaataagatctatttaggggcttcactgagtttttgcatgattcctattcacagttttgcacacactttctttggtacacaaaccatcttaaaggccttcaacttctctacttccaatccaaccttcaagctgtagcagaccacccttgcattgatcaccatttcaccatgatttggcaacagcaccaactgacacttgttcaccacttcctctggcaaagaccctgatccacaacgggtaaagaagcaccccacagaagggtgctccaaaatgaactcctgattaggaacacatccaccacacacaacccctcttccttcaactctctccttaaaccctagtggaaaagctgattccacacactcaaaatccttagggggtttaagtgcttgccaaaatggcatacctg

SEQ ID NO: 8353 - DNA, 564 bp, Glycine max
  Clone ID: jC-gmfl02220092e08d1
tgccgggaatttgccgctctacacgtgtagcagtagcgcctgcttgggggggggggggggcaaaaactgagtattgagtcgagagagcgagtgagagtgagagaaagcgtagagggcataggcaaagggaaaccatacagacaaagagaaccgtaacaaccacggaaaaaaaaacaaaaacaaaccaggaaagagaaccgtaacaaccacgaaaaacaaaaaacaaaaacaaaccggggaaatccagcggcagagagcgcatagtacatgatgctactgtggttcgggaacggacacactgcaaacttatggccgggtaaagtggcagtattagttgtagtagggggatgtggctaacactacgactaactagataagagaactgcaagaactttacacaggctgttcagattaggctgcagtaccatagaaaccgtaaagcccgccagcacactagagcggcgttaatatctattaggaaccaacggacttacacacacttacaagcctagcgagggtatatgtgtgacggggagagattggcttagaaggcgaacaacccac

SEQ ID NO: 8354 - DNA, 573 bp, Glycine max
  unsure (1)..(573): unsure at all n locations
  Clone ID: jC-gmfl02220092e09d1
tgccggggatttgccgtctacatgtgtagcagtaccgcctgcttgggggggggggggggtgggtgtcatcccaaatggccctggttagcgacgtgtttccgaccatgtcctaaggggagtagtgggactgagtaacagcggcgtaaataagagattagtggctaggcgttaaagtgtaagattaagactactaagacctgtaaaagtaccggggggaagggtaaacgacgtacccgggccaagcgttgcacctggttaaaggtttggagaactaccaggggtaaggacgcccctagcttaggggttgggcgaactgccaggttgtggtaggccttgtggttatgtattataattccccctgctggtataggggcccggtgtaagtgggcccctggtttaggtattagttgttgtagtcgtttaagtggtgccggggcggcttgtgccagtagtgagtgttgtaacggtaggcgtttagttggtaacgggtgtactggtggtagtaataagggttaacccgctaggtgtagtttacgtagtgcctgggatgctatgncacgtgccaaggggtgt

SEQ ID NO: 8355 - DNA, 297 bp, Glycine max
  unsure (1)..(297): unsure at all n locations
  Clone ID: jC-gmfl02220092e11a1
tttttatcaactcattaataatgataattacaaaatatcactaataataagtcaatctgtgtcgaattcgcataaatgtactataatattcgtaatattgtagtagggtgatacaagcanagttnaagtataattccagggaggtcgtaatctgaatggtgagcccttttttttttttttttatcaggctatttactttattattaacgtcatcaaacacgatataccctacattagaactgttctaatgtcaaactaccattgaaaatgctgaccaaagtagccccttgagaaaag

SEQ ID NO: 8356 - DNA, 519 bp, Glycine max
  Clone ID: jC-gmfl02220092e11d1
tgccgggaagttgcgtggtacatcgttgcagtgccgcctgcttgggggggggggggggacgaacgcaggcgtagaaaagggggggagtagcgatggtcataaaactgcaggaggtattggttggagggtttggcgatcgcgggagtacggctcgtgcgatagtagcacaaatgccgaaagcggttggcgaggttagccgcaaggtattgggctttgcgcgtaggcactcaacactgcgacacgagttaaatagaggcggaacacccatagcactacgaagaatacaagtagtgttggttgcagtagggttaataagtatattggggtgtggcggcagcgtattactaatactgtttgcaaaggtgcggccgatgggtactgtaataactagaataccggtgaagagaattccgtgccaactgctagaatatgcgtgaaaactagacagacaacttaatggaaatctaacggtatgccaagtaatactagccctactattagtgcgtaacatagatgtca

SEQ ID NO: 8357 - DNA, 274 bp, Glycine max
  Clone ID: jC-gmfl02220092e12d1
ttgaccttgaccgaaccaagtttgaccgtggtaacacgtgtaggagtgccgcctgcttgggggggggggggggggggggggggggggggccaataaccctctagaagggaggaaacttatcaaacacaaaataatagacgcaacgtgtggatagcatggcggcatatatactgcaaataatagaaacgcaactgacgcttttgagggcaatctagtggaggatagagacagacagaccactaactgacaggcggcaaaacgcaaacaatgatgc

SEQ ID NO: 8358 - DNA, 513 bp, Glycine max
  Clone ID: jC-gmfl02220092f01a1
ctttcattttccctcactttctcgctccccaaacgcccctctctctcctccaatggccgaccagctcaccgacgaccagatcgccgagttcaaggaggccttcagcctcttcgacaaggacggcgatggttgcattactaccaaggaacttgggactgttatgaggtcacttggtcaaaacccaactgaggcagaactgcaggatatgataaacgaggttgatgctgatggcaacggaaccatcgatttcccagagttcctcaacctgatggctcgcaagatgaaagacaccgactcagaggaggagcttaaggaggctttccgtgtgtttgacaaggatcagaatggtttcatctctgcagctgagctccgccatgtcatgacaaatcttggggagaagctgacggacgaggaggtggatgagatgatccgtgaggccgatgttgacggtgatggacagatcaactatgaggagtttgtcaaagtcatgatggccaagtgaggaccattcca

SEQ ID NO: 8359 - DNA, 463 bp, Glycine max
  Clone ID: jC-gmfl02220092f01d1
agggtcataataataataataataaccaaaagaagatgaaaacggagagtaacaaagcatggggagacacagctaccgaagcttctaaaaacaagggacagagccaacaagttggataactagggagcagagaagtagtagcaattaaagcaaacaagaaaaatagacactcaactaacaaaacctaataaccccaaatcaagatggacctaatgggaatagaattctcatcaaaacttatctgccctgtccctcttctctttatatgcttttcaaatttaggttatggttggaatgggcctcacttggccatcatgactttgacaaactcctcataggtgatctgtccatcaccgtgaacattgggctcacggatcattttatccaccttcttgtccgtgagcttcttcccaagatttgtcatgacatggcggagctcagctgcagagatgaaaccattctg

SEQ ID NO: 8360 - DNA, 512 bp, Glycine max
  Clone ID: jC-gmfl02220092f02d1
aggactaatccaaaattcaatatgcggcccatgggctcaaatatcctcctcctaaaaggattagatgttgaaatacaagtaattccaatgaaaaacagactcttctccagtgatagttcctttgtatcttagaaggagcattattcaaaattgaagctacacttctataggcaaaacatgggaacctactaacaaggacagtagacaaaaagcaatggtgtctaatttaggcatgagtaagccaatgccttctcctcagaaagctcttctgcagtcaagtccaacttcttccttgagaactcatcaatggaaagtccttgaactattgcccattccccattggcacaagtgacggggaatgaatatataagtccagctggaacattgtaggaaccatcagaatatactcccattgatacccaagtgccctgaggagttccaagaacccagtctctaatatggtcacaagcagcactagcagctgatagtgcacttgaaagctttctagcttt

SEQ ID NO: 8361 - DNA, 368 bp, Glycine max
  Clone ID: jC-gmfl02220092f03d1
ggtatcccatttcaaaaatttggtggccaattgatggggcccaactggggctgctgatatgcgccaacctgtgccccaggagcagctgcagccaccccaacttcgacgttgttgccaatggctgggggccctaaatggggaggactacccatggctgctggctgtggaggagtgtgggccatgccggggaactgcatgtgaaaagactgagctgcagctgcattaaaggaagcatgacctgtgtgtgatggcatgtaagctgcatgaggggtttgccctggcatgttatagtatggagtagattgcatgccaagaaggtcccttggattctgtgaccagatttctgatgtctcaacctgaggatttgg

SEQ ID NO: 8362 - DNA, 458 bp, Glycine max
  Clone ID: jC-gmfl02220092f04d1
ttatattttgagcgaactcactttaaacagtggcaaagagtttagggccacgaggaaaggtctcgttgtgaaaatcttttcatgatatcctaaatgttgacattttgagagcttcgttagattacacactaagtgataacgtacaaggtttgattattgcgaagtgcatctcagaaattttaccactaaatgcatatgatcagattcgaacttctatgccttacttgaacaaatgctcttttaccgattgaataggcacctttttactgtgaaaaatgccatcagcaagtgctgctgatgcatttgttttgtcgaacacctcagagaagcgttcaggaacaccagcaccgatacatgcgagtacagggatacttacagcatctgatatcaacttaattaaatctacatcgaatcctttcccttgaccgtcgcaatcaatgcaattaagtggtatttca

SEQ ID NO: 8363 - DNA, 356 bp, Glycine max
  Clone ID: jC-gmfl02220092f05d1
gcatcgaacaatatattaaaattaaactaataaatgtacattaatagaagaaaaaaggcagaatgaacatctttgtacaagttcgaatccacaggggatccaaacactttcaattgcttctgttctgatacatctttcactacacatcattgacctgtatatcagatttctaaaataacatcactaagcacaattttcactgcctattcgtcaacgtcttcctcaaccctttgataattttctgaaaaccaaatcacggtcataactgatagtgccagtggcacaacaataactaacacttgtgcaaacgcgtgcatatggtcaatctggcccaagtgcaagtagaccttgtaaaa

SEQ ID NO: 8364 - DNA, 286 bp, Glycine max
  Clone ID: jC-gmfl02220092f06d1
cccaaaatggtcattttattaaataaggggcaacttcaggttacacaaccatatggttcttcccataactttcatatgaacctatactaaagcctacataattaagcatgctacacaagcgggaccatgaccttagtttccccctttttaatatttattttttaccccagactttattcaagagcccttgtacaagagccttaaaaaagcaatttttagccattcccttttcgggtcacgggggcctttattctaacactggtaacataaacattatgccccaacc

SEQ ID NO: 8365 - DNA, 262 bp, Glycine max
  Clone ID: jC-gmfl02220092f07d1
ttttattttataatttttttttttatttattattcttgtgatgagttattggttttggtttgttttgtgtttttgtttatttttttgataatttgaaggaaagcacaacacaagaaaacagaaaaacgaagacagaaaaaagggagaaaaacaggggaaggcacagagaggacgcaccgaaaagacagaacaaagcacggggacagaaaaagggggagaaaaaagacaaaggagggaaaaggccacaaaagggacaaaggga

SEQ ID NO: 8366 - DNA, 192 bp, Glycine max
  Clone ID: jC-gmfl02220092f08d1
cgacgggcgatttgacgctggctacatcgtgtagcagtagtacctgcttgggggtgggggggggggggggggggaaaaaagtacccacgtgtgcccggaggaaggctgtcgtattagaaagaaaatggcaacggtagagccaaacgatagagcgtactgtattcagggttggttggttgggcgcatgcatgg

SEQ ID NO: 8367 - DNA, 456 bp, Glycine max
  Clone ID: jC-gmfl02220092f09d1
tgaccaagcaattgtgccgttctagcatgtgtgtagtagcaccttcttgggggggggggggggggggggggggggggggggacaatttaaaaggggtggaatggtcgactaagaatactatatcacagtgttattagtagtagtaagtaatttaaatgtctgccactaaaaaaaacaaacaaggataggaaacaaaaaattaacaaaaagcacttagttgaccatggatagggacaaataacaaataagtagcataataatgccaccaataaaccgcataattgtaatgcccgcttggggtaaatgtatgccatgtcaactagtaatccatcgcgttcatcatttgcaaccacaagtactacttttactttccatagggggtgttcctggccgtccgcttccacttgtgcttccgcaaataattccgcttcggctcttcaaaactggtaggccaac

SEQ ID NO: 8368 - DNA, 528 bp, Glycine max
  Clone ID: jC-gmfl02220092f10d1
ttgagcgggcgagtttggccctggtaagatgtgtaggagtgccgcctgcttggggggggggggggggtacggcaaatgaaggcagggagaagaggttcgtatacggattcggtagcagaaaacgagaacaaaagagatgaaagctagctgaccagatggtagcacacgacaagaggtgagagaagaagctatactgttcagcaggaggggataggcactcgagtgcgctgtcaatcgagaggatcctggatgtgagaagctatataatgttctgtcacttcaaggttcactggatcgatctcgctagctcatcgtagactgtggtgagacgcgtattgaaaggtaaggtatgccttcgtcggggataatcgtcgcatgcccaaaatttgcctcggatttaatggaagtcttggctactatagtttttgggtcttactgcctcgaagactcaacacctttctattcagtctttggtttaatacggctctacttgcaagcctcaagcccatctctttgcgagtcctctag

SEQ ID NO: 8369 - DNA, 499 bp, Glycine max
  Clone ID: jC-gmfl02220092f11a1
aatttattttctttctgcttctcatggatctctcctcactctcttcataccgcactgtcggagtaacaccttctgatcctcgaaaatcacttcctcaatggggtcttcatttcctctcctacactcacaggctcaaccagattaagaaaaggtcaagtggggtatatgcatcactatccgagagagagagaggagagtattattcccagagaccgccaactccgctactagacaccgtcaactatcctattcatatgaaaaatctctctaccaatgagctgaaacaactcgcagatgaactgcgttctgatgttattttcagtgtttctagaactgggggccatttgggctcaagtcttggtgtggtggaactcaccgttgcactccactatgtctttaatgcccctcaggacaagatactctgggacgttggtcaccagtcttacccgcataagatactcaccggtaggagggacaagatgcataccatgaggcagac

SEQ ID NO: 8370 - DNA, 465 bp, Glycine max
  Clone ID: jC-gmfl02220092f11d1
tgaccagccaactttgcgctatagcacgtgtagcactaccacctgcttgggggggggggggggggggggggggggggggggggggggggggggggggggggggggccggggggggggggggggggggggggggggggggggggggggggggtttaaaaaaccctaaaaggggtttttggaaaaaacccccccaattttagcccaatttccccagaggttttaaaaaagcgcttacccgcattacactgggaaaaagggagatttttccccccaaaaagccgtgcttgcccttaatccccaaccccaaaaagcctttttttaagggggggaaaaaatccctttggccccttttggggccgccttttaaggcccccaattttcccccccctaggcccaaacccccaaatttccctaaaaaaaagcccctattaccccaatttccccccaagaaattttttcccaaaa

SEQ ID NO: 8371 - DNA, 549 bp, Glycine max
  Clone ID: jC-gmfl02220092f12a1
gcaccctttggccattcatgatcgtacctatagcttccaatattctgattatcgagaggaagatcaggatggctggtgtttcttccatgcttcttttctttctatttgtaatattaatatctcaagtcagtgcccagttaagcgtaacctgtgattacagcaaggtcggaaattacacagcaaatagcacctataacaccaatctgaacacccttttatccactctctcttccaacacagaaattaattatggtttctacaacttctcacatggtcaaagcccagatagagtcaacgccattgggctctgcaggggagatgtggagccagataagtgccgcagttgcctcaactatgccagaagcaatctcacacaagattgtccaaatcagaaagaggcaattatacattttgacaattgcatgttgcgctactccaaccgcacaatatttggccaagtggaaaattttcctggtctctatatgtggaacttaaagaatgcaacggacgtggatgagttcaatcaagtgctcgcaaacttaatgagga

SEQ ID NO: 8372 - DNA, 510 bp, Glycine max
  unsure (1)..(510): unsure at all n locations
  Clone ID: jC-gmfl02220092f12d1
ctggcctggccggcaggtttgccgtgctacacgtgaggagtgccgcctgcttggggggggggggggggtacgggaaataaaccagcgcgccgcgagggaaataacataggctaacagtaaaggatagcacggtgaatacggcgaggggcgggaacactccaactagacagcagcaagcaagagtagttgtggaatgacaagtgattcactcgagactgtacggaggcaacttgtaggggtgcaggtggcactgcagggaaggagtcaggtatggcagttgcgggtttggcacggcgatgtttagcatgctagcgtgccaacatggttacggtgatgcggtagagaaaagctaccgggcctcccaaggcccacatggacacaagactgagggactagcactagaagccgacttagccggccgtgcgttctgaaagggtggcaatataaacggaattaagagccagatagtgcagtagggtagggtcgcaaggcggcnggaagcagccagtg

SEQ ID NO: 8373 - DNA, 504 bp, Glycine max
  Clone ID: jC-gmfl02220092g01d1
aacaatccatgatattattaaatgagagacaattattcatagtttcgacataatttatcaggcaaacctgattcaactaaaagaagattacataatttaacaatggactttccacaaaccgctaagacatgaatcacatgctttcatagataacaattagaagataatcgtggcttaattaaaatctcaagtggagtagctttagtcttgcctaatccaacggtttcagtcatatcaataggttcatttgatggatttaagaatgaaaaagaatgaaaaagactggcaagaatcaaatgaaccatttgaaggctaaaggatattccaggacacactcttctaccaccaccaaatggtaatagctcaaaatgatgtcccctaacatcaatgtctttatgggtggttagaaacctttctggtttgaactctaatggatttgaccaaacactaagatctgtgtggatcttccaaatatttggaattagacgagttccttttttgaca

SEQ ID NO: 8374 - DNA, 508 bp, Glycine max
  Clone ID: jC-gmfl02220092g02d1
aaacaagaagcagggaatgacattcattcaggaatctgaacctgaaattaacatacagtacatttcttgctccaaatgacaatgtattcaaaggcataacacaaatggttatgtaacaatagagacccctggcttataagaaatcaaacggccaacggccaaagcgagaataaaccgtgcttacattcccaagcatgaagtgctgagcattacctatttccaaaaggagactagccattcccgctaccaagacaatgagtaaccgaagcctttaagcaatttgcaaatcaattattctcaccaaggattacctaccggacaaaacttatgcagtttcttagatgcgtttggtcttttcctccaacaggatttgaagttttaccttggtaatccaaggtaataatgatataaaactccaattctgataggagaacaccaccaaaagcacctatgtaactacataaaatttcgtccctacctaccaagtaccaccacaccttcatcaaac

SEQ ID NO: 8375 - DNA, 181 bp, Glycine max
  Clone ID: jC-gmfl02220092g03d1
agtccaaactttttttatgtaaaaaaatacggggaaatatgaatatcaaaatccaatattgactaatatcatgccttgttttatcatatacaaattgcgcctctccctgttttgcacgactgcttatccatttttctacagaatgccataaggcgctcgacttatgtcttaattacagctg

SEQ ID NO: 8376 - DNA, 496 bp, Glycine max
  Clone ID: jC-gmfl02220092g04d1
gttaaaaagttcaaacctgcatgattgcatttattattttggtttccattacacaaacatggtttattaatgacaaatacaagtacattcagccactccaaatacataacttaaacatacacaactgatgaaggaatcagattccttctatttcacatttatttaaagccagggacagtacttcagcaaccatagagcccttagatagagatactgttgggaattcctctgaaagtcaatccctcctcactagaaggatagagcaaagtgtaaggcattttagccggcccatagcggtttctcaatgtctcattattggtcttctctataagcttcttttcaatctcttcaagattctttccaaacctcttaaaggcctctaatggcccggcatcagaagtccagtagtcaccggcatctctctgcccaaggtagaactcatcagatgcgtgccttgataaaatttctataattgtaaggtcaatgagggtctctt

SEQ ID NO: 8377 - DNA, 399 bp, Glycine max
  Clone ID: jC-gmfl02220092g05d1
ataaaaaaaattgcccccctacaaacaataaatctcaatttcatttggaaagggcccctaggaattgccccttaggacatttattcccaggtctatattggttttaaaaattttggtttaacgccttgaaatttttggaaaaaaaaggccccctttcctttttcaccttttggggacgcataatcccctttaatggccaaaaaatttaccttattctttgaaaaccttgggtgcccaaacagttgtccaagggtcgctttctgcaatgacttcaaaagggtcataaaccttggggtttgaactttcttcacttgggcttggatcaacagttttaacagaagcatttccctccctcttttctgagctaccccatttttcctccaagggccagggccctat

SEQ ID NO: 8378 - DNA, 433 bp, Glycine max
  Clone ID: jC-gmfl02220092g06d1
catcatataaaatatatatgttctgaaagaacacatacaagtacacaaaaaaaagggggaaattcataaaaaaatacagaaaaaaaaaaacagaattgagtaagagggaaggaaacatagagaaaattttagcaatcagataataagaagccagtagtagtgcaaaagtcccttgccaagagtgttggaaccccttttagttaagcaggtaccttctcccccttgagtggcttcaccacttcccatgtgaagtcagggtcatctctgccaaagtgtccatatgcagcagtcttcaagaacctgccatttccacccctcttgagatcaaggttgatggagatcatgccaggcctgaagtcaaaactctccttcacaatgctgaggatttccttgtcagggatcttcccagtgccataagtgtcaacaaacacac

SEQ ID NO: 8379 - DNA, 489 bp, Glycine max
  Clone ID: jC-gmfl02220092g07d1
ctttgggggggggggggggggtagatggtcaatgaaaacaatgcaaagggcaacacaaaaaacaagaagcactaaagatctaaaagatgtataatgtatgtataagttgtgagggagacgaactaagatattgggtacaaatgcaaaaagatcagcttatgaaccagaaattatgggagcgtggatctaaagagaagcacttgcgtcacaagagtaatgcggggggatgcctaaaagatatctgacacaagtaaaaataaaatgtacttaaatgacccctatcgcatacgaagagaatgaagcaaggtagtatgatataatcggaataccggctagcccccttagttgggcacggggctattgcggatatgcgacgtggcaactagaaggagcaggcggctaagggcactatagttaagtgctatgatcttaggctgggctgttggggttaagcacactaacgcgacaaatggcaccgccaactaagcg

SEQ ID NO: 8380 - DNA, 182 bp, Glycine max
  Clone ID: jC-gmfl02220092g08d1
cgacgagaatttggctgagctactcgtgtgcagtaccacctgcttgggggggggggggggggggggggggggggggaaggaaaaggaaaagggcaataggggttagaaagagaggggcacgatacacagcatactgcaacacaagaatggaaaacaaaaaaagcatatatggaaccccacaa

SEQ ID NO: 8381 - DNA, 141 bp, Glycine max
  Clone ID: jC-gmfl02220092g09d1
tgaccgagcaatttgagcgtgagtatcatcgttgcagtaccgcctgcttgggggggggggggggggggggggggggggggggggggggggggggggggagactgaaggactgaaagagttaggcaatatgcctagtaagtt

SEQ ID NO: 8382 - DNA, 536 bp, Glycine max
  Clone ID: jC-gmfl02220092g10a1
gtttagtgacatttgcagtagtagccagcaggacgaggaaaatgggtagtgtggccccaaggttccgcttcctcctggccactcccttccctcttctccgccgccggcaccaccaccaccaccgcaacctcttcctcctctccacccattccctccccttatcttccttctctttctctctcaaactcaaagcctcccaatcccaagcttccgcccctaacacctctccctgccctgagtggtcctcattcctctcccacatctcctccgccggctacctcccctccctccccgaccaagccttcaccgccgccgccgaacgtctctcctactccttcctccgcgacgccaccgcctgcctcgccttcgcacgtgaccgtcctaaccttctcaggttgctttctacgagagacattgcggcgctggttgagcacggctccccctttctcttccgcgacgccgacgactccgtcaggaagatgaagacctttctctccaacggtgacaccaatgtgttggacactgatagagcaaat

SEQ ID NO: 8383 - DNA, 498 bp, Glycine max
  Clone ID: jC-gmfl02220092g10d1
actgccggcgatttgccgctactactgtgtggagtaccgcctgcttggggggggggggggggaggggggggggggggcctatcacagaattatgggggactgattggtaggggtgggaggaaggccagtgcactgtatacggccaacaggttggtgcgatgctgcacatcgtaagtgttgggttaagccgcggggttgtggctggataataaagtgcggtattttgggctctagacctaggaggcaaccaaaagtggtcgtgccaagtgcatgcactgtacaaagagttggaagtgcgctcatctcatccaattagtgtgtacttgggcttgttgtgcatagcgttaaaccagtgcccgttggtatgcttcattttggtaaatgtgggttgcgttatgtgctgtgattatgtgccggtgtacagctgccattgccccagcaatgggtgcgtaaaggtccaatatcagtggcgagcaaatgtgcttggcaagggttatg

SEQ ID NO: 8384 - DNA, 481 bp, Glycine max
  Clone ID: jC-gmfl02220092g11a1
cgcaagcaaaaagaaagaatcccaggcgaggagaaagatggaggggaaggagcaggatgtgtcgttgggagcgaacaagttccccgagagacagccgattgggacggcggcgcagagccaagacgacggcaaggactaccaggagccggcgccggcgccgctggttgacccgacggagtttacgtcatggtcgttttacagagcagggatagcagagtttgtggccacttttctgtttctctacatcaccgtcttaaccgttatgggagtcgccggggctaagtctaagtgtagtaccgttgggattcaaggaatcgcttgggccttcggtggcatgatcttcgccctcgtttactgcaccgctggcatctcagggggacacataaacccggcggtgacatttgggctgtttttggcgaggaagttgtcgttgcccagggcgattttctacatcgtgatgcaatgcttgggtgctatttgt

SEQ ID NO: 8385 - DNA, 541 bp, Glycine max
  Clone ID: jC-gmfl02220092g12a1
tctgtctctgtgtttgcggctgaggattccgaacgagcgaccttcttcgtttctcgcaaagtttaagtcatcatgggtaaggaaaagactcacatcaacattgtcgtcattggacatgtcgactctgggaagtcaactaccactggtcatttgatctacaagcttggaggtattgacaagcgtgtgattgagaggttcgagaaggaggctgctgagatgaacaagaggtcattcaagtatgcctgggtgcttgacaagctcaaggctgagcgcgaaagaggaattaccattgatattgctttgtggaagtttgaaaccaccaagtactactgcacagtcatcgatgcccccggacatcgtgactttatcaagaacatgattactggtacctcccaggctgattgtgctgtccttatcattgactccaccactggtggttttgaagctggtatttctaaggatggacagactcgtgagcatgctcttcttgctttcacccctggtgtgaagcagatgatctgctgctgtaacaagatggatg

SEQ ID NO: 8386 - DNA, 481 bp, Glycine max
  Clone ID: jC-gmfl02220092g12d1
taaccttgccggccaatttgccgtgctacatgtgtggagtgcctcctgcttgggggggggggggggaaattagaaatacgggagaaaatggtcggagaaaggaaagataatggaaaatagtttgtactactaaaccaaagccatgaaaatttgagactgctggcgcaaaggtcaaagagtgtacatgtgggattagtaaaataaaaaatacgatgtagtaaaaataaatactaagcaaaaggcattattcttcagtaacaattgacggggcaaacggatcctgatagcaaagtcctacaaatggaaaaagagaatggaaataaaatattgaacatgtgctaaccagaaaatgatgagaaaccacgaattatcagcagcagtatagcgctgactaaaaggctttaaagctaagtatggtggtggcctactccttggccgcattggcctgttccgccccgtgggtggtgtaatatgtggcagc

SEQ ID NO: 8387 - DNA, 558 bp, Glycine max
  unsure (1)..(558): unsure at all n locations
  Clone ID: jC-gmfl02220092h01d1
aagatgataacccatgatttccttagaacatgcataatattttacgcaaagtttcttggataaggactagttttgaagtaacattgtgatgtgcatatcaagctcctgtcttcttttttctgccttttgtgttccatattcnttttcattgaaactattacaaggtcaaattattgcaaccaaaataatttcgatcgggtcatcaagtggagaaaaaaaaaaattactcccatggcacatcaccgacaagcatccagtcgccatccctgtcttcataggtcgggacatagtcggagctgttcagaagatccatcaacttgctctcattcatgaaatccttgaagccttgggattcacaatttccaatggtgaaggagctaaacattttgcccaaggcatcagagagctcagggtaactcttgtacatcttcaagtcaactttgcggaggtaaggtgctccatccatgctaactttgacaaagcttgcattagggctgttcttctcgctttctttccgtcgctgctcttttgggctgcaaacatgttctttcggaaaga

SEQ ID NO: 8388 - DNA, 454 bp, Glycine max
  Clone ID: jC-gmfl02220092h02d1
aaaaaataaactacctcttcaactttaaaaattaaaagccatttctggtagcaacattttttgaccatttacatgaacacgcttttatttgctacttacaacctacacaatcaatcacacaatggatgtcaacccatgatgatgacaaaatttgacacttatgccatcctttgaaacaagaacattctttaaaggcttatgaggggggggggaggataccactgatgagcatataaggtcaaactcttaagggttatatgaacctcctcttaaaattacgaatagttgctcggtatgagcgtactaacaagctaacccctataccaactactacaaagatgccaagcccaattccatcaccaactgtaaccccagcattaaaccatgattgttcaccatcttccccatctacatatactggccttggccaatacatgctgatgtaatccttttc

SEQ ID NO: 8389 - DNA, 447 bp, Glycine max
  Clone ID: jC-gmfl02220092h03d1
acgcagaagacaagaataaattgatgtaattcttagagttcagcagcataatataacaaaaccaccaaaagagaattgcttacagagaaaatgatcaaataagacaaactttcgagtataaaaaacataacgaaaatcagtatcactcatttcatgaaagatgccatctggaaggcattccctaataccatcaaagtgctccagctcaaataaactaacgctatcatcatcagtattgtccaaactgcaattgatgatgattaccaactagcttctttaggagagggatgagaccaatcaaagcaatctgaagctggtctgaactatttaatggaatacttatttgtccgggccctcgactgctcaaattggccagggcaacaagggttggattacgtcctactgggatctgagaatgcacattgtaccccacagcaagatctccat

SEQ ID NO: 8390 - DNA, 542 bp, Glycine max
  unsure (1)..(542): unsure at all n locations
  Clone ID: jC-gmfl02220092h04d1
aagacttctttctcataatctgtttttagtgcagaaaattaaaatacgttttagatgtttttgttttctttaacgttttaataaattttctattttcacttcaaactaccacgaccacggccactgccaccatcaccacccctgctgctagagtgccttcaagctttcacaacttattctcaaaacaaaattcatcaagcagatccagatatttctgaatgactagagaccatacatgccatgcaattatctttcctcaaacaacttatttcttactatgagcttcagtagttaagttaacattaacaacatactaagaacggctttcataacttcaaactaaaaaggtgtagttgggcaaggtacttaacaataaccataagtatggaatatcagaatcaaataatgcaacacgcctttacctgctcaagatgatatattataggcaaagagtggcacctgcaatacacgacaccaaaactccaccaaactttgatgatataataaggtcaacttancacggaaaagatgaaattcaaata

SEQ ID NO: 8391 - DNA, 355 bp, Glycine max
  Clone ID: jC-gmfl02220092h05d1
ccagggcattgatcctttgattttaattctcaagtatgctgggaacatcttcatattgactcgtttattatcgacatttaaaaaaaatcatttgtcatgaaaaatggaaatcacccacaaaatgtcatacccatcatagacataaatcccaacaaaactccgcatgaattgagtccgcaaaattcttgacaaaaacagggctctcttatgaatagagaccgctaatgggattacattagtttatgggcaaattctacaacatgcagggccaccaggcacgcacagacatggctctccaatattcaccattaaggcctaaggggctgcaaaaactcaccatggactccagataacc

SEQ ID NO: 8392 - DNA, 558 bp, Glycine max
  Clone ID: jC-gmfl02220092h06d1
caaactcaacacgttttcaaggtaattcaattctcagaaacaaagtaacaaaatacaaattacaatggataacaagtcccttaaataagagataccttgtatcttttcactagcagataaaaaacaaccaagttcaagatggtttaagaagaataaccaatatggcaagggtgcctcccctattctggaggattatatatcaggaaccaaggctcagaaccgttcaccaagaacagtactagatggtctagagggacaatcgaacagcactgaagatgatacctttagcactagggtctcaagcaccacaaataccccatcatcggattctaagaggcgatccaagataagaaaaccacagttcccattcaggttcatagtctcattccttgcttcaccatttagaagcaaaaactttagcatatccaaaaatgaaaagcgtcagcctttgttgaagtgcttcagctatgaacagatttccaatgctaccaaagacttccaccaaggtatgttagtttttttggacaaaacttagatacattttctgaagtatcttta

SEQ ID NO: 8393 - DNA, 515 bp, Glycine max
  Clone ID: jC-gmfl02220092h07d1
tgccttgccaataccgtctacatgtgtaggagtaccgcctgcttggggggggggggggggggccaaatctaaaactttagtaggcgacggcaataggactaaacaaagatgcgtttagaatgaaagagtaaaaaaacaaaaatagattacgatacagaaattgctgatccctttaaaccttgtgtaaagcataggagaggcgaatgctgaccaaggcgcgttatagagccattatacattacattacaataaataggaacttatccaacatatgaagagataatccatcactaaagcaacaacgttaggtcaagcaaacccccaaacagaagttagttaatgacccccgccccaagtgacacggggtggtgctatgtcacaaagggggtatggctagtaatttaacagcacgtaccatctactaccttaccatagaccggtaaaaacgcagagtagcaaaggttttaggcgcgcaataatggacggcttaaagtccttgtggtgttagcccactt

SEQ ID NO: 8394 - DNA, 554 bp, Glycine max
  Clone ID: jC-gmfl02220092h08d1
taggttgacaggccagcagagtgctacatgtgtagcagtaccacctgcttggggggggggggggggggaacgttatagaaaggtaggaaacataggccaaatattaaaatccgagtactaatgcacctgagttaaacttacacagttaaaaggataaacctaaaagcagaaaagatccaagtaacaactaagaaaaggtgattagtacagcaagtaaaaggtaaaagtacgtgatttcggcagtaatgttgctagagcgcccaaatcacggctaagaaaaggtgatgattagtacagcaagaaaaagttaaaagtacgtgatgccggcagtactggtgctcgagctacgggtaaacgctctggctgtgctggtggcgattgttggtgtacggggttgctttggtgggcagggcgacgagatatgtagaaaccgtttaatactgttagatggttgttgacgagctgtagataaattactagtaaatagcctgtacaacgggggtgtacatactgtacatatactagatgcgcctggcaaattagcaggggtaagt

SEQ ID NO: 8395 - DNA, 204 bp, Glycine max
  Clone ID: jC-gmfl02220092h09d1
agacggggcggtttggcgtgctacatgtgtggagctggtgcctgcttgggggggggggggggggggaactgataaaacatcgccagaatggcagaggaggggaggatagatagctagacagacttgctgtgtaaagaacgtcctaccaataaacagacacacaggtaatcagtggtaaaggggatagggcgctaaaaggggggg

SEQ ID NO: 8396 - DNA, 547 bp, Glycine max
  unsure (1)..(547): unsure at all n locations
  Clone ID: jC-gmfl02220092h10a1
gttgatgatgtcattgagcattactcaaaaatcaaagaaaatccagagttccattctcttcccagcttcctatttggacagtccatgggtggagctgttgcattaaagatacacctgaaacagcctaaggcatgggatggtgccattcttgttgcgcctatgtgtaaaattgcagatgacatggttccaccaaaattcctcactcatatcctgattggtttagccaatgttttaccgaagcataagttagttccaaacaaggatttagcagaagcagcattcagagatttgaagaagagggaacagactgcttacaatgttgttgcttacaaggataaaccacgtttgaagagtgctgtagaaatgcttaaaactaccgaagaaatagaacagcgattgaaagaagtttctctaccaatattcatccttcacggngaagctgacactgtgactgatccatcagtgagcaaagccttgtatgagaatgcaagctgttcagacaagatgcttcagctttacaaggatgcctatcatgcacttcttgagg

SEQ ID NO: 8397 - DNA, 594 bp, Glycine max
  Clone ID: jC-gmfl02220092h10d1
tgacagggatttgccgctctacatgtgtagcagtaccgcctgcttgggggggggggggggcgcggtttatgagaggggtggggtgggaggaacgaaacagagaaataggagagcggagggatagactggagtcaaaaaaaaaagaccggtgggatagaaaaataaccggagcgtgacgaatgcatggaacggctaaataatacataacggtaaaagggcagatgtgacggatggggagccaaataagactaatgggtgaggggttaggctgcaaaataactgcaagcaagaggtagtggggcaagttacacactaaaaagaaggaagtccgaggaacaccaacaggcaggcgcgcgtaactgcgctgtagtgacttaacagagcagcgtattaaaaatggcacggaggagggtagtacctgtatttgtaacaacgctagcagacctagttggcgaaactgcaactggtggcgtgcaatactggctaggtgtagataacctagggctgtatgcagccagtacgtatacgcgtactggttttcgcaaccagcaagaggccgacacaaatggtgggtaagtctgccgtgagggtggt

SEQ ID NO: 8398 - DNA, 545 bp, Glycine max
  unsure (1)..(545): unsure at all n locations
  Clone ID: jC-gmfl02220092h11a1
cagcactgacttctgctctccttttgccattttcgttcaggcgcagggatgtataataaacctaatccttgcttttgggtgggcttgtgctgcatttgtcaggaaccgagaaataaatagaataaagaagagtatgcggaatggcaataactttgcattcctttgtcatgatattagtgaacttgagcactccaatcaggctgatcttccaagtgtaacagtaattatgcccctaaaaggatttggagaacacaatctccataactggaagactcagttaacatcgctttatggtggccctcaagaatatcttttagtagttgaaagtacagaggatcctgcataccatgctgtagcaaaactaataacagaattagaggattctgttaaagctaggattataatagctggtttatcaacaacttgtagtcaaaaaattcacaatcaattggttggagtggaggcaatgcataaagatagcaagtatgtattatttttagatgatgatgttaggctacatcctggatcaatnggagcactcgttc

SEQ ID NO: 8399 - DNA, 504 bp, Glycine max
  unsure (1)..(504): unsure at all n locations
  Clone ID: jC-gmfl02220092h12a1
atttttcacttttgggtgagcagaatcgttatgcttctggaacagatatagtgaggtttccaaggggtggctatgtacatagctttcctttcttagatagttcagaaagtggagccacacagaatgtgctgcaagcttctggctcaaccaaggcagattctccaattcttggtctcacagtgatgggtgaaggtcgcatagctgtgtatggggactccaattgtttggacagcagtcatatggttacgaattgttttgcccttctgaggaaattgctagattttactaatgaagacgttagagatccagaacttttctctgactcaaataaacaagattctcctttgtatgaacctgacaatcagttgccatcccgcagaactgatgtaaatttctctgcattttcagctattgtggggaaggaattgatctgcaggactgacancaggtttgaaatctggggaactaagggctacaatttgcaagtcacgggaagaaaccaga

SEQ ID NO: 8400 - DNA, 173 bp, Glycine max
  Clone ID: jC-gmfl02220092h12d1
aggcttggccgggagatttgccgtgctgcgtgtgtggagtccacctgcttgggggggggggggggggggggggggggactaggaataggccctataggagggtatgggtacaaaagggcccttggggaaaacttggttcaattcttaaaagccggttattgggcccaaggagg

SEQ ID NO: 8401 - DNA, 483 bp, Glycine max
  unsure (1)..(483): unsure at all n locations
  Clone ID: jC-gmfl02220093a02a1
gtcacgggggagatctgattcgggagggtggttgaggggctgtctggtggttttcgcagtggtctcagcgttgggcgtgtgtggccctgctctttactggcgattcaagaacgccatcactctccgcaacaacaacaacaaactctcttgcccttcctgcctctgtgactgccctccccctctctcgctcttccaacttgctcctgggctggcgaatctctctgtctcagattgtggaagtaatgacccggatctaaaggaggagatggagaagcagtttgtggaccttctcagcgaggagttgaagttgcaagagtctgttactgaagcaaacactcggcacatgaacataactntggctgaagcaaaagagtggcgtctcagtaccagagagaggcagattaatgcataactgcaactganacatgcgagcaggcaaaagaacgtgctcaggccatactcacaagggagaaaagatgactc

SEQ ID NO: 8402 - DNA, 424 bp, Glycine max
  Clone ID: jC-gmfl02220093a02d1
agacctggccggccaacttgccgtgctacacgtgtagcactgccgccgtctttggggggggggggggggggggggggggggggggggggggggggggggggggggggccccggcaaactacactgaaagggatgccagaaagggaagtaaccttagaaatagcaccgggaaccctttaccaaatgcacttcccccagtacatgaagcccctatctcgaggtaggcccagtggagcacccaaaaagagggcagatgactggagaacccagatacggatacatataccaacccgggaaatgggaattgaaagggcccaatgtaactaggggatggccagctggccagaaaattatcagtagcagggggcttagaaacaaggggaaggataaaattgagctaccggggtgttgggttaattaagggc

SEQ ID NO: 8403 - DNA, 581 bp, Glycine max
  Clone ID: jC-gmfl02220093a03a1
ctcgagccgattcggctcgagcttatgtttatgacatgagaaacaagcttaatgacaaataccaagagtttgtcactgcttcagagagagatgattttactgctaaacttcaggaagtggaagattggctttatggtgagggtggagatgaaactaaaggtgtatatactgccaagcttgaggaactcaaaaagcatggtgatccaattgatgagcgttacaaagaattcatggagaggggtactataatcgaacagtttgtctattgtataaatagttacagacaagttgcaatgtcgaatgatcccagatttgagcacattgacattaacgagaaacagaaggtcataaatgaatgtgttgaagctgaaaagtggtttaatgagaagcagcagcagcagaactcacttccaaaatatgccaaccctgtactcttgtcagctgaaataagaaagaaagctgaagctgtcgataggttctgcaagccgattatggcaacaccaaggccaaccaaggcgactacttcaccaggaccagcaacacatccatcttctcagagtgatgaacagcagcagcagcag

SEQ ID NO: 8404 - DNA, 445 bp, Glycine max
  Clone ID: jC-gmfl02220093a03d1
cagacttggccggccaatttgccgtgctacactgttgcagtgccgccttcttgggggggggggggggggggggggggggggggggggggggggggggggaaatcccaaatcactaggataaggtagttagtcctgaataagtggagagaatgaagtgagagggaaattgacacaaacgaatgtggtgccttaaggttaattataggcctcggggggtggtaaaaggtgggcccaaaaaaagttccaggttaaacaattattagaagaggaaggaaaatggatcggattaattaattaattcacacccggtgatggatattaagtagttaaccccttatatgtatgggtaatttattaaaaggtggggggttgccctttaaggtagatgtaaagctggagatacagaccacacatggcacacctgatttataattaaaaaggacct

SEQ ID NO: 8405 - DNA, 587 bp, Glycine max
  unsure (1)..(587): unsure at all n locations
  Clone ID: jC-gmfl02220093a04a1
cattcccaaagaagaacgtggcctctctgctaaaccccttatcgtctccaaaaatggcttcttctatcataggcgtttcctccatttaccaaacaccccctctcgaactataccagaggccaagcactgcttccacttcctccgttaggttgcaatctttagactccaagtctcacttcaacaacctcctccgagcccaccgccactccactggcccgggcctcaagcctacaccatctttcgtcccctccgccgtcgccacccccaactcctccctcctcagcgaagaagccttcaaaggacttgcccgcgaattcgaccaaaacgacgaccaattcacccgcgcctcctccgccgccgaatccgttaaccccgacgaactcgacatttccaagctcgacttgccctcgcgtctcgttgagtctctccggagccgtgggattactcaacttttccccattcagagagcggtgttagtacctgcactagaaggtagagatatcattgcgcgagcgaagaccggtnaccggaagacgttagcgttcggaatccaattataaaggcctcactgaagtgagcacgcacct

SEQ ID NO: 8406 - DNA, 367 bp, Glycine max
  Clone ID: jC-gmfl02220093a04d1
agaccttgccggcagatttgccgtgctacacgtgtgcagtgccgcctgcttgggggggggggggggggggggggggggggggggggggggggggggggggggggggggggggggggggggggggggggggggggggttttttaaaaagaccggcttgggttttgttcccaaaaatgggggggggttaaggtttggggttaaaaaaaaagttgaaaggtgggcccattttcccaaaaaaaaacccccttttggcccaagttttttaattttcgcccacctaaggaaaggaaaagccccaatttggggccaaaatttggggaaaagggcccccattttgggcccttaaaaaaccccctctgaaaaagtg

SEQ ID NO: 8407 - DNA, 580 bp, Glycine max
  Clone ID: jC-gmfl02220093a05a1
gggaagacatgggaaaagcttgggtaggcctggtggtattgctgtgtttgattgtcacggccatcgccgaacaatgcggtcgtcaagctggcgggcagacatgtcccaacaacctatgctgcagccagtacggttggtgtggaaacaccgaagaatactgttccccttctaagaactgccagagcaactgctggggaggcggcggcggtggcggtggcggcggcggcggtgaaagtgcttctaatgtccgcgccacatatcattactatgagccagagcaacacgggtgggacttgaacgccgtgagtgcttattgctcaacttgggacgctagcaaaccttactcatggcgcagtaaatatggctggaccgctttctgtggtcccgttggtcctcgtggccgtgattcttgtggaaagtgcttgcgggtgacaaatacaggaacaggagcaaacacaattgtgagaatcgtagatcagtgcagcaacggaaggttggatttggacgtgggagtgttcaatcggatagacacagatggaagaggatatcaacaggggcatctcatggtaactatcagttt

SEQ ID NO: 8408 - DNA, 495 bp, Glycine max
  Clone ID: jC-gmfl02220093a06a1
cttatctaactattgtacctttgcaaaataacattctttagttatttcgaattcgtgtagcacagagagaagagaagagaacttgtattttctgccagtttcccagtatggtggccacaagcacaaatcaatccgagttagaaacaagtaagaaggattccacttatgacagaatagctgaagtcaaagcctttgatgaaacaaaacttggtgtgaaaggcctcttcgattctgggatcacaaagataccacgcatgttccatcatgccaaggtggaggaccacactgaaaccatgccaaatgactcaaacttcagtgtccccatcatagatctccaagatatagacacaaactcatcccttcgtgtgaaagcacttgacaagattcgaagtgcatgcaaggagtgggggtttttccaggtggtgaatcatggtattgctgttgatcttttggatgagatgatatgtggaatccgtaggtttcatgaacaagatg

SEQ ID NO: 8409 - DNA, 401 bp, Glycine max
  Clone ID: jC-gmfl02220093a07a1
tgatttaccatttaccacaccaaaaccaatcggatcgtttcctctgcggagtcagaaatccatggatccctacaagaatcggccatcaagcgccttcaattctcccttctggactactaattccggtgctcccatctggaacaacaactcatcgctgactgttggatctagaggtccaattctgctggaagattaccatctggtggagaagcttgcaaactttgacagggaacggatccccgaacgtgttgtccatgctcgtggagctagcgcaaagggtttttttgaagtcacgcatgacatttctcacctcacatgtgccgatttcctccgagcccctggagtacagacccctctcatcgtccgtttgtccactgttatccacgaacgtggcagccctg

SEQ ID NO: 8410 - DNA, 383 bp, Glycine max
  Clone ID: jC-gmfl02220093a08a1
gattacgaaaatgtggaagagaacgggttttgaagaagaagcagttcaattgatcaactcagatttcagggacctaagtctagctgctaatagactcgcccatcatgccatcaaacttggtggcattggctttggagcctctttgttcggattgtttgctgccattgctgctatttatctgttgattttggatcgtacaaactggaaaacaaatattctcacagcactactcattccatacattttcttcagcttgccttcattaattttcgacgtattcaggggagagcttggaaaatggattgctgcagttgctggtgtattacgccttttccttccaagacacttacctgattggctggaatagcctggagctctgattc

SEQ ID NO: 8411 - DNA, 440 bp, Glycine max
  unsure (1)..(440): unsure at all n locations
  Clone ID: jC-gmfl02220093a10a1
gtcttcataaacgcctttcttctccgtttccgtttcctcgttcgaattcgctttttgatctgcgaaaatgagagagtgcatctcgatccacattggtcaggctggtatccaggtcggaaatgcttgctgggagctctactgcctcgagcacggcatcgggcccgatgggcaaatgccaagtgacaagacagttggcggtggtgatgatgctttcaatactttcttcagcgagactggtgctggaaagcacgtgccacgtgcagtgtttgtagatcttgagcccactgttattgatgaggtgagaaccggaacttaccgccagcttttccacccagagcagctcatcagcggcaaagaagatgccgccaacaactntgcccgtggccattataccattgggaaagagattgttgatctgtgcttggaccgcatcagaaagc

SEQ ID NO: 8412 - DNA, 535 bp, Glycine max
  unsure (1)..(535): unsure at all n locations
  Clone ID: jC-gmfl02220093a11a1
aaagcttgttttggttggggttaacttacacggcaagttcaccttaagggatatccctgtacacaaagatgtgtcaaatatgcaacctcaatttagccagattaacatctctgttacatggaggggaaagaaatttgttgtcgagatgaatataggagccaatgtgaaggatctagggcaggaattgcaaaagttaacaaatatcaaagaagataccatgcggttcattgttccacagatttctgccagaacgtcaaaacttctggcccccttttccaaggaacatgcacttttaagtctgcaggaaacttcaattaccgaggccaggtcaattataatgatgggtgtaccaacaaatgaggttgaagaggttttacaaaatgcaaaaacagatttaagaatagctggatttgaggacgaggagaagagacagaaacagagaatttcccatggacctcatatttcattgaaacttncacaagggcagtatatantttgtgatttcgtacacttcacatccaggaaatagagctga

SEQ ID NO: 8413 - DNA, 516 bp, Glycine max
  Clone ID: jC-gmfl02220093a12a1
cttgtgcactcagttactctctctctctctggagcgtcgtcgtttcgttagggcacaaaaccccttttcggatcggtggagcaaggcctcgccggcgagattcccgaggctgttcaatcagcgatcgagcaccggcgaaaagcggcgaagatgaaggttttcgtgaagactctcaagggcacgcacttcgaaattgaagtgaacccttcggacacgctttctgaagtgaagaaaaatatagaaactgttcagggtgcagatgtctatcctgctgcacagcaaatgcttattcatcaaggaaaagttctaaaggatggtactactttggaggaaaataaagtagctgaaaatagttttattgtaattatgttatcaaagactaagagttcatctggtgaaagatctactacttcaactgctccttcagttaaggcaagtgcaactcctacttcaacctctgtgtctgctgcgcctcaagctcctgcttcaactggagcaacgcctacacctgttact

SEQ ID NO: 8414 - DNA, 532 bp, Glycine max
  Clone ID: jC-gmfl02220093b01a1
caaaaacataaaaattgacacattgtcatctggaaggcaacctaatctgctcagctctccttcatctgtgcaactctctccaagccaagaacatcaactatcattggtacctgcatcagtggaaagagatttggagccattggagaatgaggttcagcctggtgaagattgtacccagtcattggtattggttcagatggctggtgaagatttccagcagaatagtccgaaaaagaaaaggcgcaagttggaaccagctggggaaggggagtcttgcaagcgttgtaattgtaagaaatcaaaatgtttgaagctttattgtgagtgctttgctgctggagtctactgcatagaaccttgtgcatgccgcgattgcttcaataaacctattcatgttgagactgttcttcaaactcgccagcagattgagtctcgtaatccacttgcatttgctcctaaagtcatacgaagttctgattctgtatctgaaattggggatgaccttaacaaaactccagcctcagcacgacac

SEQ ID NO: 8415 - DNA, 199 bp, Glycine max
  Clone ID: jC-gmfl02220093b01d1
agagctggccgagcgatttggcgtgctacactgttggagtgccgccttcttggggggggggggggggggggggggggggggggggggggggggggggggggggggggggggggaaagcaaaactggggagggcttgaaggcccttcagggtatgcctaatccccttgtagggaaggttttaccctttattttaggggtg

SEQ ID NO: 8416 - DNA, 473 bp, Glycine max
  unsure (1)..(473): unsure at all n locations
  Clone ID: jC-gmfl02220093b02a1
caaaaagaaagaatcccaggcgaggagaaagatggaggggaaggagcaggatgtgtcgttgggagcgaacaagttccccgagagacagccgattgggacggcggcgcagagccaagacgacggcaaggactaccaggagccggcgccggcgccgctggttgacccgacggagtttacgtcatggtcgttttacagagcagggatagcagagtttgtggccacttttctgtttctctacatcaccgtcttaaccgttatgggagtcgccggggctaagtctaagtgtagtaccgttgggattcaaggaatcgcttgggccttcggtggcatgatcttcgccctcgtttactgcaccgctggcatctcagggggacacataaacccggcggtgacatttgngctgtttttggcaggaagttgtcgttgcccagggcgattttctcatcgtgatgcaatgcttgggtgctatttgt

SEQ ID NO: 8417 - DNA, 164 bp, Glycine max
  Clone ID: jC-gmfl02220093b02d1
caggcttgcccggcagagtttgccgtgctgcatgtgatgagtcctccttctttgggggggggggggggggaaacacagctagagagagcatgtgcccccgagggggcaggggccaaagggaagggtataaggatacctcggtaggatatagcaaggcccttggg

SEQ ID NO: 8418 - DNA, 595 bp, Glycine max
  Clone ID: jC-gmfl02220093b03a1
gtgggtttagatactggtgtcccctggattatgtgcaagcaacaagatactccggatcctcttattgacacctgcaatggatactactgcgaaaactttactcccaacaagaaatacaaacccaaaatgtggacagagaactggactggctggtacactgagtttggaggcgcggtccctcgtagacctgcagaagacatggcattctcagttgcaagattcgtacagaatggtggttcatttgttaattactatatgtaccatggaggaactaactttgatcggacatccagtggcctcttcattgccaccagctatgactatgacggtcctattgatgaatacggacttctaaatgaaccaaaatgggggcatcttagagatttgcataaagcaataaagctatgtgagccagctttagtgtctgtagatccaacagtgacatggccaggaaataaccttgaggtacatgtgttcaagacttctggtgcttgtgctgcattccttgcaaactatgacaccaaatcttccgcatcagttaaattggaaatggacaatatgacctaccaccatggtctatcagcatccttcctga

SEQ ID NO: 8419 - DNA, 411 bp, Glycine max
  Clone ID: jC-gmfl02220093b03d1
ctgccttggccggcagatttgccgtgctacactgttggagtgccgcctgcttgggggggggggggggggcttatggcaaagtaatgagtgaggatgggtaagggcggtggatagaaatagggtaagacaaaaagaaaaaggaggggtgccgacaagaagcagcgacggagtgcatattgggtgtcgcgttaatgaggtggggagacaaataaaagcgcgagcacccctgctgtaagctggtaggaggaaaactttttgacgggagccatgagccactaagaagtactacaagaagtgcatgagcgataatatggctacttaagggtggggagggataggtcggggtctctagttgccgctagcgggctaggtgcgagcgcgccaaggtaatgatataaacgaaaccccgcg

SEQ ID NO: 8420 - DNA, 457 bp, Glycine max
  Clone ID: jC-gmfl02220093b04a1
gtggtactacatcctggcgccccctggattatgtgcaaacaacaacatactccgtattctgttattgacacctgctctggatactactgcgaaaactatactcacaacatgaaatacaaatcaaaaatgtggacatacaactggactggctggtacacttaaccaggaggcgcggaccatcgtagaccagcacatgacatgacattttcagatgaaagattcgtacataatggaggcccatctgctaattactatatgtaccatgtaggaactagcttagaccggacttccagaggactcatcattgtctcagctatgactatgactgacctatagacgaatactgacgtttaaatgaaccacaatgggggcatcatagagattcgcatactgaaattaagttctgtgagccagctttagtgtctgtagattcaacagtgacatggtccgataataa

SEQ ID NO: 8421 - DNA, 432 bp, Glycine max
  Clone ID: jC-gmfl02220093b04d1
gagtggcgttgccggtaggtttgccgtgctacatgtgtgcacgtccgccgtctttgggggggggggggggggcttgtggcgaaagtgatgagtgaggatgggtaaggtctgtggatagaaatagggtaagacaaaaaggcaaaggaggtgtgccgacaagaagcagcgacggagtgcatattgggagccgcgttaatgaggtggtgagacaaataaaagcacgagcaaccctgctgtaagctgctaggaggaaaactttttgaagggagccatgagccactaaggagtactagaagaagtgcatgagcgataatatggctatttaagggtggggaggtataggttggggtgcctaggtgccgctagcgagctaggtgcgagcgcaccaatgtaatggtataaagggaaccccctcgtcagaagggggtgaga

SEQ ID NO: 8422 - DNA, 467 bp, Glycine max
  Clone ID: jC-gmfl02220093b05a1
catttgcatatactaatatcattttttctaaaaataaaattctaagccattttcatttgcactctttttttctacattaatgtatccatcactcaacctccttccaagtccttttaattctccgtctcagttccttcttattccaacctcactcggtttgagagcacggaatcaatgaagaaaataattagaatattttttcagcgttagtaaaaccgtcacattaaaataataaaaaaggagcgtaaattaggaagaaatattttgtgaggaagagaaaaatgcgagtgaaagagatgcacccgctgtgctgtatctccctcgagagtcccggaatcggcaaatattcgtcggagcgggagccggcggcgcttttccgaaccaggagcctttcggcggctggatctcacggcaatgccgctcaaggatcggagaccaccgtctccggcgttctctacaagtggacc

SEQ ID NO: 8423 - DNA, 509 bp, Glycine max
  Clone ID: jC-gmfl02220093b06a1
gcaaattgggtcatgaaccaagtgcttgttaaatcatgttatggatttgcaagaaaacttaaaagccatgggtttcattggggtgatctttcatccaaaccattgcatcaaccttcccctttccctaatattgacaagtgtgatttggagtgtagagggtcacaaaccctagcttgtgactttcacaaagtcctcttaaggactcattccttctttccctatttcatgcttgttgcctttgaaggtggaagcatttttagggcattcttcttgctttgttcatgccctatgctgtggatcttaaactatgaaatgaagcttagggtcatgatcttcatctccttttgtggcctcagaatgaaggacatggaaaacacttcaagggcagttttgccgaagttctacttggagaacctcaaccttgaggcctatgaggtagtggcttcagtagggtccagagttttcttcaccactatgcctaaagtgatggttgaaggggttctcaagga

SEQ ID NO: 8424 - DNA, 237 bp, Glycine max
  Clone ID: jC-gmfl02220093b07a1
agatcatgtaatggagcttcaccctgtcaattgtgacatagagaagatcaggactcagttcgatgagatctattaaaacagggacggttattgaattggcgaaggtgatttccgaatcgatgaagctggtgcagaagcagaaccactcctcaagatactgacgcgtgaagatgaagaacaggaggctggcttagtgcctgactcaagccctgtaattcatgaactcatggtgagtga

SEQ ID NO: 8425 - DNA, 523 bp, Glycine max
  unsure (1)..(523): unsure at all n locations
  Clone ID: jC-gmfl02220093b08a1
gttgaaaacacaaaagaaaaaaaatgggttcttctctgtggacctgtctgattttgttatcacttgcttctgcttccttcgccgccaacccaagagcaccaattgatgtgccatttggcagaaactatgtgcctacctgggcctttgatcacatcaaatacctcaatggtggttctgagattcagcttcatcttgataaatacacaggtactggcttccaatcaaaagggtcctacttgtttggtcacttcagcatgtacataaaattggttgctggtgattcagctggcacagtcactgctttctatttatcatccacaaactcagaacatgatgaaatagactntgagttcttgggaaacagaaccgggcaaccttatattttgcaaacaaatgtgttcaccggtggcaagggtgacagagaacaaagaatctacctctggttngaccctacaagagaatatcacagatactcagtgctatggaacatgtaccagattgttttctatgtggatgactaccc

SEQ ID NO: 8426 - DNA, 258 bp, Glycine max
  Clone ID: jC-gmfl02220093b09a1
gaaagcacatagaagagaatgattgaactcctagaggagaacgaaagtagttgaggaagatacatacaattcttgcagattgttgagaatgcctttcacgatgccttatcacacctcagacgcgaactacatcacaggggacgactgaggctcgttcgcgatacaccctagaggactcaacattgtgtggggaaatgagtctcggtactggcaaattccagaacagggtcctgcggagctgatccaagcttgatggtt

SEQ ID NO: 8427 - DNA, 514 bp, Glycine max
  Clone ID: jC-gmfl02220093b10a1
ggatcactctattcgattaagcgaagcacgtgacgagcctaatttacgctttacacccctacacttcccacaatttgttcctggagacgacgccgttccatcacaccctcagcggtcagagcatggcggcggaaccggtgagtgacggcggagccgcggcggagaaattgatcagcgggagagaagaatttggtgattcgtccaacttgttcagcgcgattctagcaatggtgctgtggctgggagctattcatttcaacatcgccctgatcctcctcgccgtgttcttccttcctctctccaaatcgctcttggttttcggttttctctttgggtttatggtgcttcctatcaacgagaagagcagatttggccgaagattgtcgaggttcatatgcaagcacgcttgcaattactttccgatcacgcttcacgtagaggatatgaaagcctttgatcctaaccgtgcttatgggtttgttgagctcccttttccctgcctaagatgaactct

SEQ ID NO: 8428 - DNA, 539 bp, Glycine max
  unsure (1)..(539): unsure at all n locations
  Clone ID: jC-gmfl02220093b11a1
ggttaggttgcaacataatacttaattcgcttaattttttaactgcgcctcagagtattcataacatattctattaaattaataagctggtgatgtaattaatattaatatgtagttttggcaatcttattggcagaagatgctaggtggagttcatcaatattctggtaggtataatatcttcatgaatctaatataacgttattcatagtgaaaataaatcgagccaaggaatttattaataattgtcttcatttcatattagctgcctgctgcgacttccttatgcataattttactgtttatagaaattgtgaagctatactgttgtaattgtcatgtaaattgttccctttttcatcttacttgatttggtaaactccggttacttgtatccaaataagatgggccatttgtattgcggnggctctgtataattgtacaattatctacttgtaagaagttcagattcgggcgacaacatttgtgatgcagaattaggtcattaacattgtacatcttctggcgatgattggaat

SEQ ID NO: 8429 - DNA, 524 bp, Glycine max
  unsure (1)..(524): unsure at all n locations
  Clone ID: jC-gmfl02220093b12a1
gtcctctgttactgaaacacttccatcccaaaccaatgtctgtttctcttttcggatttcctaattcataatgagtagtagaaagagaacggggatgcgggaaggttacgagtttatgccaatacgagatgttggtagatctgttggccagaaagccaagttgattggggttattcttgacttcggctttccaaagaaatccaagggcactgatttttgttgttgcctaagaataattgatgaaacacatcaccaaatctccatggctattaacatgtttgaggaaaatgtagaaagacttccccgtcttgctgctgtcggggatgtagttgtgctttgttgtgttgaggtaaaatcatttaaaggggaagtaaatgttactttcaacaagagattttcctctcttggtttatataaaggcaaagatggtgatgatttggatccttattacgtntcttcttattttcaccacgtacgtgaagacgagaagctaataagtaagcttagaaaatggctgatgaatt

SEQ ID NO: 8430 - DNA, 597 bp, Glycine max
  Clone ID: jC-gmfl02220093c01a1
ctttctttctctctcttttttttttttgccctatctcatagggtttccaccctctctctcatgcatttttgctctcacgagttcttctttgccgttgccctcttattctttgctgtatttggagccttcttttgtgtggaacagagcagatttcacctccctgggttttttgaaccgtgcccatgtctaaagttttcagctttaccggaaatgatgatttctaccatgggggccctatttatcctaacccgaaggaaccatgtctcttcttgtctcttggccgtcaagttgatgtttaccttcctcttcagaagaggtctcgcttcagtgttccatttgatatcagcggagaatggtttgagcagaagcagaagccaaagacatctattgaatctttgccagatgaatgcctctttgagatccttagaaggctgcctgcaggccaagataggagtgtctgtgcttctgtatccaagcgctggcttatgcttctgagcagtatttgcaagactgaaatccacagctaccgaagtactggaaatgaaaaccaggaaattagtgacgaaggatacctatcccgaagcttggaaggaaaga

SEQ ID NO: 8431 - DNA, 188 bp, Glycine max
  Clone ID: jC-gmfl02220093c01d1
cgacttgccggcgacttggcgtgctacacgtgtagcagtgccgcctgtgcttgggggggggggggggagggaggaggggggtagaaaagaaatagaatacgataaaccctagagtgtacgagtaggatagcagagacaaccggataagcataacggtaaaaaaaaaaaaaagcaactggaaaaacctg

SEQ ID NO: 8432 - DNA, 552 bp, Glycine max
  Clone ID: jC-gmfl02220093c02a1
ctctagattagtactcacaccttataaaagagaaagaaaaagaaaaagagagtgatgaaagcggagatgaaggatggagctcctcaagttgtgatgaatcataatggtaaccacggcaaattctcacacctacttgcttcccaagatcgtgactatcttctctctccaactggggctcaggtgaaagtttctgatcttgaagggaaagtagtgggtctattattcgctgcgaattggtacccaccttgccgtggattcacccaagtcctagctggaatctacgaggagctaaaaagcagagtccctcaatttgagattgtgtatgtgtcctcagatgaggacttgaatgcctttaatagcttctatggaagcatgccctggattgcaattccgttctctgatttggaaacaaagaagtctttgaccagaaagtttgacgtggaagccgttccatgcttaattttgttgcaacctgacgatcgtaaagagcacgcaacagttcgtgatggggttgaacttatttaccgctatggaatccaagcttatccattc

SEQ ID NO: 8433 - DNA, 215 bp, Glycine max
  Clone ID: jC-gmfl02220093c02d1
actgacttggcgggtcaatttgccgttctacatgtgtgcagtaccgcctgctgttgggggggggggggggggggggggggggatgaaaaaggtggggcggaggcggacggaggtaaacatatggcagagaatcaataacgaatactatgaggggggagaaaaaaaaactgagccacaagtaaagaccgcaggtttttaacaggggttggggcggg

SEQ ID NO: 8434 - DNA, 138 bp, Glycine max
  Clone ID: jC-gmfl02220093c03a1
ctgcaaagtagtgatttgagagtcttagattgaggatggcgtggacccagggcagattcgtgtctatcacaaagctgtcgcgcaggttgctaattctcatcctcctgaggctcagattctgtttagaagttggcgacc

SEQ ID NO: 8435 - DNA, 578 bp, Glycine max
  unsure (1)..(578): unsure at all n locations
  Clone ID: jC-gmfl02220093c04a1
atcaaaaaccctaaccaagaaagttttcaccgcatctccacctattctcaatctccacaaatcgaagaaaagagaatgagtagacgctcgagcagaactgtctacgttgggaatctacctggtgatatccgtgaaagagaagttgaagatttgtttctgaagtatggacacataacacacattgacctaaaggttcccccaagaccacctggttatgcatttgtagagtttgaagatgctcaagatgctgaggatgcaattcgtggtcgtgatggctatgattttgatgggcaccggttacgggtggagcctgcccatggtggacgtggtcattcatcctcaagagatcgatacaatagtcacagcaatggccgaggtggaccgtgggtgtctaggcgctctgatatcgtgttctaatctctggattgccctcttcggcatcctggcaggatcctaaggatcacatgcgntaggcaggggatgtttgtttttctcaagttttcatgatggaggggtactaccggtattggggatacacaaatatgatgatatgaaaatgctatcaagagcttgatgac

SEQ ID NO: 8436 - DNA, 435 bp, Glycine max
  Clone ID: jC-gmfl02220093c04d1
aatgcctgccaggagatttcgcctcgtgcatgtgagtagtgccagcttgctttgggggggggggggggaaacacgaaaatgaaggccgaagtaaagaaattcctataaggatttaaagactctagcgggggcataggtaagacgtgaggatacaaagtgatcccttcgtaaagttgtaagaggaaaaggaacgtcaaacgtggaaccgtaagaaaaccccagtaaattggaaatttaaagcggggggggcctgaaaccgaaggggatggcaaaaaatggcccgctttggttggaataggaggtaaaatggtaggaaggccgattagtaaaaccggatcccctaaaaggggccggggccggtggatgtgaatgcccaagttgctgactatgctctgggggcccctggggaggatctccacctaagccccattgcca

SEQ ID NO: 8437 - DNA, 547 bp, Glycine max
  unsure (1)..(547): unsure at all n locations
  Clone ID: jC-gmfl02220093c05a1
gagaggaagagggagtgagagagagtgttcttcgtttgctaccttctcccagaaatggttacgttcaggtttcaccagtaccaggtggtcgggagggctctcccaacggaagcagatcagcatccgaagatctaccgaatgaagctctgggccaccaacgaggttcgcgccaagtctaagttctggtattttttgaggaagctgaagaaggtgaagaagagcaatggtcaagttcttgctatcaacgagatttttgagaagaacccaaccaagattaagaactacgggatatggttgcggtatcagagtaggactggttaccacaacatgtacaaggagtaccgcgataccactctaaacggttcagttgaggcaatgtacaatgagatggcttctcgccacagggtcaggagcccatgcatccaaattatcaagactgcaaccatcccagctaagctttgcaagagggagagcaccaagcaattccacaactccaaaatcaagttcccattggtcttccagaaagttagaccacctaccangaagc

SEQ ID NO: 8438 - DNA, 297 bp, Glycine max
  Clone ID: jC-gmfl02220093c06a1
gtttactgacacttgcagagagtgtttttcttactaggttacagcggcgtgggccaagagggtgaccatggccatggtcaccaacctgctctagtctacggggttcgcggcatcatcacgacctagacatgttgaatactcttgaacgaaaaccgcccacgcacgccaccctatgcatgacgaggaactgaagtccatgtacgagcagaggctagtaaagcacggcagggcgtgcaccgcgctgcgagagaacgagaacaggatccattacttcagggacaacctgcgattcatcga

SEQ ID NO: 8439 - DNA, 223 bp, Glycine max
  Clone ID: jC-gmfl02220093c07a1
acgaaaccgtgacattgaaatccacttgtggtactatgtttatggttgctaccataaggtgcttattgtatgattgattcatcatttaccatatactatattcctaccattatttattatcattgtattgtttgagctgcgaaatcgatgagtgaggtttgaagacagaacagaggctctattatcaaagtatatgtgttgcgtgagtaaccctaactacgtg

SEQ ID NO: 8440 - DNA, 566 bp, Glycine max
  Clone ID: jC-gmfl02220093c08a1
agccattgaagggtggaaagcctcgtgttgctgattttgttcatggtaaagatggactagggaacacattcctacccccacctaaaggtgagaaaattgagaaaagtgctagtgagtttttggtagagaaagtctctgaatatcctggtgaagtatctgtgctagcacttggaccactaacaaatttggctttggcaatcaaaagggattcttcctttgcaagcaaagtgaagagaatagttatacttggtggtgcattctttgccttggggaatgtgaatcctgctgcagaagccaatatccatggagacccggaagccgcagatattgtgtttacctctggggcagatattgttgttattggaataaacattacaacccaagtccaattcacagatgctgatctcctcgaactgaaggaatctaaaggaaagtatgctcccttcttgagtgacatatgcaaattctatagggactttcatgtaaaatctgatggtgtccacggaattttccttcacgatcctgtaagttttgtggcagttgtgcgtacagatcttttcacatac

SEQ ID NO: 8441 - DNA, 395 bp, Glycine max
  Clone ID: jC-gmfl02220093c09a1
gataaagcacagaacagttgaagtgaatggcataaaaatgcatgttgcagagaaaggagagggtccagtggtgttgttcctccacggcttccctgagctctggtactcatggcgccatcagattctctctctcagctccctcggctaccgcgccgtcgctcccgatctccgtggctacggtgacaccgaagcaccaccttcaatcagcagctacaactgcttccacatagtgggtgatcttcgtgcgttaatggactctttgggtgtccaccaggtgttccttgtgcttaatgactggggagccatcataggttggtatctatgcatgtttcgccctgacaaagttaaggcctatgtctgcctcagtgtccctctcctccgcagagacccaaaca

SEQ ID NO: 8442 - DNA, 432 bp, Glycine max
  unsure (1)..(432): unsure at all n locations
  Clone ID: jC-gmfl02220093c10a1
accaactcggttcttttttttctttcaccttcacctatggccatggcttctttgattcagtgttctgcaacttccctctccgctgtccccatcactacccgtttcaccaggacccacaagtctcgccttcgctgctccttagatgctaatgtttccgacatgagcgttaacgcgccaaaagggttgtttcctccggaacctgaacattatcgaggaccaaaactgaaagtggcaattattggagctggacttgcaggcatgtcaactgcagtggaactcttggatcaaggccatgaggtggatatctatgagtcaagaccttttattggtggcaaagttggctcttttgctgacanaggtgggaatcacattgaaatgggattgcatgttttctttggttgctacaacaatctttttcgattgttgaagaag

SEQ ID NO: 8443 - DNA, 518 bp, Glycine max
  unsure (1)..(518): unsure at all n locations
  Clone ID: jC-gmfl02220093c11a1
gctgaaccctcacctcaatcttgcgtgctagctagctttattccaattcctacagaaccaaattattctgctagctagctagtacgtcaaataaaataaaataatcaaatatggcattcagcgggacccaacagaaatgcaaggcttgcgacaaaactgttcactttgtcgaaggtttatctgccgatggagctgcttatcacaagaactgcttcagatgcagccattgcaatggccttcttgcgataagcaattactcatccaccgaaggagttttgtactgcaaggtgcactttgagcagcttttcaaggaaactggaacctaccccaagaaatcccagtcgtctggaaagcctccactcgagctgaatagagcaccaagcaagctttctgccttcttctctgggactcaagagaaatgttcaaaatgcaagaaaaccgtatatccattggagaagttgaccgtggaaggcgagttntaccacatatcatgctntangtgtgcacatggagggatg

SEQ ID NO: 8444 - DNA, 496 bp, Glycine max
  unsure (1)..(496): unsure at all n locations
  Clone ID: jC-gmfl02220093c12a1
aatttgcattgatatgtaaatatgcaatggactagcaacattactaaatacattcgtgtacgatatccatatgttaaagccgtaacctatggactatcacacaacagttctgctactgattacctttgtgagtgcaaccattattctcatattcattcggagattattcaaccaaacctcagaatcagaatatgcaaagcttccaccagggcctcgtccatttcctatcataggaaacatcttggaacttggcacaaatccacacatagcactcaccaaattctcaaagatttatggacctcttatgacttttaaacttggcagaataaccaccatagttatctcctctcctcaagtagccaaagaagtactacttgaaaatggtcaagtcctttctagcagaacaattccacattcagtccatgcacttgaccatcacatatactctactgtgtggctgccaccatcagctcatggaggaaccttangcgagttt

SEQ ID NO: 8445 - DNA, 566 bp, Glycine max
  unsure (1)..(566): unsure at all n locations
  Clone ID: jC-gmfl02220093d01a1
ttcggctcgagattttccctttcgtcttgagagagagaatcggtgtattgcatctgaattggaggggctttggttcacagaaaataggaaaccaaaccctaatataagtcccaaatcacaatcacagcatcagaagagaggtctctcgccgattgttttgtatctgcagttcactccttacgaattccgagtatctccgtttgctgtggcctttcactttcttctctaatcagcgcgtagaaccacaacaacgcttcgcaggaccaaaagaactgttatagtgtgtacaaactgccggcgaatatggaagaagatgattatgtggagtatgtgcccgtggccaagcgtcgtgccttggaagctcagaagattctccaacgcaaagggaaggcctctgctgtcactgacgatgatttggagaaacaaagagtggctgaaactaagcccagtcttctggttaaagcgtcgcagctgaaacgagagcaacctgagatcagtgtgaccgagcagattgttcaacaggagaaggagatgattganaacttgtcagataggaaaaccctatg

SEQ ID NO: 8446 - DNA, 331 bp, Glycine max
  Clone ID: jC-gmfl02220093d01d1
tgacgggaatttggtttgccgtgctacactgttggagtgccgccttcttgggggggggggggggggcactaacaaagaggtaaaggacgagtatgcgtagggaaaggcggtggcgttgcctataacgaggtacaaagggacaaggccaaaaccgtcaacgtttaacaagggactacagccgtacaggttataatagtagttcagcggaaagggtaagcacgcaaaaggataaccatagggcatagtgacaaattacacataactgcgagatgtttaggtgtagaggttaaagagactttaaaggtacaagatgcaaggatgtgggggtttt

SEQ ID NO: 8447 - DNA, 566 bp, Glycine max
  unsure (1)..(566): unsure at all n locations
  Clone ID: jC-gmfl02220093d02a1
cactttcttgttttctctctcaccctcatatccatcatcttccacacccatggagcgttctctgagcaatcaataatcaagttacccacagaccaaccaagggtagagaaactgacccacttgcattttttctaccacgacatcttagagggcaagaacatcacggtggtgaaaatcatcgagccatcagcgagcgaggttcgtgaagcaactgggtttggaaccactttcatgatggacaatgttttgaccgagggtccagagctgagctcgaagcacgttgggagggctcaggggctgtttggcttggcctctttggaggaccgtggaatggtgatgctcattaacttggctttcagtgagggtgagtatgctggcagcactctcagcatgcttgggaggaaccctgttcaggacactgttagggaaatgcccattgttggaggcacggncgtgttcaggtttgccaagggctatgccattgccaagagtctttgggaaatttctgacaatgagcattttgtggtggagtatcatgtcactggttctcatccttagatctatat

SEQ ID NO: 8448 - DNA, 201 bp, Glycine max
  Clone ID: jC-gmfl02220093d02d1
cgacttggcgagtaacttgccgttctacatgtgtgcagtaccaccttcttggggggggggggggggatggcaaaatgtaagaaaagggcaggtagggagtagattagtggcaacagagggaacttgaaaagggcaggatgtggaataaaacatagagaacagtgaaccagcacaaatacgcatagcagatgttattttaaa

SEQ ID NO: 8449 - DNA, 591 bp, Glycine max
  unsure (1)..(591): unsure at all n locations
  Clone ID: jC-gmfl02220093d03a1
gaaaaaccatggcaataacactcaacaatggcttcaagatgcctatcattggattgggcgtgtggcgcatggaaggaaacgaaatcagggacctaattctcaattccatcaaaattggttatcgccattttgattgtgctgctgactacaaaaacgaagcagaagttggagatgcgcttaaggaggcttttgatagtggccttgtgaagagagaggatctcttcattaccaccaagctttggaattctgatcaaggccacgttcttgaggcgtgtaaagacagtctcaagaagcttcagttaacgtatctagatttatatcttgttcactttcctgttgccgtaaggcatactggggttggtaatacttctagtcctttgggtgatgatggggtcctggacatagataccaccatatccctggaaacgacctgncatgcaatggaagatcttgtttcatcgggcttggttcgcagcatagggatcagcaactatgatatctttctgaccagagattggttagcatattccaagataagcctgctgtaaatcagattgaactcatcatacttcagcgtgattcttagtcaat

SEQ ID NO: 8450 - DNA, 476 bp, Glycine max
  Clone ID: jC-gmfl02220093d03d1
ttgccaggcaatgatgatttgccgtgctacatgtgtgcagtgccgcctgcttggggggggggggggggggggaactaataataggtacaacgtgtgtggagggacgttatcacaggccagagcccagcacaacagcagggggtaattagtaataaacaaacgggataggagtaaagaaatgcactgatgaaccacttgcaaacagtactggagattaaagtgcaagtggaatataaccgtaaatacttagcagatacatggaccaaccctaggtgtatctagataaagtgagcttttaaaatatactgccggcaggccggtcagaggggtgagtgagatggttaagcactgttagcgttgtgggacataatgtaaaagtcaaaattgcaaacggtgtgggtaattgtgttacggggcatcagggaacaagcattatacgcggttgggcaaggttttactcgagctgcagtgccctc

SEQ ID NO: 8451 - DNA, 487 bp, Glycine max
  Clone ID: jC-gmfl02220093d04a1
cttttcttctatttttatttctatccaatcatccatggccgaggaaccccaaaaaccagcctccgctgaagaagtggtcgctgttcctgcggagaacccaccatctgaagccgaagctgaaaacatcgaagcagagaaggcccagagtggtgtagaagacaagatttcccagtcggtttcgttcaaggaggagaccaacgtggttggcgacctccccgaggcgcagaagaaagcccttgatgagctcaagaagcttgttcaagaagcgctcaacaaccatgagctaactgctcccaagccagaaccggagaagaagaaaccagcagcagagaagaatgaggaagttgaagtgacagaagggaagaatgaagctgaagtcatagaagagaagaatgaagtggaagtgacggaagagaagaaggaaatagaagttacagaagagaagaaggaagctgcagtcatagaagagaagaggaaagtggagtga

SEQ ID NO: 8452 - DNA, 416 bp, Glycine max
  Clone ID: jC-gmfl02220093d04d1
cgactgtgccaggtaagttttcctcctacatgtgagtagtacctcctgcttggggggggggggggggggggggggggggggggggggggggggggggggggggggtgggggggggggggggtgggacgggggaaagttcccaaaaaccaattttgcattcagggaaaataaatgggttccctagaaaacgggggtttttggtaaatacatgggaaggccggttgcgtaaaagtaattttcatttaaaaagcatttttgaggggttaacctaaactataaacccggggatttaaggtttaaatttattggccaaaaaatccaaggaattcctattggtaaccccaggctttcaattttaactgcgcaataaaggccctacttcagggcaaaaaaaagcattttctcgggaaaagagg

SEQ ID NO: 8453 - DNA, 581 bp, Glycine max
  Clone ID: jC-gmfl02220093d05a1
ctcctactggaagaattcacaaaggagtatgttcaacctggatgaagaatgccattcccttagagaaaagccgtgactgtagttgggctcctatttttatcagaacatcaaacttcaagttaccagctgatcattccattcctattattatggttggtcctggtacaggcctggcacctttcaggggatttttacaggaaagattggccctcaaagaggatgccgttcaacttggtcctgcattactcttctttggatgtaggaatcgacaaatggattttatttatgaggatgagctaaagaattttatggaacaaggtgctctgtcagagttgatagtcacattctcgagagagggacctgaaaaggagtatgttcaacacaagatgatggataaagctgcaaatctgtggaatttgatttctcagggaggttatctttatgtttgtggtgatgctaagggcatggcccgagatgttcatcggactcttcataccattgtccagcagcaggaaaatgtggactcttcaaggcagaggctatagtttaaaaactccagatggatgacgtattctagagat

SEQ ID NO: 8454 - DNA, 498 bp, Glycine max
  Clone ID: jC-gmfl02220093d06a1
cacttcacctcaatgccagaaaacatctttacaagggctctcacttcatgaagccaaaaggggtgtttcagaatccttcctagttgagaacaacaatggttcctccattgctggaaggagacttgagatcacagcacgaactgctggggcttcaaagacaattgaggtggaggttgacaagccacttggcctcaccttaggccaaaagtctggtggtggtgttgtcatcactgctgttgatggtggtgggaatgcagcaagagcagggttaaaggcaggggaccaagtcctttacactagcagtttctttggggatgaattgtggcctgcggataagcttggatttactaaaaccgccatccaagcaaagccggactctgtctactttgttgtcagcaggggtgctgaagtagacgttaaaaagctcacaaagcgacctgctcctgctcgatttggaagaaaactgaccgagactcaaaaagcgagagctactcacat

SEQ ID NO: 8455 - DNA, 528 bp, Glycine max
  Clone ID: jC-gmfl02220093d07a1
gcattttgcttgttatttcacgcgttctctctccaatttggacctccctttccttcgttcctcactcactgcaacggcgccggagatccgtcgctctcctcctccaccaccaccgcgatgggcgccaattccatgctcgccgagttctctcacgatctcgacgaccagatctcccagctcatgcagtgcaagccactctccgagcaacaggtccgaggtttatgtgagaaggctaaggagattttaacggatgaaagtaatgttcagcctgttaaaagccctgtgacaatttgtggcgatattcatgggcagtttcatgatcttgctgaactgtttcgaattggagggaagtgtccagatactaactaacttgttatgggtgattatgtggaccggtgttattattcagttgagactgtgtcactcctcgtggcactgaaagttcggtatcctcagcgaattactattcttagaggaaaccatgaaagccgtcagattacttaaagtttatggatttatgatgaatgc

SEQ ID NO: 8456 - DNA, 535 bp, Glycine max
  unsure (1)..(535): unsure at all n locations
  Clone ID: jC-gmfl02220093d08a1
cgtgagccttagcgagcaacagcttgtggattgcgatcacgtgtgtgatccagaagaatatggagcgtgtgactcaggctgtaatggtgggttgatgaacaacgcatttgagtacatacttcagtctgggggagtacagaaagaaaaggactatccatacaccgggagagatggcacctgcaaatttgacaaaaccaaagttgcggctactgtatctaattacagtgtggtttcccttgatgaagaacaaattgctgcaaacctagtaaagaatggccctcttccagttgctatcaatgcagtttttatgcagacatatgttggtggcgtctcatgcccatacatctgtgggaagcatttggatcatggggttcttctagttggttatggtgaaggtgcatatgctcccattcgttttaagaacaaaccttactggatcattaagaattcatggngcgagagctggggagagaatggatattacaagatctgcagaggtcgaaatgtgtgtggagtagattccatggtctcaact

SEQ ID NO: 8457 - DNA, 341 bp, Glycine max
  Clone ID: jC-gmfl02220093d09a1
caccgacaaaaaatggaactttcactatttgaattcattttccgttccccactccccgatattgccatccccacacacctcccattgtactcttactgattccaaaagttgtcacagttacatgaccgttcatgcctcatctacggcgacgccagcgaaacccttacctacgccgacgttgatctctccgctcgccgcatatccggcggcctgcacaaaatcggcatctgccagggtgacgtcatcatgctcgtccctcgcaactgcccgcagttcgcactcgccttgctgggcgccactcaccgtggcgccgtagtcaccacccgccaccccttttacac

SEQ ID NO: 8458 - DNA, 410 bp, Glycine max
  Clone ID: jC-gmfl02220093d10a1
gcaaaaagaaagaatcccaggcgaggagaaagatggaggggaaggagcaggatgtgttgttgggagcgaacaagttccccgagagacagccgattgggacggcggcgcagagccaagacgacggcaaggactaccaggagccggcgccggcgccgctggttgacccgacggagtttacgtcatggtcgttttacagagcagggatagcagagtttgtggccacttttctgtttctctacatcaccgtcttaaccgttatgggagtcgccggggctaagtctaagtgtagtaccgttgggattcaaggaatcgcttgggccttcggtggcatgatcttcgccctcgtttactgcaccgctggcatctcagggggacacataaacccggcggtgacatttgggctgtttttg

SEQ ID NO: 8459 - DNA, 523 bp, Glycine max
  Clone ID: jC-gmfl02220093d11a1
attcaccatttttctcttttccgttctgttctgttctgctttgcccctcttttctcccaatgactactcaccattctctctctttccaactcctctgagcctcgctcgttaggatctctgtctcttctcggagacccacaaaacaatgtcttatttatttccttctcaaacaaagaacctctatttccccttggctgctcagatctagtattcctcaagtcacaacctttttttgttccgttagcggtgtgagacatgagtaaagaagaattcttgaagatacagaaatgtgttcttaaagtgaacatacactgtgacgggtgcaagcacaaagtgaagaaaatcttgcagaaaattgatggggtgtttaccacagagatagatgctgaacaagggaaggtgacggcttcagggaatgtggatcccaacgttctgatcaagaagcttgcaaaatctgggaaacatgcagaactctggcgttgcacctaacccaacaacaacaacagtgatcataatcattata

SEQ ID NO: 8460 - DNA, 505 bp, Glycine max
  Clone ID: jC-gmfl02220093e01a1
ctttgcttttgttttgccaattctgctgctgtaactgctaatgaagactctacagctggaactgaggtgaacattgatggcaagcctttacatacaaagccatttccaatagaggaaaagacacttccaataccgttgtttaagccctctaccaaaattggttccaattgttacacctataccaaatcctctgcctatcccagttttccaaaagcctataccaaagtggattccagatattaagcctataccaaatccaattccaattccagtattcccaatcccagtgtttaagaagccaattccagatgttatgccaataccaaagccatctcccatagtggaaaaaccaaagccaaagccttgcccagtagccaagaaacctattcctactccggtgattaagaagcctataccaaagccatcttccatagtggaaaaaccaaagccaaagccaaagccttgccccgtagccgagaaacctattcctacgccggtgattaag

SEQ ID NO: 8461 - DNA, 487 bp, Glycine max
  Clone ID: jC-gmfl02220093e01d1
tgccaacaaggcgatttgccgtgctacatcgttgcacgtttccttcttgggggggggggggggggggggggggacgaaattaaaattacaggtgatatagtaggttggcaggacgacagtagtaagtcacggataagactcctaatagggcctacgggtagacacctaaaaaaatggggataggttaaggtaatggttaacagaaagataagaccagatagctaaatttcgatactaggcagtgtcacatatacctcgtctttgcgaaagaggcgatgccagagtgttgggtaaaggccacgccagaatggtagaactagaacaaaagagagctaagaaacaacgccgaggtacccaataagaacgggggcaacaaacctggagagacctgggaataaagcaaagggcggggccgagaacttgcagtagaaaaagccaaaagcctgagccaagaacgggccaaaggccaagaacgccacctggggga

SEQ ID NO: 8462 - DNA, 602 bp, Glycine max
  unsure (1)..(602): unsure at all n locations
  Clone ID: jC-gmfl02220093e02a1
cacgaacaagggtgtgttctgagtcagcttcggcaacggttcctagcggcagcaccaaacaagtcgagtcgacgcaagctgcattgctttctcaatataaataagtttaattcgagacgtcatcttactctcacctgaaaaccattcattcattgatcaaactcccaaaacaatggcttctttcaatctctcttattcttcctcaccagccctctcatgtcctcgggcgagcaaacaattcaaattattcaatgatgtgccttttgtccgaatgaattctaaatttccctcaagtgacaatgctattgggagaattaaagctaagttgatctctgngagggggtgatctactttcctatccaaatggcaatggcattgtgataggtaaaaatctggttggtgatgaatctgttcgaattgaggtacagccgaatagaacactggcagcagacacagggctaacaagcaatgttttctctattgacaacgatgaatttgatttggacagccccacagcaggttttgcttccatttctgaggcaattgaagacattcgccagggaaagatggtagtggttgtggaccgataagatcgagaaaat

SEQ ID NO: 8463 - DNA, 497 bp, Glycine max
  Clone ID: jC-gmfl02220093e02d1
agacttggccgggtaacttgccgttctacatgtgtaggagtaccgccttgcttggggggggggggggggggggggggggggggggggggggggattcgtaacttattaaggggaattaggactgagcataaccgataaaaccaagggagggagaagatatacgacactggtaaagtagaatggggtgagtagccataggagacaccaatgcgcagatagcacgaaagcgattaaaaacaagcaacaaatgacccttaagcatggttacacgttacaaagcagcaattgtgaaaacctattaaacaaaaaagaatttgcaaagactaagctttggcgtagcctatgagcgggtaacaagtaacagcaatagggggccgacacttgcttgcttgcaacaggagtacataaagcaagaacaaaaagtaaagtataaaggcaagaagccgggtgagaagtgagaatgggcgccaggtagtagtaagagccaaagtgaccgt

SEQ ID NO: 8464 - DNA, 592 bp, Glycine max
  Clone ID: jC-gmfl02220093e03a1
tttagatttcgtgaagcccaccattctaaactcaaaacccagcaacaaagacgagactttgaccctctccaccacctcctcctcctccttcacgtcctccgtcaccaacgacgccagcgtctccgacggcaagatcggcccttttctccctccctccgccgccaagccacctctctcctccgcccaccggaaaaagtgccgcgacgctgccgccgcactctccaccaaaccctcctgccactgctccaagaaaaggaaatcacgcgtgaaacgaacgattcgtgtgccggcggtaagctccaagatcgccgatatcccatcggacgagtactcgtggagaaaatacggtcaaaaaccgatcaagggttcaccttaccctcgagggtactacaagtgcagcaccgtgagagggtgtccggcgaggaagcacgtggagcgagcgcaagataaccccaagatgctaatagtgacttacgagggtgagcaccgtcacgttcttccgttaactgccgctgccggcgttagtttcggccattaatagagttgagtaatcgacgtcgtcgtttcggaaacctgacggggggacgtagat

SEQ ID NO: 8465 - DNA, 480 bp, Glycine max
  Clone ID: jC-gmfl02220093e03d1
actcaacccgtgggaatttgccgtgctacatgtgtggagtgccgccttgcttgggggggggggggggggggggggcaaaaaaacaaggaagaagggctagaaaacaaaaatacagcacagtatgagaagggtaggggggtcacattgcgatgaatgggatgggcccgtaaagggatataaaacgttgtcgtaatagaacacatgttcgtaaacattataatctaaagcggcctgggtagacgggtaggtttgtggggggttcgttatcaattcaattgtcggtctagttcttcggattcgtatcagttcatccgtagtgaatcgtttttcgtaccgggttcaaatcatcatcgtcaggatgtaatgtgaggaagccttcaaatgaatcttcctactcctacggaatccaacaatcgcatccgctgtatttgtcgaacgtatgaggactagtggccccggagtggctctgtctgtatcgct

SEQ ID NO: 8466 - DNA, 587 bp, Glycine max
  Clone ID: jC-gmfl02220093e04a1
aagcaataaattttaatgaatttatttttaccagcttcagatacctgaaaagagaagagcgagatggcgtcggtggtaaagaacgtactcaaatccgtcagagaaaagggtttcggcgctttcctcagagagctcaaggatgaaagctacctgagatgccttccggatggaaatctcttgcaaaccaagatccaatattggggcaacgcttgttggtgttgataaatttggtaacaagtattatgagaagcttggagacacacagtatggaaggcacaggtggattgaatatgcagagaagactagatataatgcctcccaggttccagctgaatggcatggttggctccacttcataaccgatcacacaggagatgagcttcttttactgaaaccaaaaaggtatggtgttgaacacaaagaaaatttgtctggggaaggtgaacagtatatctatcattccaaaggacatgcacttaatccagggcagagaaactggaccaggtaccaaccatgggagtccaaggcttgaactatgaatatggtgcttgtgaagttgcgatgttctggatgctttttttttttta

SEQ ID NO: 8467 - DNA, 464 bp, Glycine max
  Clone ID: jC-gmfl02220093e04d1
ttccctgccagcaatttgtgcacgtgtgtggtagcactacctcctgcttgggggggggggggggaaaagatagaaagatttcggtaaaagaagataggacagaaaacaggaggccaaagaacgctaacgttgggaaatatcagtttagaagatagacacgaagcatacgagaggggaacacagggcaaccgtaaactcaagggagtgctgggtattatgaaggtcggggagacggaaaaacaacaaaaaaatgttgggatattgtggaaagcaacctaaaataaaggggtaccaggaaaaaaaaaaaactagttacaatagcgctaatgtactactattagaggtagacggtaacttggccatgtttagccggccgattgccgttacgggtgtgctttgccaggaacgctagcgttgggccaagcagacagagatgcggtattgggtttacatagaggggtggg

SEQ ID NO: 8468 - DNA, 547 bp, Glycine max
  unsure (1)..(547): unsure at all n locations
  Clone ID: jC-gmfl02220093e05a1
ctctgcgactcatgcaaatcagccactgctaccttgtactgccgccccgacgcggccttcctctgcggcgcctgtgactctaaggttcatgccgccaacaagctcgcatcgcgccacccgcgcgtcgtgctctgcgaggtgtgcgagcaggcgcccgcgcatgtgacctgtaaagccgacgccgccgcgctctgccttgcctgcgatcgcgatatccactccgccaaccccctcgccagccgccacgagcgcatccccgtcacgccgttcttcgagtccgtacattcagtcaaggcctcctcgccgatcaacttccaccaccgcttcttctccgacgccgacgctgatgctgacgtcagcaccgaggaggccgaggccgcgtcatggctgctacctaatccaaagacagatctaaattcgtctcagtacttgttctccgaaaccgaaccggttccttacatagatctggattacgcggccatggatccgaagacggagcagaaaagttccgncaccgncgacggcgtcgttccggtgcagagcaact

SEQ ID NO: 8469 - DNA, 433 bp, Glycine max
  Clone ID: jC-gmfl02220093e06a1
tcctgctgatatggccaagaagaaaacaagtgtaatttcaaataactggtttcctgtttgggatgaagagtttgatttccctttgactgttccagaactggctttgctccgcatagaagttcgagagaatgataagagtcagaaggatgactttggtggacagacatgtttgcctgtctcagagctaaaatctggattccgatcagtccctctccatgatgaaaagggtgacaaattaaaatctgtgaagcttctgatgtggtttcagtttagatgaattataggatcagccatataataatcttagataatggatatgaggtcattgtaatgataattatatttatctttagctgcttgcaatggtatttctggctttactatgttatattttctgcaccatcaacatcaatataaaacagtattaagaact

SEQ ID NO: 8470 - DNA, 446 bp, Glycine max
  unsure (1)..(446): unsure at all n locations
  Clone ID: jC-gmfl02220093e07a1
cgaaattggagcagaggagtggcggaggacgaagtcgacggcgacaatggttaacgaaacggtgcggtggtgtgctttgttgtagtcgtctccgatcatcatcgagaatgcgcaatctggctgcacctcattccttgggggttttcatctttcgccccaataagcctccttttctcactctcccctcactctctcgaagatctctcccttccatccagtgcggtgcagttcaattccgcccctgcatcgatatccacaaagggaaagtgaagcaaattgtagggtccacccttcaagacttgaaaggctccgatcccgtcaccaattttgagtctgataagtcagctgctgaatacgccacgctntacaagcaagatggactcactggtggtcacgtcatcatgcttggtgcggatcctttgagcaaagctgctgcccttcaagca

SEQ ID NO: 8471 - DNA, 453 bp, Glycine max
  Clone ID: jC-gmfl02220093e08a1
ctgcaatcataatgttccagagagaatttgccatgagactggttgctcagcctggtgataaactatattgtcgtctcacagtcaacactcaactacatgctcgagtcttccacctcctcaaagttggaagaaacaacttcaggccccctcccaaggtggattcctctgtggtgcgaattgagcccaggaaaccccgtattgaagttaagcaaaaggagtgggatgggtttttgcggatttgttttaacaggaagaacaaaacacttggttcgatatttaggcagaagagcgtgatctccttgcttgaaaaaaactacaggactgtgcgggcactggaactcgggcaagaagattcactgaaggaagtggatgctaaaatggacttctctagttttggtgatgatcaaagtatggagatggatgatgatggagcagatgatgatgaaatggaag

SEQ ID NO: 8472 - DNA, 483 bp, Glycine max
  Clone ID: jC-gmfl02220093e10a1
aaaaaattcaagatccaaatgttcttcttaaacttttaatttttatttaatcggcaaataatatatatatatatatatatatatatatatatatatatatattatagaaggagtaccagaattatttgaaggaaaagtttaaagctcaaataaaaagttactgaattcttaaacatatagttagagattctttgttgttattgaataatagttagttagaggtttaatcttcatgattgtatgtatgaaaaaagatatgtagtgagactttcggttctatgaataaatttttatactttgaaggattagtcttttagtcttactcaaaagatatcttaaattgaaaaaaaaagtgattatttatcatgcacacactataattacattaaataaaatattattcaattcttggacaagatagttcttatttgacttgttctgattaattggattggcttgatccacatttgaagttttggatca

SEQ ID NO: 8473 - DNA, 392 bp, Glycine max
  unsure (1)..(392): unsure at all n locations
  Clone ID: jC-gmfl02220093e11a1
tacaaacaatgtcacttctctacaaacctaagatacacagcttacaattttacacactcctatgtacaaatgtgtgtatttattattattattattattattattacgcatgtacgtagcaaatatatcacaggttatcagtcaaatgtttataccaaggtccatgaacactaactgaaatagtggctgccacaatcaaaacaccagcagtttccactaccttatcagtcagaataccagccccaactttcatgagagccatttctgctaatttcctcccacggatcccactttcaccaagcacaacgccgcgcaaagcaatataaattaattnaaaaaaaaaaaaaaaacagaaataaaaaaccacttcattgtacattaaaaaaatattg

SEQ ID NO: 8474 - DNA, 522 bp, Glycine max
  unsure (1)..(522): unsure at all n locations
  Clone ID: jC-gmfl02220093e12a1
gtttctgtctctgtgtttgcggctgaggattccgaacgagcgaccttcttcgtttctcgcaaagtttaagtcatcatgggtaaggaaaagactcacatcaacattgtcgtcattggacatgtcgactctgggaagtcaactaccactggtcatttgatctacaagcttggaggtattgacaagcgtgtgattgagaggttcgagaaggaggctgctgagatgaacaagaggtcattcaagtatgcctgggtgcttgacaagctcaaggctgagcgcgaaagaggaattaccattgatattgctttgtggaagtttgaaaccaccaagtactactgcacagtcatcgatgcccccggacatcgtgactttatcaagaacatgattactggtacctnccaggctgattgtgctgtccttatcattgactccaccactggtggttntgaagctggtatttctaaggatggacagactcgtgagcatgctcttcttgctttcacccttggtgtgaagcagatgatc

SEQ ID NO: 8475 - DNA, 586 bp, Glycine max
  Clone ID: jC-gmfl02220093f01a1
agctgacggtgctgatcgccggagacctcacccatcattcccaagaacttgacaacttcctggcacaatatttgatagttttgtgtacatttaaagaacagcttcagcaacatgtcagagtccacgccgtcgaggctgtcatggcctgccgtgatatcgaaaataccttacaagctctcactggagtgagtttgggagaaggaactggtgcaacaatgtcagatgacgaagatgatttacagatggatttttctttagatcaatctagcgctgaagggcatgacatgatgggatttggtcttcctacagaatctgaaaggtcattgatggaaagagttcgccaggaactaaagattgagctgaaacagggtttcaagtcaagaattgaagatgtcagggaagaaatattaaggaaacgtagagctgggaaattgccaggtgacacaacttctgtgttgaagaactggtggcagcaacatgcaaagtggccttacccaactgaagatgacaaggcaaaacttgtggaggagacagggttgcagcttgagcaaattaatattggttcatcaaccaaaggaaacgtaac

SEQ ID NO: 8476 - DNA, 496 bp, Glycine max
  Clone ID: jC-gmfl02220093f01d1
tgacttggccgggagatttgccgtgctacatgtgtaggagtgccgcctgcttgggggggggggggggacaagaagacaatactcaagagggtaagtagtgcgcgacgacgaagaagaaggtggttcttccgtacaaaacgactaaaataagggataaacatacggaaaaacacacctaatggaattatattgaaaacaaaacgggctagatcggaacggttataaagggatacttacttgtcaagggcgggtactgagtggataagaggatacgaatttagtgatgagtggtgcaagttggacgcccatgatatgggagtactaagaactagcgttggagagagacggcgcggctggctgactgcggttatagacggacccataaaagaagagaagcgtgattgtggctcgggccatgggaaacaacgaattcaggcacacggctgcgcttacggatcgggttgggccagcagcaattaaggaggaagggctggta

SEQ ID NO: 8477 - DNA, 450 bp, Glycine max
  Clone ID: jC-gmfl02220093f02a1
atactgttccagccatacagtcgagtggcatcaagattatagaggagtaccaactaagtcgcaagctagatactcaagcctattgtgatcatacctgtgtaatagcaaaagaacatttggagcctaacttatgtgggctcactgttgagaatgctttccaaaactatgacgttgttcactttatatcaccatgactatctcattccttattatgaggaatattaatgcatataccacaaagacttatgctacatgaaccatattcatcttgaaagatgatggaactttgacaccattggccatatgagctaatgaatgccacatactcagggtgaagaatatggacctgttagcgaatcctacgtgccagccagcgaaagagtggaatgcttatataaggttactggaaaggctgatgttgatggaatgatgcatgctaccatcaaataa

SEQ ID NO: 8478 - DNA, 605 bp, Glycine max
  unsure (1)..(605): unsure at all n locations
  Clone ID: jC-gmfl02220093f03a1
cccaaatgcaaacataattcatttacatctttctttcttctttctgcaaatacttccatttcctgatttcctcaaaacaacaacacgtttaattttcatctccttccttttctatcctattcctctccctattattattattggtacatcntttttcttcttcctctgatacaaagacaccatgagaggacaggaagatcagcaatctagggttttctgtgagctctcggctctggtcttcaaccttctccggtcaccgtcgatcgtgccggagcctccggcgaggcgttcgccggcgggggcgcagattactccggcggggttcgcgtcgctactgctagggatttcggtggcgctgatgctgtgtggatcggtgactttcttcatcgggttcatgctgatgccgtgggttctcggattggttatggtgttttacgtcgctggcgtcgtttcctctctctccgttctcgggcgttctattctctgttacgctacgccacgtaaggatctccctgagtggaaacttatataaaaagaataataatcgaattgaccagtactatactggtntgtgcctgcctgctcatgctgccattagacaatga

SEQ ID NO: 8479 - DNA, 489 bp, Glycine max
  Clone ID: jC-gmfl02220093f03d1
ctgcgttgccgggagatttgccgtgctgcatgtgatgacgtcctccttgctttgggggggggggggggggggggggggggggggggggtaactcacctagaatgtgcgttgtacgggagagagagagagagagagagagccgtgtcgcacgtagttcagtagatgggtttgggtaggggagacgatagagaagtagagattagcgggccaaagccaaaaaaaagaaacaaaagtacaacttgaaaaggtaaaggggataaaacggagacgaaacataaagttacgaagccatagtaaaacatacgactgcccaataacgttgtaaggtggcccctgcctgaggccgaaagaaaaacacaacttaaagttataaaacttgcagagttagcatgttgctggtgacgcacacaacggtacgaagtggtaggcggtgagccctactagcactacctacctataaaattacgagacgatgccgtaaggtcagga

SEQ ID NO: 8480 - DNA, 590 bp, Glycine max
  unsure (1)..(590): unsure at all n locations
  Clone ID: jC-gmfl02220093f04a1
ctctttcttcccaccttcctctccttctttctttctgcttaaggtctacacaagttctctgcttcttctccccctattgacctttggtcatcacaagcgaaaacccacttctggatcttctggtgtaaaggccattagaagctttagaaattntctaattgagttggtgtatagtgttgaagggggtgaaatctggagcccagtttgttagttgttactcacttcatctgtaagctcataggttgaaccctctttttttggagacttacctgggaaaagatgatgatgtttgaagatatggggttttgtggcgatttggatatgttatgtgtttctcttggagagggggatattgctgtgagacaaactgaaccggatcctgtagttgaggatgactacagtgatgaagaaattgatgtggatgaacttgagaagaggatgtggagggacaaaatgcgtcacaagcgattgaaagaacaaaccaagtccaaggaagggactgatgcaacatagcanaggcaatcccaagagcaggcatggaggaaaaagatgtcaagagctcaagatggaatactgagtacatgctgaaa

SEQ ID NO: 8481 - DNA, 574 bp, Glycine max
  unsure (1)..(574): unsure at all n locations
  Clone ID: jC-gmfl02220093f05a1
aaaatattattaagatgatcaacattattggagcacttgttctactctttgcatttctcttcctcagttgtgtgtatgcacaagacacaacaacccttgtgcctgcaatcataacttttggtgattctgctgtggatgtagggaacaatgactatcttcccacccttttcaaggctgattaccctccttatgggagggactttgttaaccaccaacctactgggaggttttgcaatggcaaattagctactgatttcactgctgacacattgggtttcaagacctatgctccagcatatcttagcccacatgcatcagggaaaaacctccttattggagcaaactttgcttcagctgcatctggttatgatgaaaatgctgctactttgaatcacgcgattccgttgtcccaacagttgagttatttcaaggaataccaaggcaagctggccaaggtagctggcagtaaaaaagcagccttaatcatcaaggatgcgttgtatgtgctcagtgctggaagcagtgactnttgtgcaaattataatgtcaatccttggatcaacanagtctacac

SEQ ID NO: 8482 - DNA, 539 bp, Glycine max
  Clone ID: jC-gmfl02220093f06a1
gaagtaatggcgaacatagacatcgaagggatcttgaagcagcagcagccttatgatgggcgcgttccgaagacgaagatagtgtgtactttgggccctgcttctcgatccgtagaaatgaccgaaaagcttctgagggcagggatgaacgttgctcgtttcaatttctctcatggcacccacgactatcaccaggaaaccctcaacaatctcaagactgccatgcacaacactggcatactctgtgccgacatgcttgacactaagggacctgagattcggactggttttctgaaagatggaaaacctattcaacttaaagaagggcaagaagtcaccataactactgattatgacattaagggggatccggagatgatatccatgagttacaagaagctgtctgtacacttgaagcctggaaataccatactgtgctctgacgggacgattactctcactgtcttgtcttgtgaccctgatgctggtactgttagatgtccgtgtgaaaacactgcaacgtgggtgagagaaaaatg

SEQ ID NO: 8483 - DNA, 519 bp, Glycine max
  Clone ID: jC-gmfl02220093f07a1
ctgtttctcaatcgttagatctcatcttatactcaccggcgagtccatctcgcgccagcgtcgacgccgctccggcaaccgctccggccaccgcctttggttccctcactttctcgtccttcttcttctcagaaatatgccttctcagaaagttgaaacgggtcatcaagacacggtccatgatgttgcaatggattactatggtaagaggctggccacggcttcatcagatcacacaattaagataattggggtgagtaatacggcctctcagcatctcgcaacattgactggtcaccaaggacctgtttggcaagtggcgtgggctcaccctaagtttggttctctacttgcatcgtgttcctatgatggtcgtgtcattgtttggaaggagggcaaccaaaatgaatggactcagctcatgtgtttgatgaccacaagtcatctgtgaattcggttgcttgggcgcctcacgagttgggtctttgcttggcttgtggctcgtctgatgggaatata

SEQ ID NO: 8484 - DNA, 504 bp, Glycine max
  unsure (1)..(504): unsure at all n locations
  Clone ID: jC-gmfl02220093f08a1
aaaaagctcttttccttctaaatttgattccttagttcagcattctattattatatatggcttcttcaccttcctcagaaaacaaaaacctagagggagtagctggtggtgccggagagaaacccattccacttggtgagaacgttctgcagaagcatgctgcattctttgacttgaataaagatggtgtcatctacccatgggagacttttaaagggttgcgtgaaatcgggactggggttttgctgtccgttggaggtgctattttcatcaatgtgtttctcagtcagagtactcgtcccggaaagtttccatctatactttttccaattgaaattaaaaatatccaacgcggcaaacacggcagtgacactggagtctacgatactgaaggaaggtttgtaccttcaaaatttgaagaaatttttaacaagcatgcacatacacatccaaatgctttgacatatgatgagttaacggagatgataaggcnaatagagagcc

SEQ ID NO: 8485 - DNA, 467 bp, Glycine max
  unsure (1)..(467): unsure at all n locations
  Clone ID: jC-gmfl02220093f09a1
cacacacgcacagatctgatctatctgaagctgaaaacgccgacgcccgacggtgatgatgaagatggggtcctcaccttcacgttgctccttcttcctattcctcctcctcctagtggcgctcttcccctcgtcgctctccgagatccggttctccgagatccgaaacgacgatcgctccatcgttcccttcgatcagtttggattcacccacaagggtcgccttgagctcagcgtttccaaaatatcactctccaattccaatttggacctctccaaggtgggattcttcctctgcaccctggattcctggcttcatgtcttccagcaactggaggatggcgagattcggtgcgcccttcaatccgatctggtcaagtccgtctacaccttcaattctctcaacggcaaggactctttcagcacgctctancaagaagaaaccgacgccgatcagtacaacctcg

SEQ ID NO: 8486 - DNA, 521 bp, Glycine max
  unsure (1)..(521): unsure at all n locations
  Clone ID: jC-gmfl02220093f10a1
gatgcaggaagcgacgaaggtgataataatcggtgccggaacttctggtatcgccaccgccggttgcttaacgaagcaatcaataccttacataatgctcgagagagaagactgtttcgcttcgctgtggcagaaatacacctacgatcgtctccaccttcatttgaggaagcaagtttgcgagttaccgcacttaccgtttcccaagtcttaccctcactacgtgcctcggaagcagttcatagactacttgggaaactacgttaaccactttgagatcaagcctctgtaccagcgtgcagtggagttggtggagtatgatggatggaaagggatttggagagtgaaggctcagaatagaagatctggtgagcttgaagaatacgctggaaagtacctggtcgtggccagtggcgaaaccgccgagcctcgtctgcctcaaattcaggctttgagagtttcaatggaaagtgattcactcaactggctacaaaacggaacgagtntaagaataacatgtc

SEQ ID NO: 8487 - DNA, 442 bp, Glycine max
  Clone ID: jC-gmfl02220093f11a1
aggaaagaaaactctcaaaaaactattatagcaatggcagaacaaaaccaaaaccaaacaactgaagctggaaggcaccaagaggttggtcacaagagccttctccagagtgatgctctttaccagtatattctggagacaagtgtctacccaagagaacctgaatccatgaaagaactgagagagttgacagcaaaacacccatggaacatcatgacaacctctgcagacgaagggcagttcttgaacatgctccttaagctcatcaatgccaagaacaccatggaaattggtgtctacactgggtattcacttcttgccaccgctctcgctcttcctgaagatggaaagatcttggccatggacattaacagggagaattatgaattgggtttgcctgtaattaaaaaagcttggtgttgaccacaaaattgaattcaga

SEQ ID NO: 8488 - DNA, 493 bp, Glycine max
  Clone ID: jC-gmfl02220093f12a1
caccgacaaaaaatggaactttcaccacaagaattcattttccgttccccactccccgatattcccatccccacacacctcccattgtactcttactgcttccaaaagttgtcacagttccatgaccgtccatgcctcatcgacggcgacaccagcgaaaccctcacctacgccgacgtcgatctctccgctcgccgcatctccgccggcctccacaaaatcggcatctgccagggtgacgtcatcatgctcgtcctccgcaactgcccgcagttcgcactcgccttcctgggcgccactcaccgcggcgccgtcgtcaccaccgccaaccccttctacactccggcggagctcgcgaagcaagcgatggccacgaaaaccaggctggtcataacgcaatccgcgtaccttgagaaaatcaagagtttcgcggacgacagcgatgtcatggtgatgtgcattgatgacgattattctttctgaaacgatggcg

SEQ ID NO: 8489 - DNA, 607 bp, Glycine max
  unsure (1)..(607): unsure at all n locations
  Clone ID: jC-gmfl02220093g01a1
gaagcagacagatcagaggttgagggtgcaagcacaccatcagaagctgcaaagaaggtgaaaattgggatatattttgcaacctggtgggctttgaatgtggtgttcaatatttataacaagaaggttttgaatgcttacccttacccttgggcttacttcaactctctcacttgcatgtgggtctcttatgatgttgatctcttgggccactgggattgctgaagccccaaagactgatcctgagttttggaagtctttgttccctgttgctgttgcacatacaattggacatgtagcggcaacagttagcatgtcaaaagttgcggtatcattcacacacattatcaagagtggtgaacctgcttttagtgttctggtttcaagatttcttttgggtgagagctttcctgtgccagtctatctgtctttaattccaatcattggtggatgtgcacttgctgctgtgactgagctcaatttcaatatgatcggntttatggnggccatgatatcgaatttggcatttgtattccgtaatatcttnttcgaaaaaggcatgaatggaaagtctgttaatggatgattactaccatgttatctattt

SEQ ID NO: 8490 - DNA, 156 bp, Glycine max
  Clone ID: jC-gmfl02220093g01d1
catgccttgccggcagatttgccgtgctgcactgtgtgcacgtgcctccttgctttgggggggggggggggggggggggggggggggggggaatgaataatagtaaatagggagagagggagcccaagtagcataacccactagaaaaaggagtat

SEQ ID NO: 8491 - DNA, 551 bp, Glycine max
  Clone ID: jC-gmfl02220093g02a1
ataagatcactatcaccaatgacaagggtagattgtcaaaggacactggcattcctcctgcacccaggggtgttcctcagattacagtgtgctttgacattgatgccaatggtatcttgaatgtctctgccgaagataaaaccactgcccagaaaaataagatcactatcaccaatgacaagggtagattgtcaaaggaagatattgagaagatggttcaagaggctgagaagtacaagtctgaggatgaagagcacaagaagaaggttgaggccaaaaacgctttggaaaactatgcatacaacatgaggaacaccgtgaaggatgacaagattggtgagaaacttgacccggctgacaagaagaagattgaggatgcaattgagcaagcaatccagtggttagacagcaaccagcttgcagaagcagatgagtttgaggacaaaatgaaggaattggaaagcatctgcaatccaatcattgccaagatgtaccaaggtggtgctgggtcaaaacgtggtggtgctggtgcagcaaaggatgagtatgct

SEQ ID NO: 8492 - DNA, 428 bp, Glycine max
  Clone ID: jC-gmfl02220093g02d1
tgccggccagcaatttgccgtgctacacgtgtaggagtaccgccgtgcttgggggggggggggggggggggggggggggggggggggggggcagcatgaaacataacagggcgtagggaataacatacaagaaggttgataccgaaaccctagaataaggcacgagattagtgaagaagcaaaagaatctagagaatagaagctggaaactaatcggtagagtacaacccaaaaagacgggcaagtttaggtaataaaaagtagctcaggaaaagttaaggaaaaaactagaaacgaaaagaacgggggaaaataccgagtgccaccaaactaatggtagggacgctatggttgtaagtggccccttaccattagggttattacaaccaccactactagatgtagatgggcagctattacgattattt

SEQ ID NO: 8493 - DNA, 619 bp, Glycine max
  unsure (1)..(619): unsure at all n locations
  Clone ID: jC-gmfl02220093g03a1
gtatcacgggaacgttgtctcctgagaaagttgctgggaagattgttttgtgtgaccgtgggttaactgctagggttcagaaaggctccgtggtgaaatccgccggagcgttgggcatggtgctcagcaacaccgctgccaacggcgaggagctggtggcggatgctcatttgttacctgccaccgcggttgggcagaaagccggtgacgctattaagaagtatttgttttctgatgcgaaaccgacggtgaagattttgtttgaaggcacaaagttggggattcagccatctcctgtggtggcagcgtttagctctagaggacccaactcgatcaccccgcagatccttaagccagatcttatcgcgccaggtgtcaacatcctagccgngtggtccaaggcggtgggacccaccgggttacccgttgataacaggcgcgtggatttcaacatcatttctggcacgtccatgtcgtgccctcacgtgagcggcttagccgcgctgatcaagtcggctcaccctgattggagcccagccgcggtccgatcggctcttatgacaacggcttacacagtttacaaaaccggtgagaagctgcangacagcgcaacgggaaa

SEQ ID NO: 8494 - DNA, 494 bp, Glycine max
  Clone ID: jC-gmfl02220093g03d1
agactttgccaaccaatttgccctgctacatgtgtgcactacctccttcttggggggggggggggggggggggggggggggggggggggggggggggggggggggggggggggggggggggggggggggggggggggggggggggggcccccttaatttggaaaaaaaaacccaacccgaaaccaatttttggaaaccccccccattaaaattgggaccccaaaaccccctttaaaaaaagggttttaaaccgggaaaattccgtttttccccaaaaaaaaaatttatccctttaaaaggggggtttttggccaaaaaggggttttccccaaaaaaaccctttttttttagagaattttccccctttttggggaaaaaaccctatttcccgaaaatttaatgggcgcccccctaaaaaacccgaaaggaagaaagccctttttgggaaatttgggggtttcatttaaggacctttttttttgggggcccccccc

SEQ ID NO: 8495 - DNA, 502 bp, Glycine max
  unsure (1)..(502): unsure at all n locations
  Clone ID: jC-gmfl02220093g04a1
gtggttaggttaggttgagggcgatatgaaggtaaccaaagggaaggaaactaaaattgttctgacaaaacccttccaattggaaggtgaatcagatttagaaccgtcttatagagctcccaatctcctacatcgcttgttaagtttactcaagaacgtgcggccaggatcagatctcacacacttccaactgccagctgtgtttaacttcccaaaatctcaacttcaatgctatggtgaatcagtgtactgcacatcttcaaacttgctgagcaaatgcaacaatgggcagagtccactggacaggttcacatcagtagtagcatggagcatatctaccacacgccccacatcttttggtgttgctccttataatcccactcttggagagacccaccatgtttccaagggcaatctcaacgtcctagttgagcaggtatcagtcaacccttcagtatctgcccttcatgcaacagatgagaagganaacattgagatgata

SEQ ID NO: 8496 - DNA, 548 bp, Glycine max
  Clone ID: jC-gmfl02220093g05a1
tgcacttgaagggaagtatctggtacaagatagttgttatgatttgattgacagtgctgatgcagtcaatggacatcaagagcttcagcatctcagtttctcttgtcatgtaccgaatgtgactggaagagggtttattgaggtggaagacaatggtcttagcagctgttcctttccattcatagtggcagagcaagaaatttgtttagagatctgtacgctagacaatgtcattgaggcagcagagatggctgatgacaaccagataaaaactaacctaatggaagaaaagactcaagcattgtatttcatacaagaaatgggttggctccttcatagaagtcgtgtgaaagttaggctaggtcccatggcacctgtccaagatcgcttccattttaatcggttcatatggcttgttggcttctctatggaccatgactggtgtgctgtgatgaaaaagctcttgaacattatctttgagggcactgttgatactgagatcatgcctctgtgaagtagctttgttagagatggtcttctacacaagc

SEQ ID NO: 8497 - DNA, 277 bp, Glycine max
  Clone ID: jC-gmfl02220093g06a1
ctcacacgtgacgggtggccatttggtagctctgtctgttgagaataaggaggggtatctgattctacttgcaacatattgactccaaatacagatagactggaccatgccgtcaaaggctgaactaagtggaggtaaacaatgccgagaatcgcaattgttgtatgaagagtgccaattagctctgaacctcgccatgacagacatattggctgacttcttcgtgactcataagattgaccgtgcctataattaattgcagacatacatattgttt

SEQ ID NO: 8498 - DNA, 506 bp, Glycine max
  unsure (1)..(506): unsure at all n locations
  Clone ID: jC-gmfl02220093g07a1
ctcacacatgaggggtagccggttgcgagcttcatctgctggtgatgaggaggtggatctacttctacctggtacagcaagactccaaatacagcttggtgtgaacatgccatcaagggcagaacagatttcaggaaaacaaaaacaagaaaagcaaatgtttcatgaagtgtacgatgtggtgctgtaccttggtatcattgacatattgcaggactacaacatgactaagaggattgaacatgcttataaatctcttcagtttgattcattgtctatctcagctgtggaccctacgttctattcgcatcgcttcctggaatttattcagaaggtgtttccaccaaatgcaacgacaggttaatcaagataattatggggttatatttaaccagtaagtntatttagaaagtgtgaatattgcacttttcatgctttgctcagaatttttatgtaggtggccacgtggcaccttgtgatggtggtataggaatcaagtgaatatg

SEQ ID NO: 8499 - DNA, 107 bp, Glycine max
  Clone ID: jC-gmfl02220093g08a1
gattactattaggagctagcaattttgagatgctgagataatttttatgctcgaaaaagaagaatataagggccggcgccctctattgagctcgtctagccgggaat

SEQ ID NO: 8500 - DNA, 442 bp, Glycine max
  Clone ID: jC-gmfl02220093g09a1
gttctagatcgcgagcggcccccttttttttttttttttattaaaaaaagtacaacaacggattacacctccaaacttggtcacttaaacaaaaatctaaaaatgaaaaagaaagaaaaaatacaaaatatttgtgtttttgttgtcttttatactagtcgtggcaacctacaggggtgccacccacttacgtcacgagtcacgagccgcatcgatcaaaacgacatgatcgattcgaggctctctataacggttctatttgagtcaccacaatggggctccgaaccacgtgcttcccatccgtccacgtcagcgacccgaacaccgccccggacggacccatcttcagattacgggtgtaccccgccaccgtcaccacatagcttcgcttgttcaccggctgcgagaacacgagcctcgacggctttaccgtcacgctgac

SEQ ID NO: 8501 - DNA, 111 bp, Glycine max
  Clone ID: jC-gmfl02220093g10a1
cccttatcctaatacaactccagtgggtttttattcttttattacaatgatttccaacaagacgggtgtccatggtcatggccacgaccctgatcctgtgcaatggttatg

SEQ ID NO: 8502 - DNA, 488 bp, Glycine max
  Clone ID: jC-gmfl02220093g11a1
cctttctcctaaaacatctccagtgggttcttcttcttctattacaacaacgtcgtccaagaccatgaccatggccatggccacgatcctgctcctgttcacggtcttcgcggtttcatcggccctagacatgtcgataatctcgtacgacaacgcccacgccgccacgtcgcgcagcgacgaggagctgatgtccatgtacgagcagtggctagtaaagcacggcaaggtgtacaacgcgctcggagagaaggagaagaggttccagatcttcaaggacaacctgcgattcatcgacgaccacaactcccaagaggaccgaacctacaagctcggactgaaccggttcgcggatctcaccaacgaggagtacagggccaagtacttgggaaccaagatcgatcccaaccggaggctcggcaagaccccgagcaaccgatacgcgccacgtgtcggcgacaaactacctgaatcggttgattggagga

SEQ ID NO: 8503 - DNA, 498 bp, Glycine max
  unsure (1)..(498): unsure at all n locations
  Clone ID: jC-gmfl02220093h01a1
cggctcgagtgagaaaacagaagaaaacaaaatggaagacacagtttctgcgttgaggtctttgatggtttctcactctccgccgctggatgccttagtggtgccctctgaagattatcacctgagcgaatatgtgtctgcacgagacaagcgccgcgaattcgtttccggcttcactggaagtgccggcttggcacttataacaaagaaagaagcactgctgtggacggatggacggtattttttgcaggctgagaaagaacttagtgctgggtggaagctaatgcgaattggtgaagatcctgctgtagatatctggatggccgataatttgccaaaagaagcatccgttgggngttgatccctggtgcatttcaattgatactgctcaaagatgggagcgtgcttttgccgaaaaacagcagaagctggttccaacctcaaaaaatttggtggatgaaagttggataaatcgcccaccggcagagataaatgctg

SEQ ID NO: 8504 - DNA, 463 bp, Glycine max
  Clone ID: jC-gmfl02220093h01d1
cagcctgccggcaatttgccgtgctacatgtgtggagtgccgcctgcttgggggggggggggggggggggggggggggggggggggggctactacaagaggcagagaggagagagctgccctagacgaagggcaaccaagaattaggtttaagcagagtgaaaagtgacaggatacgaggagccagatccaacatatgaaaaggatctgcaattagtgggaacggagggaatggggtaatgttaaatataccgtagctattgataccggtacgcctgggtggtacttagctaggggtaatggtagttaaagagccccttacaagaggttgatagcgcctcgcagaccacggtacttaagggagtgttgtcccatggaaaacccgtaccgtaagtaatggtcgtgcagagccgctttagcgaagcgcggtaaaacagaacggattgggagtattaaaaggcaaa

SEQ ID NO: 8505 - DNA, 548 bp, Glycine max
  Clone ID: jC-gmfl02220093h02a1
cgtcaatcaatcgtgagtctgagactgagttctcatctctcaatttaaaaccctactcgccgttgccgcccaaccaccttctgtccaccgtcgccgtcgtcgcctttgcagtcggaaggttgcaccacgtcaccagcacatcaagcccgtcgcgttggaaggtctcaagttaataagtgacccattggttcgactattgatccaatgccttgactgggtcaatcaccatttggcttttaaaactatgcttcgtagttcctaggccaatgtttgcatttgcttccttatacactctctggaactgtcacaggattttgagacagctgacaagagacaacaagatatggcagagaggagcaaagagcttctcaagtttgagcataatggcacacccctttcttccttagaatccactcttcttgtttgtgataataaaaaagaatcagacagtcaaactaggagactcccccctgatggcatgctcctcactgccccactttccccaagccaacttttagggaaggttaaagacttcctaggagtgatgt

SEQ ID NO: 8506 - DNA, 489 bp, Glycine max
  unsure (1)..(489): unsure at all n locations
  Clone ID: jC-gmfl02220093h03a1
agggagggaaactggagagcgacatggaattcgacgagcaagaggagcatgaggaggaggaggaaatggggatgccggagccggcggtggcggtggcggcgccgcagacttttgactcgcggtcgaaaatcggcggcggcgaggcgcggaagagcgcgttcggcgtggcggcggtgcggtaccgagaatgccagaagaaccacgccgtcagcttcggcggccacgccgttgacggctgctgcgagttcatggccgccggagacgacggcatgctggaaggcgtcatctgcgccgcatgcaactgccaccggaatttccaccgcaaggagatcgacggcgagatgtcctccttccaccaccgcgcgcaacctccaccgncgccgttgcaccaccaccaccaattctccccgtactaccaccaccgcgtcccgcagcaccccaccggcgncggctacatccaccaccacctcacaccttcgatgtcgcagc

SEQ ID NO: 8507 - DNA, 381 bp, Glycine max
  Clone ID: jC-gmfl02220093h03d1
tgaccttgccgggcaatttgccgtgctacatgtgtggagtgccgccttcttgggggggggggggggggggggccaacaatttgactggcagtgttagtaaggaaagggtaaaggatagggggtgtgtagtcaatccaaacagtcacacaaacaaggagatgaggagtataataagtgctcaaaggacccgggtggattcacacgctgtggcggaggcgctagttaaatgggcacaatcgggtctggtataggcagtgtactatacaatgcggttatactacaggtagtcccgggtgccaggtgttatttgacggcggtgctcaagctcagtagtggagtgggggccgtggctcgcaattgaacgtccaatttggggggcca

SEQ ID NO: 8508 - DNA, 640 bp, Glycine max
  unsure (1)..(640): unsure at all n locations
  Clone ID: jC-gmfl02220093h04a1
taggaatacagaatttttttcaaacacaaatgcctactcactcttttagtcttaggactagtaattataaaatgaaaaacaaaatcattaaaggtactattacttggaaagcattattactttattgataaaaataagtcaaacaactcttcagggacttctgctctgactcgacttatttattaaaaatattaatttgttttttttaattaatcaaattgatcagatttaattttgtaaaaagactattaaatttgataagttggtatttttatataattatacatacaatatttatatttaatatacatttactaatattaacattaataatatgtttgatagacctgtttgtttatttaagttggatggcttacttaggcatacagatttattcacttgtctatgagtcttttataaaagaaatcatataaatatgctttaagttagattaaaattttaaataaatcatgctaaaacttaaaaaacaatttgtaataaataaataagtcaggttgagataatataggatagacttatgcccactaaagtttggtgaatgcatncttaaagtacattntaagtaaataaatatatgtactaantatataaaatatctttgtgcacatatacattaaat

SEQ ID NO: 8509 - DNA, 445 bp, Glycine max
  Clone ID: jC-gmfl02220093h05a1
gtttattagtattattatcactagctacctgctatcaaagcatcacaaatggcttctacagacaagcctggcggcgaccctgaatacagaacatcttcaactccagctcctgctggtgttgattactttaaatttgatgtcatcctaaggtttctattgtttgcagcatcactggtagctgttgtggtgatcgtcactgctaatcaaacagaggttattcgtgttccacagcctgtgccatggccagccaagttcagatactcaccagcctttgtttattttgtagctgcattgtccgttactggcctctacagtatcattacaacacttgcatcactctttgccagtaacaagccagccctcaaaaccaagttgctcctctactttatcttatgggatgcgctgatattggggataatagccttagcaacaggcacagctgggg

SEQ ID NO: 8510 - DNA, 527 bp, Glycine max
  unsure (1)..(527): unsure at all n locations
  Clone ID: jC-gmfl02220093h06a1
ggaggaggcaaatgtcaagcctccaaccccattgacgcttgctggagatgcaataaagactgggccaatgaccggttcaggctagccaagtgcggcaaagggttcggaagacgggccaccggcgggctcggtggtcccatctatgtcgtcaccgataattccgatgacgacatggtgaaccctaagccgggaactatccgtcacgctgtcacccaaaaaggccccttgtggatcatcttcggacacagcatgatcatcagtttgaggcaagagctgatgatttcctccgacaagaccatcgatggtcgtggcgcaaacgtgcaatttaggggcggtgctggcctcaccattcagttcgtgaacaacgttattatccacggagttcgcatcaaggacatcgtacctaaggatggtggcatgattagggactccgccgaccattatggattgagaaacaagagtgatggtgatgccatctncattnttggatccaccaacatttggatcgatcatgtttccctctctac

SEQ ID NO: 8511 - DNA, 553 bp, Glycine max
  unsure (1)..(553): unsure at all n locations
  Clone ID: jC-gmfl02220093h07a1
cggctcgagctcgtaaaccctaaaccccgttttcagtgacatcgagatcgatcgaacatggatgaggagtacgatgtgatcgtgttgggcacgggtctcaaggagtgcattctcagcggtcttctctccgtcgatggcctcaaggttctgcacatggacaggaatgactattacggaggagaatccacttcgctcaatcttattcagctttggaagagattcaggggagatgacaagcctcctccacatttgggagctagcagggactataacatcgatatgaaccctaagtttattatggctaatggcaatttggtgcgggttctcatacatactgatgttactaagtatctctctttcaagctgtggatgggagctttgtgtttaataaaggaaaggttcataaggtgcccgcaaatgacatggaggccttgaagtctccacttatggngctatttgaaaaacgccgagcacgcaagtttttcatttatgtgcaaaattacaatgagagtgatcccaagacccatgaagggatggacttgacaagagtgac

SEQ ID NO: 8512 - DNA, 485 bp, Glycine max
  Clone ID: jC-gmfl02220093h08a1
gaccattctctcagcctagctaataagatttgtgagagaaagggagaaagggtgtgagaatggagagcaaagaggaagatgtaagggttggagcaactaagttctcagaaaggcaaccaattggtacagcagctcagggtgacaaggactacaaagaaccacccccagcacctttgtttgagcctggtgagctaaagtcatggtccttctacagagctggaattgctgagtttgtggccactttcttgttcctctacattaccatcttaactgtcatgggtgtcaacaggtcaccctccaagtgtgcctctgttggcattcaaggcattgcttgggcctttggtggcatgatctttgcccttgtctactgcactgctggaatttcagggggacacatcaacccagctgtgacctttggtctctttttggaagggagctgtccttcacaagggcgctgttctacattatcatgcagtgtcttggag

SEQ ID NO: 8513 - DNA, 477 bp, Glycine max
  unsure (1)..(477): unsure at all n locations
  Clone ID: jC-gmfl02220093h09a1
taaggttactgtcatacatgccgtggcaattccagtacaaccagctccggtggaaagtgcggagtatagaaaacagctagctgaagactacggtttcaggcaagttggagagccgcttccagatgatgttactttaaaggatgtcatcaattcccttcctaaggaggtctttgagattgatgatgtgaaagcatggaaatctgttctgatatctgtcacttcttatgcactgggtctcttcatgatttccaaagccccctggtatcttcttcctctggcttgggtatggacagggactgcaataactgggttctttgttataggacatgattgtgctcacagatcattttcgtctaacaaattggtagaagacattgttggaactctggcctttatgcctctgatttatccatatgangcctggcgatttaagcatgacaggcatcatgcaaaacaaacatgttacgtgaagatact

SEQ ID NO: 8514 - DNA, 499 bp, Glycine max
  unsure (1)..(499): unsure at all n locations
  Clone ID: jC-gmfl02220093h10a1
tggagttgttgcaagaaaagaagtcatgattttagcttgtttttggaaattccaggatgcaagacaggaaaacatacaacagttaagcaagtaattacaccagtgaagaagaacaccatgccttctccaaccgctgtttgttcaaccaatgcatcatcaaaggactcttgtcccagatgtcagcagggtttcttttgctcagatcatggctcacaaagcaaacctgcaaatattattggagacaaggccgcaaatctggctggagatgcatctgttgataacaattcaagtgttcatgctccgaaacctaagaagatagttgatataaatgagccacaagtatgtaaaaataaaggatgcggtcaaactttcaaggaaaaggataatcatgacactgcttgcagctaccaccctggccctgctgtttttcatgaccggatgagagggtggaaagtgcttgtgatattcatgtaaaagaaattgatgangttatgagcat

SEQ ID NO: 8515 - DNA, 519 bp, Glycine max
  Clone ID: jC-gmfl02220093h11a1
aaatcatgccagcttaagtttattcatggaatgccaaacttaaaaggaaggctacagaaacagcattatgctctttttgttgtctctgaggatcagtcacaatactgtagtgatggaaaaccaggtttactatcattttataaccgtccatacagaagagatagtaagatcctcttaccaaattcagagagaagtcaaaacagcatattgtggtttttgggccctgcagtcctcgttgcgtccttcatttttccttcactctatttacgcaaagtgctatccatcatttttgaggactctttgttaactgatttcctcatattattcttcacagaagcaattttctattgtggtgttggggtattcctttatctactagaccatgtaagaagacccttgctagtggatatcgctgcaaacaatagtgatactctacccccacaattgggacagagagtctcttcttgtgctaccctggtgcttagtcttgtaattccaatggtgactatgggtttggtc

SEQ ID NO: 8516 - DNA, 438 bp, Glycine max
  unsure (1)..(438): unsure at all n locations
  Clone ID: jC-gmfl02220093h12a1
actacttgaacatcaagagccttttggaccttacttgccagacagtagcagacatgatcaagggaaagactcctgaggaaattcgcaagacattcaacatcaagaatgacttcacccctgaggaagaggaggaagttcgtagggaaaaccaatgggcgtttgaataagttttatgattctgctgcttttgaaatttcaatgaaaagatatgccctatagtttctagtttatgtttctgactattttgtttgttttatttatgtttcgcgtatcaaacttgtcttcttttttgaacttgggcaatcttgaaattgtaagtaatagttgaatatggtgggaggaatgcttttgaatctggtatctcagctttattgttnacaaaagcaaccctatgcacacacaagctgggaacagtgatgatggaaagtaccctttaag

SEQ ID NO: 8517 - DNA, 529 bp, Glycine max
  Clone ID: jC-gmfl02220094a02a1
ttctggtttaacgggaggaggaaccagaagcaacattctccaaaaccaacttccaagatgtatggcagcccgatgtatgatgacagagaggtaaacctaggtgctcatgaggaccgccgcgtgctgtcatttgatgctgcggtcctgatgtcacaggaactagaccgggtcaaagaggtacctgaagaagagcatgtcgaggaagttgatcattattcaagaaatggtaatgggtcagatcatctgcatgtcgatgagatcgtggaagaacctggaaccagtgaagctgtcaataatggatcttggctcaattcaacttctcttgcccggcatcaaagcttggagaatggctctacctctgaaatatgtcctgatgtcaaagagagtgccataagaagggaaactgaaggtgaattcaggttgttgggtaggagagaaggtaatcgttacggtggtgataggttttttggtttggaagaaaatgaagccactagcaggggaagaagagtgtcatttaacatgggagata

SEQ ID NO: 8518 - DNA, 582 bp, Glycine max
  Clone ID: jC-gmfl02220094a02d1
gaatttgcctgctacatgtgtagcagtaccacctgcttgggggggggggggggcaataaccaccaaagttgggtcgagctaaaccaactcaaggagagagtacgacaacggtgatttagatagataagtggctggtaaacgatattagactggtttcagagcgaataaagtgtgaaacttaatgtgataactactgtaaaaaataaaacaccaaaaggaaaaagcgaactaataacaaatagcaaggaataaagttattttctggcgtgaacgggctcgtgagagaccactggataaagtagtactaagtaagctaggtggtagcaactgatgagcctgctgctgcttttggggcggcctaagggcgtataaagaagtgggtagcggcccgggttaaaaggcaagaaacgctcccgcatgggcttagtgtagcgggtccacttggtggcaatacgaccaacatttttggtgtgcagaaagcggcccggcacaaatggccttataaaactttataagggagagatagctgtaaaagggcgtacaaactttacgcacctgcgcataatggtaacttggataaac

SEQ ID NO: 8519 - DNA, 633 bp, Glycine max
  unsure (1)..(633): unsure at all n locations
  Clone ID: jC-gmfl02220094a03a1
gcaaaatctggaaaagcttttgaagaggaaaaaaaggctgagaattataaataaaaagaaagaaggaaatggtgtgtgtatatgtgttggtgtatctgcatgacaccaaatcagtgaagaaactgagtaatattactgccagctcaaatttctcatttataacaagccagcctcaggaggaaaatcacatcaaggagtattcagggaggggttgaatatttgctgttgctattaatttcttcttcttcttcttcaatatctctgtctgttctaatctccctctagatttttcttttgctagaattctcttgcttatgagttttttttcctgagattggggatgtgaattgagggaggactcaaattgcatgtgggttttccagaattctgattcagttgtggggttcaaggattaaaagaacactctctcaggtgaagcagaagaaggctaattgctatatataggacttgctattagagacatggcggcgtcatcttcctcagcatcgctctttggatttagagcagaggatcaacataaccagatgaaagcacagcatttcctgacaccatccncatcaacaacttcagctgcaccccaccccagaagaataagagaaaccaccctgaaca

SEQ ID NO: 8520 - DNA, 209 bp, Glycine max
  Clone ID: jC-gmfl02220094a03d1
ccgatcttcgcttgctatctgccgagacctgtacaccggtgagggcaccgctggcgagggcagcggagggtgggccctggcagtgagcgcccggtggctcagcaacagaggctgtagctggggtagagagatatgaagccattccagtcacgtcctatgcgcacacttagtggtatcatgcggattgtgacccagcagcatcaggttta

SEQ ID NO: 8521 - DNA, 314 bp, Glycine max
  Clone ID: jC-gmfl02220094a06a1
tgttgatcgagataactagaaacagtgtgatgaaaatgaaggtccttgttttcttcggggctacaattttggtagcatggcaatgccatgcgtacgatatgttccctctccgaatgaacactggctatggtgcccgtactccggaggtgaaatgcgcaagttggaggcttgctgtggaagcacacaacatctttggctttgagaccattcctgaagagtgcgttgaagcaacataggaatacatccatggcgaacaatatagatcagacttcaaaacacgtaacctacatgctctacttttatgccagagacct

SEQ ID NO: 8522 - DNA, 565 bp, Glycine max
  Clone ID: jC-gmfl02220094a06d1
ccaacaatttgccgttgcatgtagtagcacctgcttgggggggggggggggaggatggaattggtggaacgattattatgaactactaaaggggagagagtgtagtaaaaatgtcatgtatttaaagggaatggtgtcaacctaataataaacgaacaaatgggtcataagaaatagacgggctagtaaagagtacatttgtagactaaacagaaaatatgttatgttatatgccataattgccacttcaaggttcactggatcgctctcgctagccaatctatagaccacaggagacacctcagtaactgaatttaatgcaagagtggcacttaacgttaccgcaaccaaaagtgggctagaggtcatggaggaagcgatagtgtgagacccaacgaaattcgtaagccttacaaacacacgctattaagaacccttaaaaacgtaggcaacaagcccacgaatagactgataatcctacgcagaagtatagagctacgttgctatatgatttgaagcaaccgtataggcgactggttatagacaccaagcggtaacgagctgt

SEQ ID NO: 8523 - DNA, 191 bp, Glycine max
  Clone ID: jC-gmfl02220094a07a1
gttgtccagtgtggagtggagtgttttatctttgctatgagggtctgatatttgatgcaaactatgtttattgtcgaaagtttcttactttgttgttgccttcgagaagttaaatttgggtgagtcgagtttttgatgagatatataaaatttgctgcttagtggtggtacttaagaaggtttaagataat

SEQ ID NO: 8524 - DNA, 268 bp, Glycine max
  Clone ID: jC-gmfl02220094a07d1
acgacaatttggcgtgctacacgtgtagcagcttcctgtcggtggggggggggccaaaagtaacacccaagtttgtgcataaaagggtagggatatgacaagaccttatatacggcaacaaacgaaagagataagaacgggactagcaaaaagagatagcgcaagggtagcagcagtggtagaggcatgtcgcgcatatgctgcagaatgcacgactgccataagtgtaagacggggaatcagaggaggtaacgatgatgcccgcagc

SEQ ID NO: 8525 - DNA, 545 bp, Glycine max
  unsure (1)..(545): unsure at all n locations
  Clone ID: jC-gmfl02220094a08a1
tgcatctctctgtgttcaatcttcaaagacttgaattcttcttacttaggttctgaatggctggaatttgctgtggtgttgtcggagaaggtgacactccggctccactcgagccaactactcgcccctccaggcgccggagtttggacatcttacccttaaaatacatcgctgacatggcggtgccgccgtcggatggttcacggaaacgtcccaagctggatctcagggaccgcgataacgtagttcaaaattgcgacgaatccactggacacaaggtggtgaaaaaagaagccaaagtggaaatccacgacaatatttccgaaacgaaaaacgtaactgttgcggatgcttcggaagttgaagattctcctaagttcggcgtgacgtcagtttgcggcaggagaagagacatggaagattccgtttcggtgcggccttgcttcacccaaggcttccactacnttggcgttntcgacggtcacggttgctctcatgtcgcgactatgtgcacggagcggntacacgagatcgtgaatgaagag

SEQ ID NO: 8526 - DNA, 380 bp, Glycine max
  Clone ID: jC-gmfl02220094a08d1
ccgcgaaattatgttggactgccacctccttgggggggggggggggtaagggttgggcgatagggttggctgttgggcgggggggaattgccccgtttaggataggataagtaatagggcagaaactaaaacttataacttttgttgtttgtgcagggccgtggtttcggtggaatcaacgttgcaaaataaacccggggccggggctggtgtcttaatcggaaggaaggccacgggcagcaggcgtcggcagtgtgttgtaaagtaattattattatctgtataggagttcaatgagcttgtcttaatctgaatggccggaataaaagtcatctaggccactaactttccgtccaattcgttcctccttatcgaaggtt

SEQ ID NO: 8527 - DNA, 390 bp, Glycine max
  Clone ID: jC-gmfl02220094a10a1
gtccgcaaagccgttactcttactcatcacatgaacccctaaatcctaattgctttgttttcccccaattcccaatggcgaacgactcgtcgtttttgttcgccggcattcgtttcgatagaaagaagttcggcgccgatattgccaggttccagaaaaaagacagtgatactgattcggcgatgattttgagcgccgtcgaagacgaaggcgagaaaacaatagaacctctggaagaagagaaagtcgcggcgtcaacgacgaataagaggaagcgcaagggaacctcttccgaaacggtcgaaggattcaatgtgttcagaagttcgacgtctgtggcgcagtcgaatgatgaagtccgagtcattgaggagtccgttgagctgtata

SEQ ID NO: 8528 - DNA, 493 bp, Glycine max
  Clone ID: jC-gmfl02220094a10d1
tagcgtcgttgtatcgtgttaagtactgcctacttggcggtgacaggtgaattgtgtggggggcgtaggggattaggtcaaggtagacacctataaaagcctttagggtatagcacaggatatgggaccccctggatacgcaccctgcaccacgagagcatcataagtagccgggaaagggacctaatatgcttggctaggactgggaaatcgcaggtgtgtggccgtctaaggcttgagttgtatttggtttgggttagtcgcggctagggggcccaagccctaagtagcatatgacctgcattccttgagggaacaaaggtgaaatattatgccaaagggtaaccggaaaactagcggcgtaggtgagctgaggataccctgagaccgtgccggggcgccacaggcaagtgtggggcccgtccgctggaggttatagggggggctctaatggtagcacagagcatccaattgtatacttgcagctgcctag

SEQ ID NO: 8529 - DNA, 553 bp, Glycine max
  Clone ID: jC-gmfl02220094a11a1
caggaatttggcgttgctacatgtcaggagttgtaccctcttgggggggggggggggggcgaaatgtaaaaggaagggtggaagacaagccagcgcaaagtaaagacatatagaataaagagaagacgacgaagctgaggagaggtggggatgaaatatagctctagtaccgatggcggatatgttgtttaaactaaatagccgcgagacgaaaaagagggaactagggctaaggccattaaaagggcagctgggaaaactggtaaagtggcctgttggccttgccaatggtaatggactagacactggtagcgacgtggtaaatataaagggacccgacactgcctggggtgttgagcttgtgggcgttaataaggtgccactacccgacagcatactagtatgcttacccggagacaagcacctgagccataggtgccgtttagtacgggcgctgagtatatccgctgttatatgttgcgatggattaggccgcagaattgtaactgcagtattaagcggaataataagccaagcctctaggccccctata

SEQ ID NO: 8530 - DNA, 539 bp, Glycine max
  Clone ID: jC-gmfl02220094a12a1
ctgagactttggccgtgctacatgtctaggagtcgcgcctgtttggtgggggggagggggggggggggggggggggagatttaaactaacattgggaagggtctgggaggtaataaatagggaaggaagaataaccataacgggatagggggggggttattggatagagcggtaaggctaactaagtctatccaggcacacgtagagaggtattttgctaggtggtggtagctgataaatgagaggagatggaaggtttataggcggccgcgttgggaggagcgaggcttaagcggatcgatatgggctcagaaaaccaataataggaaggagcaaacttgacacttaaggaacatgcagggggtgcgaatgactttaaagtagagcggtaagtggaagtatggctagctattgctattgaatttaaggcggctattgctaatagtagatataattgcgaggcagtgtgccgcaatcggtttagagcgacgaatagtatgagctcgattagggctactgcaacttgactagatggctgg

SEQ ID NO: 8531 - DNA, 511 bp, Glycine max
  Clone ID: jC-gmfl02220094a12d1
tagctgactatcgtagccaatgtgccggtgccgtcacacacaaaaccgtaccactgcggggcatggttgcaccacaggctgaaacaaggatggaagacccatagattattgccaaatattcgggttaacagtattaactgattggtgggctaacagcagcccttgttaacgcagggtgagccaacggtgtgcatacacagacaacgacttcaacaccggtgatggtgaccccaccggggacggtgaccccaccggttctggtgacccattccacaccggggaaagttgtatcccctgcccagcgccaacatgttccgcagcatgggccgcagtaagttacgaccacaccgccgacaaaggggaaaatgcctaatactgccgtgtcactactaccgaaaactacgcctcagcaggcctgaaggccaacgccgacatcagtaactaccttggtagtagtacatacaggccacccattgcggggaagggctcccaagtgccctagtcgctagta

SEQ ID NO: 8532 - DNA, 504 bp, Glycine max
  Clone ID: jC-gmfl02220094b01a1
ctcattgctgttcaccattttcaattcattcctgtgttagattccaagtggtttggtttggtttgacataaataaacctttcaagatctcagaggggcagaagatcaaagccaagacaacacactctcatatataaaagagtgtctctgataatttgatctttgtttcttctctttctctcctttgagatttttcagcaccccaccaaggttttgtccgaaaagcttgaatttttcgcctaccctttacaatgatctcttcattgagacaacctgttgtagggatcagtggttctgatcttcttttgaggcaaagacatgcaaccctaattaaggcaaggtcctttttaccctctttgtcaagagaaaagggtcaaagatctcttgtttcagttcaaaagccacttcacattgctgcttctcttggtgttggaaattttgtgtcagtgaagagtgatgatgacaaaaggggtgatttggtgaagtgtgaggcctatgaagcaga

SEQ ID NO: 8533 - DNA, 543 bp, Glycine max
  unsure (1)..(543): unsure at all n locations
  Clone ID: jC-gmfl02220094b02a1
gttgttcaaactcttagaaatgttgctcgtgatggaaggactgtcatctcttccattcatcaaccaagcagtgaagtctttgcactctttgatgacctcttcttactatctgggggcgaaacagttattttggagaagcaaaatcggcaattgagttttttgctgaagctggtttcccttgtccacgtaaaagaaatccttctgatcacttcctacgatgtatcaattctgatttcgacattgtaacagctacactgaagggatctcaaagaattcatgatgttccaaattcagcagatcctttcatgaatttggctacagcagagattaaggcaacactagttgagaaatataggcgttcaacatatgccagaagggcaaaaaacagaattcaagaactgtctaccgatgaagggcttcaacctncaacacaacatggaagtcaagctagttggtggaagcaactataacgttgacatagagatcatttgtgaacatgtgtagagatgtggttactacttggttgggatcatatttacatca

SEQ ID NO: 8534 - DNA, 528 bp, Glycine max
  Clone ID: jC-gmfl02220094b02d1
ggatttgcgctggtacatgtgtaggagtgccgcctgcttgggggggggggggggggggggggggggggggggggggggagtttaagggacacaggggaaggcaaacaaacaaacaaaaaagcgaagccaaccatcgacataagcgtttaggaagggcgtgcgggcgattggaaatccggagcaaatagggggtgtgagatagagctgaaggaacacagaataaaggtaaggggccagcggagaagttcaaaagttaccgctagctaacgctaatatggggggagggccccggcagaggaggcaggggacgccacgccacaagtaacattagtggcacaacaaacgcaagccaccccggcagcttgtgcgcaacccaaacagcctagtggttgcaaacacccgtggggggtaactgcggcgagccggtgtggcctagaaacgcgtgcaaataagccccagctgtgggttggcaatggcacaatacggaacaacacaacgtgcgaatagagcacaagtataaaggcactg

SEQ ID NO: 8535 - DNA, 500 bp, Glycine max
  Clone ID: jC-gmfl02220094b03a1
atctgctgtagcgggaggcgttcacgtaccgccagtaatcaaagcaaacgccctgggggctttcaaaacgttggatcgaggctgccaggcagaaagcggtccactggtagtgccagcgctgaaaagcatgatgattgggcgactctgaaggcagagttagcaccggtgtacatggtgtgcggaatggtggcaatggctgtggcaattggatcacacactgcgtttcaacaactggcgcgttctccaactggtcatataaacaagaagagaagagagagcatgccagaggtctctgatcctgatcgcaccttcaacttcgccaccaaattcatcgatggttccttcttaaggaaactctctcacattcaagacaacaaccccacactccacgaccctttccaccctaatccttttaccactccttgaaaccgtcacaccttgaagactgtgggcgttcaccccttcaggcgttgatccttctttaatttcactatttctaa

SEQ ID NO: 8536 - DNA, 515 bp, Glycine max
  Clone ID: jC-gmfl02220094b03d1
ctgggtctgtcgctggatgtgccagaggccgtcacaaacacaactgggccgtgtgactgaggaagaggacgaggaagaggacctatccgggcatgatgaagaaaaccaattagtcaggtcgcgtactttcgcacctacttaacgggtacagccacatcacttactgggggaagcggtggcttagggggtggtgtgtccatttggggctgcggcgcaagctaaatgtgcaaccgcagctgtgcggtctcggtacaacactgcgcaaacatttaaagaatcggtgacacactgcccagttaatgggccgccagttggcgatagccggttagaggattgcgcagcagcagaactcacggatttcatgacattgtccatatctaaaatgcgtgccttagggccggttacactgacccacctgttagtcttggtacggttgacaatgcgataacaagcagggcagcccgttaagattaaaccaatggccacaatgtaacaattgctggactgccccgtgt

SEQ ID NO: 8537 - DNA, 525 bp, Glycine max
  unsure (1)..(525): unsure at all n locations
  Clone ID: jC-gmfl02220094b04a1
cgcatatctgcagagcttgacngccgcgacgtagctcgaattcggctcaggcgcgcatagtcacatagtacactctggtctgaactctgaatctttctggtgtcgtgtcccatttgaattgaattgcatcttgaaagatggcggaggaggagaagccaaatggagaagaacaagtgaaggacaacaacaacaacaacttatacgacgccgttcagcgtctgatcttggaaccttccaagatcaaggcctccctcatccctctcttccccgaagcttctagaacctactctcgccaactcctccactggtcccgtcaaggttctcccctccgacgcatcctcttcatctccattgggatagttgcacttgttgctctctcaggacttgttgcttttacgctcttttttctggctgctactgtaaatgccattttcgtctcccttctcatttctttggctgtggctggaggcttcttggctctgctctttgcttttgtgacagctatatatattggagcactatcac

SEQ ID NO: 8538 - DNA, 469 bp, Glycine max
  Clone ID: jC-gmfl02220094b04d1
agtcgactatggcttggaatgtgccagagtgctgtacactactgtgagtgcacagggcacggttgggtatgtaagggtggtaaaccacactgtaaagtgtatgccagaacagtaacaacacgagcatttgccgactaacggggtgcacaaagtaacaccagtatgaaatagaaaaggagcactataacaaaatgacaaaccattaatgcgtaaattatgtgaagcattatgatatatatgaggagccatgaaaaagtaccagacaagagctttgaggcagagatttcggagggtgtagagttgggggacaagctgagacgtagaactgtaataaggtacaaggagacaaacagaacccaaaggagggccaggagtatagcgcgcactataggagatagaagcagccatagcaaacacagcactgtcacaatgagagccgtgtaaatgaataatgtagccagcagcagct

SEQ ID NO: 8539 - DNA, 419 bp, Glycine max
  Clone ID: jC-gmfl02220094b05a1
gaacccatgttcccgtgatgtcaccacttacaaatgggttcgcggtgttcatggggcacgggtccaccatccctatcaccggcactggcatcaacccagctagaagccttgggcctgctgtcatattcaacaacgagaaggctcgggatgaccagtggatcttctgggttggacccttcatcggtgctgctcttgctgcattctaccaccagtccgtgttgagggcccaagcagcaaaggctctagggtctttcaggagctcctcaaacctgtaattctggccaagctatttgagctactagagacatgcttcatttaattggtgttcttaattaatttgcttatacatggtggataggaataatctgcatattctcgtcactatgttgatctaactaatgtttactatatttgtggtg

SEQ ID NO: 8540 - DNA, 557 bp, Glycine max
  unsure (1)..(557): unsure at all n locations
  Clone ID: jC-gmfl02220094b05d1
gcgtcgatctatcgctagccaatgtaccagagtaccgtacaccgtgaattaaactatgattttaaacctggtactggtgcggtttagcctcggcgtatgcactgtgcggattaataataataacttggtagttcaacttggtggtaccttatgattttgatcttaattaaacaccatttgtggtattatcaacctacgcgtaaatgttaacttgtaaagtaagctagtgggcaaccacaacctacggcttccatgtatactactggtgcgcatactagtgagccgccggttccaccgcctgtagctgctgccagagcacggtgttttggtttgaaacaatgggtgatgtactagtgggctgccgccccggcggtgactacttagagggccacttcggaggccccgggttaatgggcagttccggaacacaatggaaagtagctagctgttaagctggggtaggggtgtgtgtgtgngggtatgtggtggtgactggtggcaggtagctaacggagagctaatgccggtgcggagagctagatgagtgagagtttact

SEQ ID NO: 8541 - DNA, 542 bp, Glycine max
  unsure (1)..(542): unsure at all n locations
  Clone ID: jC-gmfl02220094b06a1
tgcacttcaaacagtttgggcgtcatgtggagagagagagcgttattggtgatcctgctactgcttctagtccagcaaatttgtgctaccaagaagcaagatcatggttgccccctttcttcctgcggcaaaatcaccaacataacttacccatttcgattaaagggccaccctaaaagctgcggcgacaataggtatgagctagcttgtgaaaacaatgttactgtgttacatttgtactctggaaaatatcatgtgcaggcaatcaactacaataatttcactatccgagtggttgatccaggagtcgatcaacaaacaaattgctcctcccttcctcgctatttcttgtctcgctccaatttcactgatacttacagtgatatttacaacatggatccataccaagctggtcaatattcaggtcatcggaatttatntatttgttatcggtaaagattagttgctagttnttatttatgatgaaatccacgactttttcattctcaattctttcaatacttaggtcgtagtaattggga

SEQ ID NO: 8542 - DNA, 641 bp, Glycine max
  unsure (1)..(641): unsure at all n locations
  Clone ID: jC-gmfl02220094b06d1
aacagagagcaagtcttggccgctgactancnacggnccaggaacactatctcnccaactctcctctgccacctcctcccaccgctacgcgccacaccgccaaggggtgccaacaactccgccatcaccccacatctccatggtgcaagcccctcgacctccagattcgaggtccacaccaagcttcaaacgatagcataaggtcactctggagcaggaatgttaggccataagcggagaccgtgacggagcacggtaaaacgtgtgaggtaggccctggattatatatataggggacagccacgaaatgcgacccaaggattggaaaatgtagatagggcctaggtcacaaaaccagctaaacccggttagaagccaaagaaccgagtgcgtacggataatacaatggtacaaccccaattaaagtggccgtagttactatttgatgcttagcatgctcgacccaattaatttagatttgcaaataaatggttggagctttatgacaatggtgacgggaactaaagctattactatagctacgcctgccactactggttactgcgggtgggctacgatgcgagggggggcagagaaattgccataaagcaataacagagaaaaggtacaaaggagatgag

SEQ ID NO: 8543 - DNA, 452 bp, Glycine max
  Clone ID: jC-gmfl02220094b07a1
ggcgagcagaccggggacgtccctccccacccgaaccttttctttcaccatcacaaccaccacattcacccacgggggggggcactcacatctactctgcgaccgatatagctccccttctcataatttataataataatttactacacccctcttaatctacagaccttgtttattatacccatttatatcctgccttattatcatatggacatgctttcggctctccatgcagctgttaattttgtgcaatacccttatggaggttatatcgtgaaccgtccaactctagccagaaggtttatcccagaagaaggaaccaaagaatatgatgagatggtgaaggatcctcaaaaggcatatctgagaacaatcacacccaaattcgagacccttattgacatttcagtgatagagatattgtcaaggcatgcttctgatgaggtctacct

SEQ ID NO: 8544 - DNA, 577 bp, Glycine max
  Clone ID: jC-gmfl02220094b07d1
ccaggaatttgcgtgtacatgttggacttgcttgggcggggggggggggggggggggggggggggggggggggggggggggggggggtgtgggggggctgggcggggtgacccaaaaccctttaagatgcgtgggtagtttaagaggaattagatattaggagccatgtggggatgtaaagtgtagttagactgaattgttatatagggatagcccatatgggccaaaagtttggcaaatgaagttgggttgaatggcaaatgagccactaagcgcgggccaactgcaatgcctttagcgtcctggggtacatggccagtaggcggttgtgcgcgcagggggtttgtaagggtgcttacgggcgggttaaatgggggcaaactggttaagcttgggcaagttcgacgttaagggccaggagtttgggccttaaccgacattgtagtacaactagcttggcataagagtgtgagtatgcaaagcgtaagaacccgtgtcaatggcccgcgcaggcggtgtacagagcttggggcaccagttggtattagtgtagtagaggtgggccggttggtggtgc

SEQ ID NO: 8545 - DNA, 513 bp, Glycine max
  Clone ID: jC-gmfl02220094b08a1
aatcctcaatataaatcaaacacatcctaactctgacaaatagtcaaaattataacacatactatatatgttgctaccggaatagagcatagcaatgatttgcactccaacctaacctcagaattcaattcgaggctattgcatacctctgggcatgaccattcaaaagtctacttctgactacgtaactggtacagggttattatgctcttcttccttggagaaaaagtgtgcctttcaaacaacaaacgaggacacaaaaagcaacaatgttcatcaatatactcacattgttcacctaaactggctccttgcttcatcttcctgcacctcttctggcaaagggcccaaaagaaaagcatcattagaagtggtacacaaacatgggccaagcttccaactgaataatcatgaaggcaaagcaaagtctacaacaccacacagcgagattctgaaccaagaccaagaaagggataagtacattaacttaaggatctcaaagaacttgagcca

SEQ ID NO: 8546 - DNA, 503 bp, Glycine max
  Clone ID: jC-gmfl02220094b08d1
ctacgtcgatctatcgctagccatgtgccagagtaccgtacaccccggctgcggggggttgtacgcagagcagggcagggttattggtatgtaacggtgtgggtggtgggtttggttgggtagggagggaggggcttgagcgggtgggaaaggggaagggagacggggagattagcggagcggaagcgtagagcgctcagggggtggagaggggcgataacagggcagcaggtaaggagtgcacaaggttaacgatgggcggcaggcgcagggcgcaactaacgggtaaggcccaggtgcagcgacctgggccaccggtggtgatggtttaccagctgggtaagggagtaaggagattatattatacaccaggttacgcaggcacgcacgccagagcaagagccaaccattggagcaggcagtagctaagccacaactgccgaataaaacttggtacagtaggaaagatgtgttggagaaatttgctattagcagagtagtag

SEQ ID NO: 8547 - DNA, 436 bp, Glycine max
  Clone ID: jC-gmfl02220094b09a1
gtaacagtcaaatcgggacattctagtttttctcagtcactctctctctctctggaacgtcggggcccacttaaggcacaaaaccccactttagatccgtagagcaaggcctcgccgacgagattcccgaggctgtgcaatcagcaatctagcaccagcaaaaatccgctcagatataggttcttctgaaacaacctacaggaacctcacttcacaatcgaagagaaccctacggacacgctctctgaagtgaacaaaaatatagaaactgctcatggtgcatatgtctatcctgctgcacagcaaatgctatattcatcaaggaaaagttctaaaggatggtactactttggaggaaaataaagtcactgaaaatagctcgattgcaattatgtgatcaaagactaagagttcatctggcgaaggatctactact

SEQ ID NO: 8548 - DNA, 357 bp, Glycine max
  Clone ID: jC-gmfl02220094b09d1
gggggtttgccgctatacatcgttgtagtactacctgcttggggggggggggggggggggggggggggggggggggggggagtaaacgaataaaacccaggcagggcaggaataacttaacatttaggaccataaacagcacgggtagtaaggagactaatggaaaatgcataacagggaggaaagatagagagtagaatggataaggccggataaaaccccattaaggagtgggaacagcaccatggctgaactgtggtagtaaggcttggtgttacttagcatgtactagtggttagtaggttaccctgaacttgtattagcaccagctaaaaggtacgggtaggaactgggtta

SEQ ID NO: 8549 - DNA, 565 bp, Glycine max
  Clone ID: jC-gmfl02220094b10d1
cagcgtcgatctatcgctagccaatgtaccagataccgtgcacacagaaacaaccgagtttatacattaatacacctgtagggggctgccaaaatactggcaacagccttcaattggcctacaggataatagttacaaacaagtgatttgttatggccgctgttcgtggtctccgccgagctaaagtgggcgcaacatgtggatgcccaacattaggatgggccaccgacacactgtgcatataaggcataagcgcaaccttaacagttaacataaccacccgaggttgttacattactaaaccggcagggggctgcccaactactggcaacagccatctatctgcctacatgataataggtaaaaccacgtgatttggtattggcgttggtcgtgcaccccaccgagctacagtgggcgcaacatgggcataccaaaaatgagtattggccaacggcaaacggtacatataaggcagaagcgtaacctaaaaagataccataaccaaccgagttttttacattaatagcacggcagtgggctgcccaactaatgccaccagcca

SEQ ID NO: 8550 - DNA, 482 bp, Glycine max
  Clone ID: jC-gmfl02220094b11a1
cgtcggtctatcgctagtaatgtgccagatcccgtacaccgcaggtggagcgcactagcgcgcggctacgccagccgactacaatgctgtaggcgtggcagcccgcccctatatctgcgtctgcgagcggctagacatgtaacgtaaggaagtggcacgtctctgctacagatgccataaagttagatattattccagcacaaagctgcgctaagccagtcttaacttaagggctcagcttgagctaccgataacgtgatttgattggaagggccaagaagttggataaagctgggccttggcttgcccaaagcgccatgctaagccatgttgaaggcgccaccgtagtagtgcgactggtaagatatgagcaatagagtaatgatgggtagctcgcggtagcaacaacgtaggaaaggcgttgccatgattatggggatggcagagtcaggaagcaggatcgaatagcgagggaacagctg

SEQ ID NO: 8551 - DNA, 463 bp, Glycine max
  Clone ID: jC-gmfl02220094b11d1
tacgtgctactgttgtagtaatgtcccagatactgtacacggcggtgcgcatcatccgtggcatccagagtaaggggtttagaggtcgaaacaaaaacccttggagaaaattaaatctgttttggtttgatcaccttctgtatgtgtgacccggggaaggttgtgtggtgtgtgctagtctggtaccggtggtgcaaacagcgtgtctcgcgagcggccgaatgccaagtatcacgtattcacacacagtgtcaacatcaaggttcgcggggtccacggaggtccacgcgggcccggctatcgacattattgccggagctgggaaggcatgggcagcattctaaacagctataccagctgagttcgcaagcccagcctaacaagccggcaacccggcactgggtgtataatgtgaaaccgccaccgccgccgtcgccgccgtctgtgccgcgggtgcaggcaa

SEQ ID NO: 8552 - DNA, 514 bp, Glycine max
  Clone ID: jC-gmfl02220094b12a1
cgggaatttgccgctgctacatgtgtaggagtggcacctgcttggggggggggggggggggggggggggggggggggggggggacccaagaggtacaagggctatgatggcagaagaagtggcagcaacgcgaggtattaaaataaaagagggggaagagtaaagagaaggcgcggagggcaaaggtagaagtcaagataagtgtgaccgtggtgccggcaataacacaaagctcgaacacagggtgttaggaggaaaatagcatggtaaggcagggagtatccaagatagagtgcgtgagattagaattgtagcaggggttgggggcagcgtggaggtaatcggggtggtaaatgccagacatggaggttatggagttaagctagtaggcattatagcagtaccgccgcagacgctgctgaacatcaacgacaattgcgctaaagcctttaacgggagcggattgccgaggtatttagcgagcgtattgggccgccacaggggtagtataagg

SEQ ID NO: 8553 - DNA, 601 bp, Glycine max
  Clone ID: jC-gmfl02220094b12d1
gtggtttgttgactggtgtctgaggtgcattgagagagtagcgtaatatgttggcgacaatgtgtgtatgaaggtgaggtaggtagtgagaccgcgtggagtgagtgagtgagcaaaacatgaatgtagttttccgtcatctactgtatgacgtcctccttctttgggggggggggggggggggggtacggagagcaaaaaagtcgggttaaagttagggaaaatgtgcccacgggattaactaagggtcaagaaagcggtataatggtatagaaacatgttaaagcggattccgaataacgctaagcgttgattcaaggcgaatgggtttggtgatacactattgcgcggagaagagataatatacataaacggatagaatacgctaaatggtgaagtaagaagtagtgttggtaggattagtggtggtacggcttgtgctattcatggttgtagaagtgggtgttaccctactgagcagtggtatcacttgtagacaatgggtttgtggttagatttggattaatagattaggcaataaaactttgtggcctagatagcaccgtaaagggcgccattaagtcatagcacattggaataa

SEQ ID NO: 8554 - DNA, 503 bp, Glycine max
  unsure (1)..(503): unsure at all n locations
  Clone ID: jC-gmfl02220094c01a1
gaacacatttgcactcacacatagaagcagagagaggccattggttggtttcagagatgggaagcatgcacatagaaaccccagaaacttttgctgatggtagcaaaaacttcgatgatgatggacgagctaaaagaactgggacttggattactgcaagtgctcatatcataacggctgtgattggttctggagtgctatctcttgcatgggcaattgcacagatgggttgggtagctggtcctgcagtgctctttgtcttctctttgataacatacttcacctccactcttctcgctgactgttaccgttcacctgaccctgtacatggcaagcgaaactacacatattctgaggttgtcaaagccaacctaggaggaagaaaatttcagctgtgtggattggctcagtatataaatcttgatggtgtaacaatcggctacactataactgcatcacttagtatggnggcggtgaagaagtcgaactgttacacaaacatg

SEQ ID NO: 8555 - DNA, 518 bp, Glycine max
  Clone ID: jC-gmfl02220094c01d1
ggatttgcgtggtacatgtgtgtagctgcgcctgtcccgtcttgggggggggggggggggtaagcagaaaagcaggcgtgagaagaggcgatagaggtgggacacggcagttgatgccgaaaagggataatgaagcttagtaagagggaagaggcaattgggcgaacgcagaaaatcgtaggacgcataggccttctactgcaaaaggcacgactagcataagggtaagacatatgctctgattggcaattcatgtgccactggatcgatctcgctagctcatcgtagactgtggtgagacgcgtattgaaaggtaaggtatgccttcgtcggggataatcgtcgcatgcccaaaatttgcctcggatttaatggaagtcttggctactatagtttttgggtcttactgcctcgaagactcaacacctttctattcagtctttggtttaatacggctctacttgcaagcctcaagcccatctctttgcgagtcctctaggaactctcctcccgcgccg

SEQ ID NO: 8556 - DNA, 315 bp, Glycine max
  unsure (1)..(315): unsure at all n locations
  Clone ID: jC-gmfl02220094c02a1
caaagcacaagaagccagagagcgaatgggttcagcaatgaatacatagtgataacaatcttggctgctgccgaaggagaccataaacttccaagcatcaatggaagtggagacttgaagcaagctttacagaaacttggttccattccgtcaagcagattattggcagttgaggtgttatggacaccacagaatgagaacgatactctctcagaacgggagttacttgaagattacccgcttttacggcctttgaagtgggggatgccatgcttgcntactgctactagcctcttatatagctatgaactgaga

SEQ ID NO: 8557 - DNA, 583 bp, Glycine max
  unsure (1)..(583): unsure at all n locations
  Clone ID: jC-gmfl02220094c02d1
ggatttgcgtggtacatgtgtagcagtgccgcctgcttggggggggggggggggccaaaagtaacatccaagtttgtgattaaagggttgggatatgacatgaccttgtatacatcagcaagcgcacgaggttggagcgggagtagcaagaagtgatagctcaagggtaccggctgtggtagaggcatggcaagcaaaggctgtagtatatctaaatgtaagatttaaaaaaaagacactcactcactcatggaatttaaaaccaacctaatcctcctaatcaaaaggcatagtattaggataggataaataaggcacgcactaaagccaaggctgagtattaaccctacaagtaaaattagtggggtatgccgacgtgatgtccggcgaagggctgcgaacagtccatatgcctagtccgggctgctagtagtaggggggtacaaagagcaagtacaaagtgaaggcagctaactattttaatgcgttaaaaaggtgcccaattaaacacaataggtgatatccagaagagggtacagaagtgagtggcgctagtancaccaagggtttggttaccaattgc

SEQ ID NO: 8558 - DNA, 544 bp, Glycine max
  Clone ID: jC-gmfl02220094c03a1
cctgagacatcttgtcaatctgctacaaccatgaacttgtttcctaccaaggaaaacaacgtgacaccaaaggacctgacagctatggatttgttctctccacaagcttcctcctatcgtccttcagaggagattccaaccttgattaattccagtgcaattaaatctgtgagcaagagtgctaaaactgcacagatgacaatcttttatggtggacaagttgttgtctttgatgattttcctgctgacaaagcaagtgagatcatgtcctatgccaccaaagggatcccccaaagccagaacaattctgttttcacctacacaccgagccagccttcatttcctgctaatttggtcagaacttcagctgattcaagtgctccaattattcctagtgtgaacattaccaactccattcatgaacaccctcaagcatcatccagacctgttgtttgtgatctgccaattgctagaaaagcttcactccaccggtttctggagaagagaaaggatagaattgcttccaagcaccatatcaactagc

SEQ ID NO: 8559 - DNA, 478 bp, Glycine max
  Clone ID: jC-gmfl02220094c03d1
cgtcgatctgtcgctaggaatgtgccagagtgctgtacacgggcacccaagggcgtgaaaaaacgacttatgcttttaatcagtttagggtttggcatggtgtgatcgcaactgttggcggggctagaccactgacggcaaagcgttcacccaaagctacccaaaccaaacaaaagtcttagtaggccgcgtgtaattggaggcggccgcctgagccggcgcctccgtataaggccccgtaagtgtaagcacaagccggttaataagcagagacaccataataacaaacagtagcggctggtggttagaaaacttcgttaaatttgggcgtagtttatacaggagcacaaacaagctcaccaaacttggagactgcccctgccaaagattatacagttaaaacaatggagtaaaaggggtggtaatagtattaggataaaaaggccgcagaaatgtaaacaaatgaagaggggctagc

SEQ ID NO: 8560 - DNA, 409 bp, Glycine max
  Clone ID: jC-gmfl02220094c04a1
gccatttgtatacagtgtaatgactttgtcagcagcaacatttgcattttggtattttgtaggatcacacatatttcctgatgttttgctcaacgatattgctggcccagaaggagatcctttgttgttgagtttaaaactatccgtagatgttttggttgtttcttgtccatgtgcactgggtcttgctacgcccacagcaatcttggttggcacctcacttggggcaagaaaaggacttcttattaggggaagggatgtgctggaacgcttggctggaataaattatattgctctagacaagacaggaacccttaccaaaggaaaaccagttgtgtcggccataagctctatcctttatggagaatctgaaattcttcggcttgctgctgcagtggagaaaacagca

SEQ ID NO: 8561 - DNA, 594 bp, Glycine max
  unsure (1)..(594): unsure at all n locations
  Clone ID: jC-gmfl02220094c04d1
cagggatttggctaggaatgtgccagataccgtacaccgaccagcccagtaccagttgtttgagtagtagtagagtataagcggtaaatgcaccaaatatgcaagatacattgcttgataagtttaggaagtataaggtgaaacacgatgcagaatggggtacaactagtgaacggaccccaaccgccagagcctttgcgggataacccaaggtgattacagccaacataaaggctacgtaacacatgtgtataactggtgccgtaacctgtacaacacggtaacaagcaacgcagcgggagacttaaaggctaatagtctaattggcgaacatggggcctcgctgctggccacccatagcaaaacagatggcgagagcacgagggcgtcaagctaacgtgtcatgggtattgcgggccgagcggtggacggactggctggtaggcatggcgcggtagcgccgancggcgtgatgggngctggtcaggcgggtggtaagaagcgcacggagaaggacatggcgtgctacacataacgtaaagcggctgctgagccgcagaaaacacggcccgcgacccgccaaaggnagagaga

SEQ ID NO: 8562 - DNA, 314 bp, Glycine max
  Clone ID: jC-gmfl02220094c05a1
cttcattccaattcattttggcaccacattaactctaaacacaccatgccaaccctcaatgatgtcctcacattctcattcttccttctcctctcttgctattgccacctcctcaatggccaacaggactactcatttggccatgccatcgacagacaattgcatacgctcttgaatcctataatactatcactcttgcagatctgaaggactcacatattgatggatctagatccctatttcaagtccaaaaaaaccacgcgatctcttctaatcacaacacgtgtataagagaagtattgcatgtcctacat

SEQ ID NO: 8563 - DNA, 579 bp, Glycine max
  unsure (1)..(579): unsure at all n locations
  Clone ID: jC-gmfl02220094c05d1
gcgtcgatctatggctaggaatgtaccagagtgccgtacacgcaactgggcgcctcctaacctaaagtgctaggctcagcctcttgttcaactgtggtcgtgggctctgggtgcgaatttgaaggggtcttagtcggccccttcaacttcagagggttagtcaaccaactatgttacacttgcagattgttcttagtaccagttaaggacagtaatgtaaggttaacagttaaaggtgtcacgtgtaaagtactcaaaacggccaacaacgcaacaacaaccatcaaaggagactacaaaaacaaaacgttaggcaacagaaagtaaggattagataagttggctacaagcacaggctggtgtgttacaaaaaacccgtatgccagctgcaccactagcggccaaacctgtagctatcgctgccgcaatgatacaactaccgccataactggaaaacccaatgacaaatatanaatagccacaaacgcaatgcgcaaatgtcacgattgcacggacacaaaaacaggtagcatgccaatgtanaagcacaacagtggtannacagaaagcaccaataca

SEQ ID NO: 8564 - DNA, 522 bp, Glycine max
  Clone ID: jC-gmfl02220094c06a1
caaatgctgcagaagatttctcccaattcgggatttcaaaagaggaaaaagataagcttgttggggaattgattaggtacatgcttttcaaaacccatcaaaattctgggtgccccattaagagagaggaactcactcaactcgttacgaagaactatcatcagcgtaaccttcctacctttgtgatcaatgaggctaaggagaagctttcctttgtatttggctatgaaatgagggagcttcaaaggacccaaccttcttccaaagcccggacacagtcctcccaacaaagtgttgcagattcgaaatcatatattctcataagtcaacttcctcctaatgtatatgaaaaatatgttgtggatgttaatactgcgcatctatccggattcacttttgtcataattagtattgtatatcttgccggtggtaaaattccagaagaaaatctatggagccaaatgaggaggatgggtttgggtgaaactgaatcaagtcatccagtccttggaaatgttaagc

SEQ ID NO: 8565 - DNA, 523 bp, Glycine max
  Clone ID: jC-gmfl02220094c07a1
cttctcccgatggaactttcctcaaagaaagagttactatctcgaatagtatcaacactaacgcccaccatcacactcatcttcttcttccttgtgctttctccgagcctgtgcacatcactcggaagcaccaacacagttggatcggagttgctgaaggttgctccttctgaatttgaggggacagtgagaaccgtcgttgatgtgttgcaagaagtcacctctattctctccgagttcggttctggcttcggcgattcacgtctttctaacgccgtttctgactgtcttgatttgcttgacatgtcctctgatgaactcgattggtctgtctccgccacacagagtcccaaagggaagcacaacagcacagggaacacaagttcggatttgagaacatggctgagcgcagcacttgcaaatcaagatacatgcattgacggattcgacggcacgaacggcatggtgaagggtctagtatccactggtataggccaagtgatgtccttactccaacaacttc

SEQ ID NO: 8566 - DNA, 562 bp, Glycine max
  Clone ID: jC-gmfl02220094c07d1
gccagcaatttgcccatgtgtgcagtaccacctgcttgggggggggggggggaaattgaagaaggcgatgagaggggcagcagagcggtggttaagccggctaatggtatgaagaaaagtggccttagggttggggcagggattgaatagtgggaggcttatataacatttctgatttaaggggtttggcaatatacacttagagttgttggtatttaatggcgtgggaaaattgttgcttagtggtggaatggttggcgagcaagagtgaagacctagtaacggaggggccgtgacagaaggggtaagatgggtaaataggcataaagcgtgggggtgttagggatatcgcaaaagtataagaaatacgcatatgcggaataaaaggggttagctttagaatagacgcaaaaggagcacaagatgttaattttagcagcgggtttacgggtaagaagcaattgttgcctgcatacacgtcaaaaactacattggcgacgacgactagcttcgcggatggccatacactgccgtatagagcacctctagttagcaaagtgta

SEQ ID NO: 8567 - DNA, 500 bp, Glycine max
  unsure (1)..(500): unsure at all n locations
  Clone ID: jC-gmfl02220094c08a1
acaagcccaacaaacttggttttaattggtataggcgtgccaaggtcttgttaattttgagcgttaagtgctgcaactaatcagatcccaagaccttggcctaccttgccatacagaaaaaaaaaaagcagaaaaaaagccaaggtttggagccaacaaaaataaacacaaagcacaagtcatggaaagaataatggctggaagtgcaacaaaggttgctttcaccctcttggccactttcgccattgtcattccatgccttgaggctggcattgctgagttcgacgattatctcaaagcccaagctgatgaagcccataaaattgctcttgattcctatgtcccagagccccacgatgtcgcccatgaactcaatttccatgttcatatggcactggaaaactccacaaggagggaactaaggcagaggaaacttagaggaggaggcaaatgtcaagcctncaaccccattgacgcttgctggagatgcaataaagact

SEQ ID NO: 8568 - DNA, 602 bp, Glycine max
  unsure (1)..(602): unsure at all n locations
  Clone ID: jC-gmfl02220094c08d1
atagcgtcgatctatcgctagctaatgtgccagatgccgtacaccgcacaacacaggcctaagctaaagttaactttatggccaaggctttttagcgtacgttgcgcctgccgtttataatgacgttgcagcccttgcgcgcacctaggtaagcgcaggccataaaggcacggtggtaatacctaaggtttgcagtagagcacaactaggcttaagctaggcggtgtggctgtggggctgcccctgactgagcggactacgctatgacgtattatgcggtagtagcgtatgacaatatagacttatttacaggccggcataaagcagagaaagctgccaacctggcaggagggggatgaggcncgactaccaatgccacgttgtaatggccgggaggggtgcaggcgcctgtaaacagagtaggataacccaacgccgcattgttaacagaagctgtaacagcgccacggactggtaaaaccaaacacggacaggatgagacgctgaataagcaacaggtgaaagaaagaacaagtacagcaacaataaagaaggatagaggagcgagacgcgagagagagagagagatagagagagagaga

SEQ ID NO: 8569 - DNA, 318 bp, Glycine max
  Clone ID: jC-gmfl02220094c09a1
ggaattctaaaggaaagaacagctgagctggtcagaaaatcaatggcatcatccttgggttttgagttcctgacgaagaagccttacagtcctccatcctgggcatcccatctccaccctttaccttcccacttcttctctcttgcccatcttcccactccaattcacagatggaaccttcccaatctgcccaccaataccgagctgtggatcaagcgagacgacctttccggaatgcagctgagtggcaacaaagtgaggacataggagttcctgatggccgatgccattgcgcatggcgccgactctatcatcaca

SEQ ID NO: 8570 - DNA, 547 bp, Glycine max
  unsure (1)..(547): unsure at all n locations
  Clone ID: jC-gmfl02220094c10a1
ctcgagcctctgcatatgaataaatcgatttcaatctttgcagtatcgaacatctctgcacacttcattcccaaatcccactcgtttctctgttgtttctgcactgttttgaggaggttgaaggggaaaagtgggtatcaaagttggcatagcagaagtgcaatcagctctagtttcttctcttccaagcaacaggaacatggatgcacaagccaagaaaaaagcattgtttcgtgctaaattgaatgcccagaagaaggaaaaacgcatagaatctccccttgtaaggtataatgaatttgatcaacctgtttgccgggtttgtgatgttggtctaaagtctgagtctttatgggatgcacaccaagtttctcgtaagcatcgtgaggcaataagtaatctgaaagcgaatgcagctgggataactcaggcatacaatgcatagccttgtgctgattccagcttttccaangggctaaccagacattctttggactcacaattcataccgncagaagcttcacactagtttctaaacctcaatcat

SEQ ID NO: 8571 - DNA, 541 bp, Glycine max
  Clone ID: jC-gmfl02220094c10d1
tagcgtcgatctatcgctagctatgtcccagagtgctgtacaccgtacaggcaacctgaagtaaagtagtgggtagataaacaggtggtggtagtcgtgagcggggttgctagaggtacggggaaccggtaactagtggtggcaaatgtggtgtaactgtcatcccaagggtgtactggggtgtgtcggattgtatttagtaaacggggttgtggtgcccgcggacgggagtccagttcccctaggctaacagggcagtagggtatcaagtagagtaggagtaaatatgtttaggggtgcccgatggaaggcccagcccggcttgtccagggtctatgtgtagggtgacccgggagcgtccggctcgggccgccagattttgggcatgttcaagcactggcattatcaaaacaggccggtggccgcagtctacgcggtaaggtaagaacggtccccaggcaggtggggataaaacgccaagaggcttggggggggggctgtgcacagagagttcggtaagagggtgggggagggtggggtg

SEQ ID NO: 8572 - DNA, 498 bp, Glycine max
  Clone ID: jC-gmfl02220094c11a1
ccgaggattttggcgtgctacatgtctaggagttgctcctgcttggtggggggggggggtaaaataataggttgtgaggggtaaagtcgtatcaagcatcgagtacaggtctagaaataataaaatttgaggtgtgtaagcagacacataggcggcagcagaacaaaccaaacacaaacccgactgaaggagatactctagctgaggcagcggagttttgtcgcgcatgtggaataatgggtagtagcattctcagttgatctaccaagcatgcccatagcagccctgttaactcggcacaacatgggctgtgtgcgtagcgtgaatgtatagccgatttgcgtagggctgagtgcataagtaatcttagctgttacggctcttatgcgcaccacaatgctcgggaactttagggctgagttgccatggatctggtgcttacatttataatcgtacaattctcaacgtgggattgtgaatagtgagcggctgggttgt

SEQ ID NO: 8573 - DNA, 474 bp, Glycine max
  Clone ID: jC-gmfl02220094c11d1
tacgtggttctgtcgctagaaatgtaccagatgctgtacacgagcccatataccacatggccacgcatggtatgtttattaggcccggcttgattgctgctaaccatgagagggccgggttagcacaagccggcgcgtgtaacaagtaatatgcagctgtaaccagggaataacaactgtaatgtactgctacctacgtggtaaaactaatggttgccgtggaacaggctaaggggtcatagggataacttgtgtgagcattggcggtaagttttggtaaaagtgccggggcgccacctaaatacaccggctgcgccgattcccatgcgacacataatagttggcggcgcgaaggtaaaagtgttaccaatggcggtgaagcttatatacgagcgcggggcgcatacgcgttagttggtatacctgctgaaattacggtgactgcagctaggaaggtgataacctagagtgtgg

SEQ ID NO: 8574 - DNA, 525 bp, Glycine max
  Clone ID: jC-gmfl02220094c12a1
ccgagaatttggcgtgctacgtgtgtaggagtcgtgcctgcttggggggggggggggggggggggggggttaagaaagggagggggcgaggagaagaccaataggaacaatagtgagataacttaatagcaaagaaaatggggattaagagggtgaccaaagaaatagagaccaagcccacaaaaggcaggaactggcaggatataatggccgccagggagggctttgaagtgctaggaaaagcttgggctaggggcgctgtatattgggtgaaaggaaatggtactgcaacctaagccaatttcttgatcagaggtagctgcactttataggccagaaagagtgtgcgataggccagaagctaatagctaagggggtagcaagatgatgctcagggttgctgccccttaagtatttgtggttaatgcacaaggaagcactaatgggctactgtaagcaacacctggacccgtgtgagttcttgcgttactagcaaggacgtttagaacactttagctgcgagcg

SEQ ID NO: 8575 - DNA, 539 bp, Glycine max
  Clone ID: jC-gmfl02220094d01a1
ggcattagatcagcttaagggaatgccttctcgcggtgatgttgagcctggggagattccttctttaatggacctaggccttaatccatctgcaacaatgtcacagaatggaaagtgcgttgctaatgcttctatggtaggaggggagactgaggcactgcagaagcttaaaaaatttgcagctgagtgtgcagctcagccacacaaggggtttaaggatggaacacagagtatatatggtgccaacttctcctgcaagatttctccgtggttggcaatgggatgcctttcccctcgcacaatgtatgaagaactgaagaagactgccggcagagtcatttctgcttcgtccaaccggaatgatggtggtaatggctcgtccagaactggaacaaattggttgatgtttgagttgctatggagggacttctttaggtaactattttttgtgcacatcttttggctttgcttgaaacttcagtgtacatttttctttgcatgagatatatggaaatggcaatggtgcaccactttgggga

SEQ ID NO: 8576 - DNA, 406 bp, Glycine max
  Clone ID: jC-gmfl02220094d01d1
tatctgtgtggagtgccgcctgcttgggggggggggggaagggggggggggggggggataaaacccatacccaaaatatgtggaggatggctaaattcagtcacactagttaaagatacatagatacttaagaagaattagacataacgaggcctgaggggaggtaaaactataagacagaactaaattatatatataggggacagccacagatgccgcccaaggttgggcaaatgtagtttggttgtatggcaatcagccactaagcgcgagccaactgcaatgcctttagcgtcctggggtacatggccagtaggcggttgtgcgcgcagggggtttgtaagggtgcttacggccgggttaaatgggggcaaactggttaagcttgggcaagttcgacgttaag

SEQ ID NO: 8577 - DNA, 502 bp, Glycine max
  unsure (1)..(502): unsure at all n locations
  Clone ID: jC-gmfl02220094d02a1
ctctgtgtattacccaacaaatgcagcaattcaacaagacactgaacttcaagcatggtggaaggaagttgtggagaagggtcatggtgacttaaaagataagccttggtggcctaaactgcagactgtggaggatctcattcaatcctgctctattatcatatggacagcttcggctctccatgcagctgttaattttgggcaatacccttatggaggttatatcgtgaaccgtccaactctagccagaaggtttatcccagaagaaggaaccaaagaatatgatgagatggtgaaggatcctcaaaaggcatatctgagaacaatcacacccaagttcgagacccttattgacatttcagtgatagagatattgtcaaggcatgcttctgatgaggtctaccttggccaaagggataatccaaattggactacggattcaaaggcattggaagctntcanaaagtttggaaacaaactggcagaaattgagggaaaaatc

SEQ ID NO: 8578 - DNA, 331 bp, Glycine max
  Clone ID: jC-gmfl02220094d02d1
ggatttggcgctggctacatgtgtgtgactgcagtaccgcctgcttgggggggggggggggggaatagactaaatgaaataggggaggagaggatgggacgagaataacggcgtgtcagggtcacaaggcaaaagagaatagtgagggtaaaatagacgaagataaaggggcgtctttgtaagacaaatgtggcctgtaacggccaagatgaacgagcaaacggtgaggcggtgctggccaaccctggcgagggtggcagatgaattcaaaccttggccagccaatttgtaacgcacagaagacaaagcagtaactaagtttaatgcaaga

SEQ ID NO: 8579 - DNA, 479 bp, Glycine max
  Clone ID: jC-gmfl02220094d03a1
acgggcacatatgcctgaagcttgaactttcatgacatgagtggacattactcagggggggaagggctggaaatagctgaggagttgtcagagaaggtgacactacggatccactcgagccaactactcgccccttcaggcgccggagattggacatcttacccttaaaatacatcgctgacatggcggtgccgccgtcagatggttcacggaaacgtaccaagctggatctcagggaccgcgataacgtaggtcaaaattgcgacgaatccactggacacaaggtggtgaaaaaagaagccacagtggaaatccacgacaatatttccgaaacgaaaaacgtaactgttgccgatgcttttgaagttgaagattctcctaagttcggcgtgacgttagtttgcggccggagaaaagacatggaagatttcggttcgagcgggcttgctttaaccaaaggtttcactactttggcgttt

SEQ ID NO: 8580 - DNA, 557 bp, Glycine max
  Clone ID: jC-gmfl02220094d03d1
gcgtcgatcgtgtcgcgtagcgcaatcgtacccagagtacctgtgacactggctgattggtgccgtgccacggagagtgcggcgtctgagcgagcatcagccacagagggcaggcaacggaggtattaaaagggctagaaccccaaaatgaacctgaccgggccctgaagcccccttgtaactgttaaaagccagcagcagcagaacctatgttactgggcttcgcaaaccaacaaagggcggaactaactatggcagccctcggctgtggggctactggtgtagcgggtagagcgttacgtatggaaaacgataccaatactgggcacaaaaggtggccaattgcaacttttaaggcaagtggttggacatatggttattaagcttatattacactacttatggcataaaatttgcgtttacggtgtatgagtggtagtgcgcgtttcatctatgcagctactgcaaataggggtgttaatgtttgtgttgctgactgtgacgaacggttaactatagtagagcaaagggactacgacggtggtgaaaaccggcaa

SEQ ID NO: 8581 - DNA, 408 bp, Glycine max
  Clone ID: jC-gmfl02220094d04a1
ctccagtcgtttctgtgcatatcttgtgcactcagttactctctctctctctggagcgtcgtcgtttcgttagggcacaaaaccccttttcggatcggtggagcaaggcctcgccggcgagattcccgaggctgttcaatcagcgatcgagcaccggcgaaaagcggcgaagatgaaggttttcgtgaagactctccagggccctcgctgcacaatccaagagaaccgcattgacacgcgctatattgagtgcccagatgaaggaactgcgcatagaatctacccttgtcaggcataatgaattagatcaacctgtttgccggatttgcgatgtgagttctaaagtctgagtctttatgggatgcacaccaagtttctcgtaagcatcgtgaggccataagctatctg

SEQ ID NO: 8582 - DNA, 482 bp, Glycine max
  Clone ID: jC-gmfl02220094d04d1
ccgcgatctgtcgctagccaatcgtgccagagtggctgtgcgacaccaagcaccacacgcaacttggcaccatgagcccaaaaacggccgcgcctgcgaaagactaaaaagtaacaagttaaactaatggttattaggattaggaacccgggtagcacttggtgaagcaaaacgcgacagcacaagccgcagccgactaacacacggagggtgtgcccgagcccgcatttaatgtgtattatggaggggtttagtgtaaagcgactgcaaaaactgcggctgcaactatggtacgtatataccgggtcgcctgagctgtttatgctaccgtggttataccttaccaggctaaggctgcaagattgcgtgtcgcattggttggattaaggagtaacgcagcagcgggatagtatggcgccagctatataacttaggcagcgggtacgcctcagctggctgtcttttccgctaaatagtaggtg

SEQ ID NO: 8583 - DNA, 547 bp, Glycine max
  unsure (1)..(547): unsure at all n locations
  Clone ID: jC-gmfl02220094d05a1
ctgttgcaaaatccgttcccctatctttctgcgtttcgagttgttgctaaagagtgatggactcaccgcccagtaatcaccacgccgtcgacggagacgccaacgacctcgttagacccttttcccaccgcgacgacgacggcaaaccccaacccctcaccggcgacggcgccagtcccggaaagatattcatagggggtttagcgagagaaacgacgattgcgcaattcatcaagcactttggtaaatacggtgagataacggattccgttatcatgaaggaccggaagaccgggcagcctcgcggtttcggcttcataacttacgccgatccctctgtggttgatacagtgattgaggacactcacattatcaatggcaagcaggtggagattaagcggacgataccaaggcgggctgttggctcgaactcaaaggacttccgaacgaagaagatttttgtgggtggaattccttctactgtgaccgaagatgaatttagggacttctntacacgctatggagaagtcaaagatcaccatataat

SEQ ID NO: 8584 - DNA, 529 bp, Glycine max
  Clone ID: jC-gmfl02220094d05d1
ggcgaaggagtttgaccgctgctagcatgtgtaggagtgccacctgcttggggggggggggggggggggggggagtgaaaaacgtgcaacgcgagtaaaaggaaagacatagaaacactacgacgcataaagcgacttaggaataaaatgaacaagataattagtgctataagggctactgtagatggtaagtttagaagtacatggtaatacgcccttcactgaaaaaaggcggtccgtggtgagactgcctcacacccgctgctgaagaatgtgaagcccatggaataagagtaggcataaggggggggacaaaagcaaagagcgacttgcaacaatgcaagaattaaatataataaatgataaatccgtggtcagcatctatggtgagtggttagaaccagcagagtcattacggttgctattattcgagtttttgtgacgtttagaaaaccacttgttactactccttttagagttctttttgaactgcctagtagactgctgctggttcgaactctgattacaa

SEQ ID NO: 8585 - DNA, 471 bp, Glycine max
  Clone ID: jC-gmfl02220094d06a1
tcaactcgaggaactgcataggcttcaaatatttcgtcggtctccgacaatcctagccggatgcaggggaggcaagcatctaacgaacaacgcgagggtctcagcttgcattgctacatcaaggcctgaagatggtacccagacacgaatgtccagaacatacaggaccttggctactaaggctccatcgcttaaggattcggccggtgaactcgaaaaagtgggtgcactcaaagatgtgagaacatgacctttgaagggttagatggttcttaacttatatgcgcaggtgcctgtgctaaattgctaatgctcctggcgagtgaggttaagtggtattacattcctgtctggcttgctatattcttggggaagcagaatccctgtaatgtatgtacaaagtatttatcactctgcttgcacgtaatgctcgtatgtaaatgtaatcattcctaggatacttttgctgag

SEQ ID NO: 8586 - DNA, 400 bp, Glycine max
  Clone ID: jC-gmfl02220094d06d1
tgggggggggggcgagagggaaagggggcggacggtgtggataggggatagtaggctacgacaaaccgatgaagattccggagcccaggctagcaaaggtaagttgggggtggatatagagagacggaaggagtatggaaggagaaccacagtagcgttatgaccaaaaatgtaaactaaaaagcaagcagaaagagcagaagcatgaggaggcgtagatcggaacgggcggtagtgtttgttggagcctaggcctttgtatgaactgtttaagccacggaagccttaagggtacagttgttaagccaggcttagctattatgcgtggcgataacgactgagtaaaccgtagtggtgctatagatgtaggactatatagggctataaatctggattggct

SEQ ID NO: 8587 - DNA, 550 bp, Glycine max
  unsure (1)..(550): unsure at all n locations
  Clone ID: jC-gmfl02220094d07a1
gaactccatagccttcaaatccttcgtcggcctccgccagtcctcgccggaggccccgcatttcgccgcccagccaagacccgccactccccaccgcaaattccgcgtcttggctggaaaattcagccccaagctcaatggccggaacctccgcgtggcggtggtgggaggcggtccggctggcggggccgccgcggagacgctggcgaagggcggcgtggagacgttcctgatcgagcgaaagatggacaactgcaagccgtgcggtggcgccatcccgctgtgcatggtgggggagttcgacctgccgctggacatcatcgaccggcgcgtgacgaagatgaagatgatatcgccgtcgaacgtggcggtggacatcgggaggacgctgaagccgcacgagtacatcggcatggtgcggcgcgaggtgctggacgcttacctcagggaccgcgccaaggagtaccgtgcgaacgtcatcaatggctttgtcttgaaaatggatattcctanaggatagaactccccctacgttcttgcatactctagc

SEQ ID NO: 8588 - DNA, 556 bp, Glycine max
  Clone ID: jC-gmfl02220094d07d1
cgagtttgggcgtgactagcatcgtgtagccagtgaccaaccatgctttaggcggggagtagcaggcggcacgacgaacgccaaagctggcgactgtgagcggtagtagagcgtggtgggtatgaggtatcgcatacagccccaacccccctaaaggtttcgtgggagccgcaagcttggcaaaggacaacgataggatgtgctatatgtgaggagacaggatcgagtagggtagagagaaccgacagtagccttatggaccaaagatatagactggaagacaagcagaaagagcagaagcatgaggaggcgtagatcggaacgggcggtagtgtttgttggagccgtaggccgtttgtatgaacctgtttaagccacggaagccttaagggtacagttgttaagccaggcttacctattatgcgtggcgataacgactgagtaaaccgtagtggtgctataggtgtagtagtatatagtggtatagatctgggttggctaaccggccattgagaaaatattggtgcaacaagagttaacattggcgaacggcctt

SEQ ID NO: 8589 - DNA, 523 bp, Glycine max
  Clone ID: jC-gmfl02220094d08d1
cagcgtcgatcgtatcggtagctaatgtcctcaagtggctgtgcactggtggacgtgtggatgctggggagggctacatatgttaagcatcagcctgctgtgtgttaatccttatcctgaggctggtgggaacagcttcataggtaaccatatttagcgtggtagtaagccccaagaacagcaggattggtttccatccagcggctatatcacacaggaccatatgccatcacaggatcccaaaagtgatcccagctattcattattagaacctggctaagactagctaactgctgcgaggtagtcagaaacagctggttagtcgcaaatagcctgagtggagagggtaacctcgcaatgcaattaaagtgcacagtttagcataaccgtcaatgcatctaagcggcgcttccgcagacagtacttttaactagcaatgtaaccagtaaccgaagaagaacatttcctccatggggctgtgtgcgttggccaccaagtaacgtgcggcagttggccctcaaaa

SEQ ID NO: 8590 - DNA, 569 bp, Glycine max
  Clone ID: jC-gmfl02220094d09a1
caatcatgtgtgaaattatgaaacatcatccatcatgtccatggtgataaattggtgatagcagcttttccaaagggtttctacaaacccaacatgacaggctgttgcttccctgtgaccttccatcggtccggtagtcgcagggtcagcttcaggcttgttagaagttcctcttccggttcatctaaacatcggggaagagagagtcataaagggcctctggttgtttgctttggggagatgatgatcaatttggtccctacagtagcaagagtgtcccttgcagatgcaactgcctataagaaattcccttctggagccactgccaatgttgctgttggaatttgtagactaggaggctcagcagctctcattggcaaggtgggaaatgatgaatttggacatctgttatctgatattctgaaacaaaatggtgttgacaattctggcctgctctttgatgatcatgccaggacagcgttgggaatttatgctcttaagagtaatggagaacctgaattcatgttttaccgaaatccaagttctgatgtgctccttcgtcctgatga

SEQ ID NO: 8591 - DNA, 303 bp, Glycine max
  Clone ID: jC-gmfl02220094d10a1
tttctcttcaaattcaaaactctatctatcatgctacgaactacatacaattctcaaatcaaaattcaaacatataatagtagtatcaggcattagcacacttcaactcacaaaccttacgcacattttttgaaacagaaaatgaagctctccgcgttgcagcagacttatctcacgcgccgggcgaacagcttcagaggatcggcgcagttggattcgtccggcgacggctctgtgaagtcgccggcggcgattttctggttggtaatccacggcgtctgctgcctcatcagcttggttctc

SEQ ID NO: 8592 - DNA, 611 bp, Glycine max
  unsure (1)..(611): unsure at all n locations
  Clone ID: jC-gmfl02220094d10d1
tagcgtcgatctatcgctagaaatgtaccagatgccgtgcacacttgtgtttgtgtgtgtaaaagtcggtgtggtcaggggacccggggcggggctgctgcttgttcggttttttggtgtagaaataatctcggggtgtggtgctggtcgagtgaggtgggctggggccggggccggcaggtaaccttggtatactaggtcggctcctaggggaagtcagggagttaactaccatgcaagcaatgaagccacgtgaaaccgcccaaaaacaacgtgacgacgacgacgacgaaagtaggcggtgatcaactgttttgtccagatactaggcaacatcggacattaaatccgccaagtaacaaaggtacagtgctgctggatgttaatgctctgtctaaattggttgcagagttagttacaggcagacggtaggctagctaattagacggngaggaccggggggtggtgggccgggtaaggaccgggggctgctgtgttggtaaatgntcgtgggttcaagttgtgtgggcgcagcccggtgcggtgctggttgattctcagaacggtgtggtgcaactagctttagcctcgggtgctaagccggggcaacg

SEQ ID NO: 8593 - DNA, 454 bp, Glycine max
  Clone ID: jC-gmfl02220094d11a1
gcgtcgatctatggctaggaatgtgccagatgccgtgcaccaatgcctaacctatgatttagagcctggtacaggtgcggtttagcctcgccgcatgcaatccgccgattaataataataacttggtagttcaacttggtggtagcttatgattttgatcttaattaaacaccatttgtggcattatccaactactcgcaaatgttaacttgcaaagtaagctagtgggcaaccacaacctacggcttccatgcatactactgatgcgcatactagatagccgccgtttccaccacctgcagctgctaccagagtacaatgatctggtttgaaacaatgctggatgtatccgagcaccgcaacaccggcagtgactagctgcaggccacttcagagacaccgggttaatgggcagttccagaacacaatgcaaagtagctagctgttaagctgg

SEQ ID NO: 8594 - DNA, 569 bp, Glycine max
  unsure (1)..(569): unsure at all n locations
  Clone ID: jC-gmfl02220094d11d1
cagcgtcgatctatcgctagnaatgtaccagataccgtacatgcacaactgaagaacagcaaaagcaaacgctggcggggcgggcggctgatacggggccgactagagcaagcttagcctgtacatgattacaacggtttgtgttaaagcaaaatgcccgggccgccctaagatactaagcaccgcctagcgcttacggccacctggcctcgccaactaaataatcgacgtaacgcctaaatgcggttgctactggctccacacgatagactgcatgatcggtgaccacattaagagacagtacaggttaaaatacggaattaataactggagggtgagctgaaagtttgtaaatgtattaataaacagcgtgggcgtggccatcggcatcatatgatgtgtgtgaagtgttacgaggggctgaattagccagggccgcgccaattatataagatcatcctcgggaacaatgcccggtggcagcctcacctaggtctatgcttacacatgtggaaaagcgataatagatgcggcctgtgtcctagtaacaggcgagggtgagtacaaac

SEQ ID NO: 8595 - DNA, 339 bp, Glycine max
  Clone ID: jC-gmfl02220094d12a1
gcctcgatcatatcgctagcgattgtcgccagagtactgtacacctctgatgtgaaactggtgattcttgaaccaggggcaggtgcatgttagcctctgtgcatgcaatgcttacccttataggggtggcttgttggttcatggggagcttaggtagcatgtaggatagtagttaaacaccataatgatgaatcacttcccattcgtattcgtaagcaagccatgatagtcagacggcagaaaactagcaaaagctgcatagagcttattcgtgcacctcttggttatctccgcttccgcattctattggccgccgccctagcaacagccatgcgtata

SEQ ID NO: 8596 - DNA, 440 bp, Glycine max
  Clone ID: jC-gmfl02220094d12d1
ttgcgtggtacgtgtgtggagtgccgcctgcttgggggggggggggggggggggggggggggggggggggggggggggggggggaccttagcccccccaaaagacagcacttcaaagggaaaacggggagtaggaataacgctgaactttaagtaggctaggtaacgagagcccaaaaaagcccagtagggaccttaagggttaaattataccggccaggatcccatatgcggttatgagggacgcaaagactagagcttttggatagctaaagccgaacccggatttaactgcttttattgccggaccaaaactataattttggggggcgttaataaccgcctttggcagtggtattgggccacctttgctaggcgggctgcaaactgcatgaattaggggaggtggcagcctactaaatagccttagcaaactagggg

SEQ ID NO: 8597 - DNA, 505 bp, Glycine max
  unsure (1)..(505): unsure at all n locations
  Clone ID: jC-gmfl02220094e01a1
caagagattaacaaggttgttaaccgatatattgatgaaggtgtagcagagcttgttcctggagttctattcattgatgaggttcatatgctagatatggagtgtttttcgtatttgaatcgtgctttagagagctccctatctccaatagtaatctttgctactaatagaggaatatgcaatgtaagaggaactgatatgacaagtcctcatggcatacctgttgacctgttggatcggttggtgatcattcgaacgcaaacatatggtcctgctgaaatgatacaggtagtatggccttcatctttctttcaaatagatttcaaaatgttaagcattatgtgtttggatatacaaacatacatgcttcttaattgtgggacagattctagctatccgtgctcaagtagaggaactggttgtggatgaagaaagtttagctttccttggggagattgggacacanacatctntaaggcatgcagntcaaactgtatcacctgcc

SEQ ID NO: 8598 - DNA, 564 bp, Glycine max
  Clone ID: jC-gmfl02220094e01d1
gggtttgcgtggtacatgtgtaggagtagcgcctgcttgggggggggggggggacgagtagtgaagaatagtaagaggaaggcgagcttatgagaaagatggggaactaaataaggtgcagggcgagatattagataagcgtatatgtatttgggaacatttcgaagtgtgtgggggaggggggtggggagtatggtatatgatgtagtagataaataggggtatgggggcgacgaggtgggggggggtgtggccgagtgacagcagtataacaaagagtgattaaataggggttggcgataaaataagttatcacctatgttggtaaatggcggttagctaataaatgatgcaccaatatttatatggttacacattaaacagaaaaagacccaaggaaggtggaaagaattaaacggtcaaggaagcaaaggcaatattgatttccttattagtagggggggatagggtatgtgcggtgggctgtgaaaaaaacttagggcaagaaactaaacgataagaataaccatagctaaggaaggccgacgctgtaagaaggaagtg

SEQ ID NO: 8599 - DNA, 431 bp, Glycine max
  Clone ID: jC-gmfl02220094e02a1
ccgatttggttcaatctgccaccattttcagacaagctgctggcatttatcatcacctagcacaagaggttcttccccacttagagcctgaattgccaccagaaaaaccccctgaagctcttgctgcagtatcctccattatgagcctcatttgcttggctgaggcccaggcagtaaccataaggaaggctgaagagaaaggtacttcttcaagtctcctggcaaagttgcatcatggtgttacactttttcttgaagaagctattggaatttttcatacagttgttacacagtgcaaagacatttcatcacgcttgtcggaatttatgtatttctgcaagtgtttacatgagttgaaaggtcagcaatatcttgcagaaagcctgaaggctcgtggtcaaataggggctgctattggagttcttagttct

SEQ ID NO: 8600 - DNA, 440 bp, Glycine max
  unsure (1)..(440): unsure at all n locations
  Clone ID: jC-gmfl02220094e02d1
ggatttggcgctggtancatgtgtgtgtgtggagtgccgccttcttggggggggggggggggaatgcaaagaaaaagtacacaaggtagtggccgaggaggaaaaagagacagattcgacgaaggatagttagggggaaagggtaaagggtgtttataagagtctcggaggcaccccacacgtacacttagcaatgggccatgtacagtgatgtaaaacagctttcagctacatcaaagctgatgtgaacaagattaatatggcttggtcacaaaagaagcgaaactggttagaggcaaagaagcgagtgcgtacggataatacagtggtacaaccccaattaaagtggcggtagttactatttgatgcttagcatgctcgacccaattaatttagatgcgcaagtaaatggtcggagctttctgacgatggtgatttta

SEQ ID NO: 8601 - DNA, 526 bp, Glycine max
  Clone ID: jC-gmfl02220094e03a1
gcaatactgcaatagagaaagaggcagatagaaaaaagagctgagttttgagttcaaaagatgactaacttcccagtgatcaacttggagaagctcaatggtgaggagagaaacgacaccatggagaaaataaaggatgcttgtgaaaactggggattctttgagctggtgaatcatggcataccccatgacttattggacactgtggagaggttgaccaaagagcactacaggaaatgcatggaagagaggttcaaggaatttatggcaagcaaaggtctagatgctgtccaaactgaggtcaaggacatggattgggagagcaccttccacttgcgtcacctccctgaatcaaacatctcagagatccctgatctcattgatgagtacaggaaggtgatgaaggattttgctttgaggttagagaaactagcagagcagctgttggacttgttgtgtgagaatctcggcctagagaaagggtacctcaagaaggctttctatggatcaagaggaccaacttttg

SEQ ID NO: 8602 - DNA, 590 bp, Glycine max
  unsure (1)..(590): unsure at all n locations
  Clone ID: jC-gmfl02220094e03d1
gcgtcgatcgtgtcgctaggaatgtgccagagtaccgtacactggtgtgggctggggtgtggttgtacggcgcgcgagctataacatatgataatttggcgcttgctaagtagaatggggccgcaggtgctgcgccagcgacccaataagcatgagtggtttatttggggtaacctgcaggatttgttggagcccacccatgggcggaattattaattgatgcccaccggggctaagcctaaaggactgatgcagggtatgctgcatataggcccgggtaacattgagctgttactagagtggactttatagctagtacccaaaaattgttggaggccactaaatgggctggtactgctagtgccggagcagcaaaagctgctgatgggcaagtatctcaggttcggcgtttaatacggcacggagggtaaccaagattaacctaactgccttaaccgactgcctacgaaaaaactacttgtaagtagtaaccagctcggcgagcgctgtacgctgccaactacgcatgngcgctaaaaggaggagcgtaagttggccagtaataaacgtgatatgttgcagtacgaggt

SEQ ID NO: 8603 - DNA, 287 bp, Glycine max
  Clone ID: jC-gmfl02220094e04a1
gtcggagttaggccatggaagtaatgttcgaggaattgaaacagtcactacttatgattcaaacaccggggaatttgtcatcaatactccatgtgaatcgggtcagaagtattggattggtggtgcagcaaatcatgcaacgcacactatagtcttttcacagctctatataaatggaagcaatcaaggggtgcatgcatttattgcccaaatcagggattcagatggaaacatatgtccaaacatccgaatagctgattgtggtcacaaaaattgtttaaatggag

SEQ ID NO: 8604 - DNA, 603 bp, Glycine max
  Clone ID: jC-gmfl02220094e04d1
ccgagatctgtcgctagcgaatgtaccagatgccgtacatgtgcacttcaagtcctgtcaccacacccggtttgggttacgcatacctaagactgctaactaatgtaagtgtacactggaactaagcctcctcaacaactagcatcttccacatattaaaaacacaaactcatgtaagatgcaaatgtatcaactgtttaacctggtcaactgtcggcttgtaaacaactataaattacatgttcggctgaaacataataacaataacaacatcctgttgtggattccttcacaatcgtcgtggtaggttaaccaatgactacagctgacaaaaaacaacacaaactcatagggtatgtggcactaacactggctatcgtgagcccaaaacagcacatcgtagcacaggctgaaacaccatacactgaactgacgcatgcaactgggctaaaacagcaaccccaacaggttacacaggctccctgtgtatagtgtagtgtccaggtggtacatagcgcgtaactaggcggtatagctgccaacacagctagcgaggcaacactggtacttataggggtgcatgtgactagagacgctagagct

SEQ ID NO: 8605 - DNA, 529 bp, Glycine max
  unsure (1)..(529): unsure at all n locations
  Clone ID: jC-gmfl02220094e06a1
tcctcaagacagaaacccgagaacttctcataacacaatgcatctttccgttagttccacttcctctcccactctgactcagttcccatttaaaagcaaaccctctcaaatcaaagactctctctaacccttgtcctttatcattatcatcacattcataactctttcacaatctggatatataattatgcaaccctgtagcagagaaatgcaaggcctcaactccctcttaaattcttcatcccaaatctcccttcaagaccttcacaatcacaccactaaccagatccaaaattcacacatgaaccaccaacaccaccaccaacaacaacaacaacaccaacaacaacaacaccaacttgctcactttgattcaacttctcacgacgactgtctcgaacaaatgctctcttgctgctcttggacagatctcaaccataacaagccattattatgggaccctaacacccncaacgacatcaagcccnccgacgaaacgacgccgtncaacaacaacgacgacgctact

SEQ ID NO: 8606 - DNA, 200 bp, Glycine max
  Clone ID: jC-gmfl02220094e06d1
ggatttagcgtggtatcacgtgtgtcactgcactaccacctgcttggggggggggggggggggggggggaggggtgtctggggggcggcgggaggggggggggtctggtcggggggggcaagacgatctgggaaacggctaggaaagccaggacgccgataaaagatgtaaagagtaatagggcctgttgggcgccatta

SEQ ID NO: 8607 - DNA, 505 bp, Glycine max
  Clone ID: jC-gmfl02220094e07a1
cacatattcaatggcttcctctcttctctctccatcattcacttccttcccccgcataaagaaggatgtctctctctctgctttcacttctcagcgatgcttcaaagcgcttccaaggagaataatccgttgtgctgtggcggcgcctcagcgccaaccttccaccactggatcagtgaggactgcaatgaccatgactgagaagatactggccagagcttctgagaaggtacagctgacccctggcgataatgtttgggtcaatgttgatattttgatgacacatgatgtgtgtggccctggttctattgggattttcaagagggagtttggtgacgatgccaaggtttgggaccgtgaaaagcttgtaataatacccgaccattatatattcacaagtgatgaacgtgccaatcgcaatgtagacatattaagagatttctgccatgagcagaatatcaagtacttttatgatattaaggatctcagtaattttaaggaaatc

SEQ ID NO: 8608 - DNA, 452 bp, Glycine max
  Clone ID: jC-gmfl02220094e07d1
ggatttgcgtatagttgtacatcgttggagtgccgccttcttgggggggggggggggcgaatactgaatcattaacgtagatgtaataacgatgaaagcaattaagtggggggaataattaaaatgcgcgtaaggcaagaagacgtattcaaaagggtggtacataaaaaagattaaaacaggccgtcctggaaagactgagtacggggaatggagcctgacacaagatataatgaattaataatcgcgataatattaagcccagcatgcgaataataggtgatgctaacaatgtgtgaccagtacgaatagaattccgtaagctacagctactactgcgagagcccaaacttaagacaggcaatgggttggcgcgttaaggtcctttcccaacggttgcggtcgacgggcaatatagattggaccggtaggtagctcgctcgaacgagtgg

SEQ ID NO: 8609 - DNA, 420 bp, Glycine max
  Clone ID: jC-gmfl02220094e08a1
gagcccatgttcccgtgttggcaccacttccaattgggtttgcggtgttcatggttcacttggccaccatccctatcaccggcactggcatcaacccagctagaagccttgggcctgctgtcatattcaacaacgagaaggcttgggatgaccagtggatcttctgggttggacccttcatcggtgctgctcttgctgcattctaccaccagtccgtgttgagggcccaagcagcaaaggctctagggtctttcaggagctcctcaaacctgtaattctggccaagctatttgagctacgagagacatgcttcatttaattgtgttcttaattaatttgcttatacatggtggattggaataatctggatatcctcgtcactatgtttatttaatttatgtttactatatttgtggtgaa

SEQ ID NO: 8610 - DNA, 508 bp, Glycine max
  Clone ID: jC-gmfl02220094e08d1
tagcgtcgatctatcgtaccatgtaccaagtaccgtcactatacctctatcggatataatgagtagccttatcctaatactactgcttattgtcgttgggagccccatctcgtgttgccacctgtatgttccactcccctcacgctatctttcaggtcctggtcctaacaaaaacctgtttcttttaaacaaacttgttaccccagtcccttcacatattcatacattttgggccgagttccctcttaaactctttcaagattgtcagcccacgtggcgtccacatgatcccggtcagttcgggccctgacccaactttctccacgattgctacggtcactgccatgtctgccattacaattggctcaacaatcgcctgccccatagtaggccaattaccattcactgtctccatcgcaacgttatcttcgggtactttgatactcaacgcgggccctgttacaacggttcgcacgctcaatgtagttagccacacgcccttagctgt

SEQ ID NO: 8611 - DNA, 457 bp, Glycine max
  unsure (1)..(457): unsure at all n locations
  Clone ID: jC-gmfl02220094e10a1
ncgtcgattgtcgctaggaatgtaccagagtaccgtacacaggtgcagccgcagggtcgtagcggagggagggaggcggaaaggatttgcggatacaggtgatactggcacacaacaggataacattaagggtaccgtacagttatcggacaaaacctatggccaggtacagtggtattgtgtcggaaggtaaagcacagcagcagatttaacttacttatacaaggaaggacccaaaggctacgcggacacggccaacggcgcgagggccactaatagtggtgtgttggcgattcgaaactggggcagtaataaggagtggtgcgagtgttcatggtgaaccaccaacgcgaaacggttgtgataatatagactctatcaggtagtaagcgggtgcgcttgcagcgtggaatttacacacaagtggtgatacaataagtgaagcactagaactggc

SEQ ID NO: 8612 - DNA, 528 bp, Glycine max
  unsure (1)..(528): unsure at all n locations
  Clone ID: jC-gmfl02220094e10d1
tcgcgtcgatctattcgctagcnaatgtaccagatgccgtacaccgggggtttaggctgggaatccacatgtacaggctaaggcttgtggtgtggtgtttacaagtccgtatgaagttcagagtagcaactgtcagatcatgacgtgtcaagtcgggtttatatgcaggctattgtaaaatcatcgtcttccacaatgtgttcttctgttcggtgggcattggttcaaggttaagcatggtcagcccggtggcaaacatctgaggtacagccgcaactttctcaacccgatgataatgtggctggggagagggaaacacccgcggagccgactgctgcaggtgtcactgactagcccaccagagagagtcgtctacgtgcgcaacaaaaggagtcaaagtaagttcgagagctggcccataagcctgccgccgctgctgcaggcttacggggcctataccaagtgtcccaggaacgcgtcgggctagcaacgcctanagaaaaccacaagcgtacgcataccacttgt

SEQ ID NO: 8613 - DNA, 518 bp, Glycine max
  Clone ID: jC-gmfl02220094e11a1
ccaagaatttcccctgctacatgtctaggagtgccgccttcttgggggggggggggggggggggggggggggggggggggggggggggggggggggggggggggggtatataagccttcgaaggataaggaataatcccctttaaattgataggggtagttaaccaactttgagggaattgccgatttaacgccgtaacagttacggccagtaatgccaggttaacagttaaatgtgccacgtgtaaagtaaaaaaggcaacgggcaactctaggatagttatttacggaggctagaaaaacgatgccctaggcaatatggcgtattgattcccccaggtggctgaatgcacaatcactagcggtgcaaaacttccgcaagttaacttcgccattacagcacccagctgaaatttgattagccaaaataaaaaatgggccttcgtaaaaaaatagccccctcaaaaatgccgctttacttggggggagccgcttccatttgaagaccaagggggcatg

SEQ ID NO: 8614 - DNA, 655 bp, Glycine max
  Clone ID: jC-gmfl02220094e11d1
tatgatgacgtcgagggagtgctagtgatgaggacagtgatacgtgtctgtggagcggtagcatggcgttatgtgaatgagggtgtcatgttcgtgtggggatgagtggaagcgggaggagagcgagagccctcgcatcatgcgtcacactgtatgtcgacctccttcattggggggcggggggggactagaagttgagtcgacaacaagagcagaggacatagcgcaagtaaaaggcaccgataccctggttgcaaatctactaacgctgctaggctaaaattaacggcagaggattgggtaaatgggtaggtcaatcaatcaatgctcaggccaagcagcatagcaaaaagtagggaagaaaaagcccgcaaaggtacaatgtccagctataggctgccttacctgtttagaaaacggagcttattcatcgagcgactacgaagctcgtactgggtgggtttcgagcactaagttaaaggtggcaactgcaacctttctacatacgtaacgaggttatacgcctacgaagaggttggtacaaagagtgagaaaggtagttgtaccggggctgtcgcaagctgcggcacatggctatattgagtatgggccgcgtagctgggtgaggctggtgatgctcttcccagtgcccgca

SEQ ID NO: 8615 - DNA, 489 bp, Glycine max
  Clone ID: jC-gmfl02220094e12a1
ccgggaatttgccgtgctacatgtgtaggagtgctgccttcttggggggggggggggggggggggggggggggggggggggggggggggggggggggggggggcttaaggctgaaactaaaactgaaaacgggagggaagaagtgtggggagaatagaaggaggaaagtagtaaggaagaagctagaatagaaataggccttgtaataaggctaggtttacttggcacagtaaattaagcccgttgacttgtactagatttgggactaaattgcaaaaccttatgtttggtaagtatacctagggtttgtattggccccaaaatttaaggttgttttaagggccccagcccctgcttaggcgatggtttggtaagcaaactaaaaggtaggcttaacaacattaagtgtatgtgcccacctaaaaatcgaaaaattggcccaggggtttataactggccaatggaaggtgccctttaaccgtaatcccg

SEQ ID NO: 8616 - DNA, 283 bp, Glycine max
  Clone ID: jC-gmfl02220094e12d1
cagcgtcgatctatctctcacggatgtactaccgcctgcttggggggggtgggggtgaggtgttggcgggggccggtgtgcgggttatagacgactgaaaacccacaagcaccgccaggatgcacttgaaattttggcccctaaacagcacggcgagtaaggagactagtggaaaatgcataacaggcaggaaagattgagagtagaatggataaggccgggtataaccccatttaggtgttgggtatagtaccatgcactcaacagtgaaataactcagtgc

SEQ ID NO: 8617 - DNA, 415 bp, Glycine max
  Clone ID: jC-gmfl02220094f01a1
gtgagggttgcccctagaccctccgttttggaaaatatgagcttggaggaaatgaaacaagtatttaatgaactacccgaggctctaagcttgcttgctctagcaaggactgctgatggcactcgggcacgatattctagatctatacaggaccttggctactaaggctccatcgcttaaggattcggtcggtgagctcgaaaaagtgggtgcactcaaagatgtgagaacatgacctttgaagggttatatggttcttaacttatatgcgcacgtgcctgcgctaaattgctaatgctcttggggagtacggttaagtggtattacattactgtatggctagcattattcttggggaagcagattccctcgtatgtatgtaccaagtatctatcactctgcttgcacgttatgc

SEQ ID NO: 8618 - DNA, 505 bp, Glycine max
  Clone ID: jC-gmfl02220094f01d1
gggtttgcgtggtacatgtgtaggagtgccgcctgcttgggggggggggggggcacaaccaaagtgggctgacgatgtgactaggggatagtaggctacagaaaaccgataaagattccggagcccaggctagcaaaggtaagttgggggtggatatagagagacggaaggagtatggaaggagaaccacagtagcgttatgagcaaaaatataaactaaaaagcaagcagaaagagcagaagcatgaggaggcgtagatcggaacgggcggtagtgtttgttggagcctaggcctttgtatgaactgtttaagccgcggaagccttaagggtacagttgttaagccaggcttacctattatgcgtggcgataacgactgagtaaaccgtagtggtgctatagatgtagtactatatagtgctataaatctggtttggctaaccggccattgagaaaatattggtgcaacaagagttaacattggcgaacggccttaagaacgtg

SEQ ID NO: 8619 - DNA, 579 bp, Glycine max
  Clone ID: jC-gmfl02220094f02a1
gaactccatagccttcaaatccttcgtcggcctccgccagtcctcgccggaggccgggcatgtcgccgcccagccaagacccgccactccccaccgcaaattccgcgtcttggctggaaaattcagccccaagctcaatggccggaacctccgcgtggcggtggtgggaggcggtccggctggcggggccgccgcggagacgctggcgaagggcggcgtggagacgttcctgatcgagcgaaagatggacaactgcaagccgtgcggtggcgccatcccgctgtgcatggcgggggagttcgacctgccgctggacatcatcgaccggcgcgtgacgaagatgaagatgatatcgccgtcgaacgtggcggtggacatcgggaggacgctgaagccgcacgagtacatcggcatggtgcggcgccaggtgctggacgcttacctcagggaccgcgccaaggagtacggtgcgaacgtcatcaatggcttggtcttgaaaatggatattcctatagataagaactccccctacgttctgcattactctagctacgatggcaaaaccaatggggcttgtga

SEQ ID NO: 8620 - DNA, 616 bp, Glycine max
  Clone ID: jC-gmfl02220094f03a1
gacagatcggagcagaccctgtctggagtggcaagtggctctgacttcacaagaaagtggggtggaaactcagacatatgctcgatacaaatacccaaccatgagcaaaactcaaggcaattttagacttcgtgtagctgaaggagaatttactgattctcagattattgtgatgctgggtgagaatgggacaggaaagacgacatttattcgaatgctggctggtttattgaaacctgacaccatagaaggtggatctgaggtggagatgcctgaatttaatgtttcatacaagcctcagaagattagcccgaagttccaatcaactgttaggcacttgctacatcaaaaaatacgtgatgcatatactcatccccagtttgtgtcagatgtgatgaagccacttcttattgaacagttaatggaccaagaagttgtgaatctttctggtggagagttgcagagagttgctctgtgtctctgtcttggaaagcctgcagacatctatctgatagatgagccaagtgcgtatctagattctgaacagcgaattattgctggcaaagtctataaaagtttattcttattcaagaaaacggctttggcgtgacatgat

SEQ ID NO: 8621 - DNA, 576 bp, Glycine max
  Clone ID: jC-gmfl02220094f03d1
cgtcgatctatggctaggaatgtaccagagtaccgtacaccacacgtgggccaactagcctaatggtacataagcggcgaacactgccttgtatgtttaactatacacagcgatacatgtgggcggttagctgtatagataaatacccggtgttacacagttgctcgccacggttgagaaagtaagagcgaaataaagatagtttattagggcaccaagggcacaggcaggcggcgaggtggttgtaaccccaaaaccgacgcggtttactacggttaccgttggttagtgggggccgtatacggccccaaccaagcagcatgatacaagtattaaaacccgagttaagtatgcaaccctagcggtgggggcgactccttaatatgcacagaatgcgggtgacgctattgtacggctagtgcggtaacatgccccggaatacgacaggtgggtaacaggttgaaccgaaggaagaatagctgggggcacacttaagtagctacggagcgcggatacgatagcgaggactactaagacgcgatagctcacaaagaggcaaatataggggagagagac

SEQ ID NO: 8622 - DNA, 534 bp, Glycine max
  Clone ID: jC-gmfl02220094f04a1
gctatttcttacctcttggcatggccattcaaatgtcttcttttgtctttgtttctcttacaattttattttgcttctcttccttggagaagagttttgcctttcaaacaacaaaggaggacacagaaagcaacaatcttcatcaatatactcatcttgttcacctcagctcactccttccttcatcttcctgcagctcttctgccaaaggtcccaaaagaaaagcatcattagaagtggtacacaaacatgggccatgctcccaactgaataatcatgatggcaaagcaaagtctacaacaccacacagtgagattctgaaccaagacaaagaaagggttaagtacattaactcaaggatctcaaagaacttgggccaagatagtagtgtgagtgaattggactcagttacactaccagccaagtctggtagccttattgggtctgggaattactttgtggctgttggtcttggaacacccaagagggacttgtcactcatctttgacacttgcagtgatctcacttggactc

SEQ ID NO: 8623 - DNA, 515 bp, Glycine max
  unsure (1)..(515): unsure at all n locations
  Clone ID: jC-gmfl02220094f04d1
cgtcgatctatcgctaggaatgtgccaggtgccgtacaccgtgatgtgacacacaactcgtggcaagaaatctgtggtgtgcaaaaattgcagggtggtgtggtggtgtggtgtgggtcgggtcagtggtcagtgtgcaaaagcacacacgctagggtaagttatagtccgtaccttccgaggtaccgtccaaatcttgctgcccactgtgatgcttgtcaatatcctaggtacttgcagccctacagcttaacgcagaacatgcggccgccaccgcagcagctgggtaatattggtggtacgcaaatgcccctgccaaactatcgcttgtcgctcagggggcgacagtgtcacttgatgcgcaggcagcaacggaccatgcccatagattcttaatgagggtagttgcactactgtaggactccaaaccaacagctgctaaataatgngctttcgccttatgagattaggccaaaccacaggcggcaatgggctggccagtctagtacaaactg

SEQ ID NO: 8624 - DNA, 508 bp, Glycine max
  Clone ID: jC-gmfl02220094f05a1
gggccactactgatgatctacagcagtagttcgatgcacatgcacgcgtctagattcagtcaggttaaattcttggttgatcttttcatttttagactagactcctttatgatgacaatttaaattgtacagattaatcgatgaaatgttgctgggtttttggtatcacttccatttcctaacttccctttagattttttatacggaatttttgaatttcctttctttttctatatcagggctaaaatcaccttttgagaccccggctcccccacaaatggtacttctgtattattaatctggacccaaatattttccttacttcactttctttgtactgattattttcttcttcgatgtggatctcttgtaattttcttaatttaacatttttttttgaatccatattcaagtgcttttatgatttacagtcaaaaacagatctttcatgttactgctgaagatttcctttcttggaaatggagtaaggttaaaataaaaacatctc

SEQ ID NO: 8625 - DNA, 571 bp, Glycine max
  Clone ID: jC-gmfl02220094f05d1
ccggccaatttgccgtgctacatgtgtaggagtgccgcctgcttgggggggggggggggcccgcaaaggcgcaagatgaaggttgcggacaagtatatataatcatgtgcatatgattaccggattcgatactagtaaaatatacaacaaaagaaacaagcgcacccgacgaaaatttgggtgtataccaacgttagtaagaagtgttaattatgcttggttatacttactaaatagttagggctggagtggtttgggaatttttttatccccaacgtatatacaagagaaaaaatctgtagcagaaatagtaaaacaaatcaaaacaaaagagaacaaggtaaaaattaacacacatatcttaaattagctagcacttgtaagctagtataaaattagggtaaataggataggctacaaactaaaccgaggtaggctggagcgggtctaagtagcgttacagcaaaaagaagatacacaaaggaaggcagtgagactgcggccttaggtgaaggtctgcgagtaacaagtatacaagatgtgccgcagggaagtggtaagtcaaaataca

SEQ ID NO: 8626 - DNA, 382 bp, Glycine max
  Clone ID: jC-gmfl02220094f06a1
gctctagatcgcgagcggccgtccttttttttttttttttacacacatttataattgggtcagattttcataaaaagtcaaattggtcttcaatattaagtctcctaagtcctaattaatgataacattatagtaataagtaatgcctaacaactaacattaacacctaccacaaccaacgacggttaaaattaaaaggaaaaaaaatgtacacactaactccgggccccactgaaacaggtccatttggtccaacctcttctctaactatgactcttttttttttctaacctgaaaaaaaaattcaaaaaccgggaagcgacggtggctaaacggtgtcaggctcaggcacgtactcctttttccgccgcatttcgaggac

SEQ ID NO: 8627 - DNA, 517 bp, Glycine max
  unsure (1)..(517): unsure at all n locations
  Clone ID: jC-gmfl02220094f07a1
atcttgaccaagattgacaggcgatctggtaaggagcttgagaaggagcccaaatttttgaagaatggtgatgctggtatggttaagatggttccaaccaagcccatggtggttgaaactttctctgagtatcctccccttggtcgttttgctgtgagggacatgcgtcagaccgtagctgttggagtcatcaagagtgttgagaagaaagaccccaccggagccaaggtcacaaaggctgccgccaagaagaagtgattgcattttggcaattttgctagcacatgtgatcatcaacgtggtttcaaaaaaacttgttcctttacagtagtttatctttgcagagtcttaggtgtttgttttaccagttatattttgaagtgtccgccgatttcatgtagccgtagccttcaaaactgggttcttgatcggcggtaacattttcgttgctgnttgtttttgatgagtactgatttttggtttgatggtaaaagtctgagattttcaaattcacaag

SEQ ID NO: 8628 - DNA, 351 bp, Glycine max
  Clone ID: jC-gmfl02220094f07d1
cgattgcgtggtacatgtgtaggagtaccacctgcacctgcttgggggggggggggggaataaatggttggagaaaggaaagctaaagggaacatagtttgttgtactactaaaccaaagccatgaaaatttgagcctgctggcgcaagggcaaaagtgtacatggggattagtaaaataaaaaatacgatgtagtaaaaataaatactaatcaaaagcggattcttcagtaacaatttacggggcaaactgatgctgatagcaaagtcctccatatggtaaaagagaatgccgaaaatagatattgaacatgtgctaaacagaaatgatgcgaaaaccaataccgggggg

SEQ ID NO: 8629 - DNA, 604 bp, Glycine max
  unsure (1)..(604): unsure at all n locations
  Clone ID: jC-gmfl02220094f08a1
cagattagtaccacaaaaatggagaaatagaataactgaatatcgtatagctcaaaataaagatttaaccaaatgcaattcatatgaaaaaagccaattaattctttacaaagaacaacaagtaaacgcattaaaaaaaaaaattagaaaacaatatagatacgatcttttatcctataattttatcaattatgcagataagaaagactcatatatttatggatatagatccctatttcaagtaaaaaaaaaccaagtgatttcttctaattacaacacgtataaaaaagaattattggatatcatagataatctctntatcaagaattatatatcggaagatgcgattctagatatggaaaacaatatgtatagaaagtattttgattggatgggaatcaatagagaaatactaaatcgttccatatcgaatccagaaatttggttcttttcaaaatttgtgatattttatgacgcatataggggtaactcgcaggttataccaatcaaattactttntttttcttctaatgtaaatcaaaatgtagtgaaaataaaagaacatactagacngaaaanaatgatctcttgaatgagtagagac

SEQ ID NO: 8630 - DNA, 494 bp, Glycine max
  Clone ID: jC-gmfl02220094f08d1
ttgcgtactactgttggagtgctgcctacttgggggggggggggggcggggggggggggggggggagatttggatgaggtggggtatgcgtgccgctgatagaagtcggggtaagagtgggggtgtccaggcacagacagcaggtaacagggtcggcagtaccccaggtgctggggcttttagggtcaccgttgaatggtgaggtaacacaggtaagggcgagtgggtgaacaagccgtggggtaggggtatgaataggggcagggataggagaacaatgggaatacgatgccaggccgagaattgcccacggattttgagagctctaagaagagagtgtatagtggcacaacaatgtaaacggttgccaggtatgagccaatcagggactagggtgtgaggcaggtttagttaagtaaaagctgggtgagattgaggggtggttagagtgacaagtctagtggttcagggaggaggtggcaggaacacaggag

SEQ ID NO: 8631 - DNA, 541 bp, Glycine max
  Clone ID: jC-gmfl02220094f09a1
ggttccgtgatgactcactcaccttcaaggttgctgagacttcacaggaaactgctgaggaagctcagacatatgctcgatacaaatacccaaccatgagcaaaactcaaggcaattttagacttcgtgtagctgaaggagaatttactgattctcagattattgtgatgctgggtgagaatgggacaggaaagacgacatttattcgaatgctggctggtttattgaaacctgacaccatagaaggtggatctgaggtggagatgcctgaatttaatgtttcatacaagcctcagaagattagcccgaagttccaatcaactgttaggcacttgctacatcaaaaaatacgtgatgcatatactcatccccagtttgtgtcagatgtgatgaagccacttcttattgaacagttaatggaccaagaagttgtgaatctttctggtggagagttgcagagagttgctctgtgtctctgtctcggaaagcctgcagacatctatctgatagatgagccaagtgcgtatctagattctgaaca

SEQ ID NO: 8632 - DNA, 434 bp, Glycine max
  Clone ID: jC-gmfl02220094f09d1
agagaatttaccgctgtacatgtgtaggagtgccgcctgcttgggggggggggggggggggggggactgacgaaaggcaatgtagagaggcaggataggatggttagctgaaagagaaagaggttagaaaccaattatatcgagagcgagcacgatgagccggcctatggcatataataaaattgaactaaacagtcatccaaagcatagaagataggataaacagagatgatgaggggggggctggaggggtaagacctcagaagaaaggaaatgtgaaaagccggcgaacagaaatcatatcaatagaaattataaggagggttgcatataaccgtcggcatgacccgaagttaaacaaatcacaacaaaggttagagctagctagcggtagagtaaccccgaccagcaccgagctgattattattaatatt

SEQ ID NO: 8633 - DNA, 517 bp, Glycine max
  Clone ID: jC-gmfl02220094f11a1
cgtcgatctttggctagctaatgtgccagatgccgtacacctggtaggcaccgcggctagggctgctgagggtgggccctggcagtgagcgcccggtggctaagcaacaaaggctgtaactaaggagagagatatgaagccattccactcacgtacacggcccacacttttggatatcatggggattgtgtccgtgcccgtggtgagagtggccaaactaccatacgcggcacctaatgcttcaacgggtaaacatgggtaagcaaaaaaggacaaacgatgcgcatagcatatgtggagtagcgcttgagctgccaatgccaaagcggtgtaaccggtaaaagtgcggcccgtaggcggtataatagtggcagaaaccgcaaatgtattaaccgttgctgcgctggccaaggctgagccgactgagcctgcaacaaggcccatggcacagcctaaggtcagtaggacaatagcggtgataagagccacactacaagaggtcttcactacggttggg

SEQ ID NO: 8634 - DNA, 533 bp, Glycine max
  unsure (1)..(533): unsure at all n locations
  Clone ID: jC-gmfl02220094f11d1
tagcgtcgatctatcgctagaaatgtgccagagtaccgtgcatggtgggttgaaagtttatgatgatgtatatgtatgctacagtgtaagttagcctgattaggcggactagtaacctttcttacagtgggcatacgtcgcctaagttaattcgtcaccgccagggcatagctgttcagccgatggggctgacactgctgcggttaacgccgctagttatgcccagggagcacctttggcaaggcacacagccaccagtgcatgattggccaaacccgcgagtaaacctgcggcataagcgcaatattaggaggcttttgctgggccggcctaagcatttaatgtactacatgctgaggcataatggaagccggtaataatggcagccaatgcggaatcaagccncggccgctaactaaaactggccactaaagcttagaggcctacgcgtgtggctacgtgctaaactgccgctgctgcgttgcaaacggttgtgggattactagaggctanagaggctcccgaataaaaac

SEQ ID NO: 8635 - DNA, 406 bp, Glycine max
  Clone ID: jC-gmfl02220094f12a1
agtagactatagcgtggtatgtgccagatgctgtgcgcgactgtgatgtgacaggcacggttgggtatgtaaggtggtaaaccacactgtaaagtgtatgccagaacagtaacaacacgagcatttgccgtcttactgggtgcacaaagtagcatcgagtatgtaatagctaaggaacattgtaagtttagaggtacatggtaatacggtaaattgtgtgaaccattatgttaaagtgtgagggagccttaaaaccgctgctgcagaatgtgaagcccatggaataagagtagtcttaagttgggggacaagctcaaacagcaacttgctacaatgcaaggattgaatataatacctgataaatccctggacagcatcctctgactaaaggatagaagcagcagcc

SEQ ID NO: 8636 - DNA, 460 bp, Glycine max
  Clone ID: jC-gmfl02220094f12d1
ttgacgtgatatctcgttgtagtgccgcctgcttggggggggggggggggtgggggttaaacggtagagggttggctgttgggcgggggggaattgaaaagtttaggataggataagtaatagggcagaaactaaaacttataacttttgttgtttgtgcagggccgtggtttcggtggaatcaacgttgcaaaataaacccggggccggggcgggtgtcttaatcggaaggaaggccacgggcagcaggcgtcggcagtgtgttgtaaagtaattattattatctgtataggagttcaatgagcttgtcttaatctgaatggccggaataaaagtcatctagtccactaactttccgtccaattcgttcttcgtatcgtatgttttccacagtttcctcctcatcctcctggtgctcttggcacctatagctgtattatattatagctccgggtaggtc

SEQ ID NO: 8637 - DNA, 583 bp, Glycine max
  unsure (1)..(583): unsure at all n locations
  Clone ID: jC-gmfl02220094g01a1
gtgaaatcgggactggggttttgctgtccgttggaggtgctattttcatcaatgtgtttctcagtcagagtactcgtcccggaaagtttccatctatactttttccaattgaaattaaaaatatccaacgcggcaaacacggcagtgacactggagtctacgatactgaaggaaggtttgtaccttcaaaatttgaagaaatttttaacaagcatgcacatacacatccaaatgctttgacatatgatgagttaacggagatgataaaggcaaatagagagcctaaagatttctcaggaaggattggtagtgtggttgaatggaaaattctttacaaacttgctaaagataagagtggattactgcagaaagaaacaatccgaggtgtttacgatggaagtttatttgaacaactgaaaaaacaacactcttcaggcaaagagaagtagtaatatttttcagacacgtatgtgaaaagaagaagttacttgtcgatctcagcanaattggttattnctatgaatttatatgctagtcagttagtcacaatatttcacagtgtcctgtctatttttatgttcat

SEQ ID NO: 8638 - DNA, 397 bp, Glycine max
  Clone ID: jC-gmfl02220094g01d1
gcaacaatttccccatcgttgtactaccacctgcttgggcgggggggggtgggggggcgggtgggggtggggggggggggtggggaggcggtgggggcgcccaggcccgggggagtggttgaggtgcgcgtggggcagggaggggtgttcaagagggtgggacataggagagattaaaacatcccctcttggaagacaaaataccctgaatggagcctgacacaagatatagtgaattaatatcacaataatattaagctctagcatgcccctaataggtgatgctaacaatctccaaacagtacgaatataattccgtaagctacagctactactgccagaccccaacttaaaaaaaacacattggttgcccctattaagtccattcccaagcggt

SEQ ID NO: 8639 - DNA, 316 bp, Glycine max
  Clone ID: jC-gmfl02220094g02a1
gcgaactccaagatcaatggcttttctcttctgcttaatgatcaatcactatacatgcggggcgggaataaagatactcatcctctctggtctacacattaaacatacgctaaaaaagagctataaaattacactacctaacctcatgctgtggcggccacctcagcgccaacactttcaccactggatcagtgacgactgcaatgaccatgactgagaagatactggacagagcttatgagaaggtacagctgacccctggcgataatgtcagggccaatgttgaaattttgatgacacatcatgtgtgcggccc

SEQ ID NO: 8640 - DNA, 551 bp, Glycine max
  Clone ID: jC-gmfl02220094g03a1
tgaatgatttggatagtagcaatttttgtagtttctcttacttacctgtgtctatggagaagaagcacgaaaaagggaaagagattaccacctggtccaaaagggttgccaattttgggaaaccttcacaagttggggtcaaatcctcatcgtgatctgcatgaactagcccagaaatatggacctgtcatgtacttgcgcttaggatttgtgccagccataattgtttcttcaccccaagcagctgaactgttcctcaagacccatgatcttgtctttgctggtagaccacctcatgaagctgcaaagtatatggcttgggagcagaagaacttggcttttggtgaatatggttcttactggcgcaacgtgcgcaagatgtgcacattggagttgctaagccaaaccaaaattaactccttcagacccatgagggaagaggaacttgacctattgatcaagaatctaagaggggcatccaatgatggagctgttgctgatctcagtgccaaggtttgcacactcagtgcagacatgtcttgtagaatgat

SEQ ID NO: 8641 - DNA, 594 bp, Glycine max
  Clone ID: jC-gmfl02220094g03d1
gcgtcggatcgtatcgcgtagcgcatcgtgacccaagtgactcgtgacactagtggctgtagtgaaaggtgcaccttgggtgggggttagggatatgtatgtatctatcactggtaaaattaaaattaaatgtgcggtgaattgttaaatggggagcttaggtagcatgtagaatagtagacaaaaacaacaatgatgtatcaattctcattattattcataagaaaaccataataatcgtacgcgggaaaactagcaaaagctgcttattgtttattcttccaccgcttgtttatactcctcttccgcattctattcgccgccgccctagcaacagccatgtgtatactattcacggctgtatggccctgtgcggtaaacgcctgtactttccgcagcggcgctggctgtggtagcggtggcccaagcagcaaaggcgcaagtcacaacccaaagttgtcggcggggtatggcgtaaactagggcatgtgaggtggcttcgggagcaaccaggtgctaagggcaaataccgccagtggaacggtaaaagagcttccccggtagtacgcaccacaaggggccggtcacaactca

SEQ ID NO: 8642 - DNA, 509 bp, Glycine max
  unsure (1)..(509): unsure at all n locations
  Clone ID: jC-gmfl02220094g04a1
gtttttgacgagagtgatgggtcaagacaatgctgaagcagccaacaatgtgagcaagtggacagggacagtttacctcttctctcttcttggagccttccttagtgactcttactggggaaggtacatgacctgtgccatcttccaggtcatatttgttattggtttggtttcattatcattgtcatctcacatatccctattgaagccgagtggttgtggcgataaagaattacaatgtggatcacactcatcatcccaaacggctttgttctatctttccatatacctagtagctttgggaaatggaggataccaacctaacatagccacatttggtagtgatcaatttgatgaaggggaccctaaggaacgactttcgaaagtagcattttttagctacttttatttggctttgaatcttggctcactcttctcaaacaccatattggattattttgaggataagggacaatggactntgggattctgggcatcagctggttctg

SEQ ID NO: 8643 - DNA, 570 bp, Glycine max
  unsure (1)..(570): unsure at all n locations
  Clone ID: jC-gmfl02220094g04d1
gcgtcgatctgtcgctagcgaatgtaccagatgccgtacaccgtgagtgacggctaaatgggccgctacgccggccgactactaggctgtaggcttggcggcccgccgctataactgcggctaagagcgaatagacatgtaacgtaaggaaatggcgcgtcgctgctacggatgccgtaaaatttgttattattccagcacaaagcggcgctacggcggtcttaacttaagggctcggcttgtgctacggataacgtgatttgattggtagggccaagaaattttaaaaagctgggccttggcttgccgaaagcgccgtgctaagccttgttgaaggcggcaccgaagtagggcgactggtaagatatgggcaatagaggaaggatgggtaccccgcgggagcaacaacggaggaaagccgttgccatgattatggggtgggcagagtcaggaagctggagcgaatagcgagcgaacaggngaagggaacacaaaaacaaggaagaaaatggaaggaaatagtcgtaagaagagagagagagagacatgaacggcaataaggctcactag

SEQ ID NO: 8644 - DNA, 406 bp, Glycine max
  Clone ID: jC-gmfl02220094g05a1
aattcggctcgagtttctcttcaaattcaaaactctgtctaagtcccaatccttcttggtttacgcccaaaaggcttcttatgatattttgtctcattaacatgctaaactatgtggatcgaggagctatagccagtaacggtgtcaatggaagtcttgcaacttgcactgactctggaatttgtacaggtggcagtggaattcagggggattttaacttgaacaattttcaagatggagttctgtcatctgcatttatggttggacttctaattgcttccccaatatttgcttctctggccaaaagtcacaatccattccggcttattggtgttggattgtctggttggactttagcgatagctggatgtggtagtttcgttcgatttttggtctattgcaatat

SEQ ID NO: 8645 - DNA, 473 bp, Glycine max
  Clone ID: jC-gmfl02220094g05d1
accgaagcaagtttggccgctgctatcatgtgtaggagtaccgccttcttggggggggggggggggggggggggggggggggggggggggggggggggggggggggggggggaaccaccaggcgtaggttatggcccagtacttttatagcgctagggggcagggatagggttaatagccgagtaaattattccttattaggggttaaagcatgccgaccacgacgaaaaagctgacgagctgattcatggggatttggggaatatgaaaaccggaagagatatggcaactagaccgagaccttgaaaaggccaaaaaaaggaaatggcatgccagcgacccgtatgccgctttgaaactaagcctcgaacggggttgttgagaccgcccctaaaggctctataagtagcgggcctagagatagtatggggtaaaaacaggttgagcaattaggggataccactaacaaacaa

SEQ ID NO: 8646 - DNA, 436 bp, Glycine max
  Clone ID: jC-gmfl02220094g06a1
ctttgctagttttgattagatctacaacaagaaattaaagaaatggctttcagggcagcgagaaatgtaggattgaggttgggaggaggaaggcgatcaattgctactgccagcgctaaaaagcatgatgattgggcgactctgaaggcagagttagcaccggtgtacatggtgtgcggaatggtggcaatggctgtggcaattggatcacacactgcgtttcaacaactggcgcgttctccaactgttcatataaacaagaagagaagagagagcatgccagaggtctctgatcctgatcgcaccttcaactccgccaccaaattcatcgatggttccttcttaaggaaactctctcacattcaagacaacaaccccacactccacgacccttgccaccctaatcctttcaccactcctcgaaccgctcacacct

SEQ ID NO: 8647 - DNA, 500 bp, Glycine max
  unsure (1)..(500): unsure at all n locations
  Clone ID: jC-gmfl02220094g06d1
ccgagggatttgccgctctacatgtgtagcagtgccgcctgcttggggggggggggggggggctgtagccaaggcttcgccgcctgggagggtacagcggagggagagaagagagacagagagagagagatataaactgctagcacgacaacagtagctacacagtgaaggaggcaacgcctcttctcgcacgtgtactgagttgaacatgaagcccttaagaaagaaagaaagagaaaataggaaggcctggagggataagagggtggactagacaaagccaaaaggacaaaaaagagagaccgccacaaacggcgtagaggcacaaagacgcaaaagcaaacaaccagtaatcctgccaccccgcaatctttatacgtggtaaccgcgcactccggtcaccacgccgcaaaccaggacccgcccaacccgtcgccacgcgcacgnaccggcgtggcaagcgcacacacggggtggaacaaccaattagtcagcaaggt

SEQ ID NO: 8648 - DNA, 518 bp, Glycine max
  unsure (1)..(518): unsure at all n locations
  Clone ID: jC-gmfl02220094g07a1
cacaacacaacaccttttccttttcccttccgttggtgccattcgtgcagcaccggatcctctcatttctccggcgataactctcccttttccggcgaattcaccgcttcctcgatatgaatcccgagtatgactatctgttcaagctccttctgattggagactctggtgttggtaaatcatgccttcttctaagatttgctgatgattcatacattgagagctacataagcaccatcggagttgattttaaaattcgcactgttgagcaggatgggaagacaattaaactacagatttgggatactgctggacaagaacgatttaggacaataactagtagctactatcgtggagcacatggaatcattattgtttatgacgtgacagatgaagatagcttcaataatgtgaagcaatggctcagtgaaattgaccgctatgccagtgataatgttaacaaacttttggttgcaaacaagagtgatctgacagcanatagagttgtctcatatgac

SEQ ID NO: 8649 - DNA, 580 bp, Glycine max
  unsure (1)..(580): unsure at all n locations
  Clone ID: jC-gmfl02220094g07d1
ctacatgagccgagacgtgggacggggcactaggtgtgtggctcggggaaagatcgatccgggggtactctgggagcagggacaggtgggggaggtgagagcgtgagagcaagagagcccctcgtgcaanccngtcatcactgtatgacgtcctccttctttgggggggggggggggggggggggggggggggggggggggggggggggggggaccttagcccccccaaaagacagcactacaaagggaaaacggggagtaggaataacgctgaactgtaaggaggctgggtaacgagagcccaaacaagcccagtagggaccctaaggtttaaattataccggccaaggatcgcaataggcccttaatgagggccccaaagactggagcttttgggtagctaaaaccgaacgcggcattaactactattattgccgggccaacagtaggaattatggggggcgttaataccggctttgggcagtgctatgcggccaccttggctaggccggctgcaaaccgcctggctttggtgaggtgggcagcctataaaaaagccttggaaaactgggggtaaagg

SEQ ID NO: 8650 - DNA, 491 bp, Glycine max
  Clone ID: jC-gmfl02220094g08a1
cccgaatccaagtgaaacgaaaaacactcatcatcatggattcagttgcattaaatggcaaaagcaatgataagcctcttcacgttgccatgctcccatggctggccatgggtcacatatacccttacttcgaagtcgccaagattcttgctcaaaagggtcactttgttaccttcataaacagccccaaaaacattgaccgcatgcccaaaaccccgaaacacttagaaccattcatcaaactcgtgaagctacccttgccaaaaatagagcatctaccagaaggcgcagagagcacaatggacattccgtccaaaaaaaactgattcctcaagaaagcttacgagggcctacaatacgccagttccaagttgctgaaaacgtcaaaccctgactgggtttctgatgacttcgcagctgcttgggtcataccaatagccaagagctacaacattccttgtgctcactacaacattaccccagctttcaac

SEQ ID NO: 8651 - DNA, 583 bp, Glycine max
  Clone ID: jC-gmfl02220094g08d1
ctacgtcgatcgtatcgctagccaatgtaccaggtgccgtacaccatcaaatcagttaatgtggggggtagggctactagtaaaagcacgccgactaatcagccgactcctactgccactgtgaccgggggcaaccgcctgacgctactgcttctgatacttcttcggcttcctccgggagagcttaggtgggtagttgtaattgtgctgactgtgcacagccaacgcttcgggcctactctatcctcgcacactaaacaatcgcatcagccgcctgttcccgtgtagttgtctcacccgcttattatccgtacgtcggccaacaaattgcacaggccggcccgcaactgcaatcgccagccggtatctcatttagataaaacggttgttctgccggcgccgccgcggtgcacccatctagtactaaacgcctgttcgcctgggctgaaaaaatgcaatttgatggagctacgctattacatacacggacaacttaggtgtatccctggcaagcgcctggtacacagcaagcggaacaaatgaaggcgccacgtacatacgcatgtgcgccgcactagccgcc

SEQ ID NO: 8652 - DNA, 252 bp, Glycine max
  Clone ID: jC-gmfl02220094g09a1
tgcatgacttgcacagtggcctttcttgaagttgctcagacatacctgcctccatggggcagggacccgtattcggtaccgagattacactcgtcgatacatagccattggttgtgtggaaaaggttccatgtatgcttgctatgccgggtggaagactccaacagcgatgcctttaagaagcctcttgccagggaccccacttacctatgggtccttgaaaatggaatgaccatgcaaagttttggtagtc

SEQ ID NO: 8653 - DNA, 283 bp, Glycine max
  Clone ID: jC-gmfl02220094g10a1
cgtcgcacatttcgccgctgccatcacgtctaggactcgcaccctcttgggggggggcggggggggggggggggggggggggggggggggcggggggcggggggggggaagcggaataagcgagtgtggccattatgagcccgaccatcacttgaaggaattaagccccacagtgagcaggtcctttaccacacttaataggatgggcataaaggtaccttgactagcaactttggaaactagtgcaaaaataggggcccaaaaataagcaccccccgcgtgg

SEQ ID NO: 8654 - DNA, 210 bp, Glycine max
  Clone ID: jC-gmfl02220094g11a1
cgtcgatctatcgctagcctacgtgtctaggagtcgtaccctacatgggcatcgggcgtgcattgcagtaagaagctacgcaggaagagctatccgcgctaggtcccaatgtcgcaggaggaaagaggattgtaggatagaatatacatgctgtagaaccaaatagcgattactgaggcccatgcaggctaacccacagtgaaggaggta

SEQ ID NO: 8655 - DNA, 543 bp, Glycine max
  unsure (1)..(543): unsure at all n locations
  Clone ID: jC-gmfl02220094g11d1
tcacgtcgatctatcgctagccatgtaccagagtaccgtacaccgtgccggtgtaaatcggcgctggctgctgctgctagacggcagtcaaactagcataatagtaggcgttactagttggggtaacccaaggctactgtcggtgggtattcttttgtgaatgaccgttgcggagtagccaagcacagatgggctgatgcgagtaaagcagttgcatatatagcagcatggtaacttactgaagaaatggcacaaggttaatagggtgggcctgcagcggaggcactaccagcgtaaccagaagttgcggagcagggatagcaaaccgcgcttgcaggggttatacgcgccagggacggtgtggctacggacacgcggataataagagcagcggttgggaacgctgacaaataggggccaccagttgcaatgcaaaaagctgcgaaaactgggtaacgagcggtagggngatgccggggaggatgtggctggtagaacacacgatgtgagggtgtggatacgcactataagggggtaaaaggt

SEQ ID NO: 8656 - DNA, 641 bp, Glycine max
  unsure (1)..(641): unsure at all n locations
  Clone ID: jC-gmfl02220094g12a1
actgtgtgatagacaatctatcttcaggggtgtatgatacataccttacatggcacgatgtggtacaggtaacagaatatgtataaaatactaggtgggaatcaacaaaaaagctacgactccgaaganattttcccgttcatccactcgtatcgacggtccgtcccttctattgcggtcgtggggagacaggcccagcaggagagctgataaaactctatcgaaccgctgatgtaaacatggaatacgccacctagtcgcagcacgtatcaactgcagtaaatgccgactatagagatgtaaatatgagacaagatagattagagggtataacggacatacagtagatggtaagtttcagaagacatggaatacgcccttcactgaaaaaagcctgaccattgtgagactgcctcacaccctctgcataagaatgtgaagcccatggattaagagtaggcattaaggggcagacaaaatcaaagatcgacttgcaacaatgcaagaattaaatattataaatgataaatccgtgatcagcatatatggagagtggatagaaccagcagagtcatttacggttgctattattcgagtttttgggacggttaggaacacacttgctactactccctttagag

SEQ ID NO: 8657 - DNA, 505 bp, Glycine max
  Clone ID: jC-gmfl02220094h01a1
gttctagatcgcgagcggccgcccttttttttttttttttacacacatttataatttcatcaaattttcataaaaagtaaaattgttcttcaatattaagtctcctaagtcctaattaataataacattatagtaataagtaatgtctaacaactaacattaacacctaccacaaccaacgacggttaaaattaaaaggaaaaaaaatgtacacactaactacgggccccactgaaacaggtccatttggtccaacctcttctctaactatgactcttttttttttctaacctgaaaaaaaaattcaaaaaccgggaagcgacggtggcgaagcggtgtcgggctcaggcacgtcctgcttcttccgccgcatctcgaggacctttcggtggtggttggagtgcaactcgctggagaaagtacggctacaggcgggtctatattccggtaataaccgacccgacttgtagcggaccccacacgcgttgcacagagtcttagcccc

SEQ ID NO: 8658 - DNA, 490 bp, Glycine max
  Clone ID: jC-gmfl02220094h01d1
cttggctttttttgcatcgttggagtaccgcctgcttggggggggggggggggctatatgagggagaaggtagtaaaggggtagaaaaacgaaaaggcggtggtaagaggaacgtgttgaacgttgaaggaagaagaataggagacgaagaacgaagcgtgaatagtagtcaacaatttcattaataatgtagtaattatcatgctattattttgtacaataattaccaaaaggataaggagaattttgttcgtaatcatgataagggtaatattcaatgtattcggttccgctcaagatgtgtatgtgatgttatttggggtaggggtctacggaaggaggacggaagggaattaaacggctgagggggagacctccaccaccaacggctccatggccaagccggcgtgtcgggtcgtcaacaggtgaagggtgtccaagaggtgtgggttggttttctaattcgcatgcacaaacgcaaactcaaagt

SEQ ID NO: 8659 - DNA, 551 bp, Glycine max
  Clone ID: jC-gmfl02220094h02a1
cactctctctctaaaaaaactcaaaaataaaacgaagctctcgaaactgagtccactcgtcgcgacgttgcctttttgaatcgtttcgaatttcactttttcgtttcccttcgttgtttgtatatatatcaccaatcaccggtcaccgttcatcgatcatcgatcatcgatcgtcgattattattgttattgttattattttggtggttgcgattctattgtgttctgtgtgtgtggtttgtactgtacgacgtcgttggagcgatttcatcgccgtcgcgctggtacggagaggttgtttgctacgttgcggtgttgttgaaggatggcggtcggagtggagttgccggaggggagaagcggcggtggcggcggaattgtgatggagtttccggccggtgatgaggaatcgttctcgtcgccaacgaggttgccgaagaggctccggcgacggcttcgtgacgcggagtgcaagtctccgagcactgtggaagaaatcgaagcgaaactccacaacgctgatcttcgcagacagaaatactatgagaaac

SEQ ID NO: 8660 - DNA, 446 bp, Glycine max
  Clone ID: jC-gmfl02220094h02d1
gcgacaactggtacatcgttggagtgccgcctgcttgggggggggggggggtagtgttctgccgcacagatacatgggcttatagcgagtattgctcacatgtcactagcgctttgaggtggtgtactggttactaatttaacgtcgggtcgggtactactacggtcgggggccgcaaggctactatcgatatatgtgggagagggcggggtgtcacttagttggtgtagtaagcgtgcacatcattgggtgtgagcacaactttggtgggcttgcacacttggcacaagaactagttgaggacttgtgcttgctgcaatatctcaggtaatggggcggttaacttgtagctcggtaggtgtagactctagggtaatgttacgggggctgctggcatctaaggtagttacgtggctgaaatctagtgcccttggaagtaacagctg

SEQ ID NO: 8661 - DNA, 363 bp, Glycine max
  Clone ID: jC-gmfl02220094h03a1
catacttgcaccccgatcacttataactaatcccaacatatgataggtgtagagggggtatttcaatctattatccatattgtgatgaagaaggaacatgaagagggtctcaagattgacgttgctacactcacagttacagtagttgttgtgatgctgccattgctatgcacatgtggggcaagcaacctcgaccctttgattctaataccaggtaacggagggaaccaactagaagcaaggttgaccaatcagtacaagccctctactttcatctgcgaatcatggtaccctctcatcaagaaaaagaatggatggttcagactttggtttgattccagtgtcatacttgctccttcactc

SEQ ID NO: 8662 - DNA, 557 bp, Glycine max
  Clone ID: jC-gmfl02220094h03d1
gcgtcgatctgtcgctaggaatgtaccagagtgccgtcacaaaaccaaactattagatgcacctaaaatattgccaaatacacgggcaccatggctgcttacgcagcctacaaaactgccagcgccacgttgggcgtgtgcaatgagcgccaccgggtaactggtgagtccatttccaaatgccgggcagtatcactcacacgtgaaccataaaggtactgtggtgccctagccaacccagcactaaccaccagctacacctgagccggacataaccgcagtggcagccacagccaaactggaagcaaatgcaaggggctagttgtagccgcacctggactttgccaagcagccaacagctgcacgtagcctgccacaacctaaggcagcaacactggactaacgttgtagtggacacagaaggccgttttggggcgaattaaggcgaacggagcagagagcgagggaagaaagtggcgtacggtgaacggctgagaaggcagcaaatgtagtgggcgttgaagcccgtggcctggcggaagtaaagtaagggtggg

SEQ ID NO: 8663 - DNA, 535 bp, Glycine max
  Clone ID: jC-gmfl02220094h04a1
gccattgcttactcgttggcctttcaacaagttgattagagaaaaagcccttcaagtaacaatgaagcatattcattacgaagatgagactagtcgatacataaccattggttgtgtggaaaaggttttatgtatgcttgcttgttgggtggaagatccaaacggagatgctttcaagaagcatcttgcaaggatcccagattacttatgggtttctgaagatggaatgaccatgcaaagttttggtagtcaagaatgggatgctggctttgctgttcaagcttttcttgccactaacctaattgaagaaattggtcctacacttgcaaaaggacatgacttcatcaagaagtctcaggtaaaagataatcctcttggagattttaaaagtatgtatcgtcatatttctaaaggatcttggacattctctgatcaagatcatggatggcaagtttctgattgcactgcagaaagtttaaagtgttgtctacttctatcaatgttgccaccagagattgtgggagaaaagatggaa

SEQ ID NO: 8664 - DNA, 560 bp, Glycine max
  unsure (1)..(560): unsure at all n locations
  Clone ID: jC-gmfl02220094h04d1
cttcgactgtcgctaggaatgtgccagagtgccgtgcacgatacgtttgtagaaagaataactatacagtaaatgttgttagaggttatctttaaagtggggaaagaaaggggtgttaaagattaggtatataataatagtcagggcgaagattagcaacgggggggtactaagacacgggtgaacggtagggtggcgctgcagcggtggtgatttgggggcttatgtatgtcataatattagaattagaaattattttaggacacatcctcatcggggccgtgttaatccgggaccaaatgggctctgtccgggtggtactttctcaaatgttataaattcggatcggcccagggccgataataaaagtgtccaataaatccggcgcgcccggcttaatacacatatgttgtggaatcatatggttccgcggtgtaaaagaactaataatccaaattggcgatgttatcataatactatttcaacttgtaatttccgggccgttgttaatcgggttaggcaagttatanagaatagggtacttaactggggccagatac

SEQ ID NO: 8665 - DNA, 555 bp, Glycine max
  unsure (1)..(555): unsure at all n locations
  Clone ID: jC-gmfl02220094h05a1
gagaagggtcgacctgttttacaaggattattagctatagatcacttaacaaaggaggtgcttggctgggcacaagcaatgcccaagttctctaatgatctggtgaagtatgtgcaaacttttctggagaggacttatgaaagatgccgaactgcatacatggaggctgttcttgagaagcagagttatatgcttattgggaggcatgatattgagaagttgatgaggattgacccctcaagtgcatatttaccgaatctgcttggtcagttaaatgtggaaagtaattcatctgatgctgaaacaattgaggctgaattagaacttagtgaattactgctaagtttgcgtcctattaagcaggaaaacctaatccatgatgacaacaaacttattctgttggcatcccttagtgactcattagagtatgttgcagactctattgaaaggcttggacagacaactcaaagagcatcanatcatgtcgngggaaaataccatcacagtcattcagacagtgcacctaccaggaagttagtttcatttgctcaagat

SEQ ID NO: 8666 - DNA, 515 bp, Glycine max
  Clone ID: jC-gmfl02220094h05d1
cggagggatttgcagtagtacatgtgtagcagtgccgccttcttggggggggggggggggggcactgaaaaggagtatactagtataggaggctaactgttggagacgaaataagcgggggcacaaaggtggtgtacatgaaaggagaaataaaatctagggaggggaaagtaggcctagggtgcaaaggttaaaaaaagaaagaaaattgattgaagtagtgcgaggagcagaagcgggttgtactactaggagggggaggaggagagtgatacagccatgcagacttacagtagttgacgaggataaaaagttactacgcatataggataaaagtaatggttggcgtttgccggcactagcaacaatgcgaataaataacgtttgacaccaagtggacggttttaatgtgagacgggtcttgcgcaagataacaaccggttaaccagactaagcctcctattaacactaggcagcccggcaatgccgcgcgccaacagaagaagccaacatat

SEQ ID NO: 8667 - DNA, 507 bp, Glycine max
  Clone ID: jC-gmfl02220094h06a1
gttgttcaaactcttagaaatgttgctcgtgatggaaggactgtcatctgggccattcatcaaccaagcagtgaagtctttgcactctttgatgacctcttcttactatctgggggcgaaacagttattttggagaagcaaaatcggcaattgagttttttgctgaagctggtttcccttgtccacgttaaagaaattcttctgatcacttcctacgatgtatcaattctgatttcgacattgtaacagctacactgaaaggatctcaaagaattcatgatgttccaaattcagcagatcctttcatgaatttggctaccgcagagatttaagcaacactatttgagaaatataagcgttcaacatatgcccgaagggcaaaaaacagaattcaagaactgtgtaccgatgaaggggcttaacactcaacacaacatggaagtcaagctcgttggttggagcaactattaaccgtgacaaagagatcatttgtgaacatgtgtagag

SEQ ID NO: 8668 - DNA, 347 bp, Glycine max
  Clone ID: jC-gmfl02220094h07a1
tgaagtagtcgctatgattgagtatgcactcgctccctaacctcggcatggaattcgggatgtgattgagatcaaactcttttaaatgtagctcgtgacggaaggactgtcatctgggccattcataaaccaagcagtgaagtctttgcactctttgatgacctcttcttactatctgggggcgaaacagttattttggagaagcaaaatcggcaattgagttttttgctgaagctggtttcccttgtccacgtaaaagaaatccttctgatcacttcctacgatgtatcaattctgatttcgacattgcaacagctacactgaatggatctcaaagaaatcatgat

SEQ ID NO: 8669 - DNA, 566 bp, Glycine max
  unsure (1)..(566): unsure at all n locations
  Clone ID: jC-gmfl02220094h07d1
cagcgtcgatctatcgctagaaatgtaccagataccgtacactagccagtgaggttgaatgttacgacgccagttcaacttactggtactgtgcactcgacaagttaaagttgcaattgtaataattgctcctagtattagtgctgccaggagtaatacgagtattttgcgaagttctcgtcagtatctttctgtttatagtacgcgtaggtgaataaatgaatagggctataaaatatcttaaaaccacgcaacagtgaaataactaagtgcgcgcgcggttcttagcaatcaacaataatacgcgtgctggtgtactgtactggtgtctggtgccttttttaaaccacgcaactgagtcgatcctatgctccctggtacccttcagctagtatggtgttaagtcatccgcgatacacgcccaagttggctactttggacagtctgtaacatttctgttcgtagtccttgtagcagtattcttgcatataatanacgtgttcagaatccacgtaaaagtctgcatttaactcctcctagctgtgtgtactaggcccaatttggtc

SEQ ID NO: 8670 - DNA, 423 bp, Glycine max
  Clone ID: jC-gmfl02220094h08a1
gttagaattcttggttttatcttctcagtcagcagcaacatttgcattttggtattgggtaggatcacacatatttcctgatgttttgctcaacgatattgctggcccagaaggagatcctttgctgttgagtttaaaactatccgtagatgttttggctgtttcttgtccatgtgcactgggtcttgctacgcccacagcaatcttggttggcacctcacttggggcaagaaaaggacttcttattaggggaggggatgtgctggaacgcttggctggaataaattatattgctctagacaagacaggaacccttaccaaaggaaaaccagttgtgtcggccataagctctatcctttatggagaatctgaaattcttcggcttgctgctgcaatggagaaaacagcatctcacccaatagc

SEQ ID NO: 8671 - DNA, 502 bp, Glycine max
  unsure (1)..(502): unsure at all n locations
  Clone ID: jC-gmfl02220094h08d1
taagaatttaccgtgatatcatcgttagtagtaccacctgcttggggggggggggggggggggggacggggaacagataatgggggtagtggggaggtgccctattacaatagaggatatgtaagtaaaggcacaggaaccaggcaaatgactattaacgaaggaaacgaaaatcataaaccagagtgacttggataaaggataacctagacgggttggcataagtaacccaaccaccaccctatatataaataattgtgtagttgaaatttagtgagaaaaataggtatactatagctaatatcctagaaggagtgaataaaccagggacagggttaaaaatataagttggtggaggtggtgactaagggctgacgacgggctggaagtaaactggcagcactcatgttattccttgtgtaacgacgttgttaatcacatcggngctgtaatctgctatagccacactcacgtcgttgatatagcaactaagctaaccggc

SEQ ID NO: 8672 - DNA, 488 bp, Glycine max
  Clone ID: jC-gmfl02220094h09a1
aatgcatccatccagagcactaaaaacaaatcccaacatctgaaaggggtagagtaggtatttcaatctattatccatattgtgatgaagaaggaacaagaagagggtctcaagattgaggttgctacactcacagttacagtagttgttgtgatgctgtcattgctatgcacatgtggggcaagcaacctcgaccctttgattctaataccaggtaacggagggaaccaactagaagcaaggttgaccaatcagtacaagccctctactttcatctgcgaatcatggtaccctctcatcaagaaaaagaatggatggttcagactttggtttgattccagtgtcatacttgctcctttcactcaatgctttgccgaacgcatgacccttcattaccaccaagaactcgatgattacttcaacactcctggggttgagacccgggtccctcactttggttccaccaactctcttctctatctcaatcc

SEQ ID NO: 8673 - DNA, 563 bp, Glycine max
  Clone ID: jC-gmfl02220094h09d1
tagcgtcgatctgatcgctagccaatgtaccagagtaccgtacacgtgaaagccgggcctgccgctaccgccgccaagaggctgtaaagtagaatggagttgtggtaaatccgaaatatctcttactaaatgcacacaatatgtaacaccaataactaaacgggctttgttaatgtaattatgctgttgcctatgtggtggtacagtgggtaccgtaggccaatgcacccggccccgccatgtgagacgccttgtaacttggtgtggtggccaatgctgctggtgtaccaagggatgatgagggtgagtaacgggggaacaataacctacggcttaggctactgctatccagccgcaaaccctcgccacagccgatgcggcccagcgggccggcctggcggcgcctgcttaggctgcccgttggcaagcgcggcggtataaatttaagagcccggggccgcatgtccagctacatgtagatgtaactataaaccaaaagtagccatcaaaacaaacaactgggaaccaacctgctggtgcaaactattagactacatgtaata

SEQ ID NO: 8674 - DNA, 534 bp, Glycine max
  Clone ID: jC-gmfl02220094h10a1
cgtcgatctatggctagctaatgtgccagagtgccgtgcatgctgattggtcgctccacgcgcgtagccgcttctgagcgcgcatgcctcagacagctcactcccctgagtgattactggggctagacccccacaatgactctcatcttccacatattcccccttgaaactgatgtaagctgccagcgtcagaaccgattaacctggtaactgacgcttgaaacactattatctatgctgcctggacatgtgctatgcagcaccggagagcgttccgtctgaatccgatagcagtactgcccacgaatgcaggcgaattgcaacttctcaggctagtggttggagatatggttattaagcctatattgcgctacttacggcatatagtttgcgattacggtgcatcataggtagtgctcggttcatctatgcagctagagcagctagccctgctgatgatagagtcgctgagtgtgacgaacagttaactgtagttgagcagcgcgaatatgggcgtggtgaatagccggccag

SEQ ID NO: 8675 - DNA, 585 bp, Glycine max
  unsure (1)..(585): unsure at all n locations
  Clone ID: jC-gmfl02220094h10d1
tagcgtcgacctatggctagaaatgtaccagagtaccgtacatgggctggtgtgtgtgtgtagccacgtagcaaggtaccgtggcagtggtgtgttatgccccggtttgttcgggtggcacttttggggggtggggttcccttgggcttaaggtgtaagccaccggttacaaagccaacctaacatgcaaacgtagagcatagtactactacttgggcgccaacccccccggtaacaactggcgcagcagctggctactagagcttggcaccagggggctaaaacgcagttgcttatgcgtatgaaggctaactagcacggttattgctacgctaggtggcaagcctatcggggaagaggggggtagcgcgcgtgggtataaaataaacagagggacgcggagggggattgtgagcggcgtagacccgaagagagggggccggtaaggccggttgcgagaggaaaagccgggtgtagcaaaacggacaatgncaacgtgaagaaagctagncagggccataaccgctgagatgaattattgataaaaggccgactactgtgaaatcaaactanaagacaaagaac

SEQ ID NO: 8676 - DNA, 475 bp, Glycine max
  Clone ID: jC-gmfl02220094h11a1
cgtcgagtctttggcgctggtatcatgtgtaggagtgccacctgcttgggggggggggggggggggggggggggctcgtaaactttaatggggagggccggtggaatggaggaggtatttgataagagcgaattatcggagggtcgcaggacaggccgataaatggagggctatgcggtactaagaggtgatagacgcgaataaacataggaggtatagagctggattataaatatcttaattgtagagtgtaagtagagctacaaagggctagaactggctgaaacggcacaacattaacaagggcaagtaatttaaggagagctcagaccctgtaaaaagctagtaccaagattaaaccaatgcattaacctaacgctcgcgccgtcaacgcaactatacacggggcctatggagggacgtatgctacaactaggtgagcggcataacgagttagagccaacaaacctacaag

SEQ ID NO: 8677 - DNA, 461 bp, Glycine max
  Clone ID: jC-gmfl02220094h11d1
tcacgtcgatctatcgcgtagccaatgtaccagatgccgtacaccggtgcaaggtgatgtaatgaaaaagacttgcaatgaaaagcctgagctggtggtgtaggttatgcggttgagtagttaggggatgaggtttaagagtaactctaataatcggtgtattttaatttccaagtgctgatccttactgtccacataattggttattcatctcacaagtgcgtgtttgtagaattgttcgttagctcaactctcgcaactgtgatcatctcaatttagttagttgttatctctggtaacatatctcttgctaacgggttagtagccgttttaatcattgtagtggcaatagtgttatcaattaaatttgcgttcattacgcccgtgttcataatcgtcgatttgattatttttctatttgtagttctgattgttgtcgtcctaatcaacgtattactatt

SEQ ID NO: 8678 - DNA, 599 bp, Glycine max
  Clone ID: jC-gmfl02220094h12a1
cgtcgatctatcgctaggaatgtaccagagtgccgtacacccaccacgttaacgcgcgcccacataaacacacatagcctgaacgccgcgagcggccgcggccggtggctgtgcctgcgcctgataacgcttacacagcggtttaagtttaaccagctgccgtgtaagcattacaacaatggtagtactgagccgccacggccgcctgaggtgccaaggccaactaagccatgattggggccaccgcgtccaagaccgccgccgaggcctccgccgccatggccgcctccttgtcctcctattattcccagaccgcccggcccaccaggtccaccgtttaggccgcctccgccgcggccgccgccgactagattgtagctgattttggcagagcaatagctagctagagccaagggtggtgtcgggtgggccaggatttgacgtaatcattggcgcgtaccaaagaaggcgccgggagcggtcgcgtcgggagtggataattaggcgacacgggaaggcaggagtcttgaggcaaaagaactaaaacaaagacgacgagagtgggcgaagcgagcagcgtagggttcgtcagtgggctg

SEQ ID NO: 8679 - DNA, 417 bp, Glycine max
  Clone ID: jC-gmfl02220094h12d1
ttgcgtggctacatgttgcagtactacctgcttgggtgggtggggggggggggggggggggggggggggggggggggggggggggggggggggggggggggggggggggggggtaaaaaagcttgggaaataccttttaggggggggaaaaaaaaataaacccccttaaacgttttaataatggaattttttttaaaaaaaaacgtttaaattagcgccaatgggggtgatgaggagggcattttagttataaaagctcagtgggaaggaattgggaaaaccctaataataaagggcaggtcaataaaatttaaatggaggggagtataatccccgtgggaaaggggggcgtttaccccctgggggggggggggtttaaatagatagcggaagagtaaattctattaatattgggga

SEQ ID NO: 8680 - DNA, 596 bp, Glycine max
  Clone ID: jC-gmfl02220096a02a1
ttgcgtggctactcgttgcagtgctcacctgcttgggggggggggggggccaagcaatcgaatggtcgggtagatgtaatgcaaaggcctcagaaatgtacgtgcataggagcaagcggttgtgccatggaccatagtcaagcaaaattagcattaagagaaatgtagcgaagaggtacaggtatttatttaacgtcgactaaattgccgcagcacgaatgctatgaaagagaacccgaaagagataaaagctattaattaatagaccctggctaaggctagctacctgttgtgaggtaggcacaaacagctgggtagtcctaaaaagcctaagtggagagggtaacctagcaatgcaattaaagtgcacagtttagcaaaactgtaaatacagctaaccggcgcggccgcaaacaatacttttaaacgagcaatgtacgtagtaaccgaagaagaacatttcctacatggggcggtgtgcgttggccggcaagtaacgggcggcagttggccctcaaaaggacggcccgtttggtgaaagcgcagagtaacagcgcagtacaaaaccggtagcttacataataagcaggctccac

SEQ ID NO: 8681 - DNA, 286 bp, Glycine max
  Clone ID: jC-gmfl02220096a02d1
agtaatcggatcaacaatatgggtgaagaaggtgctgctttgttcacgattgtttatacccacacaacacaaagagatattcaacgccagggagaattgtcaatgggagctacaacagatttaactcggagatacttgtgtcgggcttccattccaaaatctcttccaaatgcattctttttgttccctccataaggcatgttatttccaaaggcaacgatacagttgatccaaacaatgaccgcacgaatggaccttggcacactgttggctgtgaccaaactct

SEQ ID NO: 8682 - DNA, 616 bp, Glycine max
  Clone ID: jC-gmfl02220096a03a1
tacgtgtactgttagcataccgcctgcttggggggggggggggggccaaaaacggatgcaggcttacacctgtggtaggagcggataaccgagataagtgatcccgggtattaccaaaaacaaaagagacaataatatgcaggcttggggttaggattggccgaaaagcggacacatgcggataggaggaagccaaacaggtggccaatgggggcagcgacacctagttgtgaaccgtaggtggttcatgcaaaagctgcctgccggaccggggccaacccctaggggagtatggctgactaggataataatacgccatagacggccgtgagtgctgctagtggtggcaatatatagtacattaagcgcgagctatggtataatggtatgtgtgagctaacaggttggtactatgccagttaagacggttaaataggggttgctatattagaggggttaactagagaaacgaacatgggccttataggtgcagacagacaaattatgcggtgggggtttatatagcagggtgacaataacaatgttagactgcgaacatagtacaggtatgcaaaataagctggttagaatagatgtgccacatagcgaggtagac

SEQ ID NO: 8683 - DNA, 411 bp, Glycine max
  Clone ID: jC-gmfl02220096a03d1
gcacacacaaaaaaaacatcttattttatagaaaggaataacttaaaagtacaattttttatttgccgaataacttaataccatccagaaaatctagttcaaagaagttacataaggacatctttcagctacagaaacagattacatcaaataagtttgtctaaactacctcactctctttgaatttcatcacattactcgtccttttactgcttggacgtaatatctttaagcttttccttcaaatcacccgtctgatgcatattaagaacaatatctgatccaccgataaactctcccttaatgaaaacttgtggaaaagttggccagttactgcagagaaagaacacacgagagaacagtaggacatcacaaaaagtatatttgacttttctgtcaataattaaactt

SEQ ID NO: 8684 - DNA, 270 bp, Glycine max
  Clone ID: jC-gmfl02220096a05a1
cctcggggaattccaattccacattttcaagaaataaggaggcaaaaatgttcatatatgaattggaattatttgttttcttattaggcctatcctgaagccaaaggaaatgagatcggaattcctcggggaattccaattccacattttcaagaaataaggaggcaaaaatgttcatatatgaattggaattatttgttttcttattaggcctatcctgaagccaaaggaaatgagatcggaattcctcgggggtaccgagctcgaatt

SEQ ID NO: 8685 - DNA, 240 bp, Glycine max
  Clone ID: jC-gmfl02220096a05d1
acaggcccggtgataaaacccttttgggaaaccaaaaaaaaaaaaccctggcggccacaaattgaggaagagcccctggaccccacctaagggatgcaaaggtgtcccccccccgccccgaaaaaaagaaaggatcttgagtgagggataaaagggggtttttcgaaacattagaaagaattgtccccgggttcaaaaagaacacaaagttcccacccttaggagggcggaggagggggg

SEQ ID NO: 8686 - DNA, 516 bp, Glycine max
  unsure (1)..(516): unsure at all n locations
  Clone ID: jC-gmfl02220096a06a1
attagaggggttttctctttgagagaatcgtatcttacaacttttcgtgaccacttttagtgagggaagagaagctaagagagagactccaattagattcaagagagatggccatcagccatgaaacttgggctttcattttcggtcttctaggcaacgtgatctcctttatggtgttccttgctccattaccaactttttaccaaatctacaagaaaaaatcatccgaagggtttcaatcactaccttatgttgttgcactgttcagttcaatgctctggatctattacgcacttgtgaaaaaggatgctagcctccttctaattactattaactcctttgggtgtgtgatagagacaatttaccttgcaatcttccttgtttacgccccaagcaaaaccaggctttggaccatcaagcttcttctcatgttgaatgtttttgggtttggagggatgcttctttcaacactataccttacgacgggttccaaacgtctntctgtgataggatgga

SEQ ID NO: 8687 - DNA, 541 bp, Glycine max
  unsure (1)..(541): unsure at all n locations
  Clone ID: jC-gmfl02220096a09a1
ttcgtttcttcccaacagaagaagagcttgttggcttctacctacacaacaagctagaaggccaaagaaatgccatagccatagccatagacagagttatcccagttattgacatcaatggagttgagccttggaaccttccaacacttgctggggagctttgtcgtggggacacggagcaatggtttttcttttcgcccggtcaagagagggaaaccaggggaggcagacccagcagaaccacagcttgtgggtattggaaggctacaggttctccttgctatgtttactcttctcacaacaaagtcattggggtgaagaaatccatggtcttctacaaaggaaaagcacctatgggaacaaaaaccaaatggaagatgaatgaatacagagccatccatgtcccttcccaatccacccctgccacccttcatttgacatgtgaattcagcttgtgtcgggtatatgtcatatcggngagctttcgagcatttgatcgacgaccattagagaaagaaggagcagagtcgcgggttcatag

SEQ ID NO: 8688 - DNA, 462 bp, Glycine max
  Clone ID: jC-gmfl02220096a09d1
tttttcgcctttttttttttttttttaaaaaggaaaagtccgaacatatatggacagatgagctgacataatttattgtcagtttaattgacataatttacaaggttggtgtaggtgaaaaggaaatacatggaagtatcgtctacatacaagctatctgcaaactaattggggttaaataacaaaaatccttcttaatatgacatgattttctatgctaactttccttaatccaattctaaacaaatatcggatgaatgactatgtatgtatatataagacttggttgatgtcatattttaatgagtcatttccctgaggagtctttcttaaggtctcagcatgtggctttgagttagagccaattaaaatgttcccattccaattcccacaacggttcttgaagttggaacccattctcattattattattattattcacatcccactttgcgctacttg

SEQ ID NO: 8689 - DNA, 233 bp, Glycine max
  Clone ID: jC-gmfl02220096a10d1
cgaaagtgttgctcaggataggcctaataagaaaacaaataattccaattcatatatgaacatttttgcctccttatttcttgaaaatgtggaattggaattccccgaggaattccgatctcatttcctttggcttcaggataggcctaataagaaaacaaataattccaattcatatatgaacatttttgcctccttatttcttgaaaatgtggaattggaattccccgagg

SEQ ID NO: 8690 - DNA, 504 bp, Glycine max
  unsure (1)..(504): unsure at all n locations
  Clone ID: jC-gmfl02220096a11a1
gcaacatcacaggggaaccttactcggtccaaaccaacgtgtatgtgaacggtgtgggcaacagggagcaaaggctcaacctttggttcgaccccaccaaggattttcactcatactctatcttctggaatcaacgtcaagttgtatttttggtggatgagacaccaataagggtgcacacaaacatggagcacaagggaattccatttcctaaggaccaacccatgggtgtgtatagctcaatttggaatgctgatgattgggccacgcagggtggtcgcgtaaaaacagattggagccacgcaccattcattgccacatacaagaactttgagatcaatgcttgtgagtgtcccgtgtcagtggctgcaatggataatgctaagaagtgcactatcagggagggcaagaagtattggtgggatgagcctaatttggctgaactcaacctgcaccagagccaccagcttatgtgggttagggcaagacacattntctatgact

SEQ ID NO: 8691 - DNA, 578 bp, Glycine max
  Clone ID: jC-gmfl02220096b01a1
ttgcgtggctacatgttgaagtgccacctgcttggggggggcgggggggggtattgtgaaagagacgcaaatagaaaggaaagaaatagacgcatcaccagagatacaggaggttaagttattagcgagaactaaaggaaggaacaatatatggaaagcaactagcgtgtgtcgactgtaaagactggccttacaaggataccagtcaccactgttgcaaacatttgacacttgggctgctggccctttgtaatatccatgccaccaacaagctactaccactactattcagcaacccgttaatttagaacagttatgccgtagtttaacttggtagcggcggcaagagcatactacctttaacctggtgactgcccggcagctatacgcttccgcagacccagccgccttaacgcaattagcaatattctaaatttaaggccaacgccgcttaatatcccaatagccctgtacttcaaggatcactggatcgatctcgctagctcatcgtagactgtggtgaggcgcctattgaaaggtaaggtatgccttcgtcggggataatcgtcgcatgccca

SEQ ID NO: 8692 - DNA, 526 bp, Glycine max
  Clone ID: jC-gmfl02220096b01d1
aaacacagaaatacactgatatatggcaaacttagtaatgaaagttcagaacacaaaagggcagtcactgaaaacaagaataatctgctgtaggaggaagccactttcatgtttaagagtttgacagttccttggatcttgaacatcagctatgtgacagtttccaaagtgatctgcagcacttcaaagagataacatatgtccagagaggatggctcatctagactagtggagttagtttcatccattatttggtgaagacttcaagttcatgattctctcaccagaatctgtgaataaccaacagggagaggtagatcaagagggagttatccctttcatatggtaaagaagtcaactacttgttttactttctttatccaaaagaagaaagtcaactacttatatttgatacaacttttttgctcttatctgccacaaccataaaagccttaacaagctcctccttaaccatgaatagaacagaagcttgcaaaacactttgtactatctttgtgctcatccc

SEQ ID NO: 8693 - DNA, 529 bp, Glycine max
  Clone ID: jC-gmfl02220096b02a1
tcacgtagctctatcgctagctaatgtcccagagtgccgtgcactataatgtcatcggatgataatgagtagccttatcctaatactactgcttattgtcgttggccagccccatctcgtgttgccacctgtatgttccactcccctcacgctatctttcaggtcctggtcctaacaaaaacctgtttcttttaaacaaacttgttaccccagtcccttcacatattcatacattttgggccgagttccctcttaaactctttcaagattgtcagcccacgtggcgtccacatgatcccggtcagttcgggccctgaaccaactttctccacgattgctacggtcactgccatgtctgccattacaattggctcaacaatcgcctgccccatagtaggccaattaccattcactgtctccatcgcaacgttatcttcgggtacattgatactcaccgcgggccctgttacaacggttcgcacgctcaatgtagttagccaaacgcccttagctgtcttatgtgtccact

SEQ ID NO: 8694 - DNA, 484 bp, Glycine max
  Clone ID: jC-gmfl02220096b02d1
cacgttacaagtttttcacaagtactactaatccaactaagtgaaaatgttctaattacaaccaaaagccgaagaagaaaagacttttacaatatgctagtaatagtgacgaggcacaagaaagactcttcttcttaagaggaggatgagaaggtgtcaatgatggttgtgtggagtgggtcactcaagtgggtggcccagttgttgagcgggcccttgccggtggcggcggcttggactgcaaagcccaagaagcccaccatggcaagacgggcgtgcttgatctccgccaattgaagggtggctttcttctctgggtctgaggccaggcccaatgggtcgaagtaactgccacctgggtacaacctcttctctgggtcgagctctgcattcctctggaactctatgtagccaattacgagtacctcgatccaaatcagtgtggtgattgagaatggaagtggttgcccaaggtatgatgacc

SEQ ID NO: 8695 - DNA, 448 bp, Glycine max
  Clone ID: jC-gmfl02220096b03a1
tgactggctactcgttgtagtaccgcctgcttggggggggggggggggggggggggggggggggggggggggggggggggggggggggggggggggggggggggggggggggggggggggggaaaaaaaacccccgaaaaaggggttagtttcccggaaaggggccccccttaaaaggggggaaaaagggagaaggggggacagtttttgggaaatttatggttttgggccgaaattttggaaggtggccccaaatttgttggaaaacctcccccgaaatggcaccccccttaaaaaaaccccgggggccaaatttaaggggggcaaaaatcttttaggggccgaaaaacccccgggggcaaaaccgccccgggtaaggtaaaaggccccttcttggagggccccccggggaggtgccccttaggctttatgggggccccccgggggt

SEQ ID NO: 8696 - DNA, 397 bp, Glycine max
  Clone ID: jC-gmfl02220096b03d1
ctagttggagcttgggcatctttatcccatctgtcgggatttttcgtctttcaaacgtatttccaaacacaaagtaagcagcctgtgttacattgtttctcctatgtacagattcaccctctactgaaaatagtaatatttagccctatactcactgcaatatgttcctgcctcacagtcagcgtagcaacccaaataatgttctgagcacaacctagaatgtattatagccagcttctcctttttccaagagagtagagtactactgggtattttccaaatatacgatatttcctggcataaaaagcttttattctgattacatcattgccacacttctcaggaagagggatttcccaccatgcaggttgataatcagaagatcaaactgtgatct

SEQ ID NO: 8697 - DNA, 561 bp, Glycine max
  Clone ID: jC-gmfl02220096b04a1
tacctatactcgttagcactaccacctacttgggggggggggggggggggggggggggggggggggggggggggggggggggggggggggggggccgggggccggggggggggggggggggggggggggggggccccaaattttttttcaaaaagcccggttgggaaaaaaaaaaccaaccctttttaaaatttttttgggtaatccctttaccgtgccctgttaaaaattttttttgccccccaatatggcctttcacccccaaaaggacaaaaaaaaatttttcccccaaaccccccccttccccgaaaaaattaaagatttaacccccatatccccaaaattaaaatttttaaaaacagcccccctttttggcatattccccaatttctgcccccttttttttttaaaaaacccccctcaaaagggctaaatttttatttccccccccaaatttttttttttgaaaaactttcccctaaatccaaaaatgtctgaattgcgttcccccaaaaaaccttcccctttttttggggcccccccctattgtaaaaatttttt

SEQ ID NO: 8698 - DNA, 566 bp, Glycine max
  unsure (1)..(566): unsure at all n locations
  Clone ID: jC-gmfl02220096b04d1
cggcagtagttgtcccgggacgacnacctcggccgccctttttttttttttttttttaagtctcaatttgacgaagctttaaattaaaaccatgacgtaccaaaagtatgcttactaactactacaatcagtcgaagacattgaaccacaattctccctaggaagtttcttgtacaactttcagaagttgccacgaaaaccattaatcgcaagatggattacattagcaatagctagcaatacacgtctgacctgctttaccaatttaaaccactccacattatatatggctctaatctatcattttggatgataaatatggcttgatctaaaacacaacaggataggacagcacttgtatttatcaaactattgtcaatttccaattataaagtaatcagtttcatgcaatgggttcaaaatacgctggcaagcaaaggaaacttaaaaagacatccacgagttacttcatcaagcaccagtagcctcaaccatttctttgtccacggtgcttggggtaactgggtagtaatggtaatgaagtttcccaacatcatcaccagaca

SEQ ID NO: 8699 - DNA, 234 bp, Glycine max
  Clone ID: jC-gmfl02220096b05a1
cagcaaaaaaagaaagcaaaaatgaaaaccctagaggagaagaagccaaagaaaagaaggcaaaaaaaaggctccaaagatgggtttcaaaagctcttctcttctatgcctagctcttttgcttgcatggctcttcggggattaattgcctttgacatcacacaaactggtatggtcaaaatccaaagtttttccacaattaaacaaaaaccttaaccgaaaaccaaagctcgc

SEQ ID NO: 8700 - DNA, 56 bp, Glycine max
  Clone ID: jC-gmfl02220096b05d1
cgcccgtgctgctcaggatcggcctgctcagaaaacagatgacgctcgcgaactag

SEQ ID NO: 8701 - DNA, 571 bp, Glycine max
  Clone ID: jC-gmfl02220096b06a1
cgcctttcttctccgtttccgtttcctcgttcgaattcgctttttgatctgcgaaaatgagagagtgcatctcgatccacattggtcaggctggtatccaggtcggaaatgcttgctgggagctctactgcctcgagcacggcatcgggcccgatgggcaaatgccaggtgacaagacagttggcggtggtgatgatgctttcaatactttcttcagcgagactggtgctggaaagcacgtgccacgtgcagtgtttgtagatcttgagcccactgttattgatgaggtgagaaccggaacttaccgccagcttttccacccagagcagctcatcagcggcaaagaagatgccgccaacaactttgcccgtggccattataccattgggaaagagattgttgatctgtgcttggaccgcatcagaaagcttgctgacaattgcactggactccaagggttcttggtcttcaatgccgttggtggaggaactggttctggacttggttcccttctcttggagcgtctcttcgttgattatggcaagaaatcaaagcttggtttcacagtcta

SEQ ID NO: 8702 - DNA, 560 bp, Glycine max
  Clone ID: jC-gmfl02220096b07a1
gagagaaggaaagggaaaatgggtaaggatctgagcgaggaacaagtgtcttccatgaaggaagccttctctctattcgacactgacggagacggtcggatcgctccgtcggagctggggatcctgatgaggtctctgggaggtaacccgacgcaggcccaactcaaagccatcgtggctgaagagaacctcacggcccccttcgacttcccccgattcctcgatctaatggccaaacacattaaacccgaacccttcgatcgccaactccgcgacgccttcaaggtcctcgacaaggactccaccggcttcgtcgccgtctccgagctccgccacatcctcaccaacatcggcgagaagctcgagccctccgagttcgacgagtggatccgtgaagtcgacgtcggatccgacggcaagatccgctacgaggatttcatcgccagaatggtcgccaagtaacgccgattccattctctctttccagtgttattttctctctttctttcgctttggggtgttggcttttcagtggacccaataatagattaatcaattgg

SEQ ID NO: 8703 - DNA, 442 bp, Glycine max
  Clone ID: jC-gmfl02220096b08a1
agctcacagccgactttcaaacggattgtctattaactttcttgataccgctgccaaagagttaggctgtactatttccatgtgaaatgaaatcatccatcttagtccgtgacaattttttactagacgtatagaaaaaaaaaagttattgatatgcttattgaactaacgggtttgcaaataagcataattctgctagtcctgttgaaaagagctgcagtcataattctagtatgtttatagaaagctcattttgtatcatgtatgtactgtagctaaactaagtttcaccctgaacttgcttgtgagtctgctctcgatagaacagtcttgtacagtaacgaaaaacgctgtaaccaggtccttttctatattgtctcattttgtgttatgcttatgttgatttagcttgtaatggaagtcatttccaattgtttggatt

SEQ ID NO: 8704 - DNA, 528 bp, Glycine max
  Clone ID: jC-gmfl02220096b08d1
gcacacacaaaaaaaacatcttattttatagaaaggaataacttaaaagtacaattttttatttgccgaataacttaataccatccagaaaatctagttcaaagaagttacataaggacatctttcagctacagaaacagattacatcaaataagtttgtctaaactacctcactctctttgaatttcatcacattactcgtccttttactgcttggacgtaatatctttaagcttttccttcaaatcacccgtctgatgcatattaagaacaatatctgatccaccgataaactctcccttaatgaaaacttgtggaaatgttggccagttactgcagagaaagaacacacgagagaacagtgggacatcacaaaaagtatatttgacttttctgtcaataattaaacttggcagcacctgcacttctagtactaccatgtttgagaactaattaatatgatcccatataccgctttaaagtgcaggacagggtttggctgactaaattccagaggatttaacatga

SEQ ID NO: 8705 - DNA, 302 bp, Glycine max
  Clone ID: jC-gmfl02220096b09a1
gaaacctaacagcgccatagctttctctattttatagtgggaggatacgcttctcttggcacaaggggagcaccaaggggcctgtgcctgtcgttgcctaccacgcccatgtcggaacccgacacccaggcgccgtcgccgtctacgtacctgctacagcgcccgccgattctgtagactgcgtttccgatcttcaagcagcggtcgtggtcgtcggacgcctttcgagacgaggcgtggtttctccgcaaggggaactggtaaaaccgacgtaattagagcgttaccgatgaagacgttgg

SEQ ID NO: 8706 - DNA, 466 bp, Glycine max
  Clone ID: jC-gmfl02220096b11a1
caaaaaaagaaagtaaaaaagaaaaccctagaggagaagaagccaaaaaaaagaagccaaaaaaaaggctccaaagatgggtttcaaaagctcttctcttctatgcctagctcttttgcttgcatgctcttcggctattcatgcctttgacatcacacaactgctaggccaatatccagagttttccacattcaacaaatacctaacggaaaccaagctcgcagacgaaatcaacagccgcaacaccatcactgtcctcgccgttgaagactcagccatgaattccattgctgccaagtccccagaagccattaaggccatcattagcacccatgtcatccttgacttctttgatgagaagaagctcatggaagctcaagctaatagccaacagttgacaaccctattccaggcctcaggcattgcagtgaaccaacaaggcttcctcaaggttgcactcgtcggc

SEQ ID NO: 8707 - DNA, 427 bp, Glycine max
  Clone ID: jC-gmfl02220096b12a1
attagaggggttttctctttgagagaatcgtatcttacaactttccgcgaccactgggagtgagggggaaccatctaagagagagactccaattagatccaagagagatggccatcagccatgaaacttgggctttcattttcggccttctaggcaccgtgacctcctttatggggttgcttgctacattaccaactttttaccacatctacaagaaaatatcatacgaaggggtgccatctcttccttatgctgtcgccctgttcaggtcaatgcttcggatctattacgcacttcgtgaaaaaagattgccagcctccttctaaaaactattaacttctttgggcgggggatagagacaatttaccttgcgactttctctgtttccccccccagccaatcccgggttttgaccatctagcctctt

SEQ ID NO: 8708 - DNA, 594 bp, Glycine max
  Clone ID: jC-gmfl02220096c01a1
ttgcgtggtacgtgtgtggagtgccgcctgcttgggggggggggggggccgggggggggggggggggagatttggatgaggtggggtatgcgtgcagttgatagaagtcggggtaagagtgggggtggccgggcacagacagcaggtaacagggtcggcagtacccgaggtgctggggctttcagggtcacgtgtgaatgttaaggtaacacaggtaggggggggtgggtgacgaagcggtgggggaggggtatgaataggggcagggataggacaacaaaaaaaaacgaagggcaggccgagaattgctcacggattttgagagctcgtagaaaagagtataaaggggcaaaacaattaaaaggtgccaggtcagagccaatcagggacgagggtgtgaggcaggtttagttaagtaaaagatgggtgagatagagggggggttagagtgacaagtctagtggttcagagagaaggtggcagaaacacaggagtgagcagagttaagaaggtggggggagatcgcggccaaggacaacaaagtatggccgggggggggatggcaaagaaccagtgagagttagaaagagagca

SEQ ID NO: 8709 - DNA, 603 bp, Glycine max
  unsure (1)..(603): unsure at all n locations
  Clone ID: jC-gmfl02220096c01d1
cccattccctcctacttcactcattaacactctttacattccatatgttttcataaaactttatatcattatattcactccattcaacctaccnanaccanacggaggtgcgtcagtccggagtacaccccgggacgacgagcatactactcgagagtcaacccaacaggctagcttttagggagctgcttgtcactgctcccggagtccgggaatatctcacatggtgccatcctctttgaggaaaccctctaccagagcacaaatgcaggcacgccctttgcgaatgtcacgaaggacgctgtggtgcttacctgtcatcgaggctgacacggacacagactatctacctgcaactaacgtagaaacaacgattcagggtctacatggccctggtaagcgttgggcctagtactactaagctggtgcacgttctgccaaatggggagcagtgctgaagattggtgccaacaagccatcggagctgtctatccatgagaacgcctatggcttggctagatacgctggcatatgccaggagaatggcctggttcccattgtcgagcctgagacacttgtcgatggacctcatgacattacaag

SEQ ID NO: 8710 - DNA, 519 bp, Glycine max
  Clone ID: jC-gmfl02220096c02a1
ttgcgtggtacatcgttgaagtaccgcctgcttgggggggggggggggggggggggggggggggggggggggggggaataacaaaaatataaaagtaatgcgggactgagtgtgccgggtggccggttaaaatgcgaaggggcaaaagaagaggacaacggtagggatacaaaagaaggggtttaatatctggatgagcacatggggaaaaatggaagaatgcaagcgagaaaatgaagctagccttgatcgatcatggggagggggactttgaggcggatagggcaaagtgtcgagtaataacaaatagcttaagggaaagttttatataaaagggaagggctacataatccagtgagaaggcctccgtaaatatttgcagtagggattttcaaaataaaggatggaaattcactgtactagcacaaggaaggcaacgaagtgtattgatgagggtagggacgctaatggtagttggaacgaggcaacgagcacatattttagtgagtggaattatgg

SEQ ID NO: 8711 - DNA, 497 bp, Glycine max
  Clone ID: jC-gmfl02220096c02d1
cttcacccctactcgcgagcttttatggatttgcttttcactgctcctggtgcctggggatatcgtgactggtgacatcctttctgaggaaaccctctaccagagcacatctgctggcaagccctctgcgaatgtcttgaaggaagctggtgtgcttcctggactcaaggttgacacgggcacagtcgagcttgctggaactaatggagaaaccaccactcagggcctagatggccttggtcagcgttgtgccaagtactactaagctggtgcacgttttgccaaatggcgtgcagtgctgaagattggtcccaacgagccatctgagctgtctatccatgagaacgcctatggcttggctagatacgctgtcatatgccatgagaatggcctggttcccattgttgagcctgagatccttgttgatggacctcacgacattcacaagtgttgccgacgtcaccgagccgtgttctttgcacatgctacaaggcttt

SEQ ID NO: 8712 - DNA, 491 bp, Glycine max
  Clone ID: jC-gmfl02220096c03a1
tacgtgtactgttagggtaccacctgcttgggggggggggggggggggggggggggggggactggccaaaaagtaaaggaaatactgcaatataagaacaatcgaaatctagatagcggataagacattccgaatatgtttgcgcggctaaaaggctgctaggggcaaaagagctaaaacgccagtagggtagtaacgaagcgtaggcgggtggagcccgcgtaaaaggatgataccactgggtgtagtaaagggacctgcgcttggggaatgtacaaagcaactggtcaggtgcttggtagcgtagaatggcctgatgcagagtccccactaaattgcgttagggcacagagacgggttggtgttaggtatcataaggaggccgggctggccgtaggacctgggcccgggggcacaaggttaggcgtaaggaaacctgcgactgtggggggaataacgggcgcgatacgtcccgtgccacagggtaaaaa

SEQ ID NO: 8713 - DNA, 501 bp, Glycine max
  Clone ID: jC-gmfl02220096c03d1
ctgtctataaaacttttagttacataacataacataacataacaggtagcttcattgacttgtctcttttttttaatgttttgagttctttttctctcatggatttgattattgatactaatttgcgttatgtataggttcttacaaatgggaaatacaggagtgtggagcatagagctgtggctcatgaggagaaagctagactctcaattgtgacattttttgctcctagctatgaagtggagcttggtccaatgcctgagtttgtggatgaaaaccacccatgcaagtataaaatatacaatcatggagagtacagtaaacactatgtaacaaacaagttacaaggtaaaaagaccctggaatttgccaagatccaaaccaagaacacaaactaggaagttccctaactagttaggagaactataattagactgactaatgactgtgtgtgtagaattaattatctaccacataaaagcatcatggtcaaatctctcg

SEQ ID NO: 8714 - DNA, 483 bp, Glycine max
  Clone ID: jC-gmfl02220096c04a1
tgcgtgtactgttaggataccgcctgcttgggggggggggggggggggggggggggggggggggggggggtaatattcgaaacatggggagtgggtcaagtaagtccgagagtagccggagatagcattacacggtgtcgctaacaagagctgtataagtaagacaaaggaaaaatgcgtcactgaaaccaggtgtgcagtagtgggtgagttaaatcaacaaagcaggggaaaaagaagggtggtgataggggcatataagggtaaagataggggaatgaatgatgcggtaaatatggccaataaaacaaaaaactagtatgattccccggtgaatgtggtttgcgaagtgccaggtgttggtaaaaggatcaaattggtaacaaggccgcagaccccaagcgagggggttcggcttactgtactttgcgttttactacttaccacaataccccgccacgcccgtgcaaacttacgcaggcg

SEQ ID NO: 8715 - DNA, 270 bp, Glycine max
  Clone ID: jC-gmfl02220096c06a1
aaccaaaaaaaaaatccctgtggatttaatcctaattggtccggtttttccctcggttcctcacaggacataatgggggtccagaggaaaaaccacaaccttaacacctttttccaccaatcccaatccattttcccactatgctcttaaactttcccccattttaatttttttcacctctttcacaaattcccactcttttccttttaccctttaagggctctccctttgttgcaccggggttttctgcggcggcggcgcccccggggg

SEQ ID NO: 8716 - DNA, 407 bp, Glycine max
  Clone ID: jC-gmfl02220096c06d1
ggcggccgccctttttttttttttttttttttttttttttttttttttttttttttttaagagcaacaacgttttacggaaacatgaaatccaatttaccagatgggcaaaaataaaaataaaaagccagccaattttagaacaaaccgattggggccgcataacatgtacccaaaggtcccaaactccacttttactaccattaaagtattattccgcaaaccggccatacacttttaggaattacaatcttcttcacgttggaggggagagcaaacccactttcgcatcacattgtataagtaagacacaggcgtctttacattttagtgtcttcacatatgggggggtgcttcaacatactttttctccttatcctcggactcccctttaacctcaaaaggggg

SEQ ID NO: 8717 - DNA, 501 bp, Glycine max
  Clone ID: jC-gmfl02220096c07a1
cagcagcagatccggcgggacaaggtaaggttcgaggcggcgccattggtagggatagaggaggaggaaccagtgtacgagaccgccggaatgttgtcggagatgttcaattttccgcccgcgacggaattgctggagcagcagcacgccacggcgacgttccgggcggcgaggcaagccggagagtggtacggaaacagacagcagcaacagcaacagatttcaggcattaatgctgactcagcagcagccatgcaactttttctgatgaaccctcaaacgaggtcgccttctcctcctcaaagccacactattccttcttcaactcttcacatgttgcttccaaatccttcttccaattccctccaaggatttactggttcggccgcgggagggtcttttggtcaattcacatgggttcctgagggtgctcaccaacaaggaggcgtggtggaagggcaaggtctttcgttatcgctgtcttcttcgttggaggcagcg

SEQ ID NO: 8718 - DNA, 501 bp, Glycine max
  Clone ID: jC-gmfl02220096c08d1
aagcagaaaacattgcacctcatcacttattctaccaacatggtgttaaataatggcgatccggtggttggagtattcaaaatcattcaccaatgtatgttccttcttagtgggttcggatgctctatctataggaggaacatacgttcatgaaatgaaagaaacactatcccctacagtaaaaacgatccccctaattcaaaattcccaatgtcgacatagtgaaattaaataatcattatatgatcgcgtaacgaaagctctattttgcttggtttgtttgattcctccttcttcaaagtgtcacgctagggaacttgcaggatccataacttggatcctttgcggtttgagttgcaagcccattgaagtaacaagttccgccaaccttcctaaactgcgcccaataagcactaaacgcatagctcgcgtgccagaaaaccgaatcgggtttaaaacacttccccttcgattggatcgggtcgcacgtgccattcccct

SEQ ID NO: 8719 - DNA, 527 bp, Glycine max
  Clone ID: jC-gmfl02220096c09a1
gcgaaacccaaccgctgaccgtcgctccggcaatgtggccggaactccaataatctccgtcgtcccacttctacccccgacaatgcctcacgccaaaacctcccaatcgcagcagaacataaagcagagggtactcacgtgcctaacgaagctctcagaccgcgacacacaagccgcgggagccaccgagctcgagtccatcgcgcgtaccatagacccacactcggttccagtgttcctctcttgcatccactccaccgactcctccgacaaaacccccgtccgcaagcaatgcgtgcacctcgtcgccaccctctcccacgcgcacggcgacgcgctctcgccgtttctgtccaaaatcatcgcctgcctcgtccgccgcctccgcgacccggactcctcggtccgggccgcgtgcgccgactccgtcggcgcactctcggcgtgcgtcacgaggcagcctttcgccgccgcgttcctcaagccgctcgcggaggcgcttttcacggagcaggacccgagctcgc

SEQ ID NO: 8720 - DNA, 271 bp, Glycine max
  Clone ID: jC-gmfl02220096c09d1
aatccacacaatggggggggacttccgttacaagctaacttaacatatccttaacacaaaatgaaacaatttagaaaaggacctgggttccgggattttctttatctgtcaaaattgttctattctgagcagtctcaccagctagttcagggcgaaacctaatttaatttcagttcttacttgattcaaaatgagctttctataaacagtctcgaactatgcctggattttttttttacaggactagcttaattatgcttatttgcaaacc

SEQ ID NO: 8721 - DNA, 554 bp, Glycine max
  Clone ID: jC-gmfl02220096c10a1
tctccatacaataatccgagtgacactcctcactttgtggccatggcttcactgaggtgcctccactcaacccaccctcatcttcatcgcggttcagcgcttctcgccatttcgaaccgctgcttcaaccattcctccttgctgaaccggactctctccgtaaaccctcctcgaaccgctcctccacgcgccatggccaagcccagtttctcaactgcccaagacctagtggcttctcctggcgattttgaatttgcgcagcctctgaaaattgtggagtatcccgacccgagattgagggccaggaataagcgcatagttgccttcgatgatagtctgaagaagcttgtccacgaaatgtttgatgtaatgtacaaaactgatggtattggtctctcagcaccccaattaggaattaatgttcaacttatggtgttcaatccagtaggtgagcgtggtgaaggagaggaaattgttcttgtaaacccaagagttagccaatactcaaagaaactgacactatttaatgaagggtgcctatctttccaggcatc

SEQ ID NO: 8722 - DNA, 508 bp, Glycine max
  Clone ID: jC-gmfl02220096c11d1
aactaattaaatgactttattgaaattggattccccaagtataattttcattatctcttcctccacttattgggaggttgaaagttttaccagttactatagaacaaaattaatctctctgatgcaaatatctaagatacataaataacatttcattaatttccattatgtccaaagaggctcccaagcagtaccaaaactgttgtcctctatgaagcagctcatatcaacgtgaggttgaggctgaagcacgtgctgctcctgtgactgactcatttccatgcaaattagggccactaaattggcttgttggcactgcatgttcactacctcagcttgtgctttggccagctgtgcttgtagctcactaacttgcttttgaagttggcatattgcacctgcacacccataaactgggtctctgatcctagcatttgcctcataaaccatgctgctcacagcatctgctctctgggattctggcagttcctgcaagaacttgatgatg

SEQ ID NO: 8723 - DNA, 456 bp, Glycine max
  Clone ID: jC-gmfl02220096d01a1
ttacgtggctacatgttgaagtaccacctgcttggggggggggggggggggggggggggggggggggggggggggggggggcataggttaatgaaaagtcccccgccgaaggaggggggaaaagtacccggaaaagaattggcgagaggttaccgataaaaaatcatctggatcaacaagcccaaaagggcataaggtgccaagtgtgctggaatggctccacccaagcttcggtggtgcaattttagtagcccaatgggcatgagattgaggagcaagtgtgggcgaatgcgaaattggctttagtgatgggcaaggggggcggaaaattggataggctggagttataaggcaaaagcgtaagcgtggactctatagagttttggcggaaatatttagggggcgcctgttggccaattgtgaagcataaggccggggttgctagatttggaaaaa

SEQ ID NO: 8724 - DNA, 252 bp, Glycine max
  Clone ID: jC-gmfl02220096d01d1
gttgttcaaaaaggattgaacggtcataaattaattgaaacacaattgcgaagtcgtcacattgatagatattcaagggccgctcatggacccgggttgcacacacacgccaagttctggaccataaaagaagaaaggaccttattatagacttttacatactttagatcacaccaaacaagggacctgcagaccattctcaaactcaaaacccaccacgaagacgcaagacaaggggaagagtaaactctt

SEQ ID NO: 8725 - DNA, 581 bp, Glycine max
  Clone ID: jC-gmfl02220096d02a1
tacgtggcactgtgtgaagtgctcgcctgcttgggggggggggggggggggggggggggtcggtaaagaaataggtgacgggagacacctataaaaaaggtttagggtatagcacaggatatgggaccccctggatacgcaccctgcaccacgagagcatcataagtagcccggaaagggacctaatatgcttggctaggactgagaaaatcgcaggtgtgtggccgtctaaggcttgacttgtatttggtttgggttagtcgcggctagggggcccaagccctaagtagcatatgacctgctttccttgagggaacaaagatgaaatattatgccaaagggtaaccggaaaactagcggcgtaggtgagctgaggataccctgagaccgtgccggggcgccacaggcaagtgtggggcccgtccgctggtggttatggtgggggctctaatggtagcacagaccaaccaattgtatacttgcagctgcttagaacaggactaataggttcaaccaagccaagcgtagtggttcgcgaaaaacgaagtctggtgttacgttggttgctgtgcttacaatca

SEQ ID NO: 8726 - DNA, 355 bp, Glycine max
  Clone ID: jC-gmfl02220096d02d1
aggacgcccttttttttttttttttttttttttttttttttttttttttttgggctggaaggggagcatattacatatatgttatctcaacaaacaagaaaatcaatacaaacttgattaagataccatatatataggactggatataaatacacatatttcccagaagatcgacaacctaataatagatacatcatacatgcatcaaactagtggaagaagcaggggcttcaatttcatacttaattcccacccaaattaaagcacttaatcttccatgagtgccaaattaattaaggagcccatggtggccttcaaaaaccttggcaaaagaatttttcttttcttatttttg

SEQ ID NO: 8727 - DNA, 550 bp, Glycine max
  Clone ID: jC-gmfl02220096d03a1
ttgcgtgatatcatgttgcagtgccgcctgcttgggggggggggggggggggggtacacagagcaaaaaatcgggttaaagttagggaaaatgtgaaaacgggattaactaagggtcaagaaagcggtataatggtatagaaactgttaaaacgattccaataacctaacggttatcaaaacaatgattagatatacactatcaccaaaaaaaaaataatatacataaacgaatagaatacgctaaatggtgaagtaagaagtggtgttggtagtattagtggtggtacggcttgtgctattcatggttgtagaagtgggtgttaccctactaacagtggtatcacttgtacacaatgtgtttgtggttagatttgtattaatagattaagcaataaaactttgtggcctagatagcaccgtaaagggcgccgtcagctcacacaacattgtaataatatgccgccaaggccacagtagctatatactttgtgcaattggcctaacagtattcttaccaataatacggccacctgccgaaggcaggttat

SEQ ID NO: 8728 - DNA, 375 bp, Glycine max
  Clone ID: jC-gmfl02220096d03d1
gggagaactcaaattaatttcattcagggtacttgcaatgactataacagtgggtaatgatttgtggctagactagctagcatagagaattacagaataaaagcataaacatgtgcttagcagttacctccttcataacattacattgtgcaaattatttacatacatactatactggtgcccctaccacgtttaggcatccatccttatatttaattgttagaaacatgtatagcagtgacagttgagaccatctagtccaccccacatacattgcgacctctgcagatcttgtaatatcccttttctccccagctctccccccatgaattttttatgatccaggtagggctttccttaaaacgaattggagca

SEQ ID NO: 8729 - DNA, 528 bp, Glycine max
  Clone ID: jC-gmfl02220096d04a1
ttacgtggctactgtgtggagtaccacctgcttggggggggggggggggggggtattgaaagggcaaggcctggtgaggaggaggaggagtgagtgagtgagagcggataaagacatagtttaaattagctcgatgcctgggcaaatcaaaatacgctagaagatgccgaagggcggagaacaaacgcagggacaaatccagctaaccaaaatacatagggttgagcaactctgtttgaagttagcagtgggtagggctactgggtgttacgagtagagtgcatcaagtttaggaaggtgccgttgggaacgtggcccggaggtggcaaatgggtggcccacaatggccaaaaacacttcgagcgtcccaaacgattatagacagtaggcgggcagaccgtgaacagtggcaccgggtttaatggacgcacggtttgtccgaggtggttacgcactggcggctgcggcacgtctaacaagggcagcggccacaccgccacacccgcctgcgcagccagttacgcaccg

SEQ ID NO: 8730 - DNA, 425 bp, Glycine max
  Clone ID: jC-gmfl02220096d04d1
tttgtttttttttttttttttttttgcacacacttaatattctaatccaaacaattgaagaggagtcttctattacgaagctaaattaactttgccgtaacacaaaatgacacactttagaaaaggacctggttacagcgtttttggttactgtacaagactgttctatcgagagcagactcacaagcaagttcagggtgaaacttattttagctacagtacatacatgatacaaaatgagctttctataaacatactagaattatgactgcagctcttttcaacaggactagcagaattatgcttatttgcaaacccgttagttcaataagcatatcaataacttttttttctctatacgtctagtaaaaaattgtcacggactaagatggatgatttcatttcacatggaaatagttcagcct

SEQ ID NO: 8731 - DNA, 170 bp, Glycine max
  Clone ID: jC-gmfl02220096d05a1
ttagaaaatagaatatgttggaccttccagtttcttattcataatgatataacatacactccaaggaacgcactgtccaccgcagtccacagctcatttcatatatgaactgaatagccgctttcgttccttggcttgactgttctattcatttgctttaatttttttaa

SEQ ID NO: 8732 - DNA, 621 bp, Glycine max
  unsure (1)..(621): unsure at all n locations
  Clone ID: jC-gmfl02220096d06a1
cttttccctcgttgaaatgaaaatgggttcttctttgtggactttgtgtctaattttggcttcactagcctcttctgcattctgtgcctttccacggaggccagtggatgttccattcggcagaaactacgttcccacttgggcttttgatcacatcaaatacttcaatggaggttctgagattcaacttcatcttgacaagtacactggtactggcttccagtccaaagggtcatacttgtttggtcacttcagcatgaacataaagatggttcctggcgattcagctggcacagtcactgctttttatttatcttctcaaaatgcggagcacgatgagatagattttgagttcttggggaacagaacaggacaaccttacattttgcaaacaaatgtgttcaccggaggcaagggtgacagagagcaaagaatctttctctggtttgatccaacanaagcataccacagatactctgtgctgtggaacatgtatcaaattgtgttcctagtggataacatcnccaatagggtgttcaaaaacctaaagggctngngagtgaagttccnctttgaccaacccatgaagtgtacaacagcttgtggaatgctgatgactgg

SEQ ID NO: 8733 - DNA, 509 bp, Glycine max
  Clone ID: jC-gmfl02220096d08d1
gcataacacctttgggatttcatctttcattcatttttcctgtctgttcctaaaccaggaaggttcagaaagatattaaatactagtaacatggttaaatagaatacaggcccatacaatcccccaaactcaccccaaaaataagataacataatcatactgttaacgctattctttatccaataccacttcccaaaacaaatactaaatttcattgagactccacgaaaaacagaggtccctttggagatcacgccaacacgagagatgcaaattaaaattgattctgtaactgttttgggaagcatctttcaattttccggaacccattaggtcaaaaacagtggcagcagctcacgtcttgaaacgtttggacaaaagtggtgcccaaacatatatatgtgggaacttaaaaaaagcttcgtctgtttgaaacgtttggacaatctgatgcacgatgcccagattccccgcaattaaaacaggtccctccaaatctgtctgatgat

SEQ ID NO: 8734 - DNA, 452 bp, Glycine max
  Clone ID: jC-gmfl02220096d09a1
aaaaaaaaaagggccccccccccccccgggggggggaattcccccccccccccggggggaaaaaaaccggggggtttttgggggggaccccccaaccccccccccccgaagagcggaaaaaaaaatgggggccccttttttaaaaaaaaaaaaaaggggggggcccccccccggggtttttgggggggggaaaaaaatccccccccccccccctttgggggggaaaaatttgtcccccccccccgggggggggccccccccgggggggggggggggggggggaaaaaaaaaaaccggggggttttttccccggggagtggggggccccacggggggccgcccccccccccgcggggggaaataacacccgcggggggggggggggcaccccccaccgggggggggcggccccccccctctttttgggggggcaaaagagccgccccgggggg

SEQ ID NO: 8735 - DNA, 368 bp, Glycine max
  Clone ID: jC-gmfl02220096d09d1
gacccggggccccctgggtttatttttccctgggccccaaaaaggaaatcccgggggccgtttggggccccaaggttgtgggaatttaaaaaccctttccccctgggaaaacccctaaaaaacttttggccaacaggcccccggtttttttttttttcccccaaaaaaaaattttttttctctccccccggggggcaaattttttttttttaaaggaaaaccaacacccggcaggggcattatttccccaaaggggggggggggggaaaacaggtaccctttaaaaaggatacgggggagaaaagtgcccttcaaaaaacaaaccaaagaattttttgaaattgcgcctccaaaaaaaggaggggggg

SEQ ID NO: 8736 - DNA, 554 bp, Glycine max
  unsure (1)..(554): unsure at all n locations
  Clone ID: jC-gmfl02220096d10a1
ctagaatgcggattgcaataggatccgctaaagggcttgcttatcttcatgaggactgtcatcctcgtatcatccatcgcgatatcaaagctgccaatgtccttattgatgatagcttcgaagcaaaggttgctgattttggattggctaagttgactactgataataatactcatgtatcgactcgtgtcatgggaactttcgggtacctagcccctgaatatgcatcaagtggaaaattgacagagaagtctgacgttttctcatttggggtcatgctattggaactcataactgggaagcgacctgttgatcacacaaatgccatggacgacagcttagtagactgggctcgaccacttctgactcgtggactagaggaggatggcaactttggagagttggttgatgcatttttggagggaaactacgatgctcaagaactgtcaaggatggcagcttgtgctgctggtagcattcgtcattctgccaagaaacgtccaaaaatgagccaaattggtagaatatnggaaggagatgtctcactggatgac

SEQ ID NO: 8737 - DNA, 521 bp, Glycine max
  Clone ID: jC-gmfl02220096d12a1
ggggcttcagctgttctgctgatgaaaagaagtgttgcattgcaaaaggggctacccattcttggtgtattcaggacttttgcagcagttggtgttgatcctgccatcatgggtgttggccctgctgctgcaattcctgttgctgttaaggctgcaggtctagagcttgatgatattgatctttttgaaataaatgaggcatttgcctcccagttcgtgtattgccgtaacaagctagggcttgatccagaaaagatcaatgttaatggaggtgcaatggcaattgggcatcctctgggttcaacaggtgctcgatgtgttgcaactctgttgcatgaaatgaagaaacgtggcagggactgtcgatttggagttatatctatgtgcataggtactggaatgggggcagctgctgtttttgagagtggtgattgtgctgatgagctatgcaatgcccggaaagtggatgaccttcttttatccaaggatgctcgcttgaaatagttacttcatactcacta

SEQ ID NO: 8738 - DNA, 425 bp, Glycine max
  Clone ID: jC-gmfl02220096d12d1
tgcccgttgtgggcccaccggaacaattcctgccgcatccgtctgctcggcattcggctcccgcggctcgaggcactttttctgccattgaagaagaacccgtttaaccgtcggggcaagtggaacacacccaactcttaattgatggaacatttgtccatgctgtttctggaactggtgcggatcttgttgcgcgcaacggatctgcttgagaagcatggtgatcagcttgctcacttgagacttgggataatggagagccttatgaacaagctgctaagattgaagttgcaatgcttgttcgactgattcgatactatgctggatgggcagataagatccatgggctaacagttccagctgatggaccatatcatgtgcaaacattacatgagccacttggtgatgccggtcagatcattcct

SEQ ID NO: 8739 - DNA, 346 bp, Glycine max
  Clone ID: jC-gmfl02220096e01a1
tgacgtcgatctatggctagcaatgtcccagatgccgtgcactagcagtgcagttgcaatgttacggcgccagttcaacttactggtactgtgcacccgacaagctaaagttgcaattgtaataattgctcctagtattagtgctgccaggagtaatacgagtattttgcgaagttctcggcagtatctttctgtttatagtacgcgtaggtggattaatggatagggccataaaatatcttaaaaccacgcaacagtgaaataactaagtgcacgcgcggttcttagcaatcaacaataatacgcgtgctggtgtaaagtaatggtgactggtgccttttttaaa

SEQ ID NO: 8740 - DNA, 422 bp, Glycine max
  Clone ID: jC-gmfl02220096e01d1
agtaaaatgcacgagaaaatttattagaaaatcacgatggctagctaagtttcaaagccaagtacattctgttgtaatgtcaaatggaaattaaaaagacacggaaggaggagctgattcgatgtcatgagctattgaaccctaagaattgatccacaggcttagccacacagttggcaagtgtatcacctgcttccggtgtagatgcctcagaatacacaccaacatcatcttcagtgccagatggtcgcacaaagcaccgaccttgggggtacttaacagattcttcatttatggcttcttttagacccggggggctcacaaccacagctattgcatttgttgtaacaataaccgctctgtcagcaactttgaccttgagctgcttgctgggtaaatcatgataaagctcattccattta

SEQ ID NO: 8741 - DNA, 543 bp, Glycine max
  Clone ID: jC-gmfl02220096e02a1
cagcgaaagtctacggctccccatgtgcagaggccgtacacactcacacaacccaggggcattacattaatacacctgtagggggctgccaaatccccgcaacagccttcaattggcctacaggataatagttacaaacaagtgatttgttatggccgctgttcgtggtctccgccgagctaaagtgggcccataatgtggatgcccaacattaggatgacccaccgacacactgtgcatataaggcataagcacaaccttaacagttaacataaccacccgaggttgttacattactaaaccggcagagggctgcccaactactggcaacagccatctatctgcctacatgataataggtaaaaccacgtgatttggtattggcgttggtcgtgcaacccaccgagctacagtgggcgcaacatgggcataccaaaaatgagtattggccagcggcaaacggtacatataaggcagaagcgtaacctaaaaagataccataaccaagcgaggtttttacattagtacatcggcagtgggctg

SEQ ID NO: 8742 - DNA, 598 bp, Glycine max
  unsure (1)..(598): unsure at all n locations
  Clone ID: jC-gmfl02220096e02d1
acgcactcctgacgtatatcaccttcaantaactgctatacccaattttcttctacccacactaacaatantacctacactgcactactacacatacttccatatcttttataactcataacattantannannccgccgggatgcgacgacgtccgatgcacacgcacgttagctcaaatccgctagagcaacagactactctcactgtttttaaatcttgccgttaacttttctcggaaagttcggagttttcccggaaaatggaaggaggtcttctgaggataacacaaaacccccaagggatttcccccttcattagcacgaaaaacacttggcaaccacatgctgagcaacactctttcccgtaaagaagaagcagaagaaggacaacacgcagaagccgaaaccgaacccagccgtgagctgaaccgaacccagactcaccaacacatcattcactaagaaaaacgtagcaacaacaggaacaacacaaaggatcccaactcttggagagccttcacggcgaagcaattgctaaagggcgccatcggctcggcttggagctgcaccaccactatcactaatcacagcaatga

SEQ ID NO: 8743 - DNA, 443 bp, Glycine max
  Clone ID: jC-gmfl02220096e04a1
tgcgtgtatctgttagtggtaccacctgcttggggggggctgggggggggggggggggtgccgacgggcaagatttcgagacaatggagtgattagcaactaactgatcgaccagcgtgtaagtgggggggaatacgttgaccctaagctgaaagccaccggttacaaagccaacctgaccatgcaaaccgtagagcatagtgctactacttgggcgccaatctccgcagtaacaactggcccagcagctggctacgagagctgtgccatccagaaggctcaaagcgcagttggcctatgcgtacgaagggctactgcaagatattgctagctaggtggctagccatttcgggaagaagtgcgtagcccgccaaggcataaaattaacaggtggacgctgagggggattgttagcggtgtaagccccaagtgagggggccggt

SEQ ID NO: 8744 - DNA, 59 bp, Glycine max
  Clone ID: jC-gmfl02220096e04d1
aagcagataacattgctcctcatcacttattttaccaacatggggttaaatggtggcta

SEQ ID NO: 8745 - DNA, 577 bp, Glycine max
  unsure (1)..(577): unsure at all n locations
  Clone ID: jC-gmfl02220096e05a1
gaaagagagagagagagagaaagagaagtgtgtagttggtgaagtttttgagaagaatatggaacgaagtggcggaatggtaacggggtcgcatgaaaggaacgaacttgttagagttagacacggttctgacagtgggtctaaacccttgaagaatttaaatggtcagatttgtcaaatatgtggtgacaccattggattaacggctactggtgacctctttgttgcttgtcatgagtgtggcttcccactttgtcattcttgttacgagtatgagctgaaaaatgtgagccaatcttgtccccagtgcaagactacattcacaagtcgccaagagggtgctgaagtggagggagatgatgatgacgaagacgatgctgatgatctagataatgggatcaactatggccaaggaaacaattccaagtcggggatgctgtgggaagaagatgctgacctctcttcatcttctggacatgattctcatataccaaacccncatctagtanacgggcaaccgatgtctggtgagtttccatgtgctacttctgatgctcaatctatgcaaactacatca

SEQ ID NO: 8746 - DNA, 508 bp, Glycine max
  Clone ID: jC-gmfl02220096e08a1
attgaatccaacaggcgagctcttagggagctgcttttcactgctcctggtgttcttcaatatctcagtggtgtcatcctctttgaggaaaccctctaccagagcacagctgcaggcaagccctttgtgaatgtcttgaaggaagctggtgtgcttcctggcatcaaggttgacaagggcacagtcgagcttgctggaactaatggagaaaccaccactcagggtctagatggccttggtcagcgttgtgccaagtactacgaagctggtgcacgttttgccaaatggcgtgcagtgctgaagattggtcccaacgagccatctgagctgtctatccatgagaacgcctatggcttggctagatacgctgtcatatgccaggagaatggcctggttcccattgttgagcctgagatccttgttgatggacctcatgacattcacaagtgtgccgccgtcaccgagcgtgtccttgcagcatgctacaaggctttgaatgatcaccatg

SEQ ID NO: 8747 - DNA, 539 bp, Glycine max
  unsure (1)..(539): unsure at all n locations
  Clone ID: jC-gmfl02220096e08d1
ctcactacagtcacctgatctatagttatcaatatgtaaattactacatcattatcaagctaattctcctttttatatcttacatcatatctcttcctcttatnttaaaattaattatcnnnnccgcgctcgcgtgtcccgctatacaaantaactacnncccggccgccctttttttttttctttaatcccactaaacaacacaaagcctcattcacggggggggggtggctttcaagaaaacaaaattacattcccttccctgttgcacaggattgaccaaattcactgatatacataaattgtcattaaatgaacccgggggaaaccacaaaggaaaattccaaccgatcaattctgggaaaagtcaaaccacattattacttattaacaacaaattcggtttgttgacccataatacagattcctactcgaattatatttttaatacaatcacaactcttaatgagcaacctctgcagatcgtatcatgtaggatctctgaggcaccatcagcaagcggtgacgtacccttgtag

SEQ ID NO: 8748 - DNA, 569 bp, Glycine max
  unsure (1)..(569): unsure at all n locations
  Clone ID: jC-gmfl02220096e10a1
gaagaagtatcactcatataatactctgtatcatttcatttcgataatcatccatagctactgaagaaaatggcaaccatctctgctgctatcacaaccccatcgatctcccgcgcaactcttgtgcaaaagcgggtctcatctcccgttcttggtttgccagcaatgggtaaggtgggaagagtgagttgctccatggaggaaaaaccttattctgtgaaggaaagcagctctagcatgttggggatgggggcatctctgatggcagctgccagcgctgcagccatgtcaggcccagccatggccttggtagatgagagactgagcactgaaggaaccggacttccctttggcctcagcaacaatcttcttggttggatccttttcggcgtctttggtcttatctggactctctattttgtctacacttccactcttgaagaggatgaagagtcaggactgtccctttaaatatcctgagttgtaaggtgggtgatgatgaatgatggattgtataaatngcaatgagtccccctcatcttctgtgtagttaaacaaattctgtgctt

SEQ ID NO: 8749 - DNA, 516 bp, Glycine max
  unsure (1)..(516): unsure at all n locations
  Clone ID: jC-gmfl02220096e11a1
cttattgctcccagcaaccactctccccaagaagacgctgaggctctcagaaaggcttttgaaggatgggggactgatgagaaaactgtcatagtaatattgggtcatagaactgtttatcagaggcagcaaatcagaagagtctatgaggaaattttccaggaggatcttgtgaaacgcctagagtctgagatcaaaggagactttgagaaagccgtgtaccgatggatactagaacctgcagatcgtgatgctgttttggccaatgttgccatcaagaatggcaaaaactacaatgtcattgtggaaatcgccactatcctctccccggaagagcttttggccgtgagacgtgcttatctcaaccgctacaagcactccttggaagaagatgttgcagctcatacctctggccatctacgccagctnttagtggggttggtgacctcatataggtatgttggtgatgagatncaatccaaattgcacaaactgaggctgaaatcttcatgatgc

SEQ ID NO: 8750 - DNA, 501 bp, Glycine max
  Clone ID: jC-gmfl02220096f02a1
ttactatactgttagtataccgcctgcttgggggggggggggggggggggggggggggggggggggggggggggggggggggggggggggggggggggggggggggggggggggggggggccaaaaaaaaaacccctttgtttattggggggaggggccccccaaaaggaggggtttttttcccaaggaaacaaagcccccgcaaaatttcctaaacgggggtttacttataacccccccctggtttacgtttccccaaaagggggggaaggggaagaagtttccccccatttggggcccgaaaattttcccctgttaaggttaccccggggattttttggcctcataggattttgggggacttttaagttttgggggggaaatagggctttgggggcctaaaatagggggcccgtaaaaatggttttttgggggaggagggcccttccaaaaaatggggggggggttaattcccaggttttttttcccaaccgggggcca

SEQ ID NO: 8751 - DNA, 394 bp, Glycine max
  Clone ID: jC-gmfl02220096f02d1
aaaccgggaacggacaattttttaatggaacaagagctcattattcatgaaagcctccaaaggggaaaacaacattgtttaaggcccctccatgactaaagaataattctcaggatttttttttataaaaattaaggggcaacttaaaggcttgttttgagagcttaatcattgtccaagggattaggccccttaaaagtcctttcccctttgttgcttcccaggggggcactcctttggtttccaacgtttccaaagattttggatcccttcttttccaactttttttttttaggtgatttgttttcaaaagattacttaccaaagtcctcaaatgggtccctgagaattaacttttcccatgggttgaaaccaaccctctttaaattcttgg

SEQ ID NO: 8752 - DNA, 483 bp, Glycine max
  Clone ID: jC-gmfl02220096f03a1
ttacgtggctacatgttgtagtactgcctgcttggggggggggggggggggggggggggggggggggggggggggggtacacgttaaaaattacataggggaggagttagaggataccgggacatagagatacccaaaacactgagcagagagtggtaaagtttgtgctaatagcaaatatggggtttcgatatagtgctgagtaaatggcgccataggatagatgcaggaaaagaaatgctattcggaggtcacacagagtaaagctgcgtggaaaaggaagtggtacccggaagcaaattttgcaatctaagaggcaatatgaacccctggcgaagcattagcacgttctcattggtaggcatgccggaatgatatgcgaaaaagcaaataggagtgtctaaaaggaagaggaggaaaatgctaaaacgaaggaccccgcggtatagcacgtggcttgtatgaatataatttgctggcaaa

SEQ ID NO: 8753 - DNA, 450 bp, Glycine max
  Clone ID: jC-gmfl02220096f03d1
caaaagataagaaaagcttatacttcagtctgcaatgaaactgcaagtattcggcaaagatctggaactctatttaacatactagtagcaacaaccttaacaagatcattacctgcaatgaaactacaaagtattcctgcaaagaaattaaacacaagctttcacataaagaaactaacgaatacaatccaagagtagaaactcagggccttgcccaacaaaatagactcatacttcagtctaagcaccactatagattaacaaaatctcactattctcttaacaatcacagataccaagtctcaaaatcaacttctgcttttgcgtcgttccctaaggccatttccattagcatatgggacctcctcacgcccacgataaggaggtgacctggtgtagctacgtccacgaggtgacaaactacggcgcctatgggaccgcccacgagga

SEQ ID NO: 8754 - DNA, 570 bp, Glycine max
  Clone ID: jC-gmfl02220096f04a1
ttgcgtggctactcgttggagtaccgcctgcttggggggggggggggggggaaaactattcgcagacgtaccaatagagatggtgtgatgcgatacaaagaatgtaatagagggagggcgggaagaagatggggacaactactggaaaaactacggcctaataaaataggatggcacgagttggttaaggtgcttggtgagataaaccgcgcattgggggggttacaataaaaccataacaacacctgtggcactaccgaaccacgccgaattaacgcgtagccttatactaatagggtatggagtactaggcaggtgaaagagttgcattggcgctagcgcccccaatgggctaataattactataagtatgctaatacgcggcaagaacaataggccaggtgcagacgtgcggcgcgcgcacctgagtaacgatactattaaaccaataatgcgcacaaatggttgcggatcacgaactgctgggttaggcgtgattgctgtttattaacgtaagtgaggcgacagtttggccgttgtgctatagccacggttgggtggttacgcaaa

SEQ ID NO: 8755 - DNA, 138 bp, Glycine max
  Clone ID: jC-gmfl02220096f04d1
gcctaaacctttgatatttcatctttattcattatacagtgggttcctaagccactaatgataataaagatattaaatacttgtaacactggataaatttaatacaggcccattacaattccctaaaactataacccc

SEQ ID NO: 8756 - DNA, 586 bp, Glycine max
  unsure (1)..(586): unsure at all n locations
  Clone ID: jC-gmfl02220096f05a1
aatccatccattattctctgtgtgtctttctctacttctttccctttccccaacccctcatacgttactctttaaatacgcaccacatcttcacgtgcctctcggttcttcagtccaaacaatggccatggttgagctctggtggattacgtgctttctctaactactgttttccacacttaacgaaccagaacacagtgagaaagacataatggcggtggagtacacatgctgctcaacggccttcttcgttcacatactggtcatcgtgctgctcgtgcttttcgcgggcctcatgtcgggcctcaccttgggcctcatgtcgctcagcctcgttgatcttgaagttcttgctaagtctggtactcctcaggatcgtaaacacgctgagaagatattaccagttgtcaaaaaccaacatttattgctatgtactctgctaatttgcaatgctgcagccatggagacacttcctatttttcttgatggcctngttactgcatggngcgctatcctaatttctgtgacattaattcttttggttggtgagattataccccaatcagtttggtctcggtatggtttg

SEQ ID NO: 8757 - DNA, 538 bp, Glycine max
  unsure (1)..(538): unsure at all n locations
  Clone ID: jC-gmfl02220096f06a1
gcaccgtgttcaagcgattagggtttcctcccatcgaacttgataaccctcacgtgcccctccctcgccgccacgtggatcgccgtcctcccctcggagtacaccgcatccacttccaactcctcgccgtcgttgccgtagcgctccaactgaaacttcatcgtgtcgattcggtccattgccgcggcctcgtgaagaaccgattcgtcgattttgcagccggaggcttccagaagcttcaccgcttggaggctcccaaccctaattgcgagcggcatgagggattccgccgtcgcgcagcaaatccgcgacgacgtcggcgctgccgcattccatggcgacgtgggggccgacgagggagacgtgggggccgggtttggagaatagttggcggaggtgttcgacggtggcctttcgggtggggagcatggtggctcggtcggttatggcgtcnggagggtcggagagagggtgtcgatcagagggctgagagagttgtagtgtgtaagaaacagaagagagtgggggacttgtggag

SEQ ID NO: 8758 - DNA, 562 bp, Glycine max
  Clone ID: jC-gmfl02220096f07a1
aaagaatccaaatggaccaccaaatccaaatcggaatggtccccccaatatggatagttatactgacaatcacctgcgcaaaattggatcaaatgttaattcctatatcggtatggtttgcgatacacttaagaatactataccaaaggccgtggttcattgtcaagttagagaggctaagagatcattgctaaaccacttttatgttcatgttgggaggaaggagaaggagaaattgggtgctatgttagacgaagacccagcccttatggataggagaaatcaaatagctaaaaggcttgaattatacaagcaagctagggatgatattgactccgtggcttggaaataatgaaatcccagagtttgcaacagatgtttcgaggaagatttgttatagatttgatcattcttactatttttttttaatcaaacacgaacagaaaaatctacggttatggcaagaagttgaattcgcacttgcgaatgattcttttggtccacagaccacagtgtacaaaagcattggagttctatgttgtgaatttatgtaacttacgag

SEQ ID NO: 8759 - DNA, 354 bp, Glycine max
  Clone ID: jC-gmfl02220096f07d1
ttggtcgccctttttttttttttttttttttttttttttttgcccccatacattttttttgggtaatatggtattttttttttaaatgggtctttttgaacaattattggggcttaaaaaacccccccttgggggcaaacctcggtgttcatacccccctaaaaatatatccgtctgtttaagcccccttgtttttgtgaggaaaagaggaattttgggggttgatttggaatttttaatttaaaccaagggattttgcggccttaatgtctttaccccccgggggctatccatgggggctcttcattggtcttcaccctacccagggcgaggccttggtggtttccttttttc

SEQ ID NO: 8760 - DNA, 481 bp, Glycine max
  unsure (1)..(481): unsure at all n locations
  Clone ID: jC-gmfl02220096f08a1
atgatgctaagatgagtgaattgctttccactgatgggcaagaattcttcacctcttatgatgaagtgtatgacagctttgatgcaatgggattgcaagagaatcttctgcgaggcatatatgcttatggttttgagaggccttctgctatacagcaaaggggaattgttcctttctgcaaaggactggatgtgattcaacaggctcagtctggaacaggaaagacagcaacattttgttctggaattttgcagcagcttgattatggattggttcagtgccaggctttggttttggcaccaacaagggagctagcacagcagatcgagaaagttatgcgagctcttggtgattacttgggagttaaggtccatgcttgtgttggtgggacaagtgttcgtgaggatcagcgcattctccaggctggtgtccatactngtgttggcactcctgggcgagtgtttgacatgctgcggaggca

SEQ ID NO: 8761 - DNA, 466 bp, Glycine max
  Clone ID: jC-gmfl02220096f09a1
ctaatccctcactcttgttcttcagtctcctcctattatccgccaccgtagccgccgccgaacggatcgacgatgaagacgaccttctgatccgtcaagtggtgccggatgcggaggaccaccacctgctcaacgcggagcaccacttctccgccttcaagacaaagttcggcaagacctacgccacgcaggaggagcacgaccaccgcttccgtatcttcaagaacaacttgctccgcgccaagtcacaccagaaattggatccctccgccgtccacggcgtcaccaggttctccgatctcactccggcggagtttcgccgccagttcctcggcctgaagccgctccgccttccctctgacgctcagaaggctccgatcctaccgaccaacgacctccctaccgatttcgattggcgcgaacatggagccgttactggagtaaaaaatcagggttcgtgcggatc

SEQ ID NO: 8762 - DNA, 515 bp, Glycine max
  Clone ID: jC-gmfl02220096f10a1
aagaaaactagtaatatggcttcaagaactatatgttttaccattcaagtgactcttgtagtagcttttctaacaacaaaggttgttttatctgatgacactgtgccaattcccgcgaacaaagcacaattaggtgaatggtataatactaatgtggggcctttagatcaaagaaagagcaccgtggacccagcattggtgactgctgaagaaggcgctaaggttgtaaaggtgatgcaagatggcagtggggaattcaagaccatcactgatgccattaaaagtatacctagtgggaacactaagcgtgtaattatttacattggagctggaaattataatgagaaaatcaaaattgagaagacaaagccttttgtcaccttgtatggggtaccagagaaaatgccaaacttgacttttgggggcactgcacaacaatatggcacttgtgatagtgctacattgattgttgaatcagattattttgtggcagctaacatcatgatctcgacact

SEQ ID NO: 8763 - DNA, 529 bp, Glycine max
  Clone ID: jC-gmfl02220096f11a1
caaggatgcagctggagttgcaggaaatgtgtttgcttttgggttgttgtgtctcccatacccacatttaggaggattatcagaaatgggtcaacagagatgttctcagggttgccatatatttattcccttctgaactgcttgatctgcatgtggtatggcacacctctgatatctgctgataatttgttggttacaactgttaattcaattggagcagtctttcagtttgtgtacacaatcatcttcctgatgtatgctgagaaagcaaagaaggtgagaatggttggattattgctggcagttcttggcatgtttgcaatcgtattggttgggagcttgcagatagatgacgttataatgcgtcggttctttgtggggttcttgagctgcgcgtctctcatttcaatgtttgcctctccattgcttataattaaattggtcattcagacaaagagtgttgaattcatgccgttttatctctcactttccacctttctaatgagcacctctttcttactttatggat

SEQ ID NO: 8764 - DNA, 397 bp, Glycine max
  Clone ID: jC-gmfl02220096f12a1
aagcacctttcttcccaacagaagaagagctattttggcttctacctacacaacaagctgggaggccggggaaatgccatagccatagccatagacagagttataccagttattgacatcaatggagttgagccttggaaccttccaacacttgctggagagctatgccgtggggacacggagcattggatcctctttccgcccggacaagacagggaaaccaggggaggcagacccagcagaaccacaggtcgtgggtatcggaaggctacaggaactccctgctatgtttactcttctcacaacaaagtcattggggtgaagaaacccatggtctcctacaaaggaaatgcacctatgggaacaaaaacccaatggaagaagaatgaatacagag

SEQ ID NO: 8765 - DNA, 467 bp, Glycine max
  Clone ID: jC-gmfl02220096g01a1
tggcgtcctactgtgtgaagtaccgcctgcttgggggggggggggggaaaagaaagaaatgggcaggagggcgtatggaacgggggccaatgggatgagtggagccgaatggtacctaccaggtacgcgcactagagcctgaggaaagagaacgagaaaagggagggacactaacagacgctaaaagagacagctgcctaatcgtaccggggggtaggggttggtgtgacaatagtgggttaagattagttgcttgaccaatacaggtaggcatagttaggtcggcttaaggtttaataaaacaacttaatgcagtcattggcgtagataagttgaccaccttatttcgagcgagcaacaccagtgggtgttgggtttatggtgggccaggggtacatagagtgggtactaggctagaactacttggattatgcgagatgcccgtaacaataatattacggcgccta

SEQ ID NO: 8766 - DNA, 351 bp, Glycine max
  Clone ID: jC-gmfl02220096g01d1
ggggaaaaccgggccccaacccccccaatttttttttttcacccgggggcacctttgaaaacccccccccccccaggggggtgtaaaaaaaaaaaaccccccccccccccttaaaaaaaaaaaccccttttgggggcccccattttttggccctttacaaaaaccccctttttttttctccttcccccccccccaaaaaaaccccccagggggggccccccccgggagaaacaaaaattgccccctttccccccccttgaaaaaaaaaccttttttaaagggtctaaggggggggggggggacccccccgggaccccctaaatccacaccctaagggggctaaaaaccccc

SEQ ID NO: 8767 - DNA, 564 bp, Glycine max
  Clone ID: jC-gmfl02220096g02a1
ttacgtgactacatgtgtagcagtaccgcctgcttggggggggggggggggcgagaagttgagtcacaacaagagcgaggaatagccaagaaaaggcaagatacctggttgcaaatctactaacgctgctaggctaaaattaacggcagaggattgggtaaatgggtaggtcaatcaatcaatgttaagaaaaacaacataacaaaaagtaaggaaaaaaaagcccgcaaagtacatgtccagctataggctgccttacctgtttagaaaacggagcttattcatcgagcgactacgaagctcgtactgggtgggtttcgggcactaagttaaaggtggcggctgcaacctttctactacgtaacgagttataccctactaaaggttgtacaaagatgaaaagtagtgtacggggcggtccaagcgcggcacatggctatattgagtatgggccgcgtagctgggtgtggctggtgatgctcttcccagtgcccgcagggccgttggcgacaccctggcgggcgtgctgtggcgcgcttacggaaaaggggggtaggcaagccc

SEQ ID NO: 8768 - DNA, 596 bp, Glycine max
  unsure (1)..(596): unsure at all n locations
  Clone ID: jC-gmfl02220096g03a1
tagcgtcgatctgtttgtngtaccgcctgcttgggggggggggggggccaacgaataagagctagatgtggaggaatcacagggatacgggggcgggagataaaaagagatggacactacgcgacggagataatggcaacgaaaagccccggaattgtattttgggaggaggtggcagggggatagtagccggtgaaatgccagaagagctcaaagcgtagagataagaggggcttaaattggaggaggcgggccaggtagcagatgagactagtagataagactagatacctgggttatagagatgagttaaaacttggccttggtaatcactggtaagtagacggagatggatagtagggatgcaagaaaggttggtatgccggcaaccagggcaatgtgtagaaggacggggtggaaaaataaagctgccggcggggccagtaccaacacggcacgtaggatttaatagcaaaataatgctgcatagacagccgtgcgtactactagaagtggctatatagaaaacattaagggccagctagtgggccatggtagccgtacactagcatgtggtgaagcaggcagtaataagt

SEQ ID NO: 8769 - DNA, 355 bp, Glycine max
  Clone ID: jC-gmfl02220096g03d1
catattccttcttcgtgaattggggattacttttttaccaaaaaaaaagcacccttttttttttttttacaaaagggttcacccaattattaatcttaaattcccgaggaccttaaataatatacgtaccgactggattttcacaaaattaagacctcacctatgctgaggttagccctctaggaagagattcattgcctggatcaggtgaaacaaacctttgaccagcttttaaaacagctgaatggaaggctgttgggttgtcaacgaacgcaaagtgcccaccctgaggaatcctgatgatgtcccatggaaccttcatatgcttgcgagctttttggacaccttgataatt

SEQ ID NO: 8770 - DNA, 520 bp, Glycine max
  Clone ID: jC-gmfl02220096g04a1
acagcgtcgatcatcgttggagtaccacctgcttgggggggggggggggggggcagcaaagaactaatcgggtgtgaggaggagaaaagccgggataaatcacgggagtgcaaagggtgtaacagtgaaaagatagacactatacggggggggggttaaatgaaacaaaaatactaaatggggccagtatgtgtatcagcgcgacggcgatggcgatataagaagaagggtgaataatagaaagaagcatcacgtgggagcgcataacacagagcttggcgacaaggaagctagtactgacaatggccggactactggcgcaaccagccatatgcgtttaaaatatagatgcgcgcctaggacaataacggttgccgcaggggccaggatataataaccagcggcgtgagatacggttcccattatactagttgtgcgggcttgttataaaattacaggggcaaccccaggcaataaccgtagacacacctggcgaaagcgtcaaaattctaagtggaac

SEQ ID NO: 8771 - DNA, 376 bp, Glycine max
  Clone ID: jC-gmfl02220096g04d1
aatcgcaaaaataaacacaaagcctcattcacagcacggtggtgtctttcaagaaaacaaagttacattcccttccctgttgcacaggtttgaccaaatacactgaattactaaaattgacataaaaggaacactaggaaaacaaaaagcaaaattccaaacgattattctgggaagagtcaaaccacaataatacttatcaacaagaaattcggttgttgtacccataataccgattcctactcgcactagtctcttcaaacaacaccaacttcgattgatcagtagctgtagttcgaaacatggaggctctctgaggcaccatcagcaagctgtgagttacccttgtaggttcccagagttgcctctgagttag

SEQ ID NO: 8772 - DNA, 517 bp, Glycine max
  Clone ID: jC-gmfl02220096g05a1
gttccttttggtttgcagaaaggaacatggaagctgtgtgtgctttttctgttggcacacttcacatcccaacagcacatgaaacatcaaactcctttaggaaatccatattcttgagcaaccaagtggcttcaccagtttcattggtttttctcaggggcagttcaaaatccaagcttttaactgccttgtcaccccctccattgacagaatccagtaaccaacctgaggctgagccagaatttgaaagtcatgcagagaaatttgactggtactctcagtggtaccctttgatgccaatttgtgaccttgacaagaggaagccacatgggaagagggtgttgggaattgatgtggttgtgtggtgggataggaatgaggggtgcttggcaggttcatgatgatgcttgtcctcatagattaccacccttgtctgatggaaggattgatcaatggggcatgttgcagtgtgtgtaccatggttggtgttcaatggcaaaggagaatgccagctcat

SEQ ID NO: 8773 - DNA, 564 bp, Glycine max
  Clone ID: jC-gmfl02220096g07a1
cttcgaaggaatttgtcaaagagtagccatcgccccaacgatcccgtttcccttcacttctctacgcaaagccccttgttttgcatagagctacttaaaatgtcggagggaaatgcggagagaggaaagagaattgccattattggtgtctcaaccttattgttggcggcgatggctgtggctgccacagttggtgtcaatgttagtgagaatggttccaacaatgaggacacaaaaattgcttcttctgtaaaagccgtccaaaccctttgccatcccacaaattataagaaagaatgtgaggaaagcctcatagccagggctggaaataccactgatccaaaagaacttatcaaaattgtcttcaacatcaccattacaaaaattggcgataaactcaaaaaaactaatcttttgcatgaggttgaggaggatcccagagccaagatggcacttgacacatgcaagcaactcatggatctctctattgaggagctaacaaggtcacttgatgggataagtgagtctgacctgaaaatatcgcaatccttatgaattaaaagt

SEQ ID NO: 8774 - DNA, 575 bp, Glycine max
  unsure (1)..(575): unsure at all n locations
  Clone ID: jC-gmfl02220096g07d1
ataaacaacactcactgttgatcatctacacaattacacttacactcgtcacattcttaactcatgtcttactaaatccctttatcttcattttaaataatatttactttacnnnnnccgccctcacaggccatcnacgnnnnnnnnntcttcctgcgccgccctttttttttaattttcaatttgactaatctttaaatgaaaaccatcacgggcctattgtgtgcatactatctactacaaacaatcctaaacttggaaccccatttccccctaggccgtttcttgggcaactctcaggggttagcacctaaaccatccattgcatgatggcttacactaacaatagctagcaatacacgtctgacctgctttaccaattaaaaccactccacaatatatatggctctaatctatcattatggatgataaatatggcttgaactaaaacacaacaggataggacagcacttgaataaatcaaactattggcaatttccaattatcaagttattagccacatgcaacggggtcaaaaataccctggcgagcagcgggaacttaaaaagacatcc

SEQ ID NO: 8775 - DNA, 461 bp, Glycine max
  unsure (1)..(461): unsure at all n locations
  Clone ID: jC-gmfl02220096g08a1
cgagagatcgattctctctgtaagtaaatcttgccgttaactttctcggaaagtcggaatttcccggaaaatggaaggaggtcgccggaggataacactttacgatcaaatgaaagccggcaacagcagccgatactcactcgccagcctcatgctgggcgatgtcgttttcaagaaggtggaagcagaagaagcagaagaagcagaagccgaagccgaagcgagctgtgagctgagccgaagccggactctccaagacatcattcgcgaagaaaaacctagcaacagcagcaacaacacgaaggatcgcaactcttggagagccttcacggcgaagcttcggctcaagcgcgccatcngctcggcttggtcctccaccaccactatcactaatcacagcaatgatgatagaaatttacctaatatacccgaaactcgccatgactcggacgagttgactc

SEQ ID NO: 8776 - DNA, 503 bp, Glycine max
  Clone ID: jC-gmfl02220096g08d1
ccagggaagaaatttctcctacaaatcgatttttgttgaagttgctattacaaatattttcagtaaattccactttactgaaacaatatacatatgatttcattcaattatgaaatttaattagtaaaaaaaaatattaaaatacatatagacaggaatagcacaaaattaagacctaacctatgcagaggttagccctttaggaagagattcattgtctggatcaggtgtaagaaaccttcgacaagcataaaaaacagctgaatggaaggcagttgggttgtcaatgaacgcaaagtgcccaccctgaggaatcctgatgatttcgcatggaaccttcatatgcttgcgagcttcttgggcaccttgataattcatccagtcttggaaaccatacatgaaagtggtgggcaccttccactctgaggcactgagaagaaggggcatcctagcaaatgcttcaaatgaaaaaatatattttaagcacagctcttcactagctt

SEQ ID NO: 8777 - DNA, 499 bp, Glycine max
  Clone ID: jC-gmfl02220096g09d1
caaaagagaagaaaagcatatacttcagtctgcaatgaaactacaagtattctgcaaagatctggaactctatttaacatactagtagcaacaaccttaacaagatcattacctgcaatgaaactacaagtattctgcaaataaattaaacacaagctttgacataaagaaactaacgaatacaatccaagagtagaaactcagggccttgcccaacaaaatagactcatacttcagtctaagcaccactatagattaacaaaatctcactattctcttaacaatcacagataccaagtctcaaaatcaacttctgcttctgcgtcgttccctaaggccatttccattagcatatgggacctcctcacgcccacgataaggaggtgacctgctgtagctacgtccacgaggtgacaaactacggcgcctaggggaccgcccacgaggactgtaactccttcgcccataacttgggctcctacggaatctgggtggacta

SEQ ID NO: 8778 - DNA, 575 bp, Glycine max
  Clone ID: jC-gmfl02220096g11a1
taagtattgcagaagcaaaaaatggagccattattttcttcagcagcagcaatatgtgtggtgactgtgttggtagctgtgattcccatatgggcactgaagatgctgaactcgctgtggcttaggccaaagaggtttgaaaggcttcttagagcgcaaggttttcatggtgacccatactcactttctcatcacaactccaaccaaacccttttgcaacaacaccagctcaattcccaaccttttcctctatccgatgatgttgctcctcgtgtatcctccttgttacatcacactatcgacaaatatggcaagaaatccttcttttgggaaggtagaacaccaaaggtgatcattacggacccaaatcaactcaaagaagtcttcaacaacattcatgacttccagaagccaaagtttagtgacaatgtcaagttcttgttcgctggcctgttaaattatgagggtgacaagtgggctaaacatcgaagaattatgaacccagcatttcactcagaaaaattgaaaaatatgctaccagcattttctcaaagctgccatgatatgattagcat

SEQ ID NO: 8779 - DNA, 481 bp, Glycine max
  Clone ID: jC-gmfl02220096g12a1
ccctaatccctatttttcttcctcagtagtgtcatttacgcttctcttctctgcagcaactatgcctaaccctaaggtcttcttcgacatgaccatcggcggtcaatctgctggccgcatcgtgatggagctctacgccgacgtcactccccgcaccgccgagaacttccgcgcgctttgcaccggcgagaagggcgtagggcggagcggcaagcccctccactacaagggctcgtccttccaccgcgtgatcccgagtttcatgtgtcagggtggcgacttcaccgccggaaacggaaccggcggcgagtcgatttatggcgccaagttcgccgacgagaacttcgtgaagaagcacaccggtcccggcatcctctccatggcgaacgccggtcccggaaccaacggatctcagttcttcatttgcacggagaagacagagtggctcgacggaaagcatgtcgtgttcggacaggtcatc

SEQ ID NO: 8780 - DNA, 347 bp, Glycine max
  Clone ID: jC-gmfl02220096g12d1
attaggcaaaaaagaaatgccccaattttattgggggggccccaccaggttttttttaagcttctaaaaacaaactccattcactcactttttgaccccccccccccccccccccttattcttttttttaaaaggaaagggggagggttttaaaaagattttcttaacaccacaatccccttaagggcggcccgggaaaaaaaaaaaaaaaaaaaaaggggcaaacccccccccaaagaaataaccccaattcagagattaaagccccgggtcaacctcgcttaaaaaagttccccccaatgggcaaaaacaacaggcttggagggcctgccccaacaggaaccccc

SEQ ID NO: 8781 - DNA, 529 bp, Glycine max
  Clone ID: jC-gmfl02220096h01a1
ttacgtggtacatcgttggagtaccacctgcttggggggggggggggggggggggggggggggggggggggggggggggggggggggggaccgtagaaaagccgccgaggtattaaaggcggaaaagctggagcctaaagcaaccggggttgcgggtaaaatgaccataggttataccttgcaatggatagcaatggcagggaatattgcatacgctattaagggacccagtatagcgcgctaaagcgctgatgttgtgggcaatgggaccagcacaatagaaggcgcaaaataattgttgggccccccaaaaaaccgggcctgttgggattgcctatgcgcaaactactataactagggctaaaagtaacacttgtttggaagtggggtgtagttggagaaagcccaggcgcaatacttataagctgtaaaacgttgttgataaaccaagtaatgctgttaaggcccctaaggccggttattgcaaaattgccaatttagttgggaaaccttggccgcgaacagtgat

SEQ ID NO: 8782 - DNA, 131 bp, Glycine max
  Clone ID: jC-gmfl02220096h01d1
acttctcaacatttttccaaacacgttaattacatagtacaactttcgaaaaaaagatataatatatatatatatatatatatatatatatatatatatatatataatatgtgaattatttttactatctg

SEQ ID NO: 8783 - DNA, 574 bp, Glycine max
  Clone ID: jC-gmfl02220096h02a1
ttgcgtggtacatcgttagcagtactcacctgcttgggggggggggggggcacttatgaaacagagggatacgcggcgtatatgctaagaggcgagggtctgcgattcgggtgatgggcgataaaaaacaaggagatagacagtaaataaagctgtggggtggcttatacgaacaacgaatctgctaaacgaagtagggcattagagttggacagagcaccgagtcaaaacaaaacggcgcgccaagttaggtgagctgtggctcccaggggctaactgcatagggtggaatatgtgggtgtacccaggtcccgacgcaggtgaccagtagagttagcatattaggcccctataaattgcacgttggccgcaagcatgtaataactgggccgaacacgaggggggccgttggctcgagcttgaacggactgtcaagagaggtcgctgggctaatggtgactgtggcaaatatttgtcggccgcgagagatatcgattgcgcaaccggtagataaataatgtaggatggaggacacggaactagcgtaaagggcacaaggcaggagtcgagcgga

SEQ ID NO: 8784 - DNA, 352 bp, Glycine max
  Clone ID: jC-gmfl02220096h02d1
aggaaaaggtttggggatcccccctaaaattgggagtaaacttcaaggtttaaagctaaaattcaaaacttttaaaggttaagaacggactggcttagctctgggaatcagaactaaaaaatttttggccggggccttataccaagactattggtctaaccattgccttattgggcccaactaaaaccccgcctccaaaactcattggtcaaactcgggggggtctcccgggtttttccccttgaaaacttttgtagggctcaacagggggacgggagttagctccagcatacactggtttcgcaccaagctccttcttaatttttaagagctgggttttttttacaagacc

SEQ ID NO: 8785 - DNA, 440 bp, Glycine max
  Clone ID: jC-gmfl02220096h03a1
ttacctggcatcacgtgtgccactgaccacctccttgggggggggggggggggggggggggggggggggggcggggggggggggggagccggggcggggccgctgcccggtaggcttgtcggggaagacgataatatcggtttgtgttacagcaaaagtgaggtgggctgctaccataaccagcaactaaccttggtatacaagatctgtcctagcaaagtcaggtagttaaatacgcatgcaagcaatgtgtccacgcgaaaccacctagaaagaatgagacgacaacacattcgcaagcagtccatgatcaactagttaagccagatacgaggcaacatctgacattaagtcctccaagtatcaacagcacagtgctgccggatggcaatgctcggtctgaattgagtgcaaagatagtcacaatcagccagtagccc

SEQ ID NO: 8786 - DNA, 545 bp, Glycine max
  unsure (1)..(545): unsure at all n locations
  Clone ID: jC-gmfl02220096h03d1
cgccagtgctggacgagctcactacagctcactcgnccttnntttttttttttttttttttttttttttttttttttttgcacgcatacaaagggatttattaaaatccattcgatgttcaaatggtaatagtagaacaataaaaggtccaaacgccctaacaatggtctaacattaaagggaaaaaacaccaaagaaaaacaatcactgtttggaaaaccggacttattttcgcaaggacataataaagacacttaagaaaactactcttcttcatcttcctctttccagcacttcaaagttgatctaggtgaaccacagtcacaagtcttggcaaatttttggtagacaagagaaccacccattccaagcccttcgtggctcctcttttcgcgacagtatcccttaacatccagaaaacacgtttgatcaaacaacttgcttgcaccatccacatgaactgcaacagagaactcagttgggagaaaacatgccaatacccttctaaccattttgttcagattcaccacttttgagtcataccc

SEQ ID NO: 8787 - DNA, 481 bp, Glycine max
  Clone ID: jC-gmfl02220096h04a1
gcacgtcgacgtcgttgtagtaccgcctgcttgggggggggggggggggggggggggggggatcgtaaaagagggcgacggacggataggagaaaggcagcgagaaaaaaacgacctagataaggcaaaaactggggagcagagagaactaaaagagaacataagttaatgtgagaagctatggggttgtgagagagaaaagcgcgggtaaggaggtgtctagcgatatgaggctgctgaagatagcgatgccaatatagaatgctagcaggcctgtgtaaaaactagcggaggaaggattggaccaagtggcaaacaagtgatgcggaattttacgttgcaatacagctaatgcaccgctatgacaaatacggagtgtacgcggccttctgataaaaacaatagctttggtacgcaggccagatttggggccgcaggtgcgacgtagtaggttggttttaatgcgcattaaaagcagcca

SEQ ID NO: 8788 - DNA, 308 bp, Glycine max
  Clone ID: jC-gmfl02220096h04d1
aattgcttgtctgttctttttctttttttaatggttgacaaacaaaatttataaaaacctctccaaatggcaacaaatcccggggccgtggtttttaagggcccaaaaaaaaacacccaacttgggccccccttacacccggggaataggaacaaaacccgatgacccaacagaaaacccccggttctttttgggggggaaaaaaccccgggagaaggagggccccatccagaccccggggaaaaacttgggaaggggggccccctcccgaaaacacctgcgggggcgaaataaaacaacaccccgtt

SEQ ID NO: 8789 - DNA, 545 bp, Glycine max
  unsure (1)..(545): unsure at all n locations
  Clone ID: jC-gmfl02220096h06a1
gacagcgtcctcctcatacaaccccttaacctgcgacgcacaacagtgtcaggacctcgaaatgtccgcttgcagaaacggtaaatgcctctaccaagtctcatatggtgatggctcattcactgtaggagaatacgtcaccgaaactgtgtcgttcggagccgggtcggttaatagggtcgcaatcggttgcgggcatgataatgagggtttattcgttgggtccgctgggcttcttgggcttggtggtgggcctttgtcattaacttcacaaatcaaagcgacgtcgttttcgtactgtttagtggatcgcgactcgggaaaatcgtccacgctcgagttcaactcacctcgacccggtgactcggtcgttgcaccgttgttgaagaatcagaaggtgaacactttctactacgtggagctcaccggagttagcgtcggcggngaaatcgtgaccgttccgccggagacntttgccgttgatcaatccggcgccggaggtgtgattgtggattctggaaccgcgataactcggttgcggactc

SEQ ID NO: 8790 - DNA, 343 bp, Glycine max
  Clone ID: jC-gmfl02220096h07a1
taaacttttagatgtgtcttgtagcgtgcaacattggggccggcaaataatgaaatgctgtaacgtttttgtgtttgaacgttaatgcttgatgacgtctgagggaagcaaatttggaaatattaatagccaaccatttttgcatcgagaactacaatcaatggcgtctgcactacctggcgacgaataaacgccacttgtgggcgatatttcgggccttgaagggctcaagagccaccacaccagggatgttcatattctgagcttggcctttctcttggtctttctcgccttcggcgccgctcagaatttgcagagcactctcaacactgaggatgacttg

SEQ ID NO: 8791 - DNA, 406 bp, Glycine max
  Clone ID: jC-gmfl02220096h09d1
ccccgaaaaaaacccaccctttttttttttttaaaaaaggggttccaaaagggtttatttgaaatttctcaagacctaaaaaaaatagggccccgttttttttttcaacctaaaaaaaaacccccaacttttgaatccctttcccgagggggggggggcccaaaaaaattttacccccaaaataacccccagtttttttgggacaaaaaaaatcccctggaaaaaaaaggcctcacctaaaacttggttagccccccgggaaggggggaccctggcccaaaacacatactgggggggattaaaacaagttcctggggattttgaattacccaccaggggtggtggttttacagtcccgggaccccaacaacctttggttgcctccaaaaaaccaaattttgaaggg

SEQ ID NO: 8792 - DNA, 583 bp, Glycine max
  unsure (1)..(583): unsure at all n locations
  Clone ID: jC-gmfl02220096h10a1
gtttcttcttctgttgcgttgtgtgtgagtgtgggcacggtaagatgcagaccattgctaggcgcttagggcagcaatcgctgaggccatcgacgtcgctcaagtccatctatccaatttccgatcaccattatggaatggatcacgagcgttacgtttctaccctcgccaccaagggagttggtcacctcgttcgtaagggcactggtggacgatcctccgtcagtggcattattgctacagtatttggggcaactggattcttaggtcgttatgttgtccaacaacttgctaaaatgggatctcaagtcctagttcctttccgaggctctgaagataatccccgtcatctcaaattgatgggggatttgggacagattgtacccatgaaatacaatccaagggatgaaagttcagtaaaagctgtgatggctaaggccaatgttgttatcaaccttattggaagggattatgagacaagaaactacagctntgaagaagtgcactatcacatggctgagcaactagcanagatttccacagagcatggtggtatcctgagatttattcaaagttcttggtt

SEQ ID NO: 8793 - DNA, 572 bp, Glycine max
  unsure (1)..(572): unsure at all n locations
  Clone ID: jC-gmfl02220096h11a1
gcctcagtaatctgagagagaaacaaaaacaatgaaggtttccattgccaagttccactcccttcccctatgttttttccttctcttggccttcaacacaaaacccctcctagcagcagaaccagagccagtggttgataagcaagggaaccctttggagccaggagtagggtactacgtgtggccactttgggctgatgaaggaggcctcacactaggccaaacaaggaacaagacatgccctctttatgttatccgtgacccttcattcattggcaccccagtttcattcttagcaccaggccttgaccatgttccaacactcactgatctaaccattgatttccctgtggtgacagtgtgtaaccagccaacagtgtggaggctcaacaaggtagggtcagggttctggtttgtgagcaccagtggtgaccctaatgatatcactagcaagttcaagattgagaggcttgaaggggatcatgcttatgagatctacagcttcaagttctgccccagtgtgcctggtgcgctgtgtgctcctgtggngactnttgaagatgctgatggaa

SEQ ID NO: 8794 - DNA, 560 bp, Glycine max
  Clone ID: jC-gmfl02220096h12d1
ctgtttgtttctgatctatggcttccaaggagttctctggtctttgttccttggtttggtcactctccgagagcattttgtgcactactgggttgaaaatgtatttggtggagagcaaaggaggtgccataacatgcatgttcttggctcttttcttcttggggacatggcctgctcttttgactatgttagaaaggcgtggtcgtcttcctcagcatacctaccttgattactcaatcaccaatttcttgtctgctttactcattgcttttacacttggtgggataggcaagggcactcatgatcagccaaatttcttagttcaacttgctcaggataattggccctccgttctttttgcaatggggggtggtctgttccttagccttgggaatctgtcaagccaatatgcatttgcttttgttgggctatctgttactgaagtgatcacggcaagcataactgttgttataggcacaaccttgaattactttttggatgacaaaatcaacaaaactgagatccttttccaggagttggttgccttttgattgagtttt

SEQ ID NO: 8795 - DNA, 161 bp, Glycine max
  unsure (1)..(161): unsure at all n locations
  Clone ID: jC-gmfl02220097a02a1
cacttccataacttctaacccatcttatataatttgtaattcatataacataatcaatctattctgcattactatcaatcatacttcaatactatcacactaccaaaaatctataattatctaatnnnnnnnnccgcgcgtcgtactgagacagctatgac

SEQ ID NO: 8796 - DNA, 506 bp, Glycine max
  Clone ID: jC-gmfl02220097a03a1
ctagttttcagggttttgctcttgctccaagtgataatttgtcttctagttcaacggagtattatgtgggtaaaggtgttggcaccatagcagatgaacgcaaaggagggtttattcatctcccgagccgtcctagcatcaatgcaaatggggttcttggccaaatattgtttgatgtttgtgtgcccaagaatgttgaggattggtgtatcaggtcaaattccaagaatgcactagtagcaggtacaaggaagcatgttccatttaatccgataaaatgcattcggcgttcaaggttgtaagattgttgtgttgactgacagaagcttaaggagaattatgcttggaaggttgtgttgtcttcaaggttcaaaatttttagggagatctaatgggcaaaagagatgtgtagtagtattaatacctgaaataagaggctaacggactatataggttaccacctaagctgttcttttagcactgtggacttggtaatgtgattgagc

SEQ ID NO: 8797 - DNA, 304 bp, Glycine max
  Clone ID: jC-gmfl02220097a03d1
acgagtcccaataaacaactttctattcttaggtccttaattagggtaatacggacactagttagcatttgctaaagaaatagcatgcccaacagggacaaacaagtctatgacatgctccattaagggagaaaaaacaagggcataaatttcactttgaatgtttggctgatcaacaccctataactaatatatacagatggctctgtgtatgcttttataaaaaacacaagttacaaaaggggaattaaaagttcaaagaataatggaattttcagacatgcgccagcctcccctggagaaa

SEQ ID NO: 8798 - DNA, 275 bp, Glycine max
  Clone ID: jC-gmfl02220097a04a1
aggcaacgaccatgcttataatatgtctagatatatagcgacatccaattctaaaacggggatcccatgagaatggagacgcagcacactgtaaaaaacgagtgcgccgatattcgatgactagatggcagaacccaacgatgaatatccgccttgtgtgtcgaaacaatagagcgcggcatgatcctcgcttgtgggtcccaacaagcaaaaggtgtgttcaatatccttgggaggaaaaacagcacagaggggacttaaattcaaagagaagt

SEQ ID NO: 8799 - DNA, 437 bp, Glycine max
  Clone ID: jC-gmfl02220097a04d1
gtggagcccggcaccctttaagccaagaggaatcaaacaaaggttcggttgtaaggagcggtttttcttcctccatctttctctaaaacattaatggaactctccattccttagatttcaccaacgagctcaccaccacacagacaaagcaatggcaaagactgagttagaggtgactgttgagagcaagaacaaagaactaaagcacctgggatttgagaagattgccgatgatcaaactcttgcgagggcgtcgaacatcgatgagtacccaacggacaagtctctgcctgtgagatcacgtgttggaaccgttgtcaacactgtgaccaccgctcttggtcctggctgcaacaaatgcaaggacttgcctgatgacgtgcaaggttatgtcgacagaaaggtggatgatgctttcaacagttggatgagcatgc

SEQ ID NO: 8800 - DNA, 578 bp, Glycine max
  unsure (1)..(578): unsure at all n locations
  Clone ID: jC-gmfl02220097a05a1
aatttatacaggaatcacattagctgagtatttcagagatatgggttataatgtcagtgtgatggcagattctacatctagatgggcagaagcattgcgtgaaatctctggacgactggcagaaatgcctgcagatagtggatatcctgcataccttgctgcacgtttagcctcgttctatgaacgtgctgggaaggtaaaatgtcttggaggccctgaacgtacaggtagcgtaactattgttggtgctgtttcgccacctggaggagatttctcagatcctgtgacatctgcaaccctgagcatagttcaggttttctggggtttggacaaaaagcttgctcagaggaagcactttccttctgtaaactggcttatttcttattcaaaatactcaacggcacttgaaaccttntatgagcaatttgatccagattttatcaacattaggacaaaggctcgtgaagttctgcaaagggaagatgacctgaaatgaaatgttcagcttgtgggcaaggatgctttagcttgaagagataagatcacctttagaacttgcaagcttttgagagaggata

SEQ ID NO: 8801 - DNA, 492 bp, Glycine max
  Clone ID: jC-gmfl02220097a05d1
aatatatatattgaacatatgattctataaggtatattttatctttacaaagtaaaacataaaactagaaatggttaaaaatctgttgcatactatcaaggcagaatacacgttctgaaagggtatagattcagtctactgtactttatatatagatcaaaccctcaaagccacctggtcttgccatgaaatcttcctcttccctgccctatttgatccatccccaacacttctacaggcagccgagagcttgatgtcgctgtgctgctcgtcagtcgcaactctttgtgtacttctctttggttcttcaatcctcatggcctcactgttcccctgcaattcctcctcttctctcgaaatctggttcaagtcgaaaaatggagttacactcttctttgtggcttccttgctgctgtgaatcctttctttgtgattcaactcaaacactggtggagcagaaccgttaaaggaagcatcttttttactagaact

SEQ ID NO: 8802 - DNA, 506 bp, Glycine max
  Clone ID: jC-gmfl02220097a06a1
cgttttcgttagaaaaaaaaaaaggatgtttatacatctgaatatcaatcttgcatgggggcatggcctcaaaaacatccaccaacagcacccattattctctacccgagatcatatcaaaccgaaatcctgacacaaaataggtgcggatactgaacacgacactaagcgatggcgaacaagcccctggaactggcatgacgaccgatcagaaaatacaaattgctctacagctcacaagagatcggtgcggaagttatataagggggctcaactttagggacacaggaagacttcaacgctgtcaagatgataacgcaagaagtgggcaacaactgtgacgctgatagggatagttcctgaaattgcggccctatgtaggggcaatgacagggacataacgagagcctgggaggctctaaagtatgccaagagggcagagcttatgcctttcatagcagtgagtgcgattctcaaggaatataagctcaatagaacaaagaaga

SEQ ID NO: 8803 - DNA, 403 bp, Glycine max
  Clone ID: jC-gmfl02220097a06d1
ttgttttttttttttttaaatcttataataagttttttttttttatgggaaaaatatgggggggctttggtgggaaaaattctccattactttgtttaacccgttaaaaagataacaccttaacatgacataattgcttttttgaataaataggtttgtagtgtgaattctaacatttaggtgctagaattctttcgacaaatacaaatcattcctttgaatcgagcattttgtttaaggcgacaatataatcctatacttttgaagagtcggaaaagccctttttttgagtctccaattagggggaataaatttttttgtcattcaaagcaggagttcgtgacggcttagtttttgtacgatttacaacacgggtagtagcaattgcatcggagccttctgt

SEQ ID NO: 8804 - DNA, 546 bp, Glycine max
  Clone ID: jC-gmfl02220097a08a1
attcggtgatcactgatcagtggtttggtgttgttgatagagaaaatgcattccagccctttgcttcttgaggaacccattaggatggcatccatccttgagccatccaagcctactttttttccggctatgacgaaaattgttggcacacttggtccaaagtcacgatcagttgatataatttcccattgccttgatgcaggaatgtctgtggcaaggtttgacttttcatggggtgatccagaataccatcaagagacattggaaaatttgagagttgctatcaaaagtaccaagaaactctgtgcggttatgctagatactgtgggtccagaattacagattgagaataagactgatcacccaatcacccttgaagcagacacattagttgtcttaactccagatcaaaataaagaagctagttcaaatctcttaccattaaattttaccgggctatcaaaggctgtgaagaagggtgatactatttttattggaaaatactcgtttactggaagtgaaacagcttctgtatggctggaggtc

SEQ ID NO: 8805 - DNA, 365 bp, Glycine max
  Clone ID: jC-gmfl02220097a11a1
cgatattgctgtaactaaccctattcatcaactgagtcagagaatgaatctgtggacggacgagaactcgttggttattgatgtgtctgtgccctcctgcgacctatacttcatctggcccaatgacgctgctccgaaggcgcagaagaacttgatcagctatggtggcgccgttggttatcgcctgattgccaacattgaggccgccttatagacctgcacctaccccatattgtggcagttctgttacaactattgcagctccactctccttgggtggggcgaccgttactacaaaggcgacgacgacaaagccaaggcagaggccaaggccgaattcacctacgccgtcgaacaggaccacc

SEQ ID NO: 8806 - DNA, 285 bp, Glycine max
  Clone ID: jC-gmfl02220097a12a1
aagaatgcccatcttctctgcaacattgggctcgtgcactagagacatggctaccttgctctcacagggacacctttctcctttcgcgaagacaccttgccaatggcagcatcactatcacactgatgatgcttggacgacgcctataactatacccgattggcggagttggtggttattactggattgggaacaatggactgcctaccggaggagctggtgccggaatacgtggtggatatggcggaagtggtggacttggtggaggtctcagcagacctaccg

SEQ ID NO: 8807 - DNA, 565 bp, Glycine max
  Clone ID: jC-gmfl02220097b01a1
ctcgagccgaatcggctcgagatcaattaccatacaatccttgcagaatgagattgctgctctccagaaaaaagggtcactggatgctgaggagcaggttggaaaggctcatgcacgtgctggtgaactacagaagcaggtggacaagcttaaaagggaactagaaacacaaaacaaggagaaagtgaactgggaaactcgagtacctgagttagagaaaaagattcatgacttgaactcaaaattagaagatcttcaaaagataaatgaggaacagaagaaaaaaattcaaaaaactgaacgtgctcttaaagttgctgaggaagaaatggtgaatgcaaagtttgaggctactgccatagaaaaagagctgagggagactcatggtgcttggcttgccccttggcttgctgttcactatattcatagtaagtcttttgttgatagtcattggaacaaacatgggaaacctgctttggaaatggttactcaaaaggccctagagaaaaaggcacaagctggaaagagggctgaacctcatgtgggaaccattaaaactaaatgg

SEQ ID NO: 8808 - DNA, 448 bp, Glycine max
  Clone ID: jC-gmfl02220097b01d1
gattctaataaacatacattatgaggaaacatttttactatgtcaagaatttaagaaaataaaaccagcaggaaaagggagtgcaaggtctaataacaaatataacaaagtgataaactgataatacataaacacctaaacatattgtgtgcccttttctacagtgaaacatcctaaagttacctcacccaaaaaaagagaagtaaaatattcaaaaccccacacgacaggaaagatacatccccctcaataagcccgtgcgaacaggaaaaattatctaaactttccagggaaaaaaataaagcaggaaccaacttcatgttgtgtgcttgtctagatgccctcgcttatgtttacgtcgtgcatggtgattgtttccatttcgagcaggtttattcacttttttgctacagaaaacagctgaaaacactctagccactaaaataat

SEQ ID NO: 8809 - DNA, 533 bp, Glycine max
  Clone ID: jC-gmfl02220097b02a1
ctacaattagaaaccctaagaggcatggggtgtggcagctccaagctggaggatctacgggcagtggccctttgcagggagcggtgtggtttccttgacgaagcaattcaccagcgctacgcactggccgcagatgacatggcctacatcaactccctcaaggcacttggtcactccttacaccttttcattcagcaagacatggatgctcctacctctccctctccctccccctccccttctccccctcacaaacccttcaaacacgcctcttcttttgactccgactgcgacggctctcaccttcacttacactccgactccgacttcgaccacgtacactgcctccaccattcccctgatccatgctctcctctggctcaccatcttcatatgaattacatgaagaataaagccgctccttcaattgtctacgagcagaggcctctgagtccccaaaccatgtacttgggagaggcctactcttgctcctccttttgcccttaccagtatcccccttacccctaccccta

SEQ ID NO: 8810 - DNA, 334 bp, Glycine max
  Clone ID: jC-gmfl02220097b02d1
aaaaagggaatctggccaaaaatttaacttaaaaacgaatgtttttttacgggaaccaataacccccatgcttttaggggggggggttactccaattttactgattaaattggggccttttataaaatgacttgccaggggggggggttttatacccgaaaggccgcccttttcctttattttttttttcaaaggccaaaagaaaaaccctttaaatgttccaatttgggggccccccttcccctgttttttaacagcacaactttacttggggccttatagcgctggatacccaaaaaggaactgggcgcctaaaaccccaaacttttttttt

SEQ ID NO: 8811 - DNA, 556 bp, Glycine max
  Clone ID: jC-gmfl02220097b03a1
gttccctacctctcctttcaagatgcagatcttcgtcaagaccctcaccggaaagaccatcacccttgaggtggaaagctctgacaccatcgacaacgtcaaggccaagatccaggacaaggaaggaattcccccggatcagcaacgtctcatcttcgccggaaagcagctcgaggacggccgtaccctcgccgactacaacatccagaaggagtcaacccttcaccttgtccttcgtctccgtggtggcatgcagatcttcgtcaagactctcactggcaaaaccataaccctagaggtcgaaagctctgacaccattgacaacgtcaaggccaagatccaggacaaggagggaatccccccagaccagcaacgtctcatcttcgccggaaagcaacttgaggacgggcgcaccctcgccgactacaacatccagaaggaatcaacccttcacctcgtcctccgtctccgtggtggcatgcagatcttcgttaagaccctcaccggcaagactataaccctagaagtcgagagctccgacaccatcgacaacgtc

SEQ ID NO: 8812 - DNA, 231 bp, Glycine max
  Clone ID: jC-gmfl02220097b03d1
gaaaagggaaaaaaaaattgttttgcccccggtccttccaattttaacatttaaagtggggaacgggggggatttctcgacttggccaacaatccgggcccagggttggtttgaaaaacaacctttaagccactggaaagggttagttttaactggttttttggggccattgtgctaaacatgaacggcacccgggaagcattcctccaaggaaaaaggggggcccccccg

SEQ ID NO: 8813 - DNA, 517 bp, Glycine max
  unsure (1)..(517): unsure at all n locations
  Clone ID: jC-gmfl02220097b04a1
ctagtttagttatctactcttttctgcatgtttgttctctcaacgactcctccgcgaaagagtattattcaatattttggttgggttgaatcccggggttgaagcgttgcagacatcacggctattctaagagtgtctcgctccctcattcatgtccgatctgtacgacggaggacgggtagttgcgtaactgccgttaacccttcgccgcacggtgggcgtggtgctttgccttctgaaggtggtagcccttcagacttgctcttcctcgctggtggtggtttcttctagtttcttcactcttttcattacttttagcctgcatagttttaaataagaaaaaaaaaacagcgactttgtgactagttaagatcaccgnttcttcttcttcttcttcttcttcttcttctactactactactactacttttcctccacaaaatgatgctcaaaatcaagagggttcccactgtcgtttccaactaccaaaaagacgacgctgcagactctcctcgtc

SEQ ID NO: 8814 - DNA, 62 bp, Glycine max
  Clone ID: jC-gmfl02220097b04d1
gacattgttagtgacatgggctattaataggagggccttactacggagcactaaaggctccc

SEQ ID NO: 8815 - DNA, 446 bp, Glycine max
  Clone ID: jC-gmfl02220097b05a1
cggctcgaggcacttcttctgccattgaagaagaacccgttaaaccatcagtgcaagtggaacacacccaactcttaattgatggaaaatttgtagatgctgcttctggaacggcaaaggatcttgttgcgcgcagctgatctgcttgagaagcataatgatgagcttgcagcacttgagacttgggataatggaaagccttatgaacaagctgctaagattgaagttccaatgcttgttcgcctgattcgatactatgctggttgggcagataagatccatggtctaacagttccagctgatggaccatatcatgtgcaaacattacatgaaccaattggtgttgccggtcagatcattccttggaacttcccttttctcatgtttgcctggaaagttggaccggcattggcctgtggcaacaccattgttctaaaacagctgag

SEQ ID NO: 8816 - DNA, 526 bp, Glycine max
  Clone ID: jC-gmfl02220097b06a1
aaaaaccttcccttctcttctcacccccacactcccatctcacacacccctcgcatccaacaatgtctctcaccattccctccaacctctccaagcccgccgccctccgccccaaactaagcccaaagctaaggtccgccgccacaaccaccatcgtctgcagcaccaccaacaacaacaacaacaacaacgtgtcctccgacctgaaggcgttctccgccgcgctggccctctcctccatcctcctctccgcccctctccccgccggcgccgacatctcggggctcaccccatgcaaggagtcgaagcagttcgcgaagcgtgagaagcagtcgataaagaagctggagtcgtcgctgaagctctacgaggcgggcagcgcccccgcactggccattaaggcgagcgtggagaagacgaagaggaggttcgacaactacgcgaacaggggttgctgtgcggcggcgatgggttgccgcacctgatcgtgagccgagaccagaggcactggggtgagttcatcaca

SEQ ID NO: 8817 - DNA, 311 bp, Glycine max
  Clone ID: jC-gmfl02220097b06d1
agcaagaactcttcttacattaattgaattggaagatgaggttgattgtggttcacatgcattagattacatcatatcatgtaccatttataaaaaaagtaattacaaaaagagcgcgtaaagatcccatccacatacaaattctccaggctttcctccaatgtagccatccaccctctcttatctagacatccttggcaatgaggtcgccgttgatgagttctctgtaggcagcaacgggccagctgaaacccctgaagagcaagcgagaagccagaagaacatcgatgatgatctccttgcatgggggg

SEQ ID NO: 8818 - DNA, 560 bp, Glycine max
  Clone ID: jC-gmfl02220097b07a1
ctcgagccgcaataattcagaaatgttactgcaaacattagctatccctacaatactcgttgtgatattcatatgggtggtacaaccaaagcaacgtcatgggaagattgcaccaggtcccaaggcgttgccaattattggtaacctccacatgctagggaaactcccgcaccgcacccttcaaacctttgcaagaaaatatggacccataatgtccttgaagctagggcaagtccaagccatagtggtttcctcccctgaaaccgctgaactattcctcaagacccatgacactgtttttgcaagcaggccaaagattcaagcctctgaatatctctctcatggcaccaagggcttggtgttttccgagtatagcgcctactggcgcaaagtgaggagagtgtgcacccttcaacttctcagtgcttcaaaagttgacatgtttgctcctttgaggagacaagaattgggagtgttagtgaagtcactgagaaattcagcggcatcacgtgaagttgtggacctcagtgaggtgttgggggagcttatggagaacatag

SEQ ID NO: 8819 - DNA, 435 bp, Glycine max
  Clone ID: jC-gmfl02220097b07d1
ggaatgtcatatttcttgtgtttttgtagctagttcttttcttgttaatacaatattttgctaataaaagattaaaatatattttggattcctaaaattatgataagtgatgtgaccaaaaaatatgataactggaaaaaattaggcaaagcaatatgataaataaaataaaataaaaataataaattaaaattttgaatgtaaattgatgtgtgtgtaggtgaaaagtatgctattgtacaagtcaactcatgaattgtactcaccaaaaaatctcaacgtgaattctggaccatacaaagtatatcctatggtatcagttttcttttcttttattttaaatcttaattagtacatcaatattaatgtaaggcgtgtgtgtgtgttgaagtacgttgttggaaaagtatgctattgtacaagtcatctcatgaa

SEQ ID NO: 8820 - DNA, 552 bp, Glycine max
  Clone ID: jC-gmfl02220097b09a1
ctctgtttctgtctctgtgtttgcggctgaggattccgaacgagcgaccttcttcgtttgtcgcaaagtttaagtcatcatgggtaaggaaaagactcacatcaacattgtcgtcattggacatgtcgactctgggaagtcaactaccactggtcatttgatctacaagctcggaggtattgacaagcgtgtgattgagaggttcgagaaggaggctgctgagatgaacaagaggtcattcaagtatgcctgggtgcttgacaagctcaaggctgagcgcgaaagaggaattaccattgatattgctttgtggaagtttgaaaccaccaagtactactgcacagtcatcgatgcccccggacatcgtgactttatcaagaacatgattactggtacctcccaggctgattgcgctgtccttatcattgactccaccactggtggctctgaagctggtatttctaaggatggacagactcgtgagcatgctcttcttgctttcacccttggtgtgaagcagacgatctgctgcttgaacaagatggatgccac

SEQ ID NO: 8821 - DNA, 337 bp, Glycine max
  Clone ID: jC-gmfl02220097b10a1
gtggaacacggcaacagcagcgccggaatgaagatggctctggaggattgtaaggacttgttgcagtccgccatccacgacctagaggcctcaggcgtgttggtcaaagagagcagcctacaggacgtgcaccagcgcaccgccgagctcaagaactggttgggagccgttgttgcctaccagcaatcgtgcctggacggcttcgacaccgacggcgagaagaaggtgcaggagcagctgcaatctgggagcttggacaacgttggaaaactcactggcttggcactcgatgtcgtgtcagggatttcacacattctccaatccttggacttgaacc

SEQ ID NO: 8822 - DNA, 309 bp, Glycine max
  Clone ID: jC-gmfl02220097b11a1
ctgttttccgctgcttgtttgtgcctgcgtagttacaaagtaaaaagagggaggactaggacaaaagttgttggcagtcatcatgtcgagcgcttcgttgaaggagatgaggaacggtggtgaggattatagcaatggtcatggtggtggtggtgtgagggacttgtatggagaggattgtgccactgaggaccagcttatcactccatggactttctctgtggccagtggatgcagtttactgagagatccacgctacaacaaagggctggcctttaccgagggagagagagatgctcattacttgcg

SEQ ID NO: 8823 - DNA, 477 bp, Glycine max
  Clone ID: jC-gmfl02220097b12a1
aagagaaagacagaatcgttaaacatttaatattggaggactataactcacagcatcttgaatatgatccgaatttctccacacactatatagcaagttgggtgacagacagtgtgagagacaactgtgcttcttgtacctaccagtacgactttgtcaacctaacgtatctaaggtaatatgtagcataatagatgccaaaagtactcatgcagcctttaatgccccaccttattaatttctctagctagcaatgcagactttagcatacaaaagccatcttggtcttggtcacactgtatgtacacctgtacctagctagccatgtaattgaggtagtcccaccacagaacatttttactttttttattagggaaaatatttaaaacactggctcgaattctttgaggaagattttttgcccacgtgatagaatcattcttggatcaaactgatgctttctttctaagaatttca

SEQ ID NO: 8824 - DNA, 501 bp, Glycine max
  Clone ID: jC-gmfl02220097c01a1
aaggcatttgaggactgtgggttttcttcacagattatgaatgctattaaaaaacaaggatatgagaagccgacaactatacaatgtcaggctttgccagttgtgctttctggcagggatatcattggtatagcaaaaactggttctggtaaaactgcttcttttgtacttcctatgatcgtgcatatcatggatcagcctgagcttcagaaggaggaggggcccataggggtgatatgtgcacctacccgagaattggcacatcagatttttctggaggccaagaaatttgcaaaagcgtatggggtacgtgtctctgctgtctatggtggaatgtcaaaacttgaacagttcaaagagcttaaggcgggatgtgagatagttgttgctacccctggcagattgatagacatgctgaagatgaaagcattgacgatgatgagagcaacttacctggtgcttgatgaggctgatcggatgtttgatcttgggtttgagccg

SEQ ID NO: 8825 - DNA, 337 bp, Glycine max
  Clone ID: jC-gmfl02220097c01d1
ggaacaaacctaaaacctttttacttttgggaagttaaaatcttttgggggattgaaaacgggggctttttttatccagacataatcaacttttggcttgccctaaatataggaacattgatcccttgggcagggggggtcattcaaggggacaactttttatcccaaccgggggggccccccctttttttaggttaaaaactggtcgggcttttttgaccaggatttaccccataaccttgacggggggaaataccccttgatgtaccaggattgggggaaccactcctttgataagttttttttgcaccaccaattgaccccccggatacaaaac

SEQ ID NO: 8826 - DNA, 483 bp, Glycine max
  Clone ID: jC-gmfl02220097c02a1
gagttagggctttacagtgtttctcttccttcttcttcttcttcttcttcttcttcggggaatcgcgattgttctgtgcgagagaaagaagagagagatcgaaaatggcgttggctttcgacgagttcggaaggccgttcataatcctgaaggagcaggagcagaagagcagactccgaggattggacgctcagaaagccaacatctccgccggcaaagccgtggctcgcatgctccgaacctacctcggccccaaaggcatggacaagatgctgcagagccccgacggtgacgtcaccatcacgaacgatggagccaccatccttgaccagatggacgtggacaaccaaatcgcgaagctgatggcggagctctcgcggagccaggactacgaaatcggcgacggaaccaccggcgtcgtcgtcatggccggcgcgcttctcgagaaggccgagcgccttctcgagcggcgaattcacccca

SEQ ID NO: 8827 - DNA, 462 bp, Glycine max
  Clone ID: jC-gmfl02220097c02d1
gttaagactacgaactaagacaaattttcattccgcctacaaacaaagattaaaacatctacaaaaacaactaatccataatgatcaatatcaaaagcatagcaattgcaacaaaacaaaaacacccaattccgatacaaaccgggccaaaatcttacatttcaagtgagcgtacggactgactacaaacaaaccaattgaaacaaaatactatcaccaattcagcatcttgacgtataacatgactgagtttaaaaatatcagtactcatatggggaaatgacatcatcgattttcagtatcatcttgacaacttgagtagcaagtaagagctgttgctgctttccgatcaaagtttcgaagacattttgctcacgcatgtcattagtgccaacatcattacaatcaatgccaaagtgagggttattatcctttatttgctgagacttaacagcagataat

SEQ ID NO: 8828 - DNA, 590 bp, Glycine max
  Clone ID: jC-gmfl02220097c03a1
caggaagaaatgccactacattccctgaaactgatactcaaaaaactttggtcgacaattttgtgggaagaagtgcctctacaatccccgaaactgatgataaaaaaactctggctgacaatgatatgggaagaagtgccactacagttcctgaaactgatatccaaaaaactttgcttgataatgttacaggaagcagagacagtgaaaacaatttgcttgacactgttacaggaggcagcgacagaaaatctcaagtacgatcaaataaaccccagagaaagaaagaggtcaaagtacctatgcggttatcaaagcgacttgctggccttgaacctgaggtagcgcctgctgaaagagctattgaatattcgactagaaaatcatgcaaagaagaaccaactgcgactgctactttaactaatggagtgtctgaccatcatgatgctggggaagaaactaagcttactccgcaagcttctgacagtttgaaaacagaagtactaggagaatcattaaaccagagtgggaagtcatgtgatgcccaaactggtgacaaggaacaattgcagaaagtgaagctgaaaata

SEQ ID NO: 8829 - DNA, 89 bp, Glycine max
  Clone ID: jC-gmfl02220097c03d1
aaaaaaaaaaaaaaaaaaaaaaaaaaaaaaaaaaaaaaaaaaaaaaaaaagggcggacgggaaataaggggcggccggcccctggaatt

SEQ ID NO: 8830 - DNA, 589 bp, Glycine max
  Clone ID: jC-gmfl02220097c04a1
ggcttacagtttggtctgtttctgggtgtcgcttgatgtcaacaatccgacaaataggtgtaaactttatgctattgaggtggggtcttcagagagaattctatcgttctcatttgggaaatgctgtcttagcagaggtgtttcaggcactacatacatccggcaagtgatttatggggaagaccgtttactcattgtgcagtcagaagagactgatgaactcaaaatgctacatcttaagcttccagtttcttatatttcccaaaactggcctgttcaacatgtggcagctagccaggatggcatgtacttagctgttgctggtcttcatggtttgatattgtatgatatacgattgaaaagatggagagtatttggagatgttactcaggagcaaaagattcagtgtaaaggtttgttatggctggggaagattgtcgttgtctgcaactatgttgattcatcaaatacgtatgaattgctcttttacccaagatatcaccttgatcaaagctcattactctgtcgaaaaccattgcttgctaaaccaatggtgatggatgtgtaccaagattatatgctgcttaca

SEQ ID NO: 8831 - DNA, 247 bp, Glycine max
  Clone ID: jC-gmfl02220097c04d1
cgccaacataccgggggtaattgtatatcaactccacacattggtaacaaacgagaagaacattaatgggacaatagagtttaacacaaaccaaacttattcgcaccggaactaccccacccatgagccataacatttcttcttaaaacgcttgggaaaatccgacatagactatcacacccaaatgccgctccagcttaaaacccctcacgaagacgctccaccacgtgccgagttgactcctttc

SEQ ID NO: 8832 - DNA, 397 bp, Glycine max
  Clone ID: jC-gmfl02220097c05a1
ttgagatgctatgagaatccaactgctgtatagtacaaacacccttgagggaaagaagggggtgacttgccacaagaacctttaagcaaatctgcagcagttggaggattgagatgctatgagaatccaaagaataagattactgcaatacctgctgaggaagaggaaatctggggtgcattcttcaaggcggaagggtcagcagtccttgcaggcacagagtaaaagattcattttcaaatgaagtaccttttgacggggggaggcgggaatgtgcttatgtgcttgagacggcataggcttgcatgcgggggccagtaaaaaacctctcatgataactatgagaagaatgtgactggtagtaaagtctatcatgggggtcattagctaggatttc

SEQ ID NO: 8833 - DNA, 89 bp, Glycine max
  Clone ID: jC-gmfl02220097c05d1
gtatccccgccttgccagactaatccgggtcgacagctactactacctggtctcctttttcttttatttttatttatttttatttaacc

SEQ ID NO: 8834 - DNA, 400 bp, Glycine max
  Clone ID: jC-gmfl02220097c06a1
ctgctgcaataaaggatcgctcaattgattttggcgacttgtctaagggcccactgtgagggaagtctatcaagcttttagggtttgttgccttgtaaaggctcggagagtacatacacctaggtggatttgatagcggggctttcgatggaaaacatgatcataacagctctattaagcactttgcactcgatgactggaggtggtattgcctgactaggagtgtgctacattggtattgcactgttcataactgcacagattgctttccagctacttgcacagcgtatataccatattgagagagcttcaaaaggagagaagggaagctgcaagaatgaacgttctgcccgacactccatatgctgtattcggattagtcattgcgcaggcaattggt

SEQ ID NO: 8835 - DNA, 469 bp, Glycine max
  Clone ID: jC-gmfl02220097c06d1
agggtttgggtttttcactttcagcctctccattccttcaaccttcttcttctctttgatctctgatggagacgttccgtgtttagtagcaagggttagttgaggccttgtgtttggaaacgtacggtgtcgttttggagttgggaaaacaaataattctgagagatggcaaccacgaacccttttgatttgttgggtgacgacgctgaggacccttctcagctcatcgccgccgagcaactcaaggcggcggctgctgctgcggctgccaccgccgctcccaagaaggcgccggctcagcagatcaagccggctcagctccctagcaagcctcttcctccggctcaggctgtgagggatgccagaaatgagtctgttcgtggaggccgtggaggtggacgaggtgtgggacgtggatttggacgtggtcgtgggtttagtcgtgactctttcaatgacgagaactcat

SEQ ID NO: 8836 - DNA, 316 bp, Glycine max
  Clone ID: jC-gmfl02220097c07a1
ggaaataactactgatttcctggcgaagcttggagttaggagctctctctctctaagggatagatccactcctcccccttatttgcttgcagatgccattgggggtaactctgctgctgcggctttagttctttttcatttttatgtgccaaaaaaagagtctctaacttacattacttccattgattcatagttttgtttggcccttttttccttaatttttttaaactttaatgtgacttgttggataatatatggagtagagtttggatttaaaaaagactgaaataaagtaagctcacataaattaaaaact

SEQ ID NO: 8837 - DNA, 216 bp, Glycine max
  Clone ID: jC-gmfl02220097c07d1
aaaaaccagactcttctccatatattttccaacatgtcaccttaaatttttaaaaaattcagggaaaacgggccaaacaaaactatgaatcaatggaagccatgttcgttggagactttttttttggcgcatcaaaatgaaaaaaaaccaaagccgcatctgctagaatcccccccaacggcatgtgcactcaaattaggggggggcgtggattta

SEQ ID NO: 8838 - DNA, 510 bp, Glycine max
  unsure (1)..(510): unsure at all n locations
  Clone ID: jC-gmfl02220097c08a1
cttaattatcgttctttctcctctgtgttgcgccattcctttgttctcagcttcttctgcttcgccggaacacttctccgaacgatcaattttccggcattctctccggcgattcttctccgattattcctcactcagatccatagctctcacaatctccgaaccactttttttcctcttccagatccgaatcccggcgcgaaaatccgggaagaacgaacgaaccgttcaccgttgatacatggattagcatcacctcgatgaaaacctcttccacaagcgtctcacgaaacgattcgttttcctcttccacaaaatcaccaccatcaccatcaccatcaccatcatcgttcagtcctagggttagggttttttgctcagtacgacagaatgttcaagaaaatcatgaaaggcgggcacaagacgcccgctaagtccgacgccagcgatccggttccgccgtcgtacgccgnacgcaaccgtagcgctccggcggctcccttcgtcaat

SEQ ID NO: 8839 - DNA, 435 bp, Glycine max
  Clone ID: jC-gmfl02220097c11a1
cttgtgccgtgtcccctttaagccaattgcaatcaaacaaagtttcggttattggtgttcatttttcttcctccatctttctctaaaacattaattgaactctccattccttaaattttaccaacgagctagttccgacacagacaaagcaatggcaaagactgagttagaggtgactgttgagagcaagaacaaagaactaaagcacctgggatttgtgaggattgctgctattcaaacttttgtgattgtgtcaaatctgtatgagtacgcaaagcagaattctgggcctttgagatccgctgttggaacggttgagaacactgtaaccaccgttcttggtcctgtctgcaacaaattcaaggacttccctgatgatgtcctggtttatgttgacaaaaaggtggatgaaagcttccacaagttcgatgagca

SEQ ID NO: 8840 - DNA, 288 bp, Glycine max
  Clone ID: jC-gmfl02220097c12a1
ccgaaaaaaaaataaaaaccccttgggcccaaaaagcccttttttaaaaaccgggtttcaaaaaacccccctccccccaaaaatcccccctttttgaacccaaaacccgttgggggggggcccttctggcccaaaaaaaatttttttccccaaaacccattttgaaagaccagggctcgtttttttttctcaaaaaacaaccgggggggggcggaacccccggtttttggcccccctgggaactggatcaaaggcccccccccgcccaaaaagggaaaaaaaggggtt

SEQ ID NO: 8841 - DNA, 544 bp, Glycine max
  unsure (1)..(544): unsure at all n locations
  Clone ID: jC-gmfl02220097d01a1
ctcttcccttagtaaaaaaatatccttctttcttcttctgaatatcaatcttgcattaagtccatggcagccaaaacatccaccaacggcacccatcattctctacccgagtacattccaaaccgcattcctgacccacattatgtccgcatcctggacaccacgcttcgcgatggcgagcaagcccctggagctgccatgacgtccgatcagaagctccaaattgctcgccagctcgcaaagcttggtgtggatgtcatcgaagggggcttcccttcagcgtcacaggaagacttcaacgctgtcaagatgatagcgcaagaagttggcaacaactgtgacgctgatggttatgttcctgtcattgcggccctatgtaggtgcaatgagagggacataacgagagcctgggaggctctcaagtatgccaagaggccaaggcttatgcctttcatagcagtgagtccgattcacatggagtataagctcaataagactaaagaagaggtgcttcanatagccactgatatgatcaaaattgcac

SEQ ID NO: 8842 - DNA, 468 bp, Glycine max
  Clone ID: jC-gmfl02220097d01d1
caagcaaataataagttcatttctcatatattagtcccatgtggagacttacaaaggtaacattctccaataatatgttccatacttaaaaagataacaaagaaatcacaaatagcaagctgaatttataacttgaagtgtgaattctaacatttaggtgctagaattctttcgacaaatacaaatcattcctttgaatcgagcattttgtttagtgcagtaatataagcctctacacttgaagtaacaatatccactccttctccggtaccactaaatgttggataaataacgtttccattcaaagcaggagtaggtgactgcttattctctctacgaattacaacacgtgtagtagcaattgcatcggtgcctcctgtaactgtacttggtgagtattcaagtacttttacggtttccttcactatgagattaatagccttgtaagctgaatctactggtcctaca

SEQ ID NO: 8843 - DNA, 506 bp, Glycine max
  Clone ID: jC-gmfl02220097d02a1
ctcattctctactagaaagcttgaacctttgcggacaagttctgagacccagttgccggagggggcgggtcccactgggaatggaggcggagactgaaaaatcacgctctgatgggaagggttggagtttttgtacaatgccatttatgcgaacaactcacactccttgttcttctactacttgcatgtcttacatgcacaatgatcatccgcgaaatcagaatcactttcaatttgttgatagatccagtcatgattcttcaaccacagtttcatctatggccaagtctctgctccctacgaagaggaggctccatcttgatccttccaacaagctctactttgcatatgaacctggtaagcaagttaagagtgcaatcgcaattaaaaacacttgcaagtctcatgtacctttcaagtatcaaacaactgcacccaagagttgttatatgcgccctccagctggtgttcttgcccctggtgacagtattattgccaccgtattc

SEQ ID NO: 8844 - DNA, 443 bp, Glycine max
  Clone ID: jC-gmfl02220097d02d1
gtataaattatagattatgatgtaaaagtacaattaagtacagctgattatagtattaattcactcgcatttaacatcacaaacataattgaaaagaaaaatgaaaggatttcattattgcttcatagcaactttctaggccactcaaccacgtgagacagatcagatcagtgagctaggaattcaatttcagaacatacattgaagaaaattaagggcttgacccaacaaaaaggaagaaagaaatgctttacactgaatcaacaccttggacctgctgttgagccaagtatctttctcttctttctttccattcatctataacaaggccctccccagcaacacaaggacctttctcctccagtggtttctttcgcgcttcaagtgcagcgtcggcctcagccaacattcgttaaagcttatccaggacaggactaggcttt

SEQ ID NO: 8845 - DNA, 559 bp, Glycine max
  Clone ID: jC-gmfl02220097d03a1
cgccggcaccgtcttcttcaccggcgtcggaaaatccggcttcgtcgcgcacaagatctcgcagacgctcgtctctctgggcgttcgctccgcgttcctctcgccggtggacgctctccacggcgacattggaatcctcaccaatcgcgatgtgctcatcctcctcagcaagtccggcgccaccgaggagctcctccgccttgtgccgtgtgcgagggccaaaggcgcgctcctcatcgcgctcacctccgttgaaggcaacgcgctcgccgcggcgtgcgacatgtccgtgcatttgccgctccagagagagctctgtccgttcaacctcgcgccggtgacatccaccgctattcaaatggtgttcggcgacaccgtcgccatcgcgctcatggaggcgaggaatctcaccaaggaggagtacgccgcgaaccatcccgccggcaagatcgggaagagcctcatcttcaaggtgaaggatgtgatgaagaaacaggacgagcttccaatttgcagagaatcggatttgattatggatcagctcgtggaactcacaact

SEQ ID NO: 8846 - DNA, 427 bp, Glycine max
  Clone ID: jC-gmfl02220097d03d1
gagcaactaactcactcgcgccatggctgctaccatcatcaccacatgcaagctctcactgcttttgagtcttctctcagtttcacttttgctgggtgtgaggtctgatacccttcagaatgtaggcgcaattccccccacatgcaagcgcatagagtgtcccagctatgatgtcattcacgtaggcaacggctacgaaatccgtcgctataattcacccgtttggatttcaaacagccccattcaggacatttctctcgttgaagccacaagaaccggcttcaggaggttatttgactatattcaaggtaagaataactacaagcagaagattgagatgacagcacctgtgatcagtgaagtattacccagtgatggacccttctgtgagtcctcatttgttgtgagcttctatgtgccaaaagag

SEQ ID NO: 8847 - DNA, 552 bp, Glycine max
  Clone ID: jC-gmfl02220097d04a1
ctctctttctctgtctctcccaacataaccattgggagagagaatcagagaaaccatcatggatccatcccatgatgaaagaggacccccaaatgaatcattaacccaccagtcctcttcccgtaggcatggggatgcaccaccaccgacggtggcaccaccgcaaatgatgtattattacccgcaagggtatgccccacaacccatgcctcaccaaggttacccaccaggttatgccccataccctaatgagtaccatcaacaaccataccattaccccgcaggtccctactttagcactccaccgacctatcacaatggtggcggaagcaaagccttcattcgtggcttcataatgtgttcatgtttaatattcacatgcctctttgttgccacccttattatggcgctagtgttgcacccccaattacccgtttatacgattaattccttgtctgtggcaaatttcaacaccactcaattgttaaccgcaaattggaacactagcatcatgatccataacatcaacaataggctaattggtttattttc

SEQ ID NO: 8848 - DNA, 450 bp, Glycine max
  Clone ID: jC-gmfl02220097d05d1
catgacgatcttattaggagaggaaatataaagggaaataaagagagtaagaaagacaatcaacaaaatcataagaaaggcttcactttctccctcacatcacaattggaaaatcataagacatcgttacatgataatattagttaggtgattacatatggtcgtgaagcttcaaaagcaaaatctcctccgactctgaatttcaacgtgtatgcaacaagaagttgctgaggaggtaactacaagcaacaccacttaagcaatttaactcacccccctacccattgactaatactatacatacaggggataaattgcccaacacattcaatctcataataatgaagaaatacatttgaaaagacaagaaaaaaaaaaatctttgatgagaagcacatggggtacacaataccatatgacaatgacattgctggtgtcactatatttgca

SEQ ID NO: 8849 - DNA, 460 bp, Glycine max
  Clone ID: jC-gmfl02220097d06a1
aatttttctctcaaccggcccaatttagcataagcccagcatggccaccgcaacagcaggggccacctcgtccttcatggggacgcgcctcctggaggcccactccggggcggggcgggtgcaggcccggttcgggtttggcaagaagaaagccgccgccccgaagaaagtttccagggggtcgggctctagctccgataggcccctgtggtatccgggcgccaaggcgcccgagtacctggatgggagccttgtcggagactacggattcgacccatttgggctagggaagcccgccgagtacctgcagttcgagttggactcgctggaccagaaccttgcgaagaacgtggctggggacatcattgggaccaggaccgagctcgcggacgtgaagtccacgccgttccagccctacagcgaggtgttccggctgcagaggttccgcgagtgcgagctc

SEQ ID NO: 8850 - DNA, 439 bp, Glycine max
  Clone ID: jC-gmfl02220097d07a1
agaccgtaaatattttaacgatctaagagcataagcatcgcactaatcactctctttgggcagacatctagagagaatgacgcacacagagatgagaataaacgcggaatatacaatcatgcgtggtgccagttacatgtaacacatgaacacaccaattaacgcacatcatttttgaatgttatcaaggggccagatggaccaaaatgtaagttaactatataagaacattccagaacccaaaaatgagaaaactaatgggatatccctgtgaagatagaccaccggatgttgctgtatgaatacatcccaagcgccatcacatataaacatctcttatacaaagaggtctcaacaatggctcgttcacaaagactcaaaaaagcccaacatgctgacagggggtttcaaaaaaacatatggtgcacagaggcctatg

SEQ ID NO: 8851 - DNA, 530 bp, Glycine max
  Clone ID: jC-gmfl02220097d08a1
gaaactactgtcaggtggccaaatccaatcctgagaagtctatccctttaactgttcttaaaagtgccaagggcttaccaattttaacagatgctaaagctggtgcactggtctcttacaaactgggcactggtttggttgttgctcgaagatcagatggatcatggtctgcaccgtcagcaatattctccctgtgtttaggatggggtgctcaaattggtggtgaacttatggattttatagttgattttcgggatatgaaagctgtgaagacattctgcagtcatatgcattattctcttggtgctggatgtagtgctgcagcagggcctgttgggagagtgcttgaagcagatattcgtgctggtgactgatgctctggcatgtgttacacttacagttgcagtaaacgtgcatttgtgggagtttctttggaaggaaatatagatgcaaccagtatggatgccaatttgcgcttatatggcgatacttacctgaccacatctgatattttactgggaatggtggac

SEQ ID NO: 8852 - DNA, 590 bp, Glycine max
  Clone ID: jC-gmfl02220097d09a1
cttgacaatttattagttggtaaaacacggaaggaagcatctcggatgttttttgaaactctggttctcaagaccagggattatgtccatgtagaacagacaaaaccctttgcaaatgtcagcataaaacctcgaatgaagcttatgcagtcagatttctgaaacctcatgtaggaatgacagatatagttgtaaagatccattcggtggtagtttggctggtatctgcagggttgggataatattttcaacatttctccccgattctagccatatatggcttttcatttataattttttggagatagggtttagctgttcagttttagtttttgaagtggcacttgtataataatcatcctattgattattctgggtcttaatgtatatatttttgtaaaatgtcacaatctgtaagttgcagaggctaatttgtatgtcgtttaaacgcatccctcctagtaagaatgacattctgctttctctaggcatcatatttatgtaacagagagcaccttgtaatttaactgtcagtggacaggggcatcatttctggactttatttgataagattaactgcattatccttt

SEQ ID NO: 8853 - DNA, 444 bp, Glycine max
  Clone ID: jC-gmfl02220097d10a1
atgggaaagcaacttttggagaggttttcaaggttttctttgccttaacaattacagcagttggtgtttcccagagtagtgccttggctccagatactaacaaggccaaagattctgcagcctcaatatttgaaattcttgacagcaaaccagctattgactccagcagtgatgagggcacaacattagacacagtaaaaggtgaaattgaacttcaacaagtcagcttttgttacccaacaaggcctaatattcaaattttcaaagacatgtgtctaaccatgccaactggaaagaccgttgccttggttggagaaagtggcagtggaaaatcaacagtgatcagcctcttagagagattttacaaccctgactctggacgcatactaattgatggagtggatataaaagaaattcaaactaactggctgaggcagcaaatgg

SEQ ID NO: 8854 - DNA, 412 bp, Glycine max
  Clone ID: jC-gmfl02220097d11a1
aaaaaaagagtcaagcggcgagcaatggcgacatcgctggtgcgatcgggttttcttcgaagcgccctaagaggaagcgctcgtggctcccaggttccgaagcgaaactttgcttcctctggtcatcacgatgatgcatatgagacggccaaatgggagaagattacatatctaggcattgttagttgcactggtttagccgtttataatctatcaaagggccacccacacttcaaagaacctcctgcttacccatatttgcatatccgcaataaggaattcccctggggtcccgatggactatttgaaacgaagcaccatgacgagcattagtggtttaatgaaggtatttgtggcactggtgggcattcgttttgtcaatgttcaacgaatagtgataatgatgattatt

SEQ ID NO: 8855 - DNA, 422 bp, Glycine max
  Clone ID: jC-gmfl02220097d12a1
aaaataatccaattcaaacacgtataattaaaaactcaatttagaccataagagtaacaagtgtgtcactcttctgacttatacaaatgcaaggaatagaaattgacaaaagagataaaaggatgaagaccaggaaaatatcaacaacgtcataactcataactcgtgtaacgccaaaaaaaaaaaaaaagcaggattttatttttatcatcattatcattgaggcactgatagttattgattatccaaagaaggctagtgtttgctcaaagccatgctgggtttttcaggggattaacaacagccttcacttgcaagtagtttttgagactatactctcctttttctctgccttgaccactcatcttgtaccctccaaagggaattgcagcatcaaatgtgtcaaagcagtttatccacac

SEQ ID NO: 8856 - DNA, 532 bp, Glycine max
  Clone ID: jC-gmfl02220097e01a1
ggcaagaatatcaaattggtctattgtcttcctcctaatctactacactactccacatagagcccagcctttcaagcccaagcccaagcccaagcccaagcccgttcataaaatactcctgcagcagcacccaggacccagccctctgcgtctaatgcctgtccgtctacgcctacagcatccaacaggaccctgaccaactggctgagacagcactctgcctctctgtgaaccgcacccaagccaccaaaaccttcgtggctaactgcaacaaattcagaggcctgaaacccagagaggacgctgcactcaaggactgcgccgaggaaatcagcgacagcgatgaccggctcagccggacgctgtacgagctcaagctatgtaaggctaatggcgaggacgtcacgtggcacattagcaacgtggagacatgggtcaactctgctttgaccgatgagagcacttgcggcgatggattctacggtgaggcgctgaatgggaagatcaacgactctattatggctacgatgct

SEQ ID NO: 8857 - DNA, 255 bp, Glycine max
  Clone ID: jC-gmfl02220097e01d1
aatcatagaaaaacacaacgtcatatttcacatttaagaagcatgagaagagccatatatctataaagactcacatatataataattacatggagcacataaaagaagaaaagtaaagcattaagcaaccaagatcattgttcccaactagtgttgcgcagcatagtggttaataagcgagagagcattgctagttacctgagcaacattgagcatcctagccctaatagagtccttgatgttgccattcagcgc

SEQ ID NO: 8858 - DNA, 592 bp, Glycine max
  Clone ID: jC-gmfl02220097e02a1
tgttcttgcaagagtaacagagaggaggtggacaaacaaagctataatttttagaggggttaccaccctcaccttctgccaaaccaaacccacccttttctctctttaagctactattgtgctgagagctgaagaggagatggggggtggaaatcaagaggcagtgaagcagctgcagaccctgatggaaaatgtggatgatgagcagctgaagaacacattccagattatgcaccagggttatcaaactgaaacgttaatacggtttctcaaagctagggactggaatattgccaaagcccataaaatgttaattgattgtttgaactggagggtggaaaatgagattgacaatgttttaaggaagcctatccccatggatttgtacagagccatacgggattctcaactcataggaatgtctggttactcaaaggagggtctacctgtcattgctgttggtgttggtctcagtacatatgataaagcatctgacaaatactatatacaatcacacatcccactaaatgaatatagggatcaagtgatcttgccaacagctacaaggaacatggacgatacattggcacct

SEQ ID NO: 8859 - DNA, 292 bp, Glycine max
  Clone ID: jC-gmfl02220097e02d1
ggggaaaaattctggatggggttgatgtaaacattacaatattacatttaataaccggctataagtttgacctcacaagcaaaacccttctaattagaaagggatcatattgttatcaacaaataaaagtggctcaggacaggccaaaaaacacagttactagtagctttagtagcatagctttcaatggccattaactttaagaccatttagtgaggtgggaaagccattcttttgattctccaatttggggaactcagtttctatgggcttggctattttggcatcatca

SEQ ID NO: 8860 - DNA, 535 bp, Glycine max
  Clone ID: jC-gmfl02220097e04a1
gttgttgctatcaagaaaatgaagaagaaatattactcttgggaggagtgtgtaaacctgagagaagtcaagtcattacgaaaaatgaatcacccaaatattgtgaagctgaaagaagttattcgagaaagtgatatcttgtactttgtttttgagtacatggaatgcaacctataccaactcatgaaagacagggaaaaactattttctgaagctgaagttagaaattggtgttttcaagtttttcaaggtcttgcttacatgcaccagcgtggatacttccatcgtgacctgaagcctgaaaacttgctggttaccaaggatttcatcaaaatcgctgattttggactagcccgagaaatcagttcacaaccaccctacactgagtatgtctccacacgatggtatcgtgctcctgaagtgctgcttcagtcttatatgtatacctctaaagttgatatgtgggcaatgggtgctataatggctgagcttttctctcttcgtcctcttttcccaggtgccagttgagcggatg

SEQ ID NO: 8861 - DNA, 421 bp, Glycine max
  Clone ID: jC-gmfl02220097e04d1
ggtatagggttttccccggcgggatacagtcccgtaatcccttcttcatcctgttttgctaaaaaattgagagtccagccgcaacgggccttgagctctgacccctacgttctggaactcgccgaaaccctagaagactccttcccctcctctccctccaccccactccctctccagaacctccgcctctcctcctcccaatccctcctctccactccatggccctcccgccgcgacgagcccttccgcttcaccgacctctccttcatccgccaatcccgcatcctccccgtctcccccaccatctccctcctcactcccacctcccacctccccaacgacgtctacgtcggctccctctcctcctcctccccctctctcctccaacgagtctcccatttcatctgccctttccccatcg

SEQ ID NO: 8862 - DNA, 573 bp, Glycine max
  unsure (1)..(573): unsure at all n locations
  Clone ID: jC-gmfl02220097e06a1
gtccattcctagaaaattggtcacacgcacacacaacactttaagaaaatcatatatttgaaagtaatatacagtggatttttgtagtaaggttattttatgttaatgttaggctaacaacatgtgtttgatgggaaattgattagctattgctctgttaggcatctgaagctgtatattttgatttacaaaattttctgttcaacctcagctagctatttggttatgttactcaaaggatttacatattaatcttctgctgacttctgctgagtacaaaattgaaagcaaacaagttttggcttccaaaagtacaagactacgagttgataagaacatattcatctactgccaaaggcctgaagttgaaccatggattgttcagctgcaagaaaaacacaaaaggctgaccgtgaaaagttaaggagggatcgactcaatgaacaattcgtagaactgggtaacattttagaccctgaatggcccaaaaatgacaaagcaaccattataggtgatacaattcaattgctaaaggacctaacttctangttagtaactcaaagatgaatatgc

SEQ ID NO: 8863 - DNA, 354 bp, Glycine max
  Clone ID: jC-gmfl02220097e06d1
atgaaattgcattgatatcatcaattaatgcaagtattgtacagatcaaagtcatcgacaattcattgcatgatacaaattgttagcttgctgaattgtatcgaatcatgcattctaacaactatgaaagagtttacaaacctacacgatagccacactggtcaatttggtgattttccagctgaaatttcaagtttttcccccaaaaggggaagtttatgcttaaattatgtaagatttaaacctacttggaccaaattcttggtcaggaagagatagcagaagtgacttttattttgggattagaacagaatgacttacacctccagagtagcagcagatgcacaatgaaaa

SEQ ID NO: 8864 - DNA, 493 bp, Glycine max
  Clone ID: jC-gmfl02220097e08a1
aacaaatactaaatgctgctatcacaattcacaagaaaatgtgttttggaatggcaagggggttgtcagttcatcatatatatgggcaataccgtgtggctgcatcattttattaatgatcatcatgatcatcgatcaaggatatgacgaactccctcctatccgattgggcctttcatctgtacctacagcaagaggctgctgcttcttcatctaattatcatcatgatgatgatcatcatgatgctgatctcaaaacggcatccagcaccaacatacatgctactctacatgctgacctccaagactaccatgctatctttaagaccaaccttaatctcgcatgcactgatcgcgctatgactcggggatctctggtcacatcttcaaacccttacagtggaccacaagcctttaattatcctgaagttgcatcgcatgctaccttaaaaggatctggtccttttggaaatgatgatccctctaacttaca

SEQ ID NO: 8865 - DNA, 451 bp, Glycine max
  Clone ID: jC-gmfl02220097e09a1
cactagattcatgctattttctccaccggctctgctcaagcctcaccaagtaccggttaccactccatttcctcttactcaaacccatcacacagtatcaagaaacaagagggtgcacagcaccagcagattcggaaactttcttgactgcaaacccgagaacaaacccggatccttagattttgaccttccatggtgccacccttctgaccgcaatcgttatgatgtgatcatcattggggctggccctgcaggcacaaggctcgccgggcaagtgtccctctatggagttaaagattgttgcgttgatcctgaccctctctctgtgtggcctaacaactatggtgtgtggagagatgagttggacagccttggtcttgaggatcgcttggacaaaacatggcccatggctcgtgttcatgcggatgatggcaagaccaagtgtttggat

SEQ ID NO: 8866 - DNA, 422 bp, Glycine max
  Clone ID: jC-gmfl02220097e11a1
cttgaataaaccgaaccgttcttcgattcgggttcaagttcgaagaagaaaagcgatgagttcgggtagtagcagcagccacagcagtgagaaggagaaggagaagcagagagtgagtcgcacgtcgctgatactctggcacgcgcaccaaaacgacgccgcagctgtgcggaagctcctccaggaggatccctcgctcgtcaaggccagagactacgacaaccgcacgccgctccacgtggcgtcgctccacggctggatcgacgtcgccacctgtctcatcgagttcggcgccgacgtcaacgcgcaagatcgctggaaaaacacccctctggcggatgcggagggagctaagaagagtaatgtgatcgagcttttgcaatcgcatggtggcttgtcttttgggcaaaatggaagccatt

SEQ ID NO: 8867 - DNA, 532 bp, Glycine max
  Clone ID: jC-gmfl02220097f01a1
agcccctaatctatgtatctatctatcttcaatactactacccttctgtctctctgtacacagacaccaacaacaaatagcacacacaatgaaagaagaaacatggaaactccacgcatccatcatgccatcaaaaccaaagagtccacaccacccaacccaaccctctttctctctcatcaatggcccagctggaccaaaatttatgtagaagaacgaaaaacagaactgaaacaaagaaggaaagaacgaatgggaaaacaaagaagaaagagaagttggatgtgttcaaatgtcctccaaccaaacccaccttacatttctctctctctcatcaaaactatgttccgcgaattgcccttctgcaagcccccaaaaaatcccatcttcatcactggtgtttcagaagaacaatatctttcaccgagttatgtgggctcttcggatttctttgtctcggtcagagtcttctcacagagaaaacaggaaagcgagaaccttcttaccccttcacctcttctctctttcttgg

SEQ ID NO: 8868 - DNA, 313 bp, Glycine max
  Clone ID: jC-gmfl02220097f01d1
cggttaaaagataactcccttatgatacgatcatctctaattactacagggacacatctttacaatttctaacgcgggaaaatgcttacaacatcattgaactgcctgaggcccagttctttgcatccatttcctttgattgatatccagatcctacgcgaactggatgcattttcagaataactctcttaactacacatcaaggcaaacgcgtgctatatacagcattatttacaagccgatactaatgtagtgctacactgatgtccacgctggagactataggcttacattccaacattccctcttttgg

SEQ ID NO: 8869 - DNA, 359 bp, Glycine max
  Clone ID: jC-gmfl02220097f02a1
gcaatgcggatattttcacgtaccacgagcatctcgctcgtgacacaagcactttcgtcccgattgcatcttgagagaaggaggcttctgagctgtatataaaggcgtcataccaccattacgcgaggtcctgttgcatgtccactgaagcacccattaatgaacttactcccgcaggatctacaggagatacagaatctcctacctgaaggcactattcagcgcactggacctatccacatccttgatcctcattggatattgctgtgacgaagaccaccgggcatagccgattcaatgcatggcaagtgggagctaggcgaaacatgcttttcacaaagaggcctcaacattgactt

SEQ ID NO: 8870 - DNA, 489 bp, Glycine max
  Clone ID: jC-gmfl02220097f03a1
atgacgttcttctccttggtgatggcccgtggccggaatttgtaaatagtgtagggtgcatcaagatactttcccctcaggaagtgcagcaaatgggcaacaatggccttgagcttcttaactctgtccccattcagaggctctctaacggcgtctgtgacgactacgcaggccgtgaggacccaagaaatttaagcactgggataacaattgtggggtctttaaactactgaatgatgtgacaatcaatactatgaatctcttctctctcttgtattattactcctacttctccactctttgtcaatggtgggatgtactgcctagttgtagtttataggctacttataagccttttgttttttttgtctgttttcctgttttttgctgcctaggaccattcataagataaacaatgtaaaccatatggcatcttgtcaatgtgctatctacaatatattgattacttaatctgttaggaaaaaaata

SEQ ID NO: 8871 - DNA, 487 bp, Glycine max
  unsure (1)..(487): unsure at all n locations
  Clone ID: jC-gmfl02220097f03d1
aagaatgcccatcttctctgcaacgttgggctccttcacttccatctcctcctccttcctctcacagtcacacctttctcctttcgtgaagacaccttgccaatggcagcatcactatcacactgctaaagtcttggtctctgcctctggcaatacccaaattgaccaaaatcccgactctggacttcttcaacgccctactcctccagacccactcgatgacgctcgtcaggctcggtagagatcgtcagattggaaggctgcaaagacatatcaagatagtaaagtcatttataatggtagggttgaaggttttaattctggaggcctgctggttcggttttattctgttatgggctttctcccattcccacaattgagtccagtgcatgcttctaaagaaccagagaaatctatccaagaaattgcacaaggcttaattggttcaatcatgtcggtgaanggtattctagcagatgaggataac

SEQ ID NO: 8872 - DNA, 469 bp, Glycine max
  Clone ID: jC-gmfl02220097f04d1
cttactggaagccttgttgtgagtaagagaaaaggcttcctgcaccgagcacaccaacttgatacctctgattctttctttgcttagaattccacagaatatggagactgttcttttcaatcactccccacctttggaattcaagggtttgagcaaggaggaggaagactcattgctagggcaagtggaaatatggaggtacatgacatgcttcacggactccgtggccttgaaagctgtcatagagcttcgtatagcggacatactagaccgttatggtaaaccactatccttgtcgcaaattgtggagaacatagaagacgcaccctccccagatgcctctcttctccagagagtcctgagagtgatggtgcgcagaaagatcttcagtgcacaagaatcagagacaggagaaaccctcttcggcttgacacgagcctcgaagtggatccttcgcgacacgaaaatg

SEQ ID NO: 8873 - DNA, 599 bp, Glycine max
  Clone ID: jC-gmfl02220097f05a1
ctgtttgtttctgatctatggcttccaaggagttctctggtctttgttccttggtttcttcactctccgagagcattttgtgcactactgggttgaaaatgtatttggtggagagcaaaggaggtgccataacatgcatgttcttggctcttttcttcttggggacatggcctgctcttttgactatgttagaaaggcgtggtcgtcttcctcagcatacctaccttgattactcaatcaccaatttcttgtctgctttactcattgcttttacacttggtgggataggcaagggcactcatgatcagccaaatttcttagttcaacttgctcaggataattggccctccgttctttttgcaatggggggtggtctgttccttagccttgggaatctgtcaagccaatatgcatttgcttttgttgggctatctgttactgaagtgatcacggcaagcataactgttgttataggcacaaccttgaattactttttggatgacaaaatcaacaaagctgagatccttttccaggagttggttgctttttgattgcagtttttaggctctgctgtcatcatcaatgctgtgatataaagc

SEQ ID NO: 8874 - DNA, 670 bp, Glycine max
  unsure (1)..(670): unsure at all n locations
  Clone ID: jC-gmfl02220097f05d1
cgaaaatgactcgtgaaagatgaataataacgagagaataatttatatctacaaattctacaaatagtacaaaatgcaaattcaatatgttaactactgaaaanntatataaganagcgggtttcgttgtgcaagacngannaaggaatacgaacgggagcgcggaaaacggaacgagcgacagccgagncgggacggacggaagaggaacccgaacgaaaagccaagcctggaggaaccaagaggggccgaagccgaagcattaccaaaaactaacacaaaacagacaaaggaggagccgaagcctcctacacaagaaactttgccagctcagaaagaatccaaaaacaaggggagggatatgaaatccaacaccgagagagccaggttggatgcagaaatcagatgaatagaatgtactacataccacaaaaggaggcccctgccaaagagagtgaaaacacaccaacaatgttaaatgaggggaaaagagaggaggagaatgcaaaggcaaagcaagccttggaaagaaagaagaaagttagcagcagaaaagctgcagccaaagcagccatcagagcacaaaaggaagctgagaagaagcttaaagaccgtgagaagaaagccaagaagaaatcaggtgctgcagcaggggccaaccctgaggatg

SEQ ID NO: 8875 - DNA, 527 bp, Glycine max
  Clone ID: jC-gmfl02220097f06a1
cttcaccacctccttcttcttcccttcccccactcttcaaccccacacaaacctccctgcttccaacgcagtaaaaccttactccgagcctccaccgtcgaatccccaaccccaaaacgccgcggcagaaagaaaaaacccgaaacacaaaccccctcaaacaacacccctcccccccaaaacgcagacaacaaaacagaagaagacgagctccacgactacgacgacggcgtggacttcccctactcggaccctcccttaatatgctgcttcggcttggcgcggaaggagttcgtccctgcggtgcgggtgcaggactacccgatgcacccggacatctactccgagtggaagatgctgcagtggaagccccccgagttcgcacgtgcgccgggcggcccgccgtccaacgtggccgtggcgcacgcgcgcctcggggggcgggcggcgttcctggggaaggtcggggacgacgagtttggagaggagatggtgctgatgatgaacgaggagagggttcagacgag

SEQ ID NO: 8876 - DNA, 312 bp, Glycine max
  Clone ID: jC-gmfl02220097f06d1
gcccccaacttcaaaataaacagatggttaattgccaaattttgcttgtttagaaggaaggtccataaaactaaagcagagggggaacattggggaggggaagagttttacaaatccaaactgcacccccattacaagaatggggtccatctgaattttccctacaaaattttcaattgacatccgcctcctgttcatacatgcatgagtgggggccaaacgaaacacccaaacaattttggcaatcggatggggttcatctgcccccattttatatcaaacacttgcagagaagttccaaataaataatca

SEQ ID NO: 8877 - DNA, 500 bp, Glycine max
  Clone ID: jC-gmfl02220097f07a1
ctagtttagttatctactcttttctgcatgtttgttctctcaacgactcctccgcgagggagtattattcaatattttggttgggttgaatcccggggttgaagcgttgcagacatcacggctattctaagagtgtctcgctccctcattcatgtccgatctgtacgacggaggacgggtagttgcgtaactgccgttaacccttcgccgcacggtgggcgtggtgctttgccttctgaaggtggtagcccttcagacttgctcttcctcgctggtggtggtttcttctagtttcttcactcttttcattacttttagcctgcatagttttaaataagaaaaaaaaaacagcgactttgtgactagttaagatcaccgcttcttcttcttcttcttcttcttcttcttctactactactactactacttttccttcacaaaatgatgctcagaatcaagagggttcccactggcgtttcaactaccaaaaagacgacgct

SEQ ID NO: 8878 - DNA, 589 bp, Glycine max
  unsure (1)..(589): unsure at all n locations
  Clone ID: jC-gmfl02220097f08a1
tagcagtgtggtctctctcactccaactccaaccacagagacaacaaatacaacaacgttgtttccatgacaatggaatctgcgcttacagcttctaactggaaccgttctttgattcggattcgccacactaagccacgcttcggtgcaattcgccccacagcaatacggtgctccatcaactcgtatcgcttgtccaacctcactccctctgagcttcagagcctcaagagccgaccccgcatcgatttctcttccattttcggtgttgttaatcctattgtcgatgatgttcacaaaagaggggatgctgcggttaaagaatacacttcaaagtttgataaagttgaattggataagatagttgaggttgtctcggagctccctgaccctgtgcttgaaccgcctattaaggaagcttttgatgtcgcctatgataatatttatgcatttcatgctgctcagaagtcatccgagaaaagtgttgagaacatgaaaggagtccaatgncagagagttgcaagaagtattaactctgtgggtctttatgttccagggggaactgctgtataccttcacagctttgatg

SEQ ID NO: 8879 - DNA, 512 bp, Glycine max
  Clone ID: jC-gmfl02220097f09a1
aggtgacgctcatgtctataatctttcaggatatcttccaatatccatttcttttttattgattgtctttcaatcatgatgcaatgcttctttaaaaattgatgcatttattattttggcttcctctcacaacccaattctgattatcctcttgcgtgtggaatagattgatctcccctttatcctgttctttggttcccaacaagtcaaagtcttcttcagcttctttgtggcgaaaaacaacacaaaggggattcaatttcaaattcaagttctgattcctgtgttgagtgccttacacaggtctaggtttggctttggcatcttaaaagggacataaagcataccatagttccgttggctggttatggattgggatgtgaaagagtttgctcgggatccacctgggttgcagctgtctactggtgaatgccaaaagagtgaaccatctgtcaaggactcgaggcttggtgaggaaagaacagccccagatgttgatgcttaagacacaa

SEQ ID NO: 8880 - DNA, 338 bp, Glycine max
  Clone ID: jC-gmfl02220097f10a1
gaaccaaataataactaagatacaaactacagtagttagatagcattgtcacaacaacagttggactcctgtacctccttactttgcttacctaaatcttctcaacgaacaaagcaaaacactaagtgagaccttttgttcacaatgtatttacaaatgtcaccaggaaaataaaaggatacttactgacaaccattttgcagtctacaaaagtataactagatactaatagcagttatcctggaggtagctacaaatatttaactagcttaccttctttgaaaagtattgttgcactgagaaaagtgtgtttgaggatcaactccagtgaaaccctg

SEQ ID NO: 8881 - DNA, 84 bp, Glycine max
  Clone ID: jC-gmfl02220097f11a1
aagaaatagaaaaaaaaataaaaatataaaacgaaatataataaagaaaataataaaaaaaaaaaaaatataaatatataaaaa

SEQ ID NO: 8882 - DNA, 333 bp, Glycine max
  Clone ID: jC-gmfl02220097g01a1
ctgtttttggctgttcttcagccctgggagatgaccacactaagccattaccgcacgaggcccacgcccaactcttaaccgatggaacatctgctaatgctattattggaacggctaatgatcactttgacgccgggtgagccgctcgacaagcacagtgaggagcttgtcccactagcaacttgatatgacgcatgcacatgcgaacactccactacgaccgaagcatcattgcttgccggaccgactctggactatgcagcctggccctacccgaccgatggtgtcgcagcaacccatgcgagacggtcttctgaaccgactgtaccggac

SEQ ID NO: 8883 - DNA, 339 bp, Glycine max
  Clone ID: jC-gmfl02220097g01d1
gggccccaatccaatttccggccattacctttcatagggatcttaacctcatcagtattttttaccggcgtccttccctttcgatttcgggcataattaacattcacaggagaacacttaacatcaagcagaagcatttctgcttagcctctccaatttcacgttacaagtttttcacaagtactactaatccagctatgtagaaaatgtttaattacaacccaaagccgaagaagaagaaaaagacttttacaatataactagaatgaccaggcacaagaaagactattcttcttcttttgcttcttcttaagaggaggatgagaaggtgtcaatgat

SEQ ID NO: 8884 - DNA, 295 bp, Glycine max
  Clone ID: jC-gmfl02220097g02a1
ctgctgcaataaaggatcgctcaattgactttggcgacttgtttaagggcccactgtcagggaagtctatcaagcttttagggtttgttgccttggcaaggctcggacagtacatacccctacgtggatttaatagcgaggctttcgttggaacatatggaccataacagtttattaagcactttgcactcgatgaacggcaggaggtactggctgactaggagtgtgctacattggtattgtactgttcataaatgcacagattgctttccagctacttgcacacgtatatacc

SEQ ID NO: 8885 - DNA, 330 bp, Glycine max
  Clone ID: jC-gmfl02220097g02d1
tcagcgggcgccctttcctttttattctaattgccttttttgcttttgtggccggcatacaggggaaaattatttactacatccaccaatagaacacaaacagaactctccataacgggacaattaccatcgagccaaacccgactcatactaaaaggtggttacaaacccattacacgtgacatttgttagtaaaaagatagggaaaaaccaacatgggaacatgagacggaagatgctattcaaacttaaacccctcgcgaaaaccctacaccaaacgcaaagtagaattcttgggcattgagatacgctggagggaccgttcataac

SEQ ID NO: 8886 - DNA, 593 bp, Glycine max
  Clone ID: jC-gmfl02220097g03a1
ggagcttacaagagtgacggcaaaggactgagcaactgggataactacactcacggaccaggtagaagtgtaataatggatggaagcaatggggatatcgcgattgatcattatcatcgctacctggaggatatagatttaatggaaactttgggagtaaacagctaccggctatccctgtcatgggcaagaattctaccaaagggtagattcggagagcccaaccatgctggtatcgagttctataacagactaattgatgttctactactcaaagggatccaaccctttgtaactcttagtcactatgacattccccaagagcttgaagacagatacgggagttggctaagtccccagttacaggaagattttgctttttatgcggacctatgttttaaaacctttggtgacagagttaagtactgggtcacattcaatgagccgaatttcctagtgtcacttggttaccgctctggtttatatcctccatgccgttgctctggccaattagcaatggctaaatgcagtgaaggagactcagaaaggagccctttgttgcagctcataatgtatcctgtcacatgcagctg

SEQ ID NO: 8887 - DNA, 500 bp, Glycine max
  unsure (1)..(500): unsure at all n locations
  Clone ID: jC-gmfl02220097g03d1
ctttctttctgtaactaaccccaatcatcaactcagtcagcgaatgaatctgtggacggacgagaactcctcggtgatggaggccttcatgccatcctccgatctctcctccatctggccccctcccgctcctccgcagccgcaatccacggcggtcttcaatcaggacaccctccagcaccgcctccaggccttaatcgagggcgcccgagagacctggacctacgccatcttctggcagtcctcttacgactattccggctccactctcctcggttggggcgacggttactacaaaggcgacgacgacaaagccaaggcaaaggccaagtccaaagccacctccgccgccgagcaggaccaccgcaaaaaggttctccgggaacttaactccctcatctncggctcctcctccgcttncgcctncgacgacgtcgacgaggaagtcaccgacaccgagtggttcttcctcgtctccatgacgcagtccttcgtcaacg

SEQ ID NO: 8888 - DNA, 319 bp, Glycine max
  Clone ID: jC-gmfl02220097g04a1
acgcaccgttgggtgagtctgtgagagacttggagctggttgttcattactctgttatgctgggtccttccttcataaaaggatggggtccatccctcactgggaccctccgatcgaggctcatatgttctgtatgacgcactgacctccatctccggcgactatggcgccgtcagacagatctatgattatgcgctgatctacactgtcatatacacagtctaccatgcagatcagcctgtagcagcttctctttctacattagacggcatctgttatgccgctgagaccattcttctagtctctggtcgtgatctca

SEQ ID NO: 8889 - DNA, 456 bp, Glycine max
  unsure (1)..(456): unsure at all n locations
  Clone ID: jC-gmfl02220097g04d1
ggagagtgcaataactcgttgtacattcctagtgtgtgggagagacatggctaagatgtgtgttttggtgttggttcttgctctggctgtggccacaagtgccagaaacgttcccaaccccaaggatgctggtcttaaggaccagaagaacttcatcagctatggtggagttggtggttattccgggattgggaacaatggactgccttttggaggagctggtgccggaataggtggtggttttggcggaggtggtggacttggtggtggcctcggcggtcctaccggtgggatcggagggtttggcggtaccggtagcggtgtcggtggcggtattggtggtggcgttggaactggcgttggtggtggcagcggtgttcttcctttcccttgaatgatgaacatgcatgcatgcatgcatatatgctccgtcacgnttctttggatacactagtc

SEQ ID NO: 8890 - DNA, 524 bp, Glycine max
  unsure (1)..(524): unsure at all n locations
  Clone ID: jC-gmfl02220097g05a1
ggagcgtgggcataaagtcgttgacagtcgaaaacaaactctcacttcttccttccttgcttccttctcttctgcgttttcttcttcaacattccaatctaatccaaaacgctgcgttttatttcgtattcaatttaattcaatccctaaattcctcgccggagagagcgaatcttaataaccccaccactttccggcgaaacatggccgtcgccgtcgccggccgccagaagccgagctccgacgcgagcctcttcacgctctgccccttctggagctcgcgcaacgctactcaaaggtccaccaaaacggtgtcgtccgtcgccaggtcgctgctccgtccgcgccggaaactccgcctcgatccttccagttacctctattttccatatgaaccgggaaagcaggtgaggagcgcggttcggttgaaaaacactagcaagtctcacgttgctttcaagttccaaacgacggcgccaaagagttgttacatgcggcctncgngtggtactcttgctccggga

SEQ ID NO: 8891 - DNA, 437 bp, Glycine max
  Clone ID: jC-gmfl02220097g05d1
gattctaataaacatactttttgaggaaacattttaactatggggggaatttgggaaaataaaaccagcaggaaaagggagtgcaaggtctaataacaaatataacaaagtgataaactgataatacataaacacctaaacatattgtgtgcccttttctacagcgaaacatcctaaagatacgtctaccaaaaaaagagttgtaacataatactatccccaaatcacaggaaagatacatccccctcaataagcccgtgcgaacaggaaaaattttgtgaactgtcatgggtaattttcagtgtcagttcgacatctatgttgtgtgcttgtctagatgccctcgcttatttttacgttttgcatagaagattgatccatctggaacaggtttattcaactttttgctacagaaaacagctgaaaacactctaccc

SEQ ID NO: 8892 - DNA, 547 bp, Glycine max
  Clone ID: jC-gmfl02220097g06a1
cgcgccacccaccacctctgttcatcacttgagccacctggttaacaccggtgttctcgggagcaaacccactgtgagagttttcaccaaagccaatcccaatttctctctcaccattcgtggcggccaagtcattctcgctccctccgatcccaccaatgagtaccagcattggtataaggatgagaagtacagcactagggtgaaggatgaagaggggtgccctgctttctctttgatcaacaaggccactggtgaagccttgaagcactccatcggtgccactcatcctgttcggctgataccttacaagcccgactatcttgatgagtctattctatggactgaaagccgtgacttaggagatggccacagagctataaggatggtcaacaatgttcatcttaatgtggatgcttttcacggtgacaagaattctggaggtgttcgtgatggcactacaataatcctctgggactggaacaaaggtgataaccagcagtggaagatcttaccttactgatttcaattgacgaaattatcaatg

SEQ ID NO: 8893 - DNA, 338 bp, Glycine max
  Clone ID: jC-gmfl02220097g06d1
agggggtcacactgaatcatattaagaaataagggcatacatgaactgtttaccaatatatttatgggaatcggcacattaaccaggggcacatgtttgcaataaatattacataaaacgcacttaatttattgaaaaaagccgattggttggtacaagcaaatgcactacacaccattccatactttagggaacaccaaaccactcaaatacaagggccaactattcttttaacttgatgcattttaaaagccattgaaaatttctttaattgaaatcagtaagggaagaacttccactggtgggtatcacctttgttacagtcccaaaagactatt

SEQ ID NO: 8894 - DNA, 553 bp, Glycine max
  Clone ID: jC-gmfl02220097g07a1
gtgcactgcaacttagccacttgaacccccttcgtaagcctcttcacatcttcacttggggacttcttcttccgcactaatacgaaaccagagggaattcacaaaagaggttaccatgtcggacgatgagagagaggagaaggagttggatctcacttctccggaagttgtcaccaagtacaagagcgccgcggagattgttaacagggctttgcagttagttatttcagaatgtaaaccgaaggcaaagattgttgacctttgcgagaaaggggattcgtatattagagagcaaactggtagcatgtacaagaatgtgaagaggaagatagagagaggtgttgccttccctacatgtgtgtctgtgaacaacactgtctgtcacttctctcctcttgccagtgatgaaacagtgttggaagatggtgatatagagaaaattgacatggcttgccatatagatgggttcattgctgctgtggcacacactcatgttcttcaggaggggccagttacaggacgggcagccgatgctcttgcagaacaaacaccg

SEQ ID NO: 8895 - DNA, 577 bp, Glycine max
  Clone ID: jC-gmfl02220097g08a1
ctagtttagttatctactcttttctgcatgtttgttctctcaacgactcctccgcgagggagtattattcaatattttggttgggttgaatcccggggttgaagcgttgcagacatcacggctattctaagagtgtctcgctccctcattcatgtccgatctgtacgacggaggacgggtagttgcgtaactgccgttaacccttcgccgcacggtgggcgtggtgctttgccttctgaaggtggtagcccttcagacttgctcttcctcgctggtggtggtttcttctagtttcttcactcttttcattacttttagcctgcatagttttaaataagaaaaaaaaaacagcgactttgtgactagttaagatcaccgtttcttcttcttcttcttcttcttcttcttctactactactactactacttttcctccacaaaatgatgctcagaatcaagagggttcccactgtcgtttcccactaccaaagagacgacgctgcagactcttctcgtccgtcggaggttgtggtcggaattgcctaaagcttgttgccttccgatgcaagctggcttt

SEQ ID NO: 8896 - DNA, 190 bp, Glycine max
  Clone ID: jC-gmfl02220097g09a1
aggtgaaaaaatgttttacaatagctctgttaaatgttccaataaacagggtccttattactcaaaattggaataaaaagccacatagaatgcctaagcccctttgccttcgccaattttgcttaaagcaaacacccttttggaaacaccaacggatccccctgggaacattttggacaagtttaattgc

SEQ ID NO: 8897 - DNA, 240 bp, Glycine max
  Clone ID: jC-gmfl02220097g10a1
ttttactcgtttttttggatgcatctacatatattgtatgatatacttaggtaacgcattgcacgagcttttcaaatatcattttgacattgcagtgtgctacctggaattgtgcaacctcattacatcaataatgcatgcacggtaactgctactactaacaacccagaaacgtcggcaggggctaaaaggtacaaacatctggtatacttgcggagcaaaaaaagaagggggctaaag

SEQ ID NO: 8898 - DNA, 212 bp, Glycine max
  Clone ID: jC-gmfl02220097g11a1
ctggaaccaaaaggggaaacctttttttttttttataaaaaaaacccaccctggggctttttttgccccccaggtccaaaacgtttcccaaaattttttaacaaccccggggggcacaaattgttttttaattaaaaaaacttccgcaaaataataaaaatttttgtttcccccccattttgtattttttttttggaccccacttcccacct

SEQ ID NO: 8899 - DNA, 461 bp, Glycine max
  unsure (1)..(461): unsure at all n locations
  Clone ID: jC-gmfl02220097h01a1
ttgagatgctatgagaatccaactgctgtagagtagaaacacccttgagggaaagaagcaagtgacttgccacaagaacctttaagcaaatctgcagcagttggaggattgagatgctatgagaatccaaagaataagattactgcaatacctgctgaggaagaggaaatctggggtgcattcttcaaggtggaagggtcagcagtccttgcaggcacagagtaaaagattcattttcaaataaagtaccgtgtgatgtattaatggagtaatgtgtttatgtgcttgtgacggtaaggcttgcatgcggggccatgtaaatacctttaatgataactatgagaagaatgtgactggtagtagagtttatcatggtgttcattagctaggattttctctgtttctcttgtacagntgcgctttctaatgtaataaaagatatgcttttggtttaaaanaaa

SEQ ID NO: 8900 - DNA, 293 bp, Glycine max
  Clone ID: jC-gmfl02220097h01d1
tttttttttttttttttttttttttttttttttttttttttttttttttttttttctttggaattttgttttttttaaaaaaaaaagctaattttcaacagaacaaagaccatgacaatttataaaaacaaacaaaatgttcacatgaagaaccgtaaaggattatgcaagcacacgcctgtgaaatatactgcaaccctacacgaatcccacaccggccaattaggggatactccactgaaaaagaaaaggaatcccccacaatgggaaaaaaaagccttaattcttctaac

SEQ ID NO: 8901 - DNA, 275 bp, Glycine max
  Clone ID: jC-gmfl02220097h02d1
aaagaacacgtcaacaggagagccatggtgaagatggctctgggagattgttaggtggggagcgcgctaagaggaagcgctcgtggctcccaggttccgaagcgaaactttgcttgctctggtcatcacgatgatgcatatgagacgctcaagagggagaagagtacatatgtaggcattgataggtgcactgggttagccgtttataatctatgaaagggccacccccactttaaagaaccttctggttacccatatttgcgtattcgcaataa

SEQ ID NO: 8902 - DNA, 143 bp, Glycine max
  Clone ID: jC-gmfl02220097h03d1
actctcgaggggtctccctttcttttttttttttttataaccaaacgcggatataaaatgagatccaaggtgcaggaggcggggtacatgaatactattagggtgatcgtatgaggataattgaatttccacagtgtttaatt

SEQ ID NO: 8903 - DNA, 542 bp, Glycine max
  unsure (1)..(542): unsure at all n locations
  Clone ID: jC-gmfl02220097h04a1
cagctcatctctctctccctctctctttgttctctctttctctttctccaaaatggctctaaactacccttttttaacctacttcatactactgctagtaaccataacccgtttgatattcactgtgggaaaaactgagcaatggaaagctccgattctaccagagcttgacattgataacatatcccacaaactccatgatgaccctgaaaccattcaaatggcttcaagggactatggccatttaacgcatgaattcccattagctgtgtttcgtccatcttctatagatgacatagtcaccttgataaaatcttcgtacaatagctttgccccttttgacatagctgcgaggggccaaggccactccactcatggacaagccatggctcgtgatgggattgtggtggacatggccagcctaagaaaacaaagaaatggggttgcgattagtgtctctaaggaccctttgatgggtcactatgctgatgttggaggggaacaaactctgatngatgtgctacatgccacacttgaatatg

SEQ ID NO: 8904 - DNA, 544 bp, Glycine max
  Clone ID: jC-gmfl02220097h04d1
gttgaaagctgacatattttccttcaaaagatcctttggcactttcaaatggaggatgttgatgacaagctgccactgccagaaccctcttcagtaagtgctgaattgaagccacaggcagaaaccactgaagaaaatcctgaagtgataaacccacccagtagtcagtcttttgttgaagctcctatcaaccaaattaataataataataatagaatggattctggcactcatttgccagtaaccgagttctctgacttaggagtgtccctaaatgcttttgatggagcagaacaaaaccaccagggagccacagttgcagattccgaacgagggccttcggaagaagatatctttaacaggcagcaggatggtgtttctactgccactgctagtggtgatgttgataatccgatgaatctctcaacttcctcttctgaaagaaaagatttgcagaccagcctcatagaactaataacagaaccacctcaattaagcttactgatgttcccgagataattcagcttcacttccaacattacag

SEQ ID NO: 8905 - DNA, 558 bp, Glycine max
  unsure (1)..(558): unsure at all n locations
  Clone ID: jC-gmfl02220097h05a1
ggcggacacggcagtatgattattaccagagggttttgaatgggatattgtgaaatagtttgtcaatggtgatcgtttgcttgttcccttttgactaagcttgcacggtgattgttcatcaattagtattttgcctttacaagtcatttgaagatggttggttcactgtgtgttatggctttggagtttttgtgagaagtaagaattaaaaggtggcagtgtgcattgtctattctcctggagtagtgtgaggaagattctgactcgcaaaagtacttcaacagtctgaggctaaatttacttgagccgagtctttttgatttttccatccctgtttcttgtgaatggagctctgctacctggagaaattgcattagcctcccaaatgctgagttagtgcaaattgtacagtgattttagcgggagtacggaccagattcatgttggctgtgaatatgagtattgtataaactgtttgattcatcaaagtcttggggttgcgatgcactgctgagcatatactgacatggtaccttcttggatatcntgtatcatggg

SEQ ID NO: 8906 - DNA, 363 bp, Glycine max
  Clone ID: jC-gmfl02220097h05d1
gccaccaaaactttatgatagatatgaaggtgaacaaatttcaccgtgaaaagtaaacaggatcgattacacatgatacaatcaaacattttcaaagaattttaataacaattttccagtttaagcatggaagaatcaactttgggaagacagacaccatagatcagctgagatcagaaaaaataacagagcagtttgccaattctggaggtctgcccatgataacagatatccaagaaggtaccatgtcagtatatgctcagcagtgcatcgcaaccccaagactttgatgaatcaaacagtttatacaatactcatattcacagccaacatgaatctggtccgtactcccgctaaaatcac

SEQ ID NO: 8907 - DNA, 576 bp, Glycine max
  Clone ID: jC-gmfl02220097h06a1
gacttaacaacagcacaaagcgggttactgtctgttcaagctaccatctctctctctctttcttagtgcctccttgccagaagttaaaatggcccaagaaactttcctattcacatctgaatcagtgaacgaggggcaccctgacaagctctgtgaccagatctccgatgctgtgctcgatgcatgcttggagcaggaccctgacagcaaggttgcctgtgaaacctgcaccaagaccaacatggtgatggttttcggagagatcacaaccaaggccaacgtggactatgagaagattgtgcgtgacacatgcaggaacattggttttgtctctgatgatgttggtcttgatgctgacaactgcaaggtcctcgtcaacattgagcaacagagtcctgatattgctcaaggtgtgcacggccacctcacaaagaggcctgaggagattggtgctggtgaccaaggtcatatgttcggctatgccactgacgagactcccgagctcatgcccttgagccatgtccctgccacgaagctcggtgccaagctcaccgatggttcgaagacgggacatgc

SEQ ID NO: 8908 - DNA, 296 bp, Glycine max
  Clone ID: jC-gmfl02220097h06d1
aattaaaaatttttattttttgtaaagggacaaaaaaaaaaaaaaaaaatggagaaaaaaaaaaaaaaaccgaaaaaaaaaaaagggggggaattttaaaaaaaaggccaaaaaaaaaaaaaactatttttccgaaggggggggaacacaccaaaaaattttggcaaaaaaaaaaaaaaaaccccggggagggaaaaaaaccccccgcaaaaaggggggagaccccttgaatagaaaagaggagccttcccccctggggggggcaaccccccccccccaggaaaaagggggccttt

SEQ ID NO: 8909 - DNA, 539 bp, Glycine max
  Clone ID: jC-gmfl02220097h07a1
ctaaaactgtgtcctccgccgttcacatcatcgtcgacgttcagttgctcacactctcaacaggtgagaagagagatgagaggaaggagctatagtccatcgcctcctccacgccacagcagaagaggaggaggagggaggagtcccagccccaggggccgctatcctccccgtcccagacaacaagatctccctaccagccttcttgtccgtaaccttcgtcatgactgtaggcctgaggatctacgccgaccttttggtcaatttggtcctctcaaggacatttaccttcctaaggattactacactggagaaccccgtggctttggttttgtccaatatgtggatcctgcggatgctgctgatgctaaatatcatatggatggtcaagttcttcttggtcgggagctcactgttgtctttgctgaggagaatagaaagaagccaactgagatgaggacacgagagagaaggggtcgcttttatgatcgaaggaggtctcctcctcgttactctcggtcaccccgctactctcgatc

SEQ ID NO: 8910 - DNA, 537 bp, Glycine max
  unsure (1)..(537): unsure at all n locations
  Clone ID: jC-gmfl02220097h08a1
cacaaatccaatgcaatccttttcccaaaaccccacatcccaaataacatcaaggcctatagcataagtgatggaatcccagagggtcacgtcctaggcaaaaacccaactgaaaaattgaatctttttctccaaactggtcctgagaaccttcacaaaggtatagaattagcggaagcagagacaaagaagagagtcacatgcatcattgcagatgctttagtaacctcttctctcctagtggctcagaccctcaatgttccttggattgcactttggcttcccaattcatgctcactctctctctatttctacactgacttgattcgccagcactgtgcaagccgtgctgggaacaaaaccttggatttcattccagggctgtcgaagttgcgtgttgaagacatgccacaggatctgcttgatgttggagaaaaagaaacagttntttcaagggaactaaattcgctaggtaaggtgctacctcaagctaaggtagtagttatgaatttctttgaggaattggaaccacctttg

SEQ ID NO: 8911 - DNA, 362 bp, Glycine max
  Clone ID: jC-gmfl02220097h09a1
gtctctcccatcctttcgcattctcaatacccttttgatttgtgaaaggaaagcaaacatggttgatcaggtccaacaccctacaatcatggacaaggttgctggtcagctccatctccgttctggtctttcatctggtattagaagttatgatggagcctaccgccacccagctatgtaccaaagaccctcttttgggaattactcgaatgctgcattgcagtttcctgtgatgcccacatgcaaagctaccatggatttgtctgctactgcaacatctgcctcacccgtctttgttgctgctccagcagagaaaggccattttcttttagactttctcatgggaaggtgtttcagcagct

SEQ ID NO: 8912 - DNA, 375 bp, Glycine max
  Clone ID: jC-gmfl02220097h10a1
acggcctttcttgttgttagtttatagaaattgttttttgcaccgagcacaccaacaggagacctgggaatctttctttggttaaaagcacacagacaatgggcactgtggtttacaatgactctccacctaagggatctaggggtcagaacacgggagatgaccacaaaaagccaaggggcttttaaatacgctataaccttccatagcggcattgaatccgctcgttaagatagatgtgataaagtctgatatatcggacatactagaccagaaatggaaaccactattcgtgacacaaatcgtggagaacatacaacacgcaccctacccagatgcctatatttccagagagccctgagactgatggtgcgc

SEQ ID NO: 8913 - DNA, 432 bp, Glycine max
  Clone ID: jC-gmfl02220097h11a1
gagcaactaactcactcgcgccatggctgctaccatcatcaccacatgcaagctctcactgcttttgagtcttctctcagtttcacttttgctgggtgtgaggtctgatacccttcagaatgtaggcgcaattccccccacatgcaagcgcatagagtgtcccagctatgatgtcattcacgtaggcaacggctacgaaatccgtcgctataattcacccgtttggatttcaaacagccccattcaggacatttttctcgttgaagccacaagaaccggcttcaggaggttatttgactatattcaaggtaagaataactacaagcagaagattgagatgacagcacctgtgatcagtgaagtattacccagtgatggacccttctgtgagtcctcatttgttgtgagcttctatgtgccaaaagagaacca

SEQ ID NO: 8914 - DNA, 536 bp, Glycine max
  Clone ID: jC-gmfl02220097h12a1
cgacagttgagtcgggacggacggatgaggaacccggatgaaaagccaatcctggaagaaccaaaacctgctgaagctgaagcattaccaaaaactttcacaaaacagccaaaggaggagcctaagccttctccacaagaaactttgcctgctcagaaagaatccaaaaacaaggggagggatttgaaatccaaaccggagagtaaggatgtagcagaaactgatgaatatgaatttaaaaatccccaaaaggaggcccctgccaaagagtgtgaaatcgatccagcaaagctgaaagagatgaaaagagaggaggagattgcgaaggcaaagcaggccttggaaagaaagaagaagttagcagagaaagctgcagccaaagcagccatcagagcacataaggaagctgagaagaagcttaaggaccgtgagaagaaagcaaagaagaaatcaggtgctgcagctgtggccaaccctgaggatgaaccaaaagatgaagttgtcgaggctacagagccagaaagggttacgatgat

SEQ ID NO: 8915 - DNA, 354 bp, Glycine max
  Clone ID: jC-gmfl02220098a03d1
aacaggaactgtaatacaattttattgaagacagttaatttacatgcatagcataacctgacagaaaaatcaagagttgatcttttgtccaaaatgtaaaacacaacaattgttttttatcaactaatatggaaacagtttaatcctttttgtacaatcaagagaattctatatatcattccgtgtgaaacacatgatcagcaatggctacagtgaagaactctgagcctttttttggaaccacacagctgcaattgtcacaagggaagcataaactgaattgggtatcttttgcaccagtttcccaacacccggaacaccttcagtagccttctttgttgccactgcaactgt

SEQ ID NO: 8916 - DNA, 495 bp, Glycine max
  Clone ID: jC-gmfl02220098a04d1
aaaagtatccatttccatagagatgagtcctatacgcttaattcacaatatacaatacaaaacagtaacaagagaatgatatcaaactcaacatgacaaaatggctttcgttactttgctacctggggaacatataaaagtaaaagaactatataaattaatccagctgaggaacccaaattttcagatctgggccaagacaaatggaaaaactgagtcaaaaatatctccctcatttgctattatgctgctgtagcagtggtgggggctcttaactcgattttctatcctttctttccgcaatacccaaacttaacaacatacttttgaaccctttattttctccacaaagaaaaatcgatcagaaccctaaagaattatgttttaggtcttccttattcttcaattcatgcaggctccggccttctcttttgtaagaacaaaggaaagaaaggaaaagtactgaatgcaacagcacaatgcaggatacacata

SEQ ID NO: 8917 - DNA, 341 bp, Glycine max
  Clone ID: jC-gmfl02220098a06d1
agggggatgaagggaatatagttttttttttcctggtatcttacaaacaataaacaaaatctccatttcattatatgaatgatccatgaccaaaataaaactaaaaatcagacaaaacctgggggcacattgaattagtatctccattacagttatgggcgttgcatccaaacccaatagaaagctcagagttttccacatcccaaaaagtaaaatcctactacagtttagcaccgagatgtcctaaaccactttacatgaacacaaattcgagttgtcttggaagaggaccaagaaataaaagctagataatgttcaaccctgcctccaaaaataccaat

SEQ ID NO: 8918 - DNA, 418 bp, Glycine max
  Clone ID: jC-gmfl02220098a07d1
agagacaaataacaatttgctattacaaaacgaagaaactattattggaattcattcaaattgaagtgcacatgattaataagattcaaccaaactagagaaggccaccacggagcctaaggacaacatagacatagaaattttgttatatcatacacattcaaggaagagaaaatctcaatagcaagattcaactgaaactagaaatcgccaccacggagcctaagaacaaggtgaagcgtggattccttctgaatattgtaatcggcgagagtgcgtccgtcttcgagctgcttcccagcgaagataagacgctgctgatccggtggaatcccttccttatcctgaatcttcgccttcacgttatcgatcgtatcagaactctccacctccagagtaatagttttcccggtgagcg

SEQ ID NO: 8919 - DNA, 363 bp, Glycine max
  Clone ID: jC-gmfl02220098a08d1
ataatacacaatagttaataatatattgtccatcatggaatacaagatgtttgttttagcaacactttgcttatgtcatccatgttacaaatatacacatgaaacatatggagaaaagcttattcttgttcattttcatccatgcttaaattctaagctatcttgaaaggaggggatttgagagatggattagcgaaagggccctcaactagtcccttagctattagcctatacgctgcttcagtaaaatgaggcccatcccaatttatttgttttgaaggatctgagcaaactattgcagcaggactaccacataatatttgaaaactgagattgtaggttcacccttccacaacatgcttg

SEQ ID NO: 8920 - DNA, 339 bp, Glycine max
  Clone ID: jC-gmfl02220098a09d1
atgacaaaatactcctataattttatcgggtttagatagaccactaaaaagtctataaacccaaggggaagctaaattaaacccaagaagaaaaaaaacttattaaaaaaaggccaacaacggtttacccctccaaacttgggcacttaaacaaaaatctaaaaatgaaaaagaaagaaaaaatcccaaatttttggggttttgggggcttttatactaggcggggcaacctacaggggggccacccacttacgtcacgagtcacgagccgcattgatcaaaacgacatgatcgattcgaggctctctataacgggtctatttgagtcaccacaatggg

SEQ ID NO: 8921 - DNA, 497 bp, Glycine max
  Clone ID: jC-gmfl02220098a10d1
gtgtgtgagtggccgcctgcttgggggggggggggggcactgaaaggcgtcgggtggatgaactaagggctgggcgcggtaacagaataaacaaatacggatttagtgggacagcagcccaagccccaaacctagaaggatgatttagcggtaaacgcatagatgacgaagaggacaatgatacaagccgacaggttaatttagctacggaacaaaatagggcccgcgccagtgtagtaagaacttgaaaggatataaataaggatagaaatgctaagcgaacggattagctattgggaaaaagagaaccgaaggactggtgctgctgctgttgtacgttgtactagtgttaacgacaaatgcacagcacggtgggtggtgcttactagacaataacgcagcaaactgggtgtgttatagcaaagttttgtatagcgctttgtgcaatgacatatgtactggcactggtgcgcaacagctgaaagcgcaagccacac

SEQ ID NO: 8922 - DNA, 499 bp, Glycine max
  Clone ID: jC-gmfl02220098a12d1
gctggcttaccgggcaattttccgtcctacatgtgtgtacgtcctccttcttggggggggggggggggggggggggggggggggggggggggggggggggggggggggggggggggggggccccaaaaaagtgcctgggatgggggttagattaccccttttgcatgccgattgtactgaagtctgggtaaagggttaagagggtattttaaggggcccagaaagctttttaaagaaaaaaggaaaaacaattttcccttgggattggggtgcaaaagtgggcaaagggtgtggccttttaaggtttgggaaaccagggttcaagagcgaaaacttttccccgtgggcaaacccagtgctggcactttcagggtcactggatacattttccttgctcatcttagactgtggtgaggcccttttttaaaggtaaggtatgcccttctcggggataattcccgcaagcccaaaatttgcctcggatttaatggaagtcttg

SEQ ID NO: 8923 - DNA, 446 bp, Glycine max
  Clone ID: jC-gmfl02220098b02d1
tttttttttttttttttttttttttttttttttttttttttttttttttttttatttttgtgatttttttatttttattttcctttttatcccttttatttttttaaattttttattttattcacccaatattattcaaaaaaaaaaaaacccccacaaataaaaaaaataaaaaattagaccaacaaactccttaaaaaaaagaaccccaaaaaaaaattaaacccaaaaaaaacttacaaaccacaatatgttgagccgctaaaaaaaacccccccacaccaaaataaaaccaacccccctaaaaaccccccaaaaaaaaaaccctccccccccccaaattttataatccaaaaaaaaaaaaaaagccccattcttttttttccaccccaaaaaaaaatccacccaaggaacaaaaaaaaaaaaacccccaaatatttttccac

SEQ ID NO: 8924 - DNA, 519 bp, Glycine max
  Clone ID: jC-gmfl02220098b03d1
gaacaaactcaacggaacaccgctgatgacaaacaaatttaaatgtataaaatgcagaagcttgtgcgaagatccatgtataaattgcagcttttggtgtcaatccatggttatatgtattcaagacatcctactatacataccacaagtataaaaggagggccacccaggacccacttcagggtggatcctctcttgaacccggaaaaaaaggatgactcatgagccctcactaggcagggataatgaataatgaaattgatagcacaaaaagatattttacatcaataaaacatgctacattaataaacatttgaagaacccaacgaacccctcgaaggatatcaattacacccaagaagattttagagacgccagacaaggaagcagtatttcaccattgatgaattgtaacttcaatcaaaacaaatatgctattagggaggtaatgaaacagggttgtggtcccctccgaatagaatcgttgaaccaattaccttgaagtagatcaatgtatca

SEQ ID NO: 8925 - DNA, 219 bp, Glycine max
  unsure (1)..(219): unsure at all n locations
  Clone ID: jC-gmfl02220098b04d1
gttgttattattgtggcattttaattataacaaaaacgaattatgancgggctgtttttttctctaaaactttgtattttttttacacaacaccaatcactacaatttgtaaattgtaaagtttatacgccagaaccccccttacccttataatatctatatattatggacattatgtaattatatatatagaacaatacacattatatttatatatac

SEQ ID NO: 8926 - DNA, 398 bp, Glycine max
  Clone ID: jC-gmfl02220098b05d1
cttcattatatcacaaataagagcttattaccaattctcatattccaatcctctaaggaatttcataaggattttcatcaatccaactaatcatctagacaactacatacacattagagctaaaatgctaactatcaccaaatcttacccagagagaacaatcattgtcatcaaataaccataacttcacaagccacttaatttcactattttaagctataaaactaataaaaatgactcaaacaattttgcttttttttttgttctttgagtcaatgcttctcagagccagaatctctcttctcccaaaacttgaactgcacagatctttgttctagcatcttctccacttcctccataggaacccctttggtctcaggcacaaaaataatgacaaa

SEQ ID NO: 8927 - DNA, 433 bp, Glycine max
  unsure (1)..(433): unsure at all n locations
  Clone ID: jC-gmfl02220098b06d1
aataataaaatattgtaagtatattaatgactactatgataaaaaaaaatgttttctcatcttgcattgtataagttaggcggtgtttagtttaggaagctaggagagaaataagaaagaaatttggtgggtctcatgtggacccataccttttacaccttattttaataataaaaaattctcttcaatttacatctctatttttattctctgaaccaaagacaacattaggcatgttcccggcaaagtggaatcacatactagtacactagttacaagctagcagacaaaaatgatgatgcttctagctgtcttaagctttcggccacatgagcaataactcctacaccagcattgtgaaaccattcattnttcacatgaatgttgttatgagcaaagaaaggccagaatgctgagtgaaagctgacatcaa

SEQ ID NO: 8928 - DNA, 178 bp, Glycine max
  Clone ID: jC-gmfl02220098b07d1
atcttcattaaacaaatcctccaacggggaaaaggtttgcttcaacaacctgcactcccctcatccctataaattaaccttccgaataagaccttatatacaaaactcctatcaaactcttactacatgaactatttatttaatatacactgagactgtttcaaaacagcacctgtaa

SEQ ID NO: 8929 - DNA, 395 bp, Glycine max
  Clone ID: jC-gmfl02220098b08d1
aattgcaaagaaatatccatgaactataattacaaacttcctagggtattatttacacgccccataggccataaatggctttatttgaattttatcttcccatatcttacagtttaaatactcactcaagaatctgttcactcccagacattcacaacaataaataacttgaataaaaagaacatatacgaacgaagttgtcgagcaggcagagacgagaattcacaatttcacaccatctggacccaaataccgtggcttggaacttcttgatggaccacaaacagcagatagaaacccggtggcgcaagaacagcggaagccggcgcggtaacttcaacctcgtgcgttgattctccaaccccactcaaatggtgcggcttcagcaccaacag

SEQ ID NO: 8930 - DNA, 460 bp, Glycine max
  Clone ID: jC-gmfl02220098b09d1
agacaaaactctcagatacacatgttttattcaaaacaaaagcaaaaaacaaatcaaattcaatacattgattaaaaaagacaagttgattgccaaagccaaccaaaacaagtaaaactttaacattatatatatagagagcactctgcaaaagttacaggtagcaaataatgtacacacctctctcacaaaatgcaacaagcggcaattcatgagtactgctgtgctgtccagtgcacatcctacttttaatatatatatttactttgttttatttaattattaattaactaatacacattaaaaagaagattgattttaagtttgaggtacagtaggtgatgaggaggatcagaaggaagaagccttggcgagtgacttgatggtaacatcgggacccagaacaactggtttaaaatcgaacgtaaacgtgtcgtaacgcaggaagaattccaccaag

SEQ ID NO: 8931 - DNA, 329 bp, Glycine max
  Clone ID: jC-gmfl02220098b10d1
catgactgtgactgacgtcgatctatggatagtgaatgtaccaggtgcctgtcactaaaaaacccagccgtgggggttgatctaatgtacggtaggtatggcgtgtcgatcacccaaatacggtctaacagtatgcctagacagctattagcagcctgaggagcaaatcactgccggttgagcgcgctgctcgtgagagtcgctcagatgatcttcgatacaggttcgttccgaattcgactctgttcacacagatccaccgattacgtcactatccaatgcagcagttgcaactgaagctaatagtcaggccatctgcacagtctcta

SEQ ID NO: 8932 - DNA, 429 bp, Glycine max
  Clone ID: jC-gmfl02220098b11d1
gctgacagagccacaattatccctatatcacgtctgtacgtgctcctgcttgggagggggggggggggggggggcaatacacaaaacgcaatagggaggtatagagggtatgatagacactgcatgttagaaagcgaaagagacaggatagctgtaagaggctccacaccgattaatacatgaggatgggaagataccccgcgacttattgatccaggaaatgccttgaacatagcatatgaaaatgcagatctcaagcagataagactatggaatccggatactgcgtttagaccggaggagcagtaccgcaccatgagcattcacattagcccgaaagctggagcacaaaatatagcctatcaggaactggaatacactaggatggacattacatagcaattacattcacttgaggcatccgagaca

SEQ ID NO: 8933 - DNA, 532 bp, Glycine max
  Clone ID: jC-gmfl02220098b12d1
gctggcttaccggccgatttgccgtgctacactgttgtagtaccaccttgcttgggggggggggggggggtgctgtggcaaaatgtaggtggtgttggttagcgcaaagaaggtaaatgacagataaaggcggctgtaataataataaaggagggcaggcgggacggggcggagccggcgtattgaagatgaaggaaccaccggggcagaatagcaaggtgaagggaggcttgagagtaccgactgaaagggaaagcggtaagagggggtaccaatagtagaaataggcggtataatagtacactagcaataaagatagggggaggttggcacttatgttataaatggcggaaaaggtgtagaccaggcgtttttggtgctaagcggatggacaattagggttggtacgggggcacattgggtttggagcggtgtagtgttaaccagggccgtgatgggtggtgggagtgtttaatcgcagagtactttgggcgtaggtaaagtcaagtttaaattaatggctatagagtat

SEQ ID NO: 8934 - DNA, 403 bp, Glycine max
  unsure (1)..(403): unsure at all n locations
  Clone ID: jC-gmfl02220098c02d1
ngaactattgtacctctatgacaatttcaaagtaataacccaaaaacgagctaactaggggggggccgccctttctttctcaaattttctattttttcgccaaaacaccacaacaaaaagaaggatatttttaaagtttttctcccttgtaccccgtttaacaatttttaaggaaaaatttaactacaagttcaatgccaaaaaaaaaaaattctgacttattccctaaagattattaaagcccactaagacctaaaagtataaatttaggtacttaatttcaatctggttggctcttatataaatacatggaatggtggcaacaaccaaccagggctttaaagaataaaaagtaaaaataataaatttaagggcattttggtccccctctttttacctccaa

SEQ ID NO: 8935 - DNA, 528 bp, Glycine max
  Clone ID: jC-gmfl02220098c03d1
aaagttattgacgtgaaataagaataaggcctttgtctagttgctacgacacaggcatgaaaattaattgcagaaaattaatacgtgaacataatctttatatatttttggggcttgcaaagattgcagagacattttatgggtctacaagggattctcacgtcaaaattttatcgcgtgtaaatgctctattcttgtatgttctgatatataattttgactggatatgaccgaaatgggatggtctctggctctacaaaattttcaaatcacaagctcatgtatgaaaaaagagatggcactaggtcaactacagaccaggcaagccctgcatactgaacaaatctaattccggtatcaacatcgaatgccttgtgctgggaaaggagcttttgcaagtaaccttgtttaagcttatcagacattttacctgtcacagatccattcagtgtaggtatatagccggttgatttatcgggatgcccaaggtgtcgctccacaggaatggtccatttgcgagagtctact

SEQ ID NO: 8936 - DNA, 217 bp, Glycine max
  Clone ID: jC-gmfl02220098c04d1
gccaataaggacaataaagtttctagccttattttatatattgctggattgatgtttttagctacattggtatgtgccagagataacatatataacaagtgtatgtattatagcataatccttagtttaggggcaaaaatgttcctccaacatgaaggttttaaaaacttgaccaagtcctttcccttgcacagaccataatatcactgatcaatat

SEQ ID NO: 8937 - DNA, 353 bp, Glycine max
  Clone ID: jC-gmfl02220098c05d1
ccaaagaaaggggaaaagtctttatttttttagcgaattttttctcaatcccccaaatatatggggggataaaaacccttttctataaaccaccattgtttggggcacccgaagggctaattaattaactccttgggcatgaatttctttttaacccaccttttgagcattatttgcagcctttgatgaacaaagtgtttattgacttgccctccctgcttcatccaattttagataaaacgactccttcccaattttctaaacaaacttggatattataagcttctccatcacctccagccttgggtttacaaacaaaaccttaactccattctttcccaatattttaatta

SEQ ID NO: 8938 - DNA, 420 bp, Glycine max
  Clone ID: jC-gmfl02220098c06d1
aatcaaaatagcatatggagttattatatcaaatacgtgattgttacatgcaacaatcaacttagatacatctagtgatcactcacacccaacaacaaagactatgaagtgtctgaagaaatagaaactaatacaataaaaggctcgcataagtgaagccctacagtcacactcgatttctcttattctgatagtaagtgcttcactgctgcctcagtatcccgctgcagaaatgagcaaatctgtccatggcttgttcagaacctgatgcttgcacagttagtggagcggctgatcttgtaagggacattgaccttgcagaaaccagggagtgcctgagcatactggtcattgatgttgtacctagcagcatccgccttgagacagttgcacacagtttgtttgtcaacggtggtgaca

SEQ ID NO: 8939 - DNA, 375 bp, Glycine max
  Clone ID: jC-gmfl02220098c07d1
atgaatgcgaattatgcatttgctatcaatgtggggtctttgtacaaacaatgaatgtagccgcagaaattttccacagcaaaatgctacttaatctcgatattcctatctctatcctcagaagctaattcagcgagcaagagaaaactaatccaaggtacaattaaaaaaatctatctacacaatgtatggggggaaataaccagctgggctgcttctgccttaatgctggcctgtgactccagaaagccaagaactataaagatgatagtgtccgtgtgaaccattctgataggcgtttgatttttgctgacagcactgcatccttttcgagaaaagtggtggcattggacagtagaatggtcacatcatgct

SEQ ID NO: 8940 - DNA, 309 bp, Glycine max
  Clone ID: jC-gmfl02220098c08d1
gtgtataggaaaaaatgcccctcgtttccctcgggagattttttgcatttccatttttggaataaaaaacagggagtcttttgtttgggacccacaatcacaccctcctacatcactccaactaattactttgcctactttttcaacaaaaattgaatccaaagatttgaccctgatgcttttatgggggataaaattaattctacacccccagcctttagtcagcctaattatatttctcctaactagttagggaacctcctaaattgggtccctgggttggaacttgcaaatcccaggggcctttta

SEQ ID NO: 8941 - DNA, 468 bp, Glycine max
  Clone ID: jC-gmfl02220098c09d1
attaatataaaatactaattttttcttttattttattttccccccccaaaaaaaaaaaaaaaaaaaaaaactcccaaaaaaattttttcccaaaaaaaaaaaaaaaaattggggaaaaaaaaaaaaaaccccccctcaaaaaaaaaccccccaaccccactttttttcacccccccccacaccccttttttttttttaaaaaaaaaaaaaagttatttttttcctctttcccccccccctttaaaaaaaacaccgcccccccccaaaaaaagggtcctttttaaaaaccaaacaactccccccaatttattataaaaaaataacccccaccgcccccccacaaaaaacaaaaatgggtaaaaaaatctcccccgggataaaaaaaaaaaacccccccaaccaaaaattccaccccaaaacacctaaagggggtccccccccccccaaccccccccaagaacacaaaaa

SEQ ID NO: 8942 - DNA, 581 bp, Glycine max
  Clone ID: jC-gmfl02220098c10d1
catgacagagactagctgtcgatctatcgctaccaatgtaccagagtccgtacactaacaagagggggttacacctgactcaacggcatgggcttacataagtacgggggacgccagcggtggggaacggccatgagggcataaacttggtaggggggcaacaggggcctgggcggcacaaaagaaaaagcgtacatacccgcaacattccacagcaatggggtggccggcctgatttagaggggaagcgtaagcaaagctgtcggcgccaacaatgggagaaacacctccgtggcaatatgcaatccaaatgcaggagaggtaagccacaatgtcagtctagaacagtgccagaggagttagtaggtggtgatttaaactggctgctatggatcaacgttggttgattgagcagccaaatgcgcgaggataggtagaagggtaacccttctaagccaccaatatgggggaccgtgctgactgaaagcaatgtttaggccgtgaaggagcggccaaccgtagctggacgaggctacgactggacacaagccgtgaagtagggcagctgaagaaaagtagcc

SEQ ID NO: 8943 - DNA, 424 bp, Glycine max
  Clone ID: jC-gmfl02220098c11d1
cctgacttagcggacaagttatcctttcttcacgtctgtactagctcctgcttggcagagcggtgcgtgcatattagtcgaaggagaatagatagtagacacgtttgcaaacagcatgcccactgaggatcgcttgacctacagaatgatcctgtgtggcagatcacttcataaagcactctgacacgagtttaccccatgtgaatttgactagcgctctatttagaagctagaaccaggtagtcgcgattgtagcagaaatatctgtgagctggatcaatggaaggcaaatcactgtcatgttagaggaccacttaagcgcatacaaagatgattagtcgcttgccaagtgtttaactagggtaatgcacatctgcagcctaagcacccacaactgttgcacagccgcagatccagcatagct

SEQ ID NO: 8944 - DNA, 421 bp, Glycine max
  Clone ID: jC-gmfl02220098c12d1
tatgactccccggagaattttccgtactacatgtatggacgtcctcctctttgggggggggggggggctgtaaaagcagagctgaggcgggaggaacgaacttttagacccatagggacgagagagtcgtatagtagaaaaacaaaaacaaaaacaagtggataaaactgcctagacgctaaatgcttgtttgggatttaatcaggctgcacgaaactaatctgacgctctatggaaagcaatgggtaatgaaaatgacaactacaaaacaccaacaccgaaacgagttatgataaaaataacgggccaacaaactgggattgagatggcataatgagccatggcagggccgctggtgagtgttgctggatcacaacttaaacgaaatgtagcacaccttgttggccaacgcatgtctagg

SEQ ID NO: 8945 - DNA, 236 bp, Glycine max
  Clone ID: jC-gmfl02220098d01d1
gggcccttcaacgaaaaaaaggcctttttttgttaagccctttacgttcacactgaatttacaaaagcaaaatttcgtttttagttacaggcaattttgttttccgcactctgtatactaatataactggtggcagcatcatagctacaagctactcctgaactaaatgcatcgataccaaattacacgacaaaggtgtgtttctttcgttctcccttttcttacaaaaaggtaat

SEQ ID NO: 8946 - DNA, 223 bp, Glycine max
  Clone ID: jC-gmfl02220098d02d1
ggagtcaaaactggtctgagggaaaatgttctattacaaggctaagtgtcccacaaattgaaactttatgcgtgagcataaaataccaaggctaccaaagatgctatcactaaagaaaacaaggaaacctcttgcctagcaccagcattaggtaaccacggataagaatcaggtggtggcattacacagttgtcaccgttgaagtagacccttcgaggaaaag

SEQ ID NO: 8947 - DNA, 512 bp, Glycine max
  Clone ID: jC-gmfl02220098d03d1
aaagagaaaaaactaaatttcagatttcatttcattgatacctcaataggtgcaaaccttacattagatgataatcatacacgtgtgtaacatctaatattttagggaatataaaataaaactaaataacataataaaaggataatatcataaatatgcagaacgacacagcaaaaacaaagggtaactaacagcaattccttaatgctaccgagtcatttatgaatgtctgttggatcaatcaaccttgtccacaaaagaaggcagacagaatgcagcagcatggatctctgggttataaaacttagtaggtccctttgccaccccatttttctctggattcaatttatttattggatgtttgaagttcactggtggaccctccgtagagcaaagcatgaatccaatcaccccacttgcatatgtaggaaccgtggtccaagcatagttaacggagcctttgaatatcttcttgcaattggctatggtgtctgcaaccacaaagttcttat

SEQ ID NO: 8948 - DNA, 178 bp, Glycine max
  Clone ID: jC-gmfl02220098d04d1
aacaaccaggcctttttttcaattcaaaaacaattgggggacaaaaggggaaataaccttccccaaaggggccaaatcccgcccacaatttttaaatcgggaatcttcttcccggggtttgcccttggcatttgatacccggggaaggggacccccttgaacaaaaatcccttgaggg

SEQ ID NO: 8949 - DNA, 425 bp, Glycine max
  Clone ID: jC-gmfl02220098d05d1
aaaataaaaacataaacaacatactttcgctggaacgagttcaatacatcattttaaaacataataaacagcagcacttaaaccagagatgcaaagcacaagttcaagggagacactgaacaaacagattagacatatgagaacacttcataaaagggattccccttagcaaccaccacgaaggcgaaggacaagatgcaaaggggattccttctgaatattggaatctgccaagggacgaccatcttccaattgcttcccagcaaaaatgagcctctgctgatctggagggataccttccttggcctgaatcttagctttcacattggcaatagtatcagagctttccacctccaagggaatggtcttccctgtcagagtcttcacaaatatctgcatacctccacgaagcctcaacaccaaat

SEQ ID NO: 8950 - DNA, 495 bp, Glycine max
  Clone ID: jC-gmfl02220098d06d1
caatgcaacaaagtctacaatttgttcctcagcagttcaatacatcaatattttgtatataggttttttttttcctcttcaatattgggccatcaacagatgttctgtttaaacaataagaaagaaaaactacaatcatagcacccccgaaaatgttaattgagcaccaatggctgaactccgttaatcagtagttatccctcaatttcgctgctaacatctaaaagaatgaacagataatacctagatctataaaggaattatattgctattgtctacaaagctctcaaggcagtatgcaactgaaaagagtgaacataatattcaactgatactgatcttcaaacaaatttatgagagttcgcataagagtagggaaggttgagcttgtgatcctccaatcaagccaaggagcataccttggcttgtctgatactactgcagcaaagccgactgtcatctatgtaagttgcttggatgcccatcatccatgat

SEQ ID NO: 8951 - DNA, 420 bp, Glycine max
  unsure (1)..(420): unsure at all n locations
  Clone ID: jC-gmfl02220098d07d1
aaattaaacaccattcaaaattattgtttatttatgatttacagatacaaaaaaccagaaggatatcagcaaacaaactcctttctacaagggggaagagagtctgggagatcacccactttctcactttctactacacagagagaaaatcaccgagagtggaaaaacaagattctctcgactcatacagagtctcagatataagattcctaaaacaaaacaaaaatctacagaagcgtgctctgttccgttccttcctctgccaccacgagtagaccaccttattgagacagtngagagaaaagacaaaaggagcaaaattagctacactgcaccatgtaacttaggtcatgtctctctctagctacattctcaagtgagttcagccgtgtcacccgcactcaagatccaggatatctc

SEQ ID NO: 8952 - DNA, 421 bp, Glycine max
  Clone ID: jC-gmfl02220098d08d1
gcacgcaaacaaagtgatttattaatccattcgatgttcaaatggtaatagaaacaataaaggtctaaatgcccaaatggtctctaacagaagctaaaaaagacaacaaagaaaaacaataacgtatctggaaaaccagacttattttcacaaggacagaataataaagacacttaaggaaactactcttcctcatcttcctcattccagcactttagagttgatctaggtgaaccacagtcactagtcttcccgaatttttggtagacaacagaaccacccattccaagcccttcgtggctcctctcttcacgacagtatcccttaacatccagaaagcaggtctgctcaaacgacttgcttgcaccatccacatgaactgcaacagataactcagttgggaggaaacatgccaataccc

SEQ ID NO: 8953 - DNA, 403 bp, Glycine max
  Clone ID: jC-gmfl02220098d09d1
ttttttttttttttttttttttttttttttttttttttttttttttttttgggtttttgtttttttttttttttttttttttttttttttttttaaaaattataattaaattttttaaaaaaagaaaaaaaaattgaaaaaggaaaaaaaaaaaaaacgccaaaaaaaaaaaaaaaaaaaaaaccctccccaaaaaaaaaaaaccccaaaaaaaaaaaaaccccaaaaaaggtaaaaaaaagggcacctcctaaaaaaataaataaaggccccaaagaggaaaaaaaaaaacaaaccctccaaaacaaaaaaaagcgccaaaaaaaaaaacccttttttcccccaacaccaaaaaaaaaacacccccaaaaaaaccataattaattttttcacaaccgggggt

SEQ ID NO: 8954 - DNA, 594 bp, Glycine max
  Clone ID: jC-gmfl02220098d11d1
ctgcttgccaggaatttgccgtgctacatgtgtgcagtacctccttcttggggggggggggggggggggaccagaatcagcaggacagggaaggagaaaaagaaaataataaatagacaacagcacaggatggggaaggaaaagaaaatacttattagaaaaaagcaggataacgtctctaaacccatatatatgcttatgattacttagtaatatttgcgattgtataggtagtgtgtgtaccaatttaagctaggcagcattatatcagatggggcagctacatacagaatatgaagacgaagagaagatatagaatacacaaacggatgattctatgcaagaatttgaaggaaacgaaaagttgtaccaagcagtaatctacaaatagcgggctccgccttagaagtccggcgagtccagcaccaagtgcttaccctggcaccacaccagtgccaagtgtcccaagtgtaatccagaatttggtcattgtggtactcagtgtaaccagccacggtaacaactctaagtcagtccttacggttaggcgtgcgctgtgtacaagctgcggtcttctggtgcgtgtcatctatc

SEQ ID NO: 8955 - DNA, 543 bp, Glycine max
  Clone ID: jC-gmfl02220098d12d1
ctagcttgccagcaatttaccgtgctacatgtgagtagtaccgcctgcttgggggggggggggggggggggggggggggggggggatgtttaaaagaaagaaggaaaagaaaagcaaacatcggacagcccggggcggatatggaatgaagttgctgagggctacggtaaaaaaaaaaaaaaaacaggcaataaaatggggagatggggagataggatatataactcaggcttttgttggtaataggtgattaaccataatggaaggctggcacggcagcacataataaaaatgtggttgacggacctcacatggagacacccagaagtactaattgttaggttaaagcttgcgcgacttgttcagcaatgaaatacaagatggtgcatagggggtaggtgatgggtggtagggtggcaacgcgaccgaccgcaatacacgaatggtgcaaggtacacaacagcagcatggttcaaggcaaggttagcacgacttagcgcctcacgtagtgggagtaaaatggtaaattgcacaaaagttgag

SEQ ID NO: 8956 - DNA, 411 bp, Glycine max
  Clone ID: jC-gmfl02220098e01d1
aataccaaggaatctctcataatgataaggaaaaagtttaattacaagacaattttaaatgtaaagcatgataatatgtcgctacaactacaacagacaaacacatacgtcttaaaattattactcgtattaagaagcactcacacaaaacaagcaaagatcgatatataagaaagccaagtctaacaacatgattgagagtcattatgttcctgttcatgattagtacttaattagacatgcatctcatggttttggttgatgaaatattataacaaaccataatgacacaaatttactattattcaaccacttagcaatgtccatccgtgtctgctgcagcttaattatccttactttagtaactaagccaactgggcaccgcaattacaaaggatggggcaggtcatg

SEQ ID NO: 8957 - DNA, 495 bp, Glycine max
  Clone ID: jC-gmfl02220098e02d1
aagatgcatgaatatccatatattgattccccataatacacttatgaggtcatttttcaaaaaacaatataaaaatttcacatgtattagctgtacagttttctcatgtttaatttgtacaagatatgatatgattccaccctagcttggaagaagaatcacaacaactgtgctgaaaacaaagctaatttatttattctacatagacacattaatttgcacacaaaataacaaaaaaaatcttcccaagattaggctgcagtatgatgccctatttggtgaaaccaatagtataaggaacgccagtagccttcaaccaaccatcagcatctccagcaggtccacctctgaggaattgggcagcagtgaattgtgcagcttcgttcttattaatattgggatggtaacccctccactttacccttccttgaacgttagaaccaggtccaacgttagcatactcagcatagtacaacgtatcaagatcaggttccc

SEQ ID NO: 8958 - DNA, 524 bp, Glycine max
  Clone ID: jC-gmfl02220098e03d1
cacaagacttgaataaatttcatttcaattatacgtttccatatatacatcaggcacacaagtaatccattcatatgttaaattgttacacaagcatacaacagtgtcatgatttcctcaggtccacaaatattggaagtttgaatgccaatagcctcgaatatgcaacttgaatcttagcccaaaacttttacttagttattggctttgccatagcttcttgggaaagggataacgtccctaacattgccaaggccagttgcgaagaggaccatcaggtcaaaccttagagtgaacccagagttcttcactgttccgtttcgacgaagatctaggtaccattcatacttctctcgcgggaagcctaactaatcaatcctggagcttatcatgttaagacgttcctcgttttggctaccagatattattgttccaagctttgggacaaccaagtcaaacgcagctacagttccatcatcattctggcgagcataaaatgggctagcttcttttggataattgat

SEQ ID NO: 8959 - DNA, 468 bp, Glycine max
  unsure (1)..(468): unsure at all n locations
  Clone ID: jC-gmfl02220098e04d1
ggggntnnnaatttctgtgaatgcgcattcgtattcngtacggattattaccgctcgccagctgactaccggctggccgcccttttttttttttttttgtagcattgactataggcaatagccatccatcaagggtgatgtgaaccatcctatgaagagacagagaaattaaacaaggaggcaaccatatgcctaatgaggaattaaaagtatagaatttcaagccaggaataataaaatgagaaagaaacagaaagcagctgtaacattttaaagaccaacttagaactacccttattgatcctaaccatagctttcacatgacctcactgatagattcataatactagtgccttagaattttgcttcagttgttgagaggtgcaggatatctgttgatgcaatcaagccaagggttcctagattgcttggtaactctgcgcatggcgcgcccaaccacgctgttgc

SEQ ID NO: 8960 - DNA, 325 bp, Glycine max
  Clone ID: jC-gmfl02220098e05d1
ctgtagcattgactataggtaatagccatccatcaaggttgatatgaatcatcctatgacgagacacccaaattaaacaaggaggcaaccatatgcctaatgaggaattaaaagtatagaatttcaagccaggaataataaaatgagaaagaaacagaaagcagctgtaacattttaaagaccaacttataactacccttattgatcctaaccatagctttcacatgacctcactgatagattcataatactagtgccttagaattttgcttcagttgttgagaggtgcaagatatctgttgatgcaatcaaaccaagggttcct

SEQ ID NO: 8961 - DNA, 449 bp, Glycine max
  Clone ID: jC-gmfl02220098e06d1
aataaatgttaaattaataaattaagtcttgtaattaaagacagtgggagtacatcttagttctactattttctttgcctcagatccctcaaatcatataatccaagggaaaaggaagaacaaagcgaggaaaaggaattaaaaaaccacggaagcattcacttcgggtttgatatgtacacgacttatttatgttacaaccacaaacgaagctctttatttggttcaacacgacttgtttacttcacattttagaggacctgcaaagcgagtgagactcgatacggctttcccaggctttgctatgatttctgccttgggattttttgctacgtttttcccagactgaacaaagaaggctccattcatcaataaatcaccctctgatctccaattccagttcttccacacactttctggtgcatagtccccttttgcacttctttggc

SEQ ID NO: 8962 - DNA, 202 bp, Glycine max
  Clone ID: jC-gmfl02220098e07d1
aaaaaccggggtaagggatatgccaatatatcatatcagttcaacacactactaaaacagggaacagaaacacccaaaacgggtgagtaaaaagaatatgccacacaactgattctagcacaaaagagtaacaacagtttgatgaaaatcaggaacgcagcaggaacttggaatccttaatcagctaacaatctgcatttgt

SEQ ID NO: 8963 - DNA, 235 bp, Glycine max
  unsure (1)..(235): unsure at all n locations
  Clone ID: jC-gmfl02220098e08d1
tgtcaattantgactccgtatagcattaatgctatatcatacatactcactattcggtggccgggctttttttctttatttttattttctcttattttttacacaacaacaaaattattaaaaagaaccttttaaaattttaaaaccatanccccccttttccctaattcaaaaatatatataatatatataaataccattatattacaaatattttttattatcttctataaaa

SEQ ID NO: 8964 - DNA, 549 bp, Glycine max
  unsure (1)..(549): unsure at all n locations
  Clone ID: jC-gmfl02220098e09d1
aaatcgcgatgcgttctgtatncatttaaaaggttaataaccaacatactaatcggcggccggccttacgtcctcttttttttttttttttgattttttttttttcttcattataacacaaatgggaacttggtaccaattctcattttccaaccctattatgaattccataaggattttcatcaatccaactaatcatctatacaactacctacacattaaagctaaaatgctaactatcaccaaatcttacccaaagagaacaatcattgtcatcaaataaccataacttcacaagccacttaatttcactattttaagctataaaactaataaaaatgactcaaacaattttgcttttttttttgttctttgagtcaatgcttctcaaagccagaatctctcttctcccaaaacttgaactgcacagatctttgttctagcatcttctccacttcctccataggaacccctttggtctcaggcacataaataatgacaaataagattgccacaatggccacaattccaaacatcatgaatgtccat

SEQ ID NO: 8965 - DNA, 618 bp, Glycine max
  Clone ID: jC-gmfl02220098e10d1
gtgacttaccgggcaattttccgtactatcatgtctgtactagcacctgtttgggggggggggggggggtacaactaaaagtaagcatgaacagctaggatggcaccgggaagactataagacgagggtcctcgaaaataaaaacgacgaactacgaatacaatgaaatttgaactaaggtcttggccagtgtaaaacctaaacaagagtctaataagcggtaagggaatagaggataataaaaaaccttcaattaattgcacaacaagttattccatatactcggtcgttacagtttcctcgggatatctctctcatccttcctctcctcctgcaactcctcctcttattcaccaatcacaccaagttccactgcggtccagtttgtcacttcaaggttcactggatcgatctcgctagctcatcgtagactgtggtgagacgcgtattgaaaggtaaggtatgccttcgtcggggataatcgtcgcatgccctagaatttgcctcggatttaatggaagtcttggctagtatagtttatgggtgctactgcctcgaagactctaaacctttctattcagtctttggtttaatacggctctacttgcaagcctcaag

SEQ ID NO: 8966 - DNA, 491 bp, Glycine max
  Clone ID: jC-gmfl02220098e11d1
gtgaacaggacacaagcgatctatcgatacgaatgtaccagctcctgtctgcagtgatagacgagcgagtatgatacaagatgactaagcgcaaacggcatgggagaaagaataaaaaaaaaaggagggaaccctccatcatcatgacgcactgacgggatttccaaaggaaggatgcattccgattgctaccgtcgattactaggggtttgagacagcagcgctccaggacagctggcactcgaagaaagccattagactagcgggatgcacgcaaaggcggagttctgtataaggttatataatagatcacttccaactagaaacgcgaaacttgccccgcttgaagcacgcactgaatgtagaggaaggctaggctctgaatgcccccgggattaggaggaataatgcaacactataatgccaggaaaagaccgactaagctcggctagacaaccccagaccgagagacccggttacccaccgggggt

SEQ ID NO: 8967 - DNA, 575 bp, Glycine max
  Clone ID: jC-gmfl02220098e12d1
gatgactgtgactagcgtcgatctgtggctagcaatgtaccaggtactgtcaccgccattgtgcctgtgtgtgtgtgtgtgcgtgtgctcagccacgggtctcgggttcgtagggccacttggtgttgtaggcgtgtgggaggtgtgttgcaaagtaacccgcacctggtgccggttcgtggtggtcgtcagactgttacgaagtaaggttggtctctgacagtagttaatcagcactaattggtaagcggctggtaacaacggccgctgctgcgcgtacgtggctggccggggctattgttggttattggggtgctgcttactgtagttaacggcaagcaccggtgaaggttgaatttaggtaacaccttttcgctgcgcgggggctgccaacgaaagccaagtaagctgtggccaaaaaggcgttaccagaagttaagcggtactaaggtaggggccacgataaaggtacagaaacggcctaggtaatggttacagcaaatgcagcgggtgcaccaggtgggccagcaataatgccaacatgccatggcataacaaggacgcaggggtggtgg

SEQ ID NO: 8968 - DNA, 369 bp, Glycine max
  Clone ID: jC-gmfl02220098f01d1
caaaataaaataattctgggacaacattatgctacgataaatccacaagggaaactagtaataataacaaactttccctggtatttccgagggttccttattgatcactcttaaatcactagtcaccgcatcagcatgatttatccctccaagggaacactgtgaagaacaacggtctcaacggttagacccggcccgaatccgaatagcaccccccactttaacccttctccaggggtactcttcccttcctccttagacttcttcctcatttcatccagaatgaacaaaacacacgcgcttgacatgtttccgtactcactcagcacatgccgggtggactggagtttctccggcttgagccggagc

SEQ ID NO: 8969 - DNA, 501 bp, Glycine max
  Clone ID: jC-gmfl02220098f02d1
gagaaacatgagcagagattacaatttaatatataaaatatacgttcgtgttaaccagattataaactggactgaacaagaggggagagagagatcatcataatacatctaaaatatagtggtaattattgcttcatattaatctacacatacatataacatatataaatatatgtaaattgttgttacttttgtatcatcaggcagaaatctaggaattggcagacccacctcccttgattgaaagaggagaaccacagagagaggtgttctcagtgagttttggattaagaaacaccacaatcactgttatgtcatcatggatgtgtctcctcatcccttgctcaatcttttggaggtcagaaagtctcatttcacacttcttagctgcttctctaagtgcagctttcacaagtcttctagcaattccgttaggtggattgttgctgactatgctaacaacctcttggttggaagatgctcccataagccatcagaagc

SEQ ID NO: 8970 - DNA, 384 bp, Glycine max
  Clone ID: jC-gmfl02220098f03d1
aaaaaaggtatccccttaaaagggggaccaaactttatttggggcatacaattatctataattcagtagttaaattcatctaccttcaaattaataggggccaagagaaagagaaagaccttccagttgacgtgtaaatagagttccataatacaagaattttatgatgaaaattaaaaagccctcttgaagacaaagtactgggcgggtaaaatatacaagcgggaaaggaagtaatttttttctccatcattttgccgaacagctccgttctgtacagttatctcttcaacagcaaaacttctttttctcgaatttgcttctttcctgactatcaatggatgccagaagttcttcttgtctaatcaaagcttcatacaaagc

SEQ ID NO: 8971 - DNA, 212 bp, Glycine max
  Clone ID: jC-gmfl02220098f04d1
aaaaaaaaaaaaaccttcctttaaacccggtgaaaaattttccctttccaaacttttttttaaaaaaaaaaacccccaaaaaaccctttttttggaaaaaacccccttaaaaaacctttttttaaaggggggtaaatttgttacccccttttgccccctaaaaaaggggggttttggcccttccccccggggcccccaaacccccggggggc

SEQ ID NO: 8972 - DNA, 398 bp, Glycine max
  Clone ID: jC-gmfl02220098f07d1
cataacgagaggacacatatttgcattgtgtgtcttccttgtgccttgtttaacaatttctagggaggaatttgactacaagttcaatgccagaacagaagtgttctgtcttattccctaaggattatgaaagcacacaaagacaaaaaagattaaattaaggtacttaatttcaatctggtgggtacatatataaatacatggagtggtggtagcaactagcaagggcattaagagacttaataggtaaaatttaaagtttcaggggcattttggtcctcctctttttgtcttccagttgttgtagcaagggcaaacttgcttgttgccaaaagttccaggaggcacacacaagcacttggcacagcacttttggcagaagaataggcacggtttct

SEQ ID NO: 8973 - DNA, 354 bp, Glycine max
  Clone ID: jC-gmfl02220098f08d1
ggagcacaggtgacattttgttcatgctttcgcatcatgataaaaacatcacaggggatggtgaacatatttatttttatcaaattaagacaccgcccttacctatcccctcattacaaacattatcttcccccccaaaaacttgaagttaaacgcacccccacaaaagttttcatagatgccatccatttcaatatacattatctaaacacaaatcagcccatggcatacttctgggtccagctgcgtgcagtggcctcatacttggcccggccagttttgtacatgtgagcgatttccggaacaagtggatcatcaagatttggatcagccagcaatgagcagatagaaagc

SEQ ID NO: 8974 - DNA, 540 bp, Glycine max
  Clone ID: jC-gmfl02220098f09d1
acatcaaaatagtaatcacacttaacatattagcagaactatgaatacattgtttttcattacaaagggcataataatcgatctcgacccaactaagaacaaaaacggcgtataaaaaaagaattacaaaaatagaacagactttgttacataacaccgagaatagttgtcatacctcccagactaaaaacaaaacagaacagactggaaggtatcctcaaatccacatccatgcaattgccaacttcagcttccacagctttgaatagtttacgagatcttccatgttatacctatttgctcaatctcaaatctgaaaactgtctttgtctttgtcccagctgcaattatatcctctcccaaccagaaaaaaccatctcccttttaaaaacaatctaaaataaagcactccaaactgctccatttccttcaccacactttgagtggacatatttaatcttctccactgacttacagattccactgcagctcccatcaaatgatgcaaacacatatgtaccggcctgcgccttcactaca

SEQ ID NO: 8975 - DNA, 503 bp, Glycine max
  Clone ID: jC-gmfl02220098f10d1
gatgactgtgactagcgtcgatctatggatagcgaatgtacctaggtccctgttctgcttgccgggttgacggtaagtcatacattagggtcaccagagaggaagggagcgatggaatatggaatatacgatatagctagagagacactaatatagggtaaccaaataggtgttaaattagatgcagtgtttaaaagaaatgccaacagcaggaatggaaacatatatagagagagagaacttaaaactagagagagagagaacataacgtcaaccaagagctgtagaaggccggctggagctggtacttaaacacagccgcctgctggtgggttagcactggttgtagtggctgatgggctggttgggggtgtagcagcggtagccaacctaaatttattccagtttatgctactgctgctgctaattgatgtggtgagtggcgcttgcgcactagctgtgcccgtaaatggcttggctctggtgtagctgagagagtatat

SEQ ID NO: 8976 - DNA, 513 bp, Glycine max
  Clone ID: jC-gmfl02220098f11d1
gctacttaccaggcaattttccgtactacacgtgtgtagtaccaccttctttggggggggggggggggggggggggggggggggggggggggggggggggggagaacaatacggcgacgaagggagggactcgactcgacctttaagtagagaccatgatagggatgagagtatcagtctcagaataaataataaaggcagatagcaaatccattcagcacggaatgaaccagcccatatatgccgtgaatgctaaagagatagagagggggttaacagagggcacgggctagcgaagccgcactgacgaataaccgggcacccctggtttccacacataagtcggcgacataaaccaccacctggtcacagcagtaaaaccacacttaaccccaagtggcttataaacagcccgagcatgtaaagttaaccctttaagagaccaactacaccagagccatggaccgagccttttggggacccgaggagatcataaagctacactacgcaaag

SEQ ID NO: 8977 - DNA, 537 bp, Glycine max
  unsure (1)..(537): unsure at all n locations
  Clone ID: jC-gmfl02220098f12d1
gtacactgtgactagcgtcgatctatcgctagnaatgtaccagagtcctgtcacagcgctttgtttgtgggtgactgagggtttgtgtggaatataaggaataaacagagagtagagtagagtaatgttaaagcagcaaaaagaggcccggcgggtggtggcgccgccgcctgatggggcgccgcctacttatactgccgactggggattaacatgggcaaagaatagccccgccgcactcgcttaaaagtgagcaaaagccaaagtggtgtatttgtgtttgacatacacttgtgcctgtgcctgggtcggttaaaaaacaagatggcggtccaaaaaggcatagctactgtaactgtcgcttgccgaatgtgctgccaatacgtatgcttgaggagggagtggtgtgccccttgatgtagcatcaaagacatggtcacgggggcccgaatggcacgccgcagttggagatgtgttatatcaatcgaggtacttaacccaaacccaatacacaataatacggttagtgagccggtc

SEQ ID NO: 8978 - DNA, 508 bp, Glycine max
  Clone ID: jC-gmfl02220098g01d1
gctagcaactgtacttttcattgattaaataaacctttacatttaccttaggcctacaaaaatttactcatctcatactgggagagggtggacctgtaaatgacagcatccctagaaattcgctaaaaatcgcagaatagcagggctagatttataatcaatattgactgtctatatacagtactgctaactacttgcataaattctcaatttgtatttttttttttcttttgagaaattgaatcaaaaagatttggacagagaaaccacttggcaatcttgtgctagggcttttgctgggaagggtcatcttcccctgagcaacaaagtttgcaaggattggaggatttctgggaacaccagtgatctggaacactcaaaaaatatgtagacataaactttctgaacctctttttgtattctttaggagagattacagttggcaacacatttttggcacaacaagtgaagacttcatccatgtctcaagatgtttgtcccaagtata

SEQ ID NO: 8979 - DNA, 481 bp, Glycine max
  Clone ID: jC-gmfl02220098g02d1
agtaactgaacttcttgcttaacaagaaggagatgatatgtgaagtaataataatccaacaacaaataagatgaatctaaagaataactacacacacacaactaattacataatgatgatagccaacacaaacacacacacatatatctctatcaggagaaaaaagcatccaattctccaacgaatcaacatatttgaaagattatcatcaaaacagctgcaacaacttcaaaaggaacatgtcattgttattcttgtgtttcttcttgtcatcacaagaatcaaacttgaaaaggccaaggccaatccttcaagtcctcatcctgctgcaccttcccactcctcacaggcacaacagccccactattcccctcaacacaagcataatacttcaagaaaaatgcaagtgtcaaaaccacccactccaagcaaaagatcaaaatggtgagtccaccagccaaattgagaatcacagcaccat

SEQ ID NO: 8980 - DNA, 414 bp, Glycine max
  Clone ID: jC-gmfl02220098g03d1
gggccaaatgggcttggagcctctattcattttttcaaggcatctgggccttccaaatggcagaccaataagttgacatgcttcaaacaaatcaacttaaaggatcggtggaaaaaacactgaacataaccatatctctactttttcctttaaagaccacatacttcctgagaacaccctccctttgaaaaccagccttttccagcaccttttgagaagccacattttccacatcaactaaagcccgaagcctctccaaggggggaaactcgctgaatgcaactttaatcacttggttcacagcatgggttgcaatcccttttccccaatttttggaggcttaagcgtaaccaagttcaacaaatttgtgcctgtttctacgctggcccccacatgagaaaaaatcaatacccc

SEQ ID NO: 8981 - DNA, 512 bp, Glycine max
  unsure (1)..(512): unsure at all n locations
  Clone ID: jC-gmfl02220098g04d1
catcaattacaagcccttcagcagcaactcgaggacctgcttccacaggaggcttcttacgagcttcaactgcagcatcagcttcagccaactgtcttttcagtttttccaaaacaggactttgccgagctggatctataaagacaaccctcaatattctttccactgtcactagttccttttgttcatcaaactgcatgacagaaggccaaagaccaaatttaattatttacttttatcattcacgggtaaccttgaaaatattgcctaaagcatgaatagatgaaacaagctattatcaatataacaagctgacgctaccatgaaaatagcctatctacaaatatctgttaataaatcaatcctatccagaagttgaagttcagtttttggcatatgttaatgttgtagggcctatagctaacccaaacaaactagtatcctacatatggagtaatattatagaataccaggagtngaaaaccactagctggctaaatcatctaatcaaa

SEQ ID NO: 8982 - DNA, 195 bp, Glycine max
  Clone ID: jC-gmfl02220098g05d1
agacaagaatcacatgctttcatagataacaattagaagatagatcgtggcttaattaaaatctcaagtggagtagctttagtcttgcctaatccaacggtttcagtcatatcaataggttcatttgatggatttaagaatgaaaaagaatgaaaaagactggcaagaatcaaatgaaccatttgaaggctaaag

SEQ ID NO: 8983 - DNA, 257 bp, Glycine max
  Clone ID: jC-gmfl02220098g06d1
tttttttttttttttttttttttttttttttttttttttttttttttttttggttttttgtttttttttttttttttttttcctttttttttttttttttttttttttttttttttttccaaggaaaccccaaaaaaaaaatttgcccttttggaaaaattttttaaaaaaacccccccccgggggaaaaaaaaataaaaacccccccccccaagaaaaaaaaaaccccaaaaaaatcccccccccccccccttggg

SEQ ID NO: 8984 - DNA, 337 bp, Glycine max
  Clone ID: jC-gmfl02220098g07d1
atggtacctcgatgcgatcccatttattaatttattcccgaattgactagctgactggcgggcggccgccctttttttttttatatttttctattttcaatataaaatgaactagattcctggggtagagtgatcctttcattccatgaataccccacgcgtgtgtcaaattatataccttggggcaataaaggggaaagctggcggacgatctaaatggcttgtataatgtaactccccaactacactacatactcttagggtatcaaacaacaattcccacctgctgcctggctgttcatgaatgtctggtgaaacaatgaccctccctcacatt

SEQ ID NO: 8985 - DNA, 487 bp, Glycine max
  unsure (1)..(487): unsure at all n locations
  Clone ID: jC-gmfl02220098g08d1
cagaatacacaattgcatacctgcaatatatataggggtacaaatcaaatcaggaggcaggaatcctatcacagcaggattaaaaaacgaaaaccacactaagattgttttctactcgctaattgctaatataacgaagcacatgcgatttagatgcactttctataaataatatcatactataacaatggaaatacaaacctacaacattcggcaacagttgactaggttgttaaaaaagcacactatgtaaccaacccactattgttttttttaaatagaaaatcaatcttatcggttgatatgtcattcccaatgagacttctctgaattatgttgtctcaaacccaccacctatctgcatatgcagccacccaggatgtgatgatccctgagcatacccccttgctgcttgtgatccaaataccattccagcaatgtcaaatggctgagtaccaacatctttngaaggaaacccatcaatagt

SEQ ID NO: 8986 - DNA, 221 bp, Glycine max
  unsure (1)..(221): unsure at all n locations
  Clone ID: jC-gmfl02220098g09d1
agagtagcactatttcactancagntatacnctcttacagaattagattaccatactcactattctgactaccgaccttccggggtgggtgttttgttttttttatattttaaaacacccccactataataattagggagaatgggtattctttattcacactgtggcactgtccacccctttttgggttattatcaataatcatataataacttctagcc

SEQ ID NO: 8987 - DNA, 632 bp, Glycine max
  unsure (1)..(632): unsure at all n locations
  Clone ID: jC-gmfl02220098g11d1
gatcgaccgtgcacgagtatcgagcatatcttgtaagngaactgtacccaggtgcctgtacacccggtgtcaaatcgcggcaaatgggagtaaaccctaactggcaagtgtgtcaatcggttacgctacttgatacaaataggttacccgcgccgttaccggttgtactacagacaattacaattgtacgccggacgcctggagccaacaaatgcaaccatggcagccagcaggggtaacccggcacccttacaagctacaagcacgataaccaaattcgccaatcaaccgatgggattagaataccacaaaacctgcagcaacatattagacacaatggcagagtaacgccacaaacgcacacggggtggtacaccctcaggtaccaataacccaccccgtacagaagccatattagagtccacaggtaacacacatatcagctgcggaaccacagacacaacaagggcaggcactgctagtagcgcgggagccatagcctactgtggcgacacgtgtaccggaataatggagtgatagacacacgtagcgcctatagctaacggtggggcgcacacaactatgcactaagggcacatctgacacacgagtaaacacggtgacaacgccat

SEQ ID NO: 8988 - DNA, 291 bp, Glycine max
  Clone ID: jC-gmfl02220098h01d1
agttaattaattgagaatgaaaaccattcttcaaaaaacaagattattttccccattcctgtttacagtgcaaacattttattaaaaaaatgctcctagcataataaattcccattagctctaaaacctttttttttttttctcaacaacagagctggtaattaagtaaggtaagaaaattaatgtgatggatggataggaagctatgcgcatgcagggggcattagcaagcctccaaagagaggtcgagtattgacacatcttgaggtggttggggtgagcccaatcttg

SEQ ID NO: 8989 - DNA, 357 bp, Glycine max
  Clone ID: jC-gmfl02220098h04d1
caaaaaaaaaaaaaaaaaattgttgcttgcttgcccccccagtgttttttttcaacgcggggggttaatattagtaataatagggcccttttttttttttattctccccctttgtttttttaacacaaaaatttacatttggggatggtaaacaatgccccccttgagggggaggcatttgcccttaaacgggaacagtttggtttttttttcagggaggggcttttcgcccccgggagactttttaaaagcctccccccttgcttttttgtccaaaaggacaaagctaaacctttaccaagcttccaccaggttttggttccccaccaactccaaagcttcttttttttttttaaa

SEQ ID NO: 8990 - DNA, 441 bp, Glycine max
  Clone ID: jC-gmfl02220098h05d1
agtctcataaattgcataatttgtaaaataataattaattccatcacatgaacatatattacgcgtacaagaattgaggagtttgactaagggcacacacggaaagaagtagagaagatacgttgttacacgttttactacagtgagagtgatggaagaggccaaagagagactctcatgctaacataattgaccacctaacatattattgctacaaattgaggcaaacacgttacttaaaagaaccctaaacaccaaacttcacgtactgttcttgcgttaagatgaggccccacttggcaaagtaattaagtaataatcgcacttttagcttaaatattttggggcctcattttttttctttctctttggactcgattcattattgctttattctcacacactgctagctatctcaatcacaggcacatgaccattttt

SEQ ID NO: 8991 - DNA, 255 bp, Glycine max
  Clone ID: jC-gmfl02220098h06d1
aaacccttagtaaaggttatagattacatttcaaccacaaacatgttctcccttgggggtcaacaagaaatcaaatcacacaacaatttctttccagcatttaataataacgctaaaatcactcactcatatacatatatattataagttataaatatacaaccacaaaataaattcgagtcactgaatgactttatctacttcattaagcctcacatagaagatggaaaaggcccaaaacatgaaaatagtctt

SEQ ID NO: 8992 - DNA, 403 bp, Glycine max
  unsure (1)..(403): unsure at all n locations
  Clone ID: jC-gmfl02220098h07d1
agaacatgtctgttcctcgtatcncaataaaaattaaaaggaaaaactaaaaaaaggacgaccttttttttccttttttttttaattttacaatttctgaataaatataattccaattataggggccaatttatactttatacacacaagccacccattcccatgttaaattgttacacaagcatacaacaatgtcatgatttcctaagtccacaaaatgaaagtttaaagccaattaccttcaatatgcaatttagaattttagcccaaaactttaacttaattattggctttaccataacttcttggaaaaaggataacgtccctaacatttccaaggcccattgcaaaaagaccatcattgcaaaccttataatgaacccaaagttcttcactgttcctt

SEQ ID NO: 8993 - DNA, 548 bp, Glycine max
  unsure (1)..(548): unsure at all n locations
  Clone ID: jC-gmfl02220098h08d1
aaaatcaaatagttgagcattgagtacaagattaggatgtatggcagatgaagcttgtcaacaatcgccttcattagcgtaagcacccaccacctgctaatgactgaggtacaatatagacaacagcaaacctaaccatgccgccaaatcatgaaggagaaaaagaaaaagaaagccaacttttcaactgtaatcaagaacgaacgagagtcgggccacagagctatatgaactagcaaccatagacaattagtggtttctacatactacagatactttcgtgcaagggctcggactttagtatcaaaatgtgatgacgtgatccgggagccaggcaagcacaggggattaaggagagtctctatgtaaagctcatgcacctctnggaagaagctcttaataccatcatcattacgggagtcatgtagcaacataagtcgggtatgaccagctgtaacatacactgacacccatgttcattaaacctgtctactgatttcaagtacattgcactagtagtccatgcaaggtcctgaacatatcaagag

SEQ ID NO: 8994 - DNA, 252 bp, Glycine max
  Clone ID: jC-gmfl02220098h09d1
gtagcattgactataggtaatagccatccatcaaggttgatatcaatcatcctatgaagagacagagaaattaaacaaggaggcaaccatatgcctaatgaggaattaaaagtatagaatttcaagccaggaataataaaatgagaaagaaacagaaagcagctgtaacattttaaagaccaacttagaactacccttattgatcctaaccatagctttcacatgacctcactgatagattcataatactag

SEQ ID NO: 8995 - DNA, 419 bp, Glycine max
  Clone ID: jC-gmfl02220098h10d1
gcatcgcaggtccgctctattctgcacgtacaagtccgccctgtcacttcagtcctgtcacggggaagagacagagatgctataacaccacaaatggccaccaaaggccaaaaaagtagattgaagtaccataataagcgacttgaaagattgagaggagcgatgaacaagaataccagagagagatactaagaaacaaagaggtggatagaagccggacttgagagtaagtcgccccgcaattgccgcggcaatttagcacaaagaaaagttgagacaaatacggtgttgtataaacaccacgggcggtaagtcagtttgcaaaggcatacaccaaaccgtgcagcacgcgcaagcctatgcctactcacgtgtagccaccgcgtttgaccacaccctgcagggctccggtgcaattg

SEQ ID NO: 8996 - DNA, 497 bp, Glycine max
  Clone ID: jC-gmfl02220098h11d1
gtgactccccgaggagtttgccgtgctacatgtgtgtagtacctccttcttggggggggggggggggggggggggggggggggggggaacaatataatggagggcagtgtggaaaggagggcaactagaggaggatggctaaaagggttaactagatagaacaaaaaataaaataagaaggtagtaatggggtggggtggggaaggggttacgcacaatgtcaaagttcaatttataatgagtgcggaccttaagccgtactacaacaattagggtaatgtgcaagtggaacggttggtggcgatttttatggagggaagtcgggtgggctgccagggattgtgggaggttaagtacgctcaacgccaagttagaagaaaagaacccgtgctaataggcggtttttcagtagcttacattagaggtttgccatattgaccttcaatcgcaactttaaaatatacgttaatccaaggttaagtttcggagaatacttt

SEQ ID NO: 8997 - DNA, 521 bp, Glycine max
  unsure (1)..(521): unsure at all n locations
  Clone ID: jC-gmfl02220098h12d1
ctgacaggactacgtgatctatggctagcaatgtgccagagtcctgtcacttgtcgggttttttgcggggtgcaggaatgtgggatatcagtggagtgatcaagaagaaaaaaggaaggttgtaaggcaggtgggcgcctccgcggtcagtccgattgctagtgtggtggggttaccgggccacaagcacggtgcgctaaccattacggcgcgctttggtgcgttcgcttaaataacgacccggtgctactaggttaagcaggcccctacgcaaaagcaatcggacatctagttcaacgcaaggggccccgtgtaagcctcttaacctgaaatttccggggtgggtggcttagagaaatatctcaaacgctaacatgcgctaggcgatggggaatgtatttgttaagcatacgccaacgattctgcataagggtaagcaaaaacagcaacaggagcggagggtgacgcgaaggcaactgcggcnacgcaacacgccactacagccgggtagaagtaaaagc

SEQ ID NO: 8998 - DNA, 195 bp, Glycine max
  Clone ID: jC-gmfl02220099a01a1
gatgactaggactagcgtgatctatcgctagtaatgtgccagagtcctgtcacactgtgctgcggtttcagatgggccagaggcttggctagtttggtcgtaggagccccgtgtgtgcgtggctactccgacgcagtaaatgtaagggccggcacattgggtgaaaagcactctggcggtggggctagggtctat

SEQ ID NO: 8999 - DNA, 566 bp, Glycine max
  Clone ID: jC-gmfl02220099a01d1
caaatagaaaattgccagtgagtctgacaaggaaacagcagcgcagcggagtgagcaatgccggagcttccagaggtagaggcggcgaggagggccgttgagtataactgcgtcggaaagaggataacaaagtgcgttgtcgccgatgattctaaggtgatccatggtgtctctccctccgacttccaagcttccgtcctcggcaagctcatcgtcgctgctcaccgtaagggaaagaacatgtggcttcaacttgattctcctccttttccttccttccaattcggtatggctggtgctatatacattaaaggagctgcagtaacaaactataaaaggtctgctgtaaaagacgaggatgagtggccctcaaaatattcaaaaattttcattgagttagatgatggtttggagttgtctttcactgacaaaaggcgatttgctaaagttcgtctgctcaaagatccgacatcagtgccttccatatccgagcttggtcctgatgcacttttcgaacctatgacacttgagaagtttacggagtctttgcacaagaagaaaactga

SEQ ID NO: 9000 - DNA, 500 bp, Glycine max
  Clone ID: jC-gmfl02220099a03a1
ctactactcgttgtaccagagtcctgttcatggtgtggggtggccagcggcggtgtgtaatcatgttgttgctcaagcacgaggaggtaagaggggccggcccggcaagtttccccggcaactcggctacatagtatcctgaggtgaacactcgtgtctgtttgtaggtagcgttcagtgcgatcatccaccatcccgacggctcgaatgcttcggaatttggtcttctatccgcccgcgccactgggcttggtgcaacctccgactttggtacatggctgtggttgtctgccgccgccggttggtgacgggtggtatgtggggtaggatggggacttgctagacggggaaagatcaaataggaaatactcatgggcgcatgacggaacagtattcgcgtggtggtggtggtggtggtggtggtggtgatgatgatgatgatgatgggggtgttatagaagcagctgtacaagtaacaaccggtttatgcgtcgggttat

SEQ ID NO: 9001 - DNA, 538 bp, Glycine max
  unsure (1)..(538): unsure at all n locations
  Clone ID: jC-gmfl02220099a03d1
aacacggatgacaaccattccagaaagcaacaaaaatggaaattacattttttttttcagacacatggggggatgtgtccaacaagagaacaacaaatgcaacaaaaatcaaaaacagagaaaaacaacttgtagctttatttacacacagggagaccaaagaaaaagcggttcagaaaactccaccagccatggaaggaatgtcatcaaagcaccaaaggttcatgaggtttccaccatcctgagttgtgtcaccagatagcaaggattccaatgaagtatcgccccagctcccttcaagataaggcatctgaaagaacttcaactcagattcaatatccacaagctcctcagagagtgtctttgcagaatcatcttcaatagataccacattctgagagttaggctgctgctggttggcattttgcacaaaatgagattcacaatccaaaggagcagaaagcatggatgagatctcaggagcataatcaanatgaatactcccttgatctgaactgaagtaaagggttgcatcatc

SEQ ID NO: 9002 - DNA, 157 bp, Glycine max
  Clone ID: jC-gmfl02220099a04d1
tcctatcctactccttccactcttatatactgattccttactatagtattaaatcctgacttattctctataacttcatttcttcatacactaaaccttattctaagatatcttacttctataatatctcagcctgttgtgtgagacggtccggaat

SEQ ID NO: 9003 - DNA, 589 bp, Glycine max
  unsure (1)..(589): unsure at all n locations
  Clone ID: jC-gmfl02220099a06a1
gatcacagtgactagcgtcgatctatggcgtggacaatgtacccaggtacctgtacacccggtgtcaaatcgcgcaaatgtagaaaccctaactggcaagtgtgtcaatcggttaagctacttaatacaaataggttacccgcgccgttaccggttgtactacagacaattacaattgtacgccggacgcctggacccaacaaatgcaaccatggcagccagcaggggtaacccggcacccttacaagctacaagcacgataaccaaattcgccaatcaaccgatggtattagaataccacaaaacctgcagcaacatattagacacaatggcagagtaacgccacaaacgcacacggggtggtacaccctcaggtaccaataacccaccccgtacagaagccatattagagtccacaggtaacacacatatcagctgcggaaccacagacacaacaagggcaggcactgctagtancgcgggggccatagcctactgtggcgacacgtgtaaccgtaataatggaataatagacacacgtagcgcctatagctaacggtggggcgcacaaacactatgcactaatggt

SEQ ID NO: 9004 - DNA, 542 bp, Glycine max
  unsure (1)..(542): unsure at all n locations
  Clone ID: jC-gmfl02220099a06d1
ggcactgattcttcattgaatcatggaatgacacccaacataggcgactcgggtttcctgcattgtccggaagatgcaggacaaggaaacccactgaacaaaacctttgtgaaggtttataagtcagggtcctttggaaggtcattggatatcaccaaattcagcagctaccatgagctgcgtggtgaactcgctcgaatgtttggccttgaaggcgagttggaggaccctgtgagatcaggctggcagcttgtatttgtagaccgagagaatgatgttcttctccttggtgatggcccctggccggaattcgtaaatagtgtatggtgcataaagatactttctcctaggaagtgcagcaaatgggcaacaatggccttgagctgttgaactcggttccaaatcaaaggctctctaatggcatctgtgatgactatgtgagccgtcaagacccaagaaatttaagcactgggataacaactggggngtctttagactactaatagtctgtacttcttctatcatgtttaatattattaccc

SEQ ID NO: 9005 - DNA, 501 bp, Glycine max
  Clone ID: jC-gmfl02220099a07a1
agtacactgtgactactgtcgatctatggatagccaatgtacccaagtacctgtacactgggtaggattaattgtataatataattttgggtgtggtgtggttaaggataaagtttggtggtgtgtgtgtgtgtgggaggtgtagggtataatgtagtaagttttgtgtgtgtgtgtttaaatctaaaattgaactagcctgtacaacctttacaaaaatcatatgcacgggaaccgttttcaatttagtagtaattttgctattattattattattattattattgtcagggttcaattggtgacaggtggtcagctaattatttttcttatggtagtctctgttttaaactcagtttgtttgtgtcatcaccaagtgtacatccattaaatcatcgtggtgcactttaaatctcttcgcaattctgctgttcctgcttcctcctctcgcccatgtatcccaggttccgcttctgctccgcattggggtgctctacacta

SEQ ID NO: 9006 - DNA, 564 bp, Glycine max
  unsure (1)..(564): unsure at all n locations
  Clone ID: jC-gmfl02220099a07d1
cggctcgagtttgaatcaagggtgagggccttccatggcttccgcttgtgcttcctctgcaattacagctgttgccatctctacgccgagttccgggcagaagaatggatcaggaggttgttttcttagtggaaggaaattgagggtgaaaaaggagagagcagcaattggaggacgatcgatgggcactacagtgtgcgcagttgctgagcctgacagacctctatggttcccaggcagcacccctcctccatggcttgatggcactctacctggagacttcggctttgaccctcttggtcttggatctgacccggagagtctgagatggaatgttcaggcagagctagtgcactgcagatgggcaatgttgggtgctgctggcattttcattccagaattcctaacaaagattggtgtcttgaacactccttcatggtactcagctggagagctggaatacttcacggacactactaccctcttcatagttgagctctttntcattggctgggccgagggtagaagatgggctgacataatcaagccaggctgtgtcaacac

SEQ ID NO: 9007 - DNA, 492 bp, Glycine max
  Clone ID: jC-gmfl02220099a08a1
gatcacagtgactagcgtcgatctgtggctagcaatgtaccagagtcctgtcacactgcgcggccgtttaacaacacccgtaggataggctcgtaagtttgttggaactacatggtgtcgcggctgtggcaccacagtaaatgtaacgggagtcagattgtggtaaacgggccctagccgtctggttacattatataccacaactacaacggtgggccatcttgtaaactagaaggagcggaaggccagccaaagctgccaaggtgagggccggcttagtatggagaaatgggcgacgccgggtgcaggggcagaggaagccaggtggtcccgacgcacggggggggtggttgaaccgcccttaattggggcgggtacccaacatgcagtcggcagggtaaaggggcgggagcacgggagtgaaaaaaaaaaaaaaaaaaaccctcgctcttcatgacgcactgtcgtcatttcccaaggaaggttccattc

SEQ ID NO: 9008 - DNA, 560 bp, Glycine max
  Clone ID: jC-gmfl02220099a09a1
gtcacaggactacgtgatctgtggctagcaatgtaccagagtcctgtcactacaaataaaacgcctacgaggaccgcctagtattcaacgctacccactgcttaatactcgtcacagtaataagtgtctgtctgggctgcgacaccaataaaataaaacacacaaggtacggtgccacgggcgcacccgcaggacgctaaactactaacgccggctgccacgcaaggatgatagaataggccaactaaaacagccgcacaggaaaaagcacgagaaactcaaccgggcccacacccaagtttaacacggctgacaaggtaacttaataggaccgctaccacctagtagtcagcgcttgcccctgcttaatactagtcacagtcattagtgtctgtctgggctgcgacaccaataaaataaaacacacaaggtccggtgccacggccgcaaccgcaggacgctaaacaaataacgccggctgccaagcaaggatgatagaataggcgcactaaaacagccgcgcaggaaaaaacacgagcaactcaacaggcccgcaaccc

SEQ ID NO: 9009 - DNA, 493 bp, Glycine max
  Clone ID: jC-gmfl02220099a10a1
gatgacagtgactagcgtcgatctatcaggtagccaactgtacccaggtacctgtacacccgacgcaatgatggcaggagcgagtagcgcaacaagacggagcgagtagaagcagtagcaagaagagaatacgggcgtcgtacgatcacggaggcgagacgaaggaagaactgaccgggaaacggcgggttgggccgctagccagggagtaggaagcacagtaagcgcaacgggcgggaaaaaaaaaaaaaaaaccctccttcttcatgacgcactgtcgtcatttcccaaggaaggttccattccgattgctacctcgattactgggtttgagacgcacgtcgaggacactggcctcgaagtagccgtagactgcgggttgcgcgcaaaggcggagttctgtataaggttatataatagatcacttccaactagaaacgcgaaacttgccccgcttgaagcacgcactgaatgtataggaaggctcggctct

SEQ ID NO: 9010 - DNA, 162 bp, Glycine max
  Clone ID: jC-gmfl02220099a10d1
acctttcgcaaattactgcatactcataatatatgttaatgagtatttctaattagattttcctaacattaatatttttctgctatattaatatagtatactataaatattattctctacaatataacaaattagtatcgactgtatcagacggtacggaaa

SEQ ID NO: 9011 - DNA, 470 bp, Glycine max
  unsure (1)..(470): unsure at all n locations
  Clone ID: jC-gmfl02220099a11a1
ggcactgattcttcattgaatcatggaatgacacccaacataggcgactcgggtttgctgcattgtccggaagatgcaggacaaggaaacccactgaacaaaacctttgtgaaggtttataagtcagggtcctttggaaggtcattggatatcaccaaattcagcagctaccatgagctgcgtggtgaactcgctcgaatgtttggccttgaaggcgagttggaggaccctgtgagatcaggctggcagcttgtatttgtagaccgagagaatgatgttcttctccttggtgatggcccctggccggaattcgtaaatagtgtatggtgcataaagatactttctcctcaggaagtgcagcaaatgggcaacaatggccttgagctgttgaactcggttccaaatcaaaggctctctaatggcatctgtgatgactatgtgagccgtcaagaccccnagaaattaagcac

SEQ ID NO: 9012 - DNA, 386 bp, Glycine max
  Clone ID: jC-gmfl02220099a11d1
gctcagcaaaaatagataatatattaattgagtaccagaggtactaaatatacaaacggggcattataagaccacagaccaatggttccattgtcagactaatgtagtcttgatggaaaccagagcctagattacatgtgaccagtattttgcacctatacattgtactgtcgacaactaatacacaaaccctgatctaagattgctggaccaatgattgtagctgatgctgaaatccttctctaagtgccgaagccacgtccacaataaaaaagatgcatcttccatgattttattagcatcaaatgattagaccaattctctaagctactgcaatactaagcatgaccttccaacataattagaccaatgggagttaatttagc

SEQ ID NO: 9013 - DNA, 585 bp, Glycine max
  Clone ID: jC-gmfl02220099a12a1
cggctcgagtttgaatcaagggtgagggccttccatggcttccgcttgtgcttcctgtgcaattacagctgttgccatctctacgccgagttccgggcagaagaatggatcaggaggttgttttcttagtggaaggaaattgagggtgaaaaaggagagagcagcaattggaggacgatcgatgggcactacagtgtgcgcagttgctgagcctgacagacctctatggttcccaggcagcacccctcctccatggcttgatggcactctacctggagacttcggctttgaccctcttggtcttggatctgacccggagagtctgagatggaatgttcaggcagagctagtgcactgcagatgggcaatgttgggtgctgctggcattttcattccagaattcctaacaaagattggtgtcttgaacactccttcatggtactcagctggagagctggaatacttcacggacactactaccctcttcattagtgagctctttttcattggctgggccgagggtagaagatgggctgacataatcaagccaggctgtgtcaacactgaccccatcttttccacaac

SEQ ID NO: 9014 - DNA, 545 bp, Glycine max
  Clone ID: jC-gmfl02220099a12d1
ccagcaaacatcttatattttttattaaatcgtagtcaattaacaaccaaacataaaccattttttatttttcagatccataagagaaaaaatagatacccaacccaaggagagaatgcaaccttgaaaagcagcaaatggctcgtataacttcatattcaaggctcgaagaccatgctctctgcttctcgcttcacggattcaaagagcacagatgataaataacgctctccaaagcttgggaagaccgcaataatgagttttccagcattttctggcctctttgctatcttaattgcagcagctgcagctgcaccagatgatattcccaccagcaaaccttctttcaaagcaagaagtttagcagttccaatggcttcttcacttgaaatttgaacaacttcatcaagtaaatcgacatccagaacaccagggatgaagccagcaccaattccttggatcttatgagggccaggttttcctccagacagaattggactttctactggttcaatgccatatagcttaatataaggggtctgatc

SEQ ID NO: 9015 - DNA, 509 bp, Glycine max
  Clone ID: jC-gmfl02220099b01a1
gatcacagtgactagctgtcgatctgtggctagcaatgtaccaaggtcctgtcacctccggcacaacggcactcaggcaaaaacagcgcatgcaaggaaggcctaaaatgttaggccgagagtgtaattctagtcgccagcctgcgcggcttaaacggctgctcaactgacaaagcagccaattggctgttacgcgtaaacataccagacccgagactagcaggcgacagctgcaccacaaaccatgtagtatattcccgcaaacgcgttgtaggcacttgatgacgccaaatatgcctagaccgggcctaggtagcctactgctgaacccggagaaatggaggagaattagcttggtggtcagcacgtgtcaaacaacaattaggtggtcactggggccactgcacggacgttgtatgcagtttcttaaaacgagcaaaccactgcggtacaagctacaacacaggtcccagaacatgttaaaggtggagaggtggtactaagggcaa

SEQ ID NO: 9016 - DNA, 529 bp, Glycine max
  Clone ID: jC-gmfl02220099b01d1
tttttctttcactatccctttcgaactctctccgattagggcacacgcgatgcctctcttcctctccgacgaggagttcgcgtggtgctccggtgacggctctgccgtggccgcgaaggccgacgccttcatccgcggcctcttcaacgagctcgacaccgtccgctccaaggcccacgccgccgacatcaacgccgagcagaactgccttctcatcgagcagaagtatctctccctcaccgccgagttctccaaactcgagtcgaacatcgccgaacttcaatcctctctcgatcagcgcctccgcgaaatcgacgaggtgcaatcgcagaaccaccgaatcaaattggaagcggttgagaaagatagggagatagagcggttgaggacggaggtggcggagttgcacaagtcgaagaggcagttgcttgagttgaacgagcagaaggatttggagctaagtgagaagaatgcaaccatgaagagttatcttgataagactgttcgtttaagtgaaaatgctgctcat

SEQ ID NO: 9017 - DNA, 638 bp, Glycine max
  Clone ID: jC-gmfl02220099b02a1
gataacagagactagtgtcgatctatgggtagcgaatgtaccagagtctgtttggcagggggaggtggggggagacataaaggatgacggaggatccgaaagccgtatagatgataaacccaaagaagagtctaagtctgcaataagcggagggaataaaaccagtcattatagagaaaaataatttaatgttaagtagtagtattatcgttactaaaagataggtaaaactgagtgaaaaagggcaccaatttatacgcctctaggacaaattagcattagacaagggagcacacaaagaggagccctattcgcttgtgttaataagttttaaaatcggctggatctggtactaaatttaactgtacaaactggggccgcacttgtaatcgaagtactcaagaagctagtggtagatcagctagagggcgtaatagcatcctgcgatatatccgtgcatgaatagcttgtgcagtaaccgatgcaaaactagcggatttagctataactgcggcagatgcaactgcagctaacgccgcacaatggagtgttgaaagtgaataagagatacgtcttgaaaggtgtgaacaggtacagttactgcattggggtattaccaacgtgctagtagcagcaga

SEQ ID NO: 9018 - DNA, 562 bp, Glycine max
  Clone ID: jC-gmfl02220099b03a1
catgactgagactagtgtcgatctatcgctagcaatgtaccagagtcctgtcacacaaaggccatacatacatataatgctcatggacggtagtttggtgtaacttattcaacttgtatgggggcaaaggatggctagacagacagaagtagcctgagcagcaaatcgctgctggttgtgctctggtctgtgtggaggcttgtagttgttattggtattacaaattggtagcttgtaccgcaaaacaacaacaggccccccgcggtgataaacccaagcaagagctgaaaggcaagttaaaggggcggccagcgcggcaaccgctaggcccaagatcgcacgcctgccaagtatacccgtagtacgataggcgtatgcagcataaacaaccattgcaggtgcaatggcacaaatataggttacagctatagcgtagtagagtgatgttaggttattttcttgagcgtattctacaaacaaggaacaaacttaaaaagggccactgctggggcatgctgcctaggccggtgcagtagcggcagtgtaaactgctactgctgct

SEQ ID NO: 9019 - DNA, 614 bp, Glycine max
  Clone ID: jC-gmfl02220099b03d1
aactgtcctcctcccccccggtaccccccactcccccacacccccaacccaaaccaacaacctcccccccggggcacccaaagggggaaacctctcaaaaaaagggccaacccccaccggccgccccccgacccccccccccccaaaaccccaaaaggaaatgctcccgccaacaaaacaccgcggcgaaagagggggcctccggccccgcaggacaaaaagcctccaaaagagggccccccccccccaaaacacctagggggaggggaggcaccccggggaaaaaaaacaccccccggggggaaaaaacccacaaagggggccccaaaaaaacccccacaaaaagggcccccgggaccccccgggggggggcaccgggggcccccccaaaaacgggggggggccagaagagaccccgggaaacaccggcccccactggggggcgggggcccccccgaaaaaaaaacgcccccccggggggccctcaaccccggggcccccaccccccccgcgagaaaggggcggccccccccccccgggccgcgcgaaacaaaaccaccggggggccatccacaccggcccccccccggagagaaaacaccggtccccccccc

SEQ ID NO: 9020 - DNA, 549 bp, Glycine max
  Clone ID: jC-gmfl02220099b04a1
atgactaggactagcgtcgatctatggctagccaatgtacccaagtacctgtacactgtacacttgcaagtacctgtacactaaggagagacagagatgctataacacacagtttttaacagagccaaaaaagtagatagaagtaccaaaataggtgacttgaaggattgagaggagcgataaagaagaaaaccacagagggatactaagaaaaaaagaggtggatagtagcgtacttgagagtaagtcgccccgcaattgccgcggcaatttagcacaaagaaaaattgacacaaatacgatttgtataaacaccacgggcgataaggcagtttgcaaaggcatacaccaaacctgcagcaacgcaagcctatgcctactcacgggccgccgcccgcgtttaaccacacctgcagggctccggtgcaattgaaccttaagcaaaccataagaacaacccaaagtccgctaacaaagccgcaagcaactgtgcacatcacgttttaagatgcagcccaataaaaagaggcagagccgtaagtaaagttc

SEQ ID NO: 9021 - DNA, 546 bp, Glycine max
  unsure (1)..(546): unsure at all n locations
  Clone ID: jC-gmfl02220099b04d1
ccagcaaacatcttatattttttattaaatcgtagtcaattaacaaccaaacataaaccattttttatttttcagatccataagagaaaaaatagatacacaacccaaggagagaatgcaacttgaaaagcagcaaatggctcgtataacttcatattcaaggctcgaagaccatgctctctgcttctcgcttcacggattcaaagagcacagatgataaataacgctctccaaagcttgggaagaccgcaataatgagttttccagcattttctggcctctttgctatcttaattgcagcagctgcagctgcaccagatgatattcccaccagcaaaccttctttcaaagcaagaagtttagcagtttcaatggcttcttcacttgaaatttgaacaacttcatcaagtaaatcgacatccagaacaccagggatgaagccagcaccaattccttggatcttatgagggccaggttntcctccagacagtattggactttctactggttcaatgccatatagctntatatcagggttctgatctt

SEQ ID NO: 9022 - DNA, 552 bp, Glycine max
  unsure (1)..(552): unsure at all n locations
  Clone ID: jC-gmfl02220099b05a1
gatgacaggacgacttgatcttcgctgcatgtccaggtccgtcaccggtgtaaatcgcgcaaatgggaaaccctaactggcaagtgtgtcaatcggttaagctacttagtacaaataggttacccgcgccgttaccggttgtactacagacaattacaattgtacgccggacgcctggacccaacaaatgcaagcatggcagccagcaggtgcaacccggcacccttacaggctacaagcacgataaccaaattcgccaatcaaccgatgggattagaataccacaaaacctgcagcaacatattagacacaatggcagagtagcgccacaaacgcacacggggtggtacaccctcaggtagcaataacccaccccgtacagaagccatattagagagcacaggtaacacacatatcagctgcggcaccacagacacaacaacggcaggcactgctagtaacgcggtggccatagcctactatggcgacacgtgtagccgtcataatggatagtagacacacgtagcgcctatagctaacngtggggcgcac

SEQ ID NO: 9023 - DNA, 518 bp, Glycine max
  unsure (1)..(518): unsure at all n locations
  Clone ID: jC-gmfl02220099b06a1
cgtgactgagagtagcnatcgatctatggcgtggacaatgtgcccaggtacctgtacactggcagtggcagccttactactactattagtgcaagcatggcactgcggatagatacttgtcttttccgcttacggtgcgcacgacagtgccgtccgttaacatttgaatgttagtaaagtgccaacactgtggggtgctgcacagggtgggcgtgttttccgaggtgcagttactacttccggtgcgcggggttttgatgtataaagtactgcggtgtaagtacgggtaatactgttaaacgagcggagtattgagaaagatgaagggctgcgtgttgaacaagcggcactagttgtgggggtacctggtggggccgcgtgtgttggtgccaaccagcgtattaacaacgcggcaattaagtgtgttaagcacgctgtcgggagtgctagggctgtactcacacaaatactactaatactgctctacgcggacggtaacacattggccgcttaatacg

SEQ ID NO: 9024 - DNA, 569 bp, Glycine max
  Clone ID: jC-gmfl02220099b06d1
caaatagaaaattgccagtgagtctgacaaggaaacagcagcgcagcggagtgagcaatgccggagcttccagaggtagaggcggcgaggagggccgttgagtataactgcgtcggaaagaggataacaaagtgcgttgtcgccgatgattctaaggtgatccatggtgtctctccctccgacttccaagcttccgtcctcggcaagctcatcgtcgctgctcaccgtaagggaaagaacatgtggcttcaacttgattctcctccttttccttccttccaattcggtatggctggtgctatatacattaaaggagctgcagtaacaaactataaaaggtctgctgtaaaagacgaggatgagtggccctcaaaatattcaaaaattttcattgagttagatgatggtttggagttgtctttcactgacaaaaggcgatttgctaaagttcgtctgctcaaagatccgacatcagtgccttccatatccgagcttggtcctgatgcacttttcgaacctatgacacttgagaagtttacggagtctttgcacaagaagaaaactgaaat

SEQ ID NO: 9025 - DNA, 549 bp, Glycine max
  Clone ID: jC-gmfl02220099b07a1
gatgcacagagagtagagattgatcctatctatcacgtctagtactaccacctgcttggggggggggggggggcggaaaagcaaatgctgcaaactaggtgtaacaagtaaaagctctatatatatatatactaaatgggtgagtgtagtaagctagctaggggataaccataatatgagagaggagctcggctgcataagccgctaggagttagccgacgacgagatcataggctgactgactaggtaggtgtcactgcatgcgaaggttttgtcacttcaaggttcactggatcgatctcgctagctcatcggtagatctgtggtgagacgcgtattgaaaggtaaggtatgccttcgtcggggataatcgtcacatgcccaaaatttgcctcggatttaatggaagtcttggctactatagtttttgggtcttactgcctcgaagactcaacacctttctattcagtctttggtttaatacggctctacttgcaagcctcaagcccatctctttgcgactcctctaggaactcttctcccgcgccg

SEQ ID NO: 9026 - DNA, 383 bp, Glycine max
  Clone ID: jC-gmfl02220099b07d1
gcgatgagttcgggtagcagccacagcagtgagaaggagaaggagaaacagagggtgagtcgcacgtcgctgatactgtggcacgcgcaccaaaacgacgccggatcggtgcgcaagctcctccaggaggatccctcgctcgtcaaggccagggactacgacaaccgaacgccgctccatgtggcgtccctccacggctggatcgacgtcgccacgtgcctcatcgagttcggcgccgacgtcaacgcgcaagatcgctggaaaaacacccctctggcggatgcggaaggagctaagaagagtaatgtgatcgagctcttgcaatcgcatggaggattgtcttttgggcaaaatggaagccatttcgagccgaagccggtagc

SEQ ID NO: 9027 - DNA, 500 bp, Glycine max
  unsure (1)..(500): unsure at all n locations
  Clone ID: jC-gmfl02220099b08a1
gatcacagtgactagcgtcgatctgtgggtagnaatgtgccagagtcctgtcaccgcaccaaagagacaaagcctcgtcgccgctccgctgtccactggttacaggttcctcagccaacatactctatgctctaattcgctggtaggccttcttccacgacccgcgggcgtccgccttcctattgttggtgcctctgttgtggtcgtattcaactctgtgggcttaggtatagctggcactagggtggttcagatgtcgaggaaccaaacgcggtaaatgcaaccgctattgctcctgggcccattagaggtgtaactaagtaaagttaataattggagggggcgcgtgccgcggtggccttggcggtttcacatacccaacggtcgagtgcagcagcggcaacattaaatgcaatactggtggaaaaatagcccccaaaggtggaaacttccgccgctgactgatgtcgttcggcggaacataataaggagcggcctgc

SEQ ID NO: 9028 - DNA, 512 bp, Glycine max
  unsure (1)..(512): unsure at all n locations
  Clone ID: jC-gmfl02220099b09a1
gatcacagtgactagcgtcgatctgtggctagnaatgtgccagagtcctgtcacaacaacccaaccggcaaccgccgcaacaaaatattattcgtatttgaattggtcggaaggagatattattattattattgggccgggcgacacagtcaaagaagtaataataaccagggaaaaaattagtcctaattcgcagggcacggagaatagtaagcaggggtaatgcgttgtaattataaggcaaagtatagtccaggctagggcggtcgaagggagtatcagaggaagtaatttagttaaattcggagctaatgcgaattcagtaataaccgaacacacccccaaagcacccgagggaaaacacttacgccacttagtaaccataccaatactagagcccggctcaaaggtgtattagacccgctaggttataatttgcagcgacaaattcgcagaagtaaacctatagcttatcatcagtactataggcaggtaaacaatcgctacacacg

SEQ ID NO: 9029 - DNA, 545 bp, Glycine max
  unsure (1)..(545): unsure at all n locations
  Clone ID: jC-gmfl02220099b10a1
gatcactgtgactagcgtcgatctatgggtagcaatgtgccaggtcctgtcaccgttccgtgggctcgggcctatacctgctctacgcgggcaatcggcaaccacactcgacacctacgccggggtgggggggcagggtgtgggcgacaagtcaagtcacggaagggggcagtcgcgcacgcgttcagtggcaaagttataataataagccgcacaccaggctgtaataactgtcgtgtgtctgtttgtgtccgtcttccaaaagcctactataagtaatgttcttcttgtaatagttatcacgattacccgctgcaaggcagcactaaatatccacgtaatcggttcacacctcgcctgcgggttgtgcggcaacaccttacaaaccgtagtaaccattggggtttgaagcaaaagcacggccgccggaacacgtaaaggggacttcctccatcaacgggcccaatgngtaaaactccttggaacccaacacgctataggcggaacatgcattancgggcacatagactgcccaacagctggcc

SEQ ID NO: 9030 - DNA, 432 bp, Glycine max
  unsure (1)..(432): unsure at all n locations
  Clone ID: jC-gmfl02220099b11a1
caaatagaaaattgccagtgagtctgacaaggaaacagcagcgcagcggagtgagcaatgccggagcttccagaggtagaggcggcgaggagggccgttgagtataactgcgtcggaaagaggataacaaagtgcgttgtcgccgatgattctaaggtgatccatggtgtctctccctccgacttccaagcttccgtcctcggcaagctcatcgtcgctgctcaccgtaagggaaagaacatgtggcttcaacttgattctcctccttttccttccttccaattcggtatggctggtgctatatacattaaaggagctgcagtaacaaactataaaaggtctgctgtaaaagacgaggatgagtggccctcaaaatattcaaaaatntttattgagttagatgatggtttggagttgtctttcactgacaaa

SEQ ID NO: 9031 - DNA, 525 bp, Glycine max
  unsure (1)..(525): unsure at all n locations
  Clone ID: jC-gmfl02220099b12a1
gcgatgagttcgggtagcagccacagcagtgagaaggagaaggagaaacagagggtgagtcgcacgtcgctgatactgtggcacgcgcaccaaaacgacgccggatcggtgcgcaagctcctccaggaggatccctcgctcgtcaaggccagggactacgacaaccgaacgccgctccatgtggcgtccctccacggctggatcgacgtcgccacgtgcctcatcgagttcggcgccgacgtcaacgcgcaagatcgctggaaaaacacccctctggcggatgcggaaggagctaagaagagtaatgtgatcgagctcttgcaatcgcatggaggattgtcttttgggcaaaatggaagccatttcgagccgaagccggtagcgccgccgttgccgaacaagtgtgaatggaangannnnanccttccnanctcgacttctccaactcggtgcgaatcggatagggttcttttggtgagattttaaaagcccaatggcgtggaacaccagttgctggtaaacgta

SEQ ID NO: 9032 - DNA, 521 bp, Glycine max
  Clone ID: jC-gmfl02220099b12d1
ttatttttttttttttttggagagaaatcatatctagcttcatgaaagaatatatcggtagaaattgttctttgtcgggaggaaagctaccagattgaccaagaaaaatcattacaatgagtatattcactttgaacaaaaaattctatctaataaccgtaaaaaaaaaaaacaactaccctgactcgttacagaccaacttcgattggtagtattcgtatattataaggcctaaaatgaggcattgctgggccattgcattcttcaaacaaacaatcaaacattcattaaagccttctcatgttgcagttctctgaatactctataaactcaacaaggacaccgataggtcaaaagttctagctggaaagatcatatttgtcgactgaagtacatatccataaagtttctaaaaggattgaaaccccttaaaatcaaaattggagaaaggacaaatcccatctcaattgggtacacgaaaaaagtggtcctctccaaaaaagggagaacatcataaccta

SEQ ID NO: 9033 - DNA, 462 bp, Glycine max
  Clone ID: jC-gmfl02220099c01a1
gtcacaggacagctgtgatcttcgtagcaatgtccaggtccgtcaccgtcacctatgattccacacacacacccacaaacacaaccacagtctatggaatatagtatatactaacacaaacacgaagacaagtcgccggtcgggctacaacaacaccggaacacaaccacgcattcaactcaacagcggattaatactggttaaaccatcggtggtggtggttgttgttgttgttgtggttgtgtcattgaataagtttagctgctggtttgattgttctacaagtagtaacgcctaataaagccagaggcaagagatgggggcctaaagctggtagtgagcgatagtattcaaacggcgtgagtactagatgaaagagtataaataaattaacaagtaagccctatcgcagcatttgctagggcggcgcagtgctgcgtgttggggcctacggctaatggg

SEQ ID NO: 9034 - DNA, 553 bp, Glycine max
  Clone ID: jC-gmfl02220099c01d1
ttcagaacttatctgtggcagtgtctgttctgcagcagtgcaaaaatctcaccacccttgtacttactaagaatttccgtggtgaggtaatttcagaaagtgtgacagtagaatttgagagccttatgattttagcacttgggaattgtggtcttaaaggccatattccttcttggttatccaattgcaggaagttggcagttcttgacttgtcttggaaccatttgaatggtagtgttccttcttggattggtcagatggacagcttgttctatttggatttctcaaataattctctcacaggagaaataccaaaaggtctggcagagttgaagggcctcatgtgcgctaactgtaatagagaaaaccttgctgcttttgcattcattcctctctttgttaagagaaacacaagtgtaagtggactgcaatataaccaggcatcaagtttccctccttcaattctcttgagcaataacatattgagtgggaatatatggccttgaattggtcaattgaaagcactgcatgtcttggatttaagcagaaacaa

SEQ ID NO: 9035 - DNA, 538 bp, Glycine max
  Clone ID: jC-gmfl02220099c02a1
gatgaccagaccgaggagagttatccgtgctatcactgttgtactagctcctgcttggggggtaggggggagagaactagagagcagcagagattagacaagagattcaggcgcgagataaacctagtgactacacagacaaacggaggcaaccctaggttgatgaacttacgctttggcaggttagagagtagataggtgaggacgattaagatccagaggagtaataaagaggtgacgtgaacgaccgatgctagggcaaaggcgtaagcgaggcagtgggtagcagtaatggaaaggaggtgcactagatgagaccatagaaaaccaagctagttgtgcaaggagtgtacagcgtgcttaagctcaggcaagtagatggcggaatgaaggcaacgcgtaagtagccaggagtgggatgaatacaacttgcgcaagtgtgcgtacagctgatatcgttacgtggtagcacgcctagtgcagcaagcgctgtgtttgtagagcgacctataaagcagtgtcccatagtgaggctgtg

SEQ ID NO: 9036 - DNA, 337 bp, Glycine max
  Clone ID: jC-gmfl02220099c02d1
aaaaaaaaagggggcccgggccccctttaaaaggggaaaaaaaaaaacccttttgtttttttggtttggggggggggggaaaaaaaaacccccccccggggtttttttcccccaggggggccccccccccctcaaaaaaaagggggggggccccccccccttggttttgaaaaaccccgggtttcccccccaaaaatgggtcccccccaaaaaaagaaaaaaggccccccttttgtccgtccccccccctttttttggggggggccccagggccccctggtttttgggggggtttaaaccccccccccctaacaaaaaagccgggggctccccaagg

SEQ ID NO: 9037 - DNA, 187 bp, Glycine max
  unsure (1)..(187): unsure at all n locations
  Clone ID: jC-gmfl02220099c03d1
ctctatcacgatattctaatcgtactttagtatggacgtcgttactgtaacttcgtctaattattcctcatacgaagctgttgacgaattggtcatctatgatctcacttagcataatactattcatcttctactngtaacatatacttataccctagccccggtcagttggngaccgggccggaat

SEQ ID NO: 9038 - DNA, 579 bp, Glycine max
  unsure (1)..(579): unsure at all n locations
  Clone ID: jC-gmfl02220099c04a1
gtcacatgactacttgatctgtggctaccaatgtacccaggtacctgtacacccttccagggcaacaactccaacgtgcatggccatcggcatggtcacctgcagggtacccaggggaaacatcaggtgcagagtcatcatcatcatcatcagtattaacgtaactttgggctgggtcttcttgtggtgtcgtgcgtgatcctactcaaagtgcgcctaggttaaccgtccctgcacagagtgctaaagacaaacaccaacaagtacgagaccccaagttcgtaatcgtttggcccgcaacaagcccgtatctgcgacaggtccccagttaacaaacccccggtcgcgtgcctggccaattggtaatatgctgcaacaactgctaacactggagcagctgcaactatccaccaggtcgcctaacaaacttaaccgcaaggggttgcacctattaccgatggtggtgcgaaaatcggttaaccgaaagttataccaaaagtggaacatgcggtactttaagtgcccgtantacggtacgctgcctaataagtatagccagtgccgccaatacaaattttg

SEQ ID NO: 9039 - DNA, 573 bp, Glycine max
  Clone ID: jC-gmfl02220099c04d1
ggagagtaattatatctagcttcatgaaagaatatatcaatagaaattgttctttgtcgggaggaaagctaccagattgaccaagaaaaatcattacaatgagtatattcatttgaacaaatattctatctaataactgtaaaaaaaaaaaacaactaccctgactcgctacagtccaacttcgattggtagtagtagtatattagaaggcctaaaatgaggcattgctgggccattgcattcttcaaacaaacaatcaaacattcattaaagccttctcatgttgcagttctctgaatactctataaactcaacaaggacaccgataggtcaaaagttctagctggaatgatcatatttgtcgactgaagtacatattcataaagtatctagaaggattgaaaccacttaaaatcaaaattggagaaaggacaattacgattccaattgggtacaggaaaaaggtggtcctctccaaaaaaggcagaacatcataaacctaagaaattagataatgatagtatgaagcgccaaccatgaacagcagatttgacaagcatactggaatgaaac

SEQ ID NO: 9040 - DNA, 565 bp, Glycine max
  Clone ID: jC-gmfl02220099c05a1
gataacagtgactactgtcgatctatcgctaccaatgtaccagagtcctgtcaccgtaggggtaccgggtccaacacaccgctgtgcaaataacagggggaaaacgccgaagcttgttgaacctagtcccaagtgtttgatccccaccaaccacgatacctaaaccacttacctgcctgtggttacaattaattagcaacaaagtagtgattgtggtgcccgtattaatttacctgcccgtagtgatttacaaaattaagggacaacccgtagtaatttacaggcttgtaagtaaattgcacttagttatgtaccaagtgtttaaattcctaattcttaaataaatagtccttcatgagctggccttaaggcaaatttggtacctttggtaacatagcccgtgcattaaagggttaaaaagaagtaaaaaagtggccctacataggcttgtacaagtgcagcagcaagtgcaagtaaagggataaataagcagttaaaagctcgtaagcattaaaatacttattaagatgaaaccaaaatgattgggacttaaactgtaaatatt

SEQ ID NO: 9041 - DNA, 390 bp, Glycine max
  unsure (1)..(390): unsure at all n locations
  Clone ID: jC-gmfl02220099c05d1
gctatggcgatttaattattagtattattcttattgttatctccatttgactcactcgctctctcttgtttgtttgcgtagaaaaataaaatcaggtactgcagggttgtgaaagctagatactaattagatcgctgaaatcgagaaagagaaacaaaccatagtactactactaattttgattaaggatttgatctaatataatataatttcacgatttaattaaccgcagaagctgcctcggtgtgtgagggacaaaaggaggtgggagaagaaagagagagaagaggagagattggaaaagatgtcatcatcatcgaactcgccgtgcgcggcgtgcaagtttctgaggcgaaagtgcacgcangagtgcgtgttcgcgccgtactt

SEQ ID NO: 9042 - DNA, 205 bp, Glycine max
  Clone ID: jC-gmfl02220099c06d1
tttttctttcactatccctttcgaactctctccgattagggcacacgcgatgcctctcttcctctccgacgaggagttcgcgtggtgctccggtgacggctctgccgtggccgcgaaggccgacgccttcatccgcggcctcttcaacgagctcgacaccgtccgctcaaggcccacggccgcgacattaacgccgagcagaact

SEQ ID NO: 9043 - DNA, 554 bp, Glycine max
  Clone ID: jC-gmfl02220099c07a1
agatgactagagagaagagattgatctatatatcatgtgtgtagtacctcctgcttgggggggggggggggggggagacataaaggatgacggaggatccgaaagccgtatagatgataaacccaaagaagagtctaagtctgcaataagcggagggaataaaaccagtcattataaagaaaaataatttaatgttaagtagtagtattatcgttactaaaagataggtaaaactgagtgaaaaagggcaccaatttatacgcctctaggacaaattagcattagacaagggagcacacaaagaggagccctattcgcttgtgttaataagttttaaaatcggctggatctggtactaaatttaactgtacaaactggggccgcacttgtaatcgaagtactcaacaacctagtggtcgttcagctagagggtgtaataacaacctccaatataaccgtacataaaacgcttggcgtacaaccgactgcaaacaacttggtgggtgtattatgtaataatgttggcaacgagcacggcgtcaaaagacaacaga

SEQ ID NO: 9044 - DNA, 523 bp, Glycine max
  unsure (1)..(523): unsure at all n locations
  Clone ID: jC-gmfl02220099c08a1
gatacactagagagctagctgtcgagtgtatcaggtaggncaactgtacccaggtacctgtacactgacggtggacagtctcactccttctttggggggggggggggcgatttggggggtacacggtatagggggggccttgggccaataggaagcgcaagcgtgagactgatagcgagtcacaagggggagagaacaggcgtacggtctatgtaaaaaaaaaaaaaaaaccctccttcttcatgacgcactgtcgtcatttcccaaggaaggttccattccgattgctacctcgattactgggtttgagacgcacgtcgaggacactggcctcgaagtagccgtagactgcgggttgcgcgcaaaggcggagttctgtataaggttatataatagatcacttccaactagaaacgcgaaacttgccccgcttgaagcacgcactgaatgtataggaaggctcggctctgtatgctttctgggttacgtcccagattgcgtcgcttactgctaggaagcaagt

SEQ ID NO: 9045 - DNA, 544 bp, Glycine max
  unsure (1)..(544): unsure at all n locations
  Clone ID: jC-gmfl02220099c09a1
atgacagcgactagtgtcgatctatcaggtagccactgtacccaggtgcctgtgcaccaataaggtagatagaaagggccagggtctatcgactgactgatacaacataaaccacttggcacgtgtcacagtggcgtacagtccaatctaattctaatgcttattcacaggctgggcgcgcggagcccaacccaacggatgcctagataccggagccaaaacaacttaaagccgcttagactcctggtaaagcctacgggaacgcagacaagctcgcgggtgtttaaaaggctactaagccggtaactaagccagtagcacagaaaccaagtgctgcaactgaaggtcgggcacaaatagtatcacaccaaacagacgggcacgcttaaaaatataaaaggaaagctgcctggcttacaacaacacaagcacaaagtgcagtaccggttaacttttgtgctgttatacttagtgcagtaccggatgcaaaactagcgtatttagctatacctgcagcagatgcaacntgcagctacgccgcgca

SEQ ID NO: 9046 - DNA, 381 bp, Glycine max
  unsure (1)..(381): unsure at all n locations
  Clone ID: jC-gmfl02220099c10a1
gatcacagtgactagctgtcgatctatggctagnaatgtaccagagtcctgtcacctcactacggtgctggcaggagccagtctaaggtaacatcggttaacccgcgaccctagaggcactgcgagcagcgtagcgtgcgatttagcctaagactatgggtcccttaattgcggtggccgtaattacgcagccgcaacttagtacaactacaaaacaagcacccgtacgatataatagtgctactgaagccatgtatgccatggagacctttggaggtgcccccactaacaaactgcgagcggcctcagtactagcgtactagcatgcaactgcagagatgacccacgagcactagtgccgtaccggcactgacgttactg

SEQ ID NO: 9047 - DNA, 377 bp, Glycine max
  Clone ID: jC-gmfl02220099c10d1
aaacttacccatttaacccccccaaacaaaaggggggccccccaaaagacaaacacttaaatcccccaaaaaccctaaaggggggttttaaaaaaaaaccccccaggcccaagaaaaaacaaaaatgggcccccgggggggaaaaaaaaaaatttgggggggcccaaattgggaaaaccccccgaagggggcaccccccctttttcaaacttttaaacccgggaaaaaaaccttttaaaaaaaaagggcccgccccggggcccttggtaaaaaataaaaaaataaaaaattctttaaaaacccccccgggaagaacaaaatgccgcccaccaccccaaattttgaaaaaaggccaaaaagggccaccaaaataaaaa

SEQ ID NO: 9048 - DNA, 548 bp, Glycine max
  Clone ID: jC-gmfl02220099c11a1
tttttctttcactatccctttcgaactctctccgattagggcacacgcgatgcctctcttcctctccgacgaggagttcgcgtggtgctccggtgacggctctgccgtggccgcgaaggccgacgccttcatccgcggcctcttcaacgagctcgacaccgtccgctccaaggcccacgccgccgacatcaacgccgagcagaactgccttctcatcgagcagaagtatctctccctcaccgccgagttctccaaactcgagtcgaacatcgccgaacttcaatcctctctcgatcagcgcctccgcgaaatcgacgaggtgcaatcgcagaaccaccgaatcaaattggaagcggttgagaaagatagggagatagagcggttgaggaccgaggtggcggagttgcacaagtcgaagaggcagttgcttgagttgaacgagcagaaggatttggagctaagtgagaagaatgcaaccatgaagagttatcttgataagatggttcgttaagtgaaaatgctgctcatacagaggcacggctgagtga

SEQ ID NO: 9049 - DNA, 401 bp, Glycine max
  unsure (1)..(401): unsure at all n locations
  Clone ID: jC-gmfl02220099c12a1
gctatggcgatttaattattagtattattcttattgttatctccatttgactcactcgctctctcttgtttgtttgcgtagaaaaataaaatcaggtactgcagggttgtgaaagctagatactaattagatcgcttgatcgaagaaagagaaacaaaccatagtactactactaattntgattagggatttgatctaatataatataatttcacgatttaattaaccgcagaagctgcctcggtgtgtgagggacaaaagtgagtgagagagagagagagagatcaggagagattggaaaagatgtcataatcatcgaactcgccgtgcgcggcgtgcaagtttctgaggcgaaagtgcacgcaagagtgcgtgttcgcgccgtacttttcgccggacaa

SEQ ID NO: 9050 - DNA, 571 bp, Glycine max
  Clone ID: jC-gmfl02220099d01a1
gtcactaggactacgtcgatctatggataggcaatgtacccaggtacctgtacacttgcattaggggtaatattagtgtaggtggggttggggtgtgtagagcatagcaagtagtgttcaacctatacgaagcagacgtatcgtgtattggttcacatttggggtggcaaccaaatgtgaagttattaaaagtggcttggggtggccgcaacaataataacaacaagaagattaagaagaataataataagaagaagaaagagaggaggcggcggaagaggcggaggaaaaagagcatccaacgctggtacggcttggtagttgtaactgcggtctcgtcgttagcgccgacgtgtatatttaagcagcccgtctatttaagggtttggaggaatctgttgtttatgcgccaacagtaaacccgccaaaggcaacaacaacaacacaaacaaacccaaacccacaaccagtactgggtgaggggcatttggggcaggctgatcggtaccaaagtgggcaggcccgctactattatgatagatggtgtggtggtggtggtggtggtggttag

SEQ ID NO: 9051 - DNA, 518 bp, Glycine max
  Clone ID: jC-gmfl02220099d01d1
cacaaagtgctggagcaaacactaacactaacacaacaccaccaacaagaagaagaagaaacattcccagagacccttttgctctgtgaagccaaagttgctatcttttctcaaatggggacccgaatcccttcgcaccagctcagcagcggcctctacgtgtcgggtcgacccgaacaagtaaaagagcgtccgccgacgatgacgtcacgctctgttccgtacaccggcggcgaccccaagaagtccggcgagctcgggaaaatgttggaaatccccggcgtcgagccgaaaccgtcgcgtccgtcgtctgggtcggtgagatccgggccgaactcgggcccggcgggagggaggctgagcgggtcagggcccatgtcgcgaaagtcgtccggttcgggtccgatagcgctgcagcccacgggcctgataacgtcgggcccggtcgggagtcggcggtcgggtcagctggagcagcctgcagcgacggcgggggggaagatggtgtacgggtcggc

SEQ ID NO: 9052 - DNA, 89 bp, Glycine max
  Clone ID: jC-gmfl02220099d02d1
ggcaaaggaactaatttatccatttgaacgagataaaatagccacaatttgcaggattgaacatgccacttaaacaaataatagaagac

SEQ ID NO: 9053 - DNA, 515 bp, Glycine max
  Clone ID: jC-gmfl02220099d03a1
gataacagtgactagcgtcgatctgtggctagcaatgtaccaaggtcctgtcacaggtcataaacgagcgatatatacaaagataactaacgcaaacggcaatggtaaaaaaaaaaaaaaaaaaaaaaaaaaaccctccttcttcatgacgcactgtcgtcatttcccaaggaaggttccattccgattgctacctcgattactgggtttgagacgcacgtcgaggacactggcctcgaagtagccgtagactgcgggttgcgcgcaaaggcggagttctgtataaggttatataatagatcacttccaactagaaacgcgaaacttgccccgcttgaagcacgcactgaatgtataggaaggctcggctctgtatgctttctgggttacgtcccaaattgcgtcgcttactgctaggaagcaagtccttaatctctccccacacctccgggctcgaggccctcttacccgccgggggtggggtattacgcacatccctaatactgcaggctttg

SEQ ID NO: 9054 - DNA, 562 bp, Glycine max
  unsure (1)..(562): unsure at all n locations
  Clone ID: jC-gmfl02220099d04a1
gctgactaggactagcgtcgatctgtggctaggaatgtaccagagtcctgtcactaaaaacggtgcggtgggggtttatttaaggtacggggtgtaaagcctgtcgatcaactaaatcctgtctaacgttattcctcctaacctcttatcgaactactgccttattaacctcctgtcgaacgtgctgttcctgattcctcctcgcaacaacttctatacaggttcgttcccaattcgactctgttctcacagttccaacgattacaacactatccaatggtgcagttccaactgtttcggttactcaggccgttcgcacagtctctaccatggtaacattcattggtcagggtacactgttcttcgtgttctttgttaccaacttcttcaccttgatggccggccgtgtggtcaacatattaagtgtgctctgaggtatcttaactcgcgtatgagtagctttaaccagaggtaatgtctgacctcgnaggaccctcactctctggaaagtgaaggaggcaggtgtgcgagacatcagggtaagggtaactcggtggacgga

SEQ ID NO: 9055 - DNA, 500 bp, Glycine max
  Clone ID: jC-gmfl02220099d04d1
aacccataacataaaacatttattaatatacaaacatttattacaaagggaaaccagaaatacagcaagggaagatttcatccttaagaacttcttccagaacaaacagattactgaatttattatttctcagagtcaagtcaagcattatgatacattattccccaaaacaccaacaacagttcttaggggagcagttattacatcgtactttcacatgaacgcgttataaaggcagataaaagcaaatacctccaacacaggaccttaagggttaagcacagcacaatactatgtgacttaaacggggacacaatttagcaatttttcttaaagcactacggatttgctgaatttggtcataattatagagccttgttagtgtagaatcacacattcttgtgaaccagctaccaccacagcagggtgttcgcttgtgctgactgcatcaacttttttgacactttcaacgttgacatcctccaattaccacagccaat

SEQ ID NO: 9056 - DNA, 590 bp, Glycine max
  unsure (1)..(590): unsure at all n locations
  Clone ID: jC-gmfl02220099d05a1
gatgacagagcacagctgtcgatctatggctaggaatgtacccaggtgcctgtgcaccttccggattacgtacacaggctatcggtccgcggggcgggagcgttgtgccccgcccttttagccacgttcacctgccgtcacgttcgtcttggcccggctcgcttacggcgtagactccatccgaggtccggcttcgggcgtgttctccgcaacgccgtccacagagtccgcatccgcctccacaaacatcgccccacctgcctgcacagatgccactctcgcctcctcataaattgcactataaggtaaaccaattgcgcccatttactaatcaccaccctttgatggggtaatacttaccgttaccgaccccagcttatcgcctaccgttgcaacctgggcacgcaaaactggcagacagttggtacaactgtcacccgggtatcttaaggccaggngcatatcgaacaaccgggaaacggaaatgtcatcataacggcgcgggagggtggtatgtatttcgccgaagcaacagcatagggtaaaaatatatctgctagccatttagagaaaagaaacaagacgcagca

SEQ ID NO: 9057 - DNA, 360 bp, Glycine max
  Clone ID: jC-gmfl02220099d05d1
tcatcatggccacctctgctattcagcaatcagcattcgcaggtcaaactgctctgaagcagctcaatgagttggtccgcaagaccggtggcgccggcaaaggtcgcaccaacatgcgccgtaccgtcaagagtgctcctcagagcatttggtatggccctgatcgtcccaagtacctgggtccattctcagagcagattccgtcatacctgaccggagaattccccggtgactacggatgggacactgctggactatcagctgacccggaaaccttcgccaggaaccgggagctggaggtgattcacagcagatgggccatgcttggtgcacttggctgcaccttcccagagatccttg

SEQ ID NO: 9058 - DNA, 567 bp, Glycine max
  unsure (1)..(567): unsure at all n locations
  Clone ID: jC-gmfl02220099d06a1
gtacactaggactagctgtcgatctatcgctagcaatgtaccagagtcctgtcactaaagtggtactgtgaagcctcatcgctttgctcaaggttggtaatggtaatattatttgtgctctcgctatttttccgtatcgctgttactatcgcaccaatatcgctcgctgtgatcaccccaaggtaataagttgtattcatattcctcgtcatgatgatctctgcactggttttcacatctgtggtctcggtcatacaagtaacaacggtatctacgtctacctccgcggtggccaacttatctgtcggagctggtgtgtcgcctggtgcggtgctcgcgggtgcaacgctatcaactgtccgcagccaaccaatcgggccggtaaaagtaacgccgccagtacgaccggccagagggctggtcttataacctatgcctgccagcagtacaaacgccgtatgaaatctaaaatacaatggccgccactgggtgttagacttacggccagatgagggaggccaggcagactgctcggctgcgattacagtagagtanacacagtaaggc

SEQ ID NO: 9059 - DNA, 569 bp, Glycine max
  Clone ID: jC-gmfl02220099d06d1
ttcagaacttatctgtggcagtgtctgttctgcagcagtgcaaaaatctcaccacccttgtacttactaagaatttccgtggtgaggtaatttcagaaagtgtgacagtagaatttgagagccttatgattttagcacttgggaattgtggtcttaaaggccatattccttcttggttatccaattgcaggaagttggcagttcttgacttgtcttggaaccatttgaatggtagtgttccttcttggattggtcagatggacagcttgttctatttggatttctcaaataattctctcacaggagaaataccaaaaggtctggcagagttgaagggcctcatgtgcgctaactgtaatagagaaaaccttgctgcttttgcattcattcctctctttgttaagagaaacacaagtgtaagtggactgcaatataaccaggcatcaagtttccctccttcaattctcttgagcaataacatattgagtgggaatatatggcctgaaattggtcaattgaaagcactgcatgtcttggatttaagcagaaacaacatcgctggtaccatt

SEQ ID NO: 9060 - DNA, 551 bp, Glycine max
  Clone ID: jC-gmfl02220099d07a1
ctcacaggactacttgatcttcgctgcatgtccaggtccgtcaccggatatcacaaaaaagttatccagtattcagtattcagttagtggggggcgtatgtctatatatttgggtgggttcggtgtaaatgtatgtatatgtgtgtgatgctgacaggtcatcaggtttcaacgcttggttgttgttgttgttggtggttttgtgaagtccagttaaagttaaagttaaagttacggtaaacaacagctaagataacaattgcccctcagtgccttgcaaccgcacttactgtgttgatcctctcgcccgcactggtcccaattactgccatcgcaaccacctcaacctttgttgatacgctgcttctcattatcctcgtaatggtggtcataatcttcaccgtgatcttaatccttctcttcaccaaagtagcccttagcttagttcccactgtcctgccaactctgttcatagtcgtcgtgttattaacagtggtgcccctccctacccttttaatcatacccttgtgtctttactatcgtcggcaccc

SEQ ID NO: 9061 - DNA, 617 bp, Glycine max
  Clone ID: jC-gmfl02220099d08a1
gatgactgagactagcgtcgatctatcgggtagacaatgtagccaggtacctgtacacttgatgatcgacaactactggtccgggggccacaacgggtagccatgtgcatgtaactgtacgggaagtgttaaaatttagggtaccaatgcgcggcgagggtttacccggcatgttaaccaggctagtgggtagtttggcacgcgcagtggggcgatggaagggagaggagtgactagggtagggagggggtccgatatgcacaggaggccggatgaaatgcgccctaaccggctggcgacaacacacacgagggcgatggtgggaaaaggcgattaagccaatattaggggccgtaacctatgctacaattgctagtgcaagttgggcagaacctgacccggggaaagcgcaacttaggaacaatgtggcggttgcgcggtttggtattagtgaagttgctggtagtggtaatgttataaccgccgcttttggggcgcgcgcgggtgttggtgcctttgggtttggtacccggctatttggtgagttgggtggtagtgtattacaagtttaaactgtgtgcaatacaagctctaaattttcatacgtaatctcgcct

SEQ ID NO: 9062 - DNA, 546 bp, Glycine max
  Clone ID: jC-gmfl02220099d09a1
agtacacagtgactagcgtcgatctatggctagcaatgtaccagagtcctgtcaccaacaaagccaaatcctaagactataactagacaggcaaggcaagtatacaacaaacaaacaaacaaagtttatcatcgtaagagtacaccacacaaacggcaacacaaaatgcatatatcaacgcacaaaaggaaatatatatcttatcttagtattattctttttaggctttagtgttcctaaatctaatttaaaaattgaatgaatccgtatatgcggttggttggtcggcaggtaaggtaattgtgtgtgtgttaaggtggtagtaatagtggtaattcaaggtttgggttcagcacaggcagggcaagtcacggggctggggttcaaggctctcctcaggtgcacagcaaaagcttcttcaacttcaattaccgcctgcgcacacattgtcgtcaccaacttaaaaaatcgagtcgtagttgtcgtcgagctcgtcgtccctgtgttgagtgtagcgttgggcatactgttgtacgggcccgtaat

SEQ ID NO: 9063 - DNA, 394 bp, Glycine max
  Clone ID: jC-gmfl02220099d09d1
acctttctttttttttttttttttttttttttttttttctttttttttctttcttctttttgttactttttttctttttcttttttttttttttttttcttttaaaaaaaatgtagctccgctctttttttttaagctttttttaaaaatctatctcttccttttattattcttggaaaggtataaatattgcctctacattatttgtttttaattttttctctctaccaatttccccagacaatttttgccttcttttaccttgtaatggagaaacctttactttttttaacctatctttcccgaaccccattgatattttaatataaaattgtgtttacaattaaagcattcataatttgttttatatagcttttcccctcctaaattgttt

SEQ ID NO: 9064 - DNA, 415 bp, Glycine max
  Clone ID: jC-gmfl02220099d10a1
gctatggcgatttaattattagtattattcttattgttatctccatttgactcactcgctctctcttgtttgtttgcgtagaaaaataaaatcaggtactgcagggttgtgaaagctagatactaattagatcgctgaatcgaagaaagagaaacaaaccatagtactactactaattttgattagggatttgatctaatataatataatttcacgatttaattaaccgcagaagctgcctcggtgtgtgagggacaaaagtgagtgagagagagagagagagaagaggagagattggaaaagatgtcatcatcatcgaactcgccgtgcgcggcgtgcaagtttctgaggcgaaagtgcacgcaggagtgcgtgttcgcgccgtactttccgccggacaaccctcagaggttcg

SEQ ID NO: 9065 - DNA, 605 bp, Glycine max
  unsure (1)..(605): unsure at all n locations
  Clone ID: jC-gmfl02220099d11a1
ttcagaacttatctgtggcagtgtctgttctgcagcagtgcaaaaatctcaccacccttgtacttactaagaatttccgtggtgaggtaatttcagaaagtgtgacagtagaatttgagagccttatgattttagcacttgggaattgtggtcttaaaggccatattccttcttggttatccaattgcaggaagttggcagttcttgacttgtcttggaaccatttgaatggtagtgttccttcttggattggtcagatggacagcttgttctatttggatttctcaaataattctctcacaggagaaataccaaaaggtctggcagagttgaagggcctcatgtgcgctaactgtaatagagaaaaccttgctgcttttgcattcattcctctctttgttaagagaaacacaagtgtaagtggactgcaatataaccaggcatcaagtntccctccttcaattctcttgagcaataacatattgagtgggaatatatggcctgaaattggtcaattgaaagcactgcatgtcttggatttaagcagaaacaacatcgcttggtccattcctagcacaatttcagagatggagaactnggaatca

SEQ ID NO: 9066 - DNA, 423 bp, Glycine max
  Clone ID: jC-gmfl02220099d11d1
atctaatcatcccaaatattttaataattcagcgaaacacatttattagtcacatactgtattttatgggtaaaagaacacatttcattttaatccgctttttgaagattgaaacaagccttaaaaaagcagtgaaaagtttcacatgactggatttgcattaatgttttttaattttttcaatatacaaattttcccagaccatgttagcattcattgaccgaggaagggagagacatgactgcaatcagcttaactgttccgaaccccattgattttttaatataagattggttttacaattaaagcattcagaatctggttttcatgttttttcccgccctaagttgattaagttggtccctgaacaaaacagcatctttttagggtttttcaacaacagctttcaacatattgtgtaaa

SEQ ID NO: 9067 - DNA, 491 bp, Glycine max
  unsure (1)..(491): unsure at all n locations
  Clone ID: jC-gmfl02220099d12a1
tcatcatggccacctctgctattcagcaatcagcattcgcaggtcaaactgctctgaagcagctcaatgagttggtccgcaagaccggtggcgccggcaaaggtcgcaccaacatgcgccgtaccgtcaagagtgctcctcagagcatttggtatggccctgatcgtcccaagtacctgggtccattctcagagcagattccgtcatacctgaccggagaattccccggtgactacggatgggacactgctggactatcagctgacccggaaaccttcgccaggaaccgggagctggaggtgattcacagcagatgggccatgcttggtgcacttggctgcaccttcccagagatccttgagaagaatggtgtgaaattcggcgaggccgtgtggttcaaggctggttcacagatcttctcggagggaggacttgactacttgggcaacccanacctgatccatgctcanagcatccttgccatctgggct

SEQ ID NO: 9068 - DNA, 515 bp, Glycine max
  unsure (1)..(515): unsure at all n locations
  Clone ID: jC-gmfl02220099e01a1
gatacactagaganctagctgtctgatcgtatcacgtagcnaactgtacccaagtacctgtacactgggtcaggattaattgtatatataattttgggtgtggtgtggttaaggataaagtttggtggtgtgtgtgtgtgtgggaggtgtagggtataatgtagtaagttttgtgtgtgtgtgtttaaatctaaaattgaactagcctgtacaacctttacaaaaatcatatgcacgggaaccgttttcaatttagtagtaattttgctattattattattattattattattgtcagggttcaattggtgacaggtggtcagctaattatttttcttatggtagtctctgttttaaactcagtttgtttgtgtcatcaccaagtgtacatccattaaatcatcgtggtgcactttaaatctcttcgcaattctgctgttcctgcttcctcctctcgcccatgtatcccaggttccgcttctgctccacattggggtgctctacactattctgat

SEQ ID NO: 9069 - DNA, 543 bp, Glycine max
  Clone ID: jC-gmfl02220099e01d1
cggctcgagtttgaatcaagggtgagggccttccatggcttccgcttgtgcttcctctgcaattacagctgttgccatctctacgccgagttccgggcagaagaatggatcaggaggttgttttcttagtggaaggaaattgagggtgaaaaaggagagagcagcaattggaggacgatcgatgggcactacagtgtgcgcagttgctgagcctgacagacctctatggttcccaggcagcacccctcctccatggcttgatggcactctacctggagacttcggctttgaccctcttggtcttggatctgacccggagagtctgagatggaatgttcaggcagagctagtgcactgcagatgggcaatgttgggtgctgctggcattttcattccagaattcctaacaaagattggtgtcttgaacactccttcatggtactcagctggagagctggaatacttcacggacactactaccctcttcatagttgagctcttttcattggctgggccagggtagagatgggctgacataatcag

SEQ ID NO: 9070 - DNA, 535 bp, Glycine max
  unsure (1)..(535): unsure at all n locations
  Clone ID: jC-gmfl02220099e02a1
gtacacagagactagcgtcgatctatcgctagnaatgtaccagagtcctgtcacggaaaatttcgcgcaatgaaacaagacgacaagacgagatccgcggccggactggtcagacaggaagtaatatacaccacgcactcaaatgacaagttcaaaaataagcctcctccactgacatacttatcttcgcctggttcagagcagtcatggttgtaatctggtgttcatcctgggttatcttcgtcatcacctaaacacctcgggctcaactctccccgattattaatgtgtccacacccaattcgccaaatggtaattccctaataacgatggtggtattacaaattatgttattagtcgtcttggtcttagtcctaaaaacgagcgggtgccaaagccaggttatagaagtccnctgtatatccagacgttggcgtgtaaatgtaacttgcgtattaaccggcggaacctgcccaggggccaacagccgcgttagattgagccaaccactggcgcctatatagccgggcagtca

SEQ ID NO: 9071 - DNA, 446 bp, Glycine max
  Clone ID: jC-gmfl02220099e02d1
cttaacttgcttataaaaactttttcatcctcattatttaaaatcgggccatcttctaccttgcattctcccctataaactataatacctctatcaatctcctcatttactccatttatttcttttcttccttacccacctttactttaatttaacttaagaatcaaataagatttattaatttatcacataatccaccaatgaaatcactgagcctttaaagtaatttatgaataaacatcattaaggcaaatggtcattaaatatcaatgactttgcaaattcaaaacaaggtattataggacaataatcgtcaattttgcataaaattaattcatttccaataatgattgcctaaagtgtaagccttggtttaacaagaaagatgagcttaatgctcctgtatgttttgaatcaaacttaaccgaatttctcccataattaca

SEQ ID NO: 9072 - DNA, 577 bp, Glycine max
  Clone ID: jC-gmfl02220099e03a1
gataacagagactagcgtcgatctatggatagccaatgtaccaaggtcctgtcacaaaacccgggtatatgggcgttaagtgggtatatgcaatgtggtaaggggtaaggtgtgggggtagctattatgtggtgggggtggtacatattggtagtagtgctagattctggactgttaaaaatgatatatataacaaggtgcgggtgggtgcggcagggcagccagttctacagtgaagccgggtatatatgggtggtatgatccagtaggcgtggtggtagtgcccctattttaagactggtggtgaagtcagacgtaaaggggcggccggacaccgccagtagtggtcgtcggcgccgcatgacgcaccacgctaccatgagatggagtgagagacgcgagcaaaaggtgccccccgcaacgtcgggggcccgacggcaaacagcggcaaagttggcatccggcgggccgcaaagcacccagcggagttcccggcagcaatggaggcacccttgctggggtcttcccggtccagccagggatatcgctaacggtccagcttccgccgacataacag

SEQ ID NO: 9073 - DNA, 599 bp, Glycine max
  unsure (1)..(599): unsure at all n locations
  Clone ID: jC-gmfl02220099e04a1
gatgacagagactagcgtcgatctatggctagcgaatgtaccagagtcctgtcactaacagtggggggttacacctgactcaacggcatgggcttacataagtacgggggacgccagcggtggggaacggccatgagggcataaacttggtaggggggcaacaggggcctgggcggcacaaaagaaaaagcgtacatacccgcaacattccacagcaatggggtggccggcctgatttagaggggaagcgtaagcaaagctgtcggcgccaacaatgggagaaacacctccgtggcaatatgcaatccaaatgcaggagaggtaagccacaatgtcagtctagaacagtgccagaggagttagtaggtggtgatttaaactggctgctatggatcaacgttggttgattgagcagccaaatgcgcgaggataggtagaagggtaacccttctaagccaacaatatgngggaacgtgctgactgaaaggaatgtttaggccgtgaaggagcggccaaccgtagctggacgaggctacgactggacacaaggccgtgaagtagggcagctgnnagaaagtagccccacagctagtggggga

SEQ ID NO: 9074 - DNA, 371 bp, Glycine max
  Clone ID: jC-gmfl02220099e04d1
ggggggggccctgattatatatttatatgccggggtggggaaacaatttattccccaattttctatcccccatttgttaacccggcccacttatttttttgccccccaaggaaatggcccttcaaattcgaaaaaccaaaaaacaatccctggaaaaggggggggtccttaaacttttatttttgaaaccaattaaacgggttcaaattcaacaaagcaggggccttacataattagagggccctctaaaactttatttgcccatattcattggccctaaaattggaaaaatcaaaggccccattgaccccccccccttcattgggtttggctaacaagttgcccccccttacaatgtaattttgttctgg

SEQ ID NO: 9075 - DNA, 521 bp, Glycine max
  Clone ID: jC-gmfl02220099e06a1
gtcactaggactacgtcgatctgtggctagcaatgtaccaggtgcctgtcacgctttagcagggggaacctggtgaaggctagtaagctaagtgagagctggccacccatggccgccgcacaaaaaacggcagttgacaagataacaaataatgggtagataatagatggggccgccttcgtggtaagttaaccggaacgcgggcaaggcgaagtagcaagtacaaaccgagcacaataggagccattgcattggccacagaggcccggcccggcacgtatgccaacagctctgcatgtacgggatggttttgcaacagggccagccacacaagagcgatacagcgccaaccgctatagtagagcggtcactgacaaactaatgcactagatagcaactgttgaatagtggcatgagacggtgcaacacagggtaacaaccaacagagcccaaaaggaataacgctagaatggggttgcaaagctgccagagcaggttgggtagcattcccatcccgcaga

SEQ ID NO: 9076 - DNA, 468 bp, Glycine max
  Clone ID: jC-gmfl02220099e06d1
cacaaagtgctggagcaaacactaacactaacacaacaccaccaacaagaagaagaagaaacattcccagagacccttttgctctgtgaagccaaagttgctatcttttctcaaatggggacccgaatcccttcgcaccagctcagcagcggcctctacgtgtcgggtcgacccgaacaagtaaaagagcgtccgccgacgatgacgtcacgctctgttccgtacaccggcggcgaccccaagaagtccggcgagctcgggaaaatggtggaaatccccggcgtcgagccgaaaccgtcgcgtccgtcgtctgggtcggtgagatccgggccgaactcggcgcccgcggagggaagctgagcgggtcaaggcccatgtcgcgaaagtcgtcccgttcgggtccgatagcgctgcagcccacgggcctgataacgtcgggccccgtcgggagtcggcggtcgggtcagc

SEQ ID NO: 9077 - DNA, 535 bp, Glycine max
  unsure (1)..(535): unsure at all n locations
  Clone ID: jC-gmfl02220099e07a1
gatgacgcggacgggntcgatctgtggctaggaatgtgccaggtgcctgtcaccaacaaccaaaggcaacgaatagcacacaacaaccaactgcaacgtagacaacacaacaaccaacgccaacgcatccaacacaacaaccaaaggcaacgaatacaacacaacaaccaactacaacgcaaacaacacaacaaccaaccccaacgcatccaacacaacaaccaacggcaacgcatccaacacaacaaccaactccaacgcagacgacaacacaacaaccaacggcaacgcatccaacacaacaaccaacgccaacgcattcaaccaaacaaacaacgccaacgcagtcaacacaacaaccaaatacaacgcatacaacaaaacaaacaacgccaacgacaacgcacccaacacaacaaccaaacgcaacgcaaacaacaacaaaaaccgtcccaccggcggttacagcaacggcacagagccccaaggttttgctgcccccatcacaacactcagcgcaggtgctgaaacgggt

SEQ ID NO: 9078 - DNA, 474 bp, Glycine max
  Clone ID: jC-gmfl02220099e10a1
tcatcatggccacctctgctattcagcaatcagcattcgcaggtcaaactgctctggagcagctcaatgagttggtccgcaagaccggtggcgccggcaaaggtcgcaccaacatgcgccgtaccgtcaagagtgctcctcagagcatttggtatggccctgatcgtcccaagtacctgggtccattctcagagcagattccgtcatacctgaccggagaattccccggtgactacggatgggacactgctggactatcagctgacccggaaaccttcgccaggaaccgggagctggaggtgattcacagcagatgggccatgcttggtgcacttggctgcaccttcccagagatccttgagaagaatggtgtgaaattcggcgaggccgtgtggttcaaggctggttcacagatcttctcggagggaggacttgactacttgggcaacccaaacctgatccatgctcaaagca

SEQ ID NO: 9079 - DNA, 178 bp, Glycine max
  Clone ID: jC-gmfl02220099e10d1
gcctcccaatcttcttcttctcactatctcttatatatataaatcaactttactttgattatgcttctcactacctattattatatattatactatatactgactttacaatacatatttctctcttttaactttatacaattattcagattctgcattatgagtagcgtagcggaat

SEQ ID NO: 9080 - DNA, 519 bp, Glycine max
  unsure (1)..(519): unsure at all n locations
  Clone ID: jC-gmfl02220099e11a1
cacaaagtgctggagcaaacactaacactaacacaacaccaccaacaagaagaagaagaaacattcccagagacccttttgctctgtgaagccaaagttgctatcttttctcaaatggggacccgaatcccttcgcaccagctcagcagcggcctctacgtgtcgggtcgacccgaacaagtaaaagagcgtccgccgacgatgacgtcacgctctgttccgtacaccggcggcgaccccaagaagtccggcgagctcgggaaaatgttggaaatccccggcgtcgagccgaaaccgtcgcgtccgtcgtctgggtcggtgagatccgggccgaactcggcnccggcgggagggaggctgagcgggtcaaggcccatgtcgcgaaagtcgtccggttcgggtccgatagcgctgcagcccacgggcctgataacgtcgggcccggtcgggagtcggcggtcgggtcagctggagcagcctgcagcgacggcggnggggaagatggtgtaccggtcggcg

SEQ ID NO: 9081 - DNA, 540 bp, Glycine max
  Clone ID: jC-gmfl02220099e12a1
ggcactgattcttcattgaatcatggaatgacacccaacataggcgactcgggtttcctgcattgtccggaagatgcaggacaaggaaacccactgaacaaaacctttgtgaaggtttataagtcagggtcctttggaaggtcattggatatcaccaaattcagcagctaccatgagctgcgtggtgaactcgctcgaatgtttggccttgaaggcgagttggaggaccctgtgagatcaggctggcagcttgtatttgtagaccgagagaatgatgttcttctccttggtgatggcccctggccggaattcgtaaatagtgtatggtgcataaagatactttctcctcaggaagtgcagcaaatgggcaacaatggccttgagctgttgaactcggttccaaatcaaaggctctctaatggcatctgtgatgactatgtgagccgtcaagacccaagaaatttaagcactgggataacaactgtggggtctttagactactaatagagctgacttcttctatcatgtttaatattatta

SEQ ID NO: 9082 - DNA, 406 bp, Glycine max
  Clone ID: jC-gmfl02220099f01a1
agtacacagtgactactgtcgatctgtggctagcaatgtaccaggtacctgtcactgcgatagcgtctagtcgtaggtactctatactcacatcagttaacccttgaccctggaggcactgcgagcaacgtaccgagcgattcagactccgactatgggtcactatttttcggtgacagtgattacgcagccgcaaattagtacaaatccaaaacaagcacccctacgatataatagtgctactgaagccatgcatgccatggacacctttgaagtggacctcactatcacactgccagtcgacacattatctagctgaatagcatgcaacatcagagatgaccgcactagcaactgatatactagctactatgacattactgcatgaggcagaacagtacctatg

SEQ ID NO: 9083 - DNA, 576 bp, Glycine max
  unsure (1)..(576): unsure at all n locations
  Clone ID: jC-gmfl02220099f01d1
gcgatgagttcgggtagcagccacagcagtgagaaggagaaggagaaacagagggtgagtcgcacgtcgctgatactgtggcacgcgcaccaaaacgacgccggatcggtgcgcaagctcctccaggaggatccctcgctcgtcaaggccagggactacgacaaccgaacgccgctccatgtggcgtccctccacggctggatcgacgtcgccacgtgcctcatcgagttcggcgccgacgtcaacgcgcaagatcgctggaaaaacacccctctggcggatgcggaaggagctaagaagagtaatgtgatcgagctcttgcaatcgcatggaggattgtcttttgggcaaaatggaagccatttcgagccgaagccggtagcgccgccgttgccgaacaagtgtgatggtaggaaactancctaccgagctcgacttcttcaactcggtgcgaatcgaaagggttcttttgcgagatataaaagcccttggcgggaacaccagtgctgtaaacgtatctttcattctttagtaaaattattgtgattaggacttaagcttgaggcaattgttgtg

SEQ ID NO: 9084 - DNA, 515 bp, Glycine max
  Clone ID: jC-gmfl02220099f02a1
gatcactgtgactagcgtcgatctattgttagcaatgtaccagagtcctgtcactggtggtgttataagagggagcgaggggtcgaataaattaaatttaataaaaatggtggtatgtggacgggtgtagcctagtagtgtacaatcgacttactaggcacttagccagctggtctttattgcgtattcaggtagcctgtctacacggtggtctgtctcatcttcagatttgaattaccctgtggtacaacgtgtgtgttcctctgcggtgcttctaccataattattgggtgttcgggtgctattactttcttcttcttcttcttatttttattcgcgttacttgtgttcctgttcagtaccacgtcctcttctcttcttcgctcctcttgttctttgtgcccaacagtgttaacaccaacgtctctcttgtcaactctgtctacatcatcggtagtattctccattttcttaatggtttctacagccgttactaccggattcctcgctccggt

SEQ ID NO: 9085 - DNA, 541 bp, Glycine max
  Clone ID: jC-gmfl02220099f03a1
ataactaggactacgtcgatctatagctaccaatgtaccaagtaccgtacccgtggtgaggagggcggaacggctagcggtaagttgctagaggcagctgaggggagtgtcggtgaagccagaaaggacggttgggcataaaaaaaaaaaaaaaaaaaaaaaaaaaaaaaaaaaaaaaaaaaaaaaaaaaaaccctccttcttcatgacgcactgtcgtcatttcccaaggaaggttccattccgattgctacctcgattactgggtttgagacccacgtcaaggaaactggcctcgaagtagccgtagactgcgggttgcgcgcaaaggcggagttctgtataaggttatataatagatcacttccaactagaaacgcgaaacttgccccgcttgaagcacgcactgaatgtataggaaggctcggctctgtatgctttctgggttacgtcccaaattgcgtcgcttactgctaggaagcaagtccttaatctctccccacacctccgggctcgaagccctcttaaccgccaggggtggg

SEQ ID NO: 9086 - DNA, 431 bp, Glycine max
  Clone ID: jC-gmfl02220099f03d1
atctaatcatcccaaatattttaataatacagcgaaacacattcatcagtcacatactgcatcttatggataaaagaacacattacatattaacagcttttgaagattgaaacaagcctcagaaaagcagtgaaaagtttcacatgactgcattagcattaatgtttataaatatatacaatatacaaatatacacagacaatgtaagcatacatagaccgaggaagggagagacatgactgcaatcagctcagctgtaccgaaccccatcgatattctaatataagattggatttacaattaaagcattcagaatctgtttttcatgttttttcccgccctaagttgattaagttggtccctgaacaaagcagcatctttattgcgttcttcaacaacagctttcaacatattgtgtaaaagattaaact

SEQ ID NO: 9087 - DNA, 560 bp, Glycine max
  Clone ID: jC-gmfl02220099f04d1
gaaagagaacaatttgttgtttactaatgagagatgaaggaactaatcatttgtcttgccatcgcaaaagaatagaactcccataattccattagagaagcaattaatatggggttaaatctaaaatccaaacaatggttgccccaaagttaaacaattaaaataaaagttgcaactttagttgccaactattcattcctatagaagttcctagcaggaaatctaatgcagattttttcgggtaacttctatggggacataaggaattgctgtaatttgaatttcaactttctgcttgcagaagaacccgcataaaaaagggcaatacaggcagaacataaacaattcattgtgcgtctgagtctgttggggtagacttttccgttaatgcagaaagctgtgtctcctgctgtttcttcagatacctctgggcagttgcattcactatcttgacaaagaagttcataagcatgagccacacaacagtgttccagactaaagtgaaagaaaaatccccacttttcccctgcttatttggggaaactggatgggaatctttt

SEQ ID NO: 9088 - DNA, 450 bp, Glycine max
  Clone ID: jC-gmfl02220099f05d1
agaaaaactaaatccttagtatttgtataattactgaaaggtacaattcaacgagtgattgtatacatgaaacggccatatatacaggactcagtactagttagcagctggaggtaagccacattggcaaatcaacataacatttataattgcttagaatagtcacctcaaaagagaaaattcaaattccaaaaccattctaagatatattcatgaatcataaacatatcatcacgtatctggcatgacgttaatagtttggccttccacatatggcctaatgaaagtcctccgccaccacacctcaaaagctctctgaagattgggacagccatcaccagttttcaagaaacttccaacccatgaaagcaaaatactctgctgatcctccaaaggcaaggtgagaattgtccttccaattccttcctccacaagtttcctatcgaatga

SEQ ID NO: 9089 - DNA, 314 bp, Glycine max
  Clone ID: jC-gmfl02220099f06d1
ggggaacccaaacaccccttggcccaaggccggggttttctgggggggtatcgggaaaaaacccccaaaaaagccccttaaaaagggggcccccccccccttttttttccaaaaaaaaaaaagggcccccattttaaaaccccccccccccctccttgtggaggggggggcccccccccctggccccccctagagagaaaaaaaaaacccccctttttgcccccccccctctttctgtcaaaggggggttaccttggggggggccccctttcggccccccaatagaacccgggggggggaaacccccccccggg

SEQ ID NO: 9090 - DNA, 498 bp, Glycine max
  Clone ID: jC-gmfl02220099f07d1
gcaacaaccaagactgaccactttaattagaatttggggtcccaacctaattcgtaccaataatatagtgataaagaaaatctaataaaaaattaacatgcaagtaccggtgtaatccaagacccatacaaattctcattatggaagagatgcaacaaccaaacaaacttaataatttcttgcaaattatcttttacgagtaagacctgcgtaatcagcgtggccatatggttcaaacaactccgaaaaaaggccattcttccttctagggtcatgcttcatgtctttgcacaattgatcatgataccatatgccacaatgagcaatgcatgttttccaataatatttcccaccatattgcttcaaattgtcttcccacaatttcacgtccttttccatctctcttatactaggcaactctatgtttccatccaagaaatgtgatagccacaagcttttcatttccgaggcaaatatatttgatgggctctcggcata

SEQ ID NO: 9091 - DNA, 439 bp, Glycine max
  Clone ID: jC-gmfl02220099f08d1
ccattaaaaatttcaactcaaaaggggttatttatgggatgtaaagtcgttaaaacatccacctaaactaaccaaattttatgatcttcaacaagatcacattctatttttttcttcgagatcaaatcaatttccaaaggtggcacagctacaacaagcttgaccgaactcgagtgcccatggaccaaaagcctgaagaattcttcacaacaagcttgcacttaatagtccaacgggcctttctttcccaaaggattcttcatcaaaatcttcgtttgttgaattttcttggcataactctcgagtaggatttaaatcaagagcctcccaagccattgaattaccatcacaaacattgccttttttagaagcttgattgacatccacatgtgcctctgcatttggccttgtatcagtagacaaaggttccattccctta

SEQ ID NO: 9092 - DNA, 433 bp, Glycine max
  Clone ID: jC-gmfl02220099f09d1
ggggaaaaaaaaagatcctgccctttaaaaaatcaagacagaataattcctcccaacaaaggggaaaacaatgggtttttccctctaatgaaaaaaagccaatggccttatgggtaaaggaacgtttatttaacccgggcaaaacaatttgtttcccctcccacaaaaatcataaaaggtaaaattcaataaaaaagcctcaaataagttttaaacaaaaaaaggggggaaagccccccccccttttggcccctttctcaatcttggggcccgccccccttccccccgaaggggccggtttatttttcttgggtggcccagcccccgccccccccatggtggggcccgcccccccttgggacattttggcaaagaaaggaatggaaaagccttccaaatcccttattttggccccaaaaacaattggttttgg

SEQ ID NO: 9093 - DNA, 374 bp, Glycine max
  Clone ID: jC-gmfl02220099f10a1
gggtgggaggaataaacttttttccaaacccaaaaccataaagtttggattaaatttcgaagaaacatgatattcctttcaagacatattaatgaacacatgtaagagccttaaatggtaccaactaacagaaattttaaatataaatgttcttagaggggatcaacccccaaaattaaactaattaagattccctaataatctattttgctcatcatgggctagggtttatttttccttcattggccattttgaaaagctgggcttgggcttctgcggccttgttggagttgagtgagggcacaaacctttcccttacttggttgggagggtaagggaacttgttgttcaccatggagttgaggaaggaagct

SEQ ID NO: 9094 - DNA, 551 bp, Glycine max
  Clone ID: jC-gmfl02220099f10d1
cagctctttctgttctctctttcttctccaagcgattcattcaattttcaattcgattcgatcgcattcttcttctacattctcgattccttcctttctcaacaactattatattatgcatcttcgtctccctctctcaccaaccacctagggtttctctccgacgttaggtttttttttttcgtttctcgccgggattttgggggcagacttaatctccggcagctatggcctccaacttgcagatgagccctcaggtggagcagatccacggtgaaattcgcgacaactttcgagccctcgcaaatggctttcagaagctggataagattaaagatgccaatagacaaagtaatcagctggaagaactcacggacaagatgagggagtgcaaaaggttgataaaggagtttgatcgtgagattaaagacgaagagggaagaaatcccccagaagtgaataagcagctcaatgatgaacagcaatcaatgattaaggagcctaactcatatgtggcattgagaaaaacgtacatgaataccattgggaat

SEQ ID NO: 9095 - DNA, 566 bp, Glycine max
  unsure (1)..(566): unsure at all n locations
  Clone ID: jC-gmfl02220099f11d1
atatgtaaggatggaggtttatttaagaagatacttaccaagggggagaaatgggagaacccaaaggatcctgatgaagttttagtcaagtatgaagcatgccttgaagatggaactcttgtggcaaaatctgatggagtggagttcacagtcaatgatggttatttttgtcctgctttgtcaaaggctgttaaaaccatgaagaagggagagaaagtgcttctgacagtgaagccacaatatggatttggtgagaagggtaagccagcacatgatgaagaaggtgcagttccaccaaatgcaacattgcagattactcttgagttagtttcttggaagactgtctcagaagtaacggaggacaagaagatcattaagaagatcctcaaggaaggggaaggatatgagcgtccaaatgagggagccattgtgaaatagaaagtaattggtaagctgcaagatggtactttgttttngaaaaagggccatgacgatgaaggagagctgtttgaattcacaactgatgaggagcaagtaattgatgggcttgacagagctgtgttgac

SEQ ID NO: 9096 - DNA, 552 bp, Glycine max
  Clone ID: jC-gmfl02220099f12a1
ctccgctccacctctactacttattacaagaatgttaatctatttcgttactatgtacatatccttacctatctatataaacatcataccatgatttgtacttacctcaattaactcaattcttttattaactgtatgccgtacgcgtcggattaataccgggtccacgagctgctagtctacggccgccctttctttactttattaaaaaatgtaacatcatcccatctatgtatctatatctaggggaacgtcatatttgacattgaaattaaaaggacagacagcactattatgtcatgaaggagttcataaaaaagaaaatgatcggattacattcaggtaagaaggagcaaaaagaaaaaagaaaaagaaaggtcttaaacggatgttgatcacatgtgacatcagactacctgcacgcttcttcccgtttaagattagaaaagctgaaagcctcttggtttcaaatcttgatcaccactgcttatcatttttactcttgcaagatcagtatccagcatacctcgagccccaatctcagacttactt

SEQ ID NO: 9097 - DNA, 462 bp, Glycine max
  Clone ID: jC-gmfl02220099f12d1
atcactcccccacttgagtaatgagtcaggatccctatccattttttacactgtggcactgtccacccctttttgggttattatttctaatttttataataacttctagccactgccacacagagtgtatttttaaaaaaaaagagcaaaaccgcaatgcatcccacgtcagcatcacgcattagttgaccaacaactgctctccacgtgtgcactgtgtgccacttgacttcccacttgctcctttctcaatccactttgagccgtcaccgtggaccccaccaccttcttccgcctcttcgtcgacgacgcactatccgacgaagaagacgacggctccggcgaatacctctttgccgtgacccgaaccggttcgggctcgcctgaattaatccggagcgggaaattcaacaaagcgcgcgagccgcgcattcggtacgcggctcggtcgtaagccagcgc

SEQ ID NO: 9098 - DNA, 566 bp, Glycine max
  unsure (1)..(566): unsure at all n locations
  Clone ID: jC-gmfl02220099g01d1
gtcctccactgactcttactagtgtatgtgtaacataacatgatgacgaccaacatagatatatcacattgggtcggcgagttcatacgatggtatcactcagtaactacttgctccacctccttaaaataaatagtaattgccgtcgaccgagctaggatgataggcggcgcncccgcggagggcttgaaattcgggcgggagggccttcataaaaccaagcgctggaataccgccactcactctcacccctctaggggggctcaaaagccaaatccagtccatcttcagccttagctcccgaacttgatatttcatacccgagacctccccagaaaccctaacctctcccccgtagaaacaaccgtagccgacaggaaccacgccgcaattaaagagcaccaccgtagaaaccccacacccagccctaaggcccctgccccagctccgaacgttaccatacccgagctcaccctcgcctttggcgatatctccgccgaccacccaacctaccggttcgaagcccaccgagagatagagaagcgcgggggcgtccggcacggcat

SEQ ID NO: 9099 - DNA, 521 bp, Glycine max
  Clone ID: jC-gmfl02220099g02d1
agtcactacttcctctgagtctagcgcgtgtatgccccccgaacatgaagagaatgcgcgaaatggaccagctcaaaacagtggtaggaatgacaaggagcatgagcatcccttggcctcagagacaagagttgagaagttgaatgagatggaacaagatgcatatgagagactggagaggagttcatcctatgtgtcctccaaaattgggagtccagtaaatggtcatacctctattacaagtactccaaatcatagatcagcaacaaccccaaagcaggctgcttctttgaatgctgattcttcgtccccaatcttggaggaaaattctaagagcaggtccataagcagtgatgatgaaaatatggatcaggagggttgtgaaaaagttttcaatggtagaaatatgagtacaggtgttcaaataaacaatgacgaaagtgattttgacatttattctaagcacactacatctctagacagtaattacctcgtggacaagaattcaagctttggtttgg

SEQ ID NO: 9100 - DNA, 339 bp, Glycine max
  Clone ID: jC-gmfl02220099g05d1
cttggggccaaaaaaaaccacccttttcaaggggggaaaaatccaccccccctgccccgttaaattaaatcaaaaacgtaacccccccccagggggggggaaaaattctttccccccccaaacgggaaaagggtacccccccttacccccccccaaaacgggggggggtcaaatttccctcccaaacaaaaccccattgtttgccggataaaaagggggaaaacaatgggtggccgcaacagagggggaaaatttttttccccccctaatgacccgccaaatgccccaaaccaataaaaaacccccccgggcccaaatccgaggttccctccccggggc

SEQ ID NO: 9101 - DNA, 255 bp, Glycine max
  Clone ID: jC-gmfl02220099g06d1
aacaccaaaggggattttttaaacaaaaataaagaccatttttaaatcgattggtttatttatgcctgtcggcaaataaatttattatgtaaaaaaaaaaaaccccacataaagatctaaaaaattggcacttttttttacatctcaatttcaatcattacatattaccctgatcgggatgatccaccggagttgttgttcggcccctccctctagaatgccggtggtgactgccgccaaatttaaaccttccgg

SEQ ID NO: 9102 - DNA, 439 bp, Glycine max
  Clone ID: jC-gmfl02220099g07d1
caataatacaactaggtggacagcattgattagaagttttaacattagtttttttacatcagaattaacaataaaatgtttttaaattgtcttttgggcaaaacgcagatgttttgaacaacaaaagaagggggattaaagaatgtacaattgaattgtcaaaggcagatgactaagcatcatctgcattacttccaccaacatgtgcttcattgccgacccaataattattattgttattgccatcaggacctgacaccttgtaccgttcaattacagattttccttccttgtacttctggcttttttcatgagcagtctcatatttccaacccacaattgatccacagcccacacagaaaatgtcagccacagtatgcatcccaggggccatctgtctgtcctcattttctccaggtgtaacattcacgaccttact

SEQ ID NO: 9103 - DNA, 559 bp, Glycine max
  Clone ID: jC-gmfl02220099g08d1
tttttttttttttttttttttttttttcttttttttttttcattttttttctttggggggtttttttttttttttttcttttcttttttttttttttattttacccaattcttccccccccctttccacacaaataaccaccccaccctccccccccccccaggggggaaaaaaaggggaaaaaaaaaagggggggaaaaaaaatcaaaaaaaggggcccctaaaaaaaaacggggggggggggagggggcccccccataaaaaacccccgggggccccccccggggggaaagggggcaaacaggggggccaaaaaaaacacccgggggggatccccggcccgggggggcccaaaaaaagggggggggggggggccccccagggggccaaaaggggggggggacaaaacggggggcaaaccttttcccccgaggggggggagggccaccaaaaaaaaaaccccccgcctcgggggggcaaaacaaccgcaccaccgggcaccttataaaggaggaccccggggggcccccccaccggtggaaggagcggcccccccccc

SEQ ID NO: 9104 - DNA, 513 bp, Glycine max
  Clone ID: jC-gmfl02220099g09d1
gatgataataagcaaacatttctctattattataaaaggggttacaaacgagtttatctgaaatttctcaagatctaaaatacatagagcacagttttttttttccaaactaaagaaaaacagcaaacttttgaatcactttcacgatgtgtagttgtacttgtacacaataataatttctaacaacataaataatgacgagtctttatgtgacaagagatatgccttgtagaattaatgcatcagctagaacttggttagcagcttgtgaaggatggacactgtcccaaaacacatactgtgtggcattagaacaagttcctggtgattttggattacacaacaaggatgttgtctttacagtcccggtaccacagcatcctctgtttgcctccacaaaaccagattttgaaggggattgaacaaggtcatagagaggcttgtaaatgtcgaaaaccgcaatcttaagaccaggaagttgcttttgagactcgttgagctgagttgagcttt

SEQ ID NO: 9105 - DNA, 390 bp, Glycine max
  Clone ID: jC-gmfl02220099g10a1
aaaaaaaaagaaaacccctttttttacccaaaaaaaactaattttgataagcccttacgggtcccgggtttaaaacagcctgggggggttctttttcaaatcccaatcccccctttttcttgggacccaaaaaacaggggggggggggggcccaagtttttgcaaaaaggggaaaaccgggttcccccccttatgggtaccttggggggggccttaaaggcttaggggcggggcaacccccaaattttgtttttttttggggggagaccattcaccccccccttttttttttttccaaaaaaaaaaaaaagggggggggggggagaaatttcttggaaaaacattctaaaaaaaacttttttccggggcgcgggggggggaacccccccc

SEQ ID NO: 9106 - DNA, 540 bp, Glycine max
  Clone ID: jC-gmfl02220099g10d1
accagatcttcacgcaaacttctgatttgagttttactcctttagatctgcaaatgaatttctgattttcatttaaacgcttggccgaattgtggagctgccaaagcaaaacacttattattatgtgagagcaataatgggctctggaaatatactaccttcttctggcagctctgacatgtctatctccgagctccgcgagaagcaccattgggagctagaaaatctgactctgaccacacaacctctcaaaacgttgaaattcttcacattagctgttattcaatacatcaagaaaacagcaatatatctattggcaaaaggtggatgggttatgcttttcagtgttgcagttgggactcttggcatagtgctgatgacccttggttgcctccatgagaagcatcttgaggagcttcttgaatattttcgctttggactgtggtgggttgcccttggggttgcttcttcaattggtctaggatctggtttgcacacatttgtcctatatttgggtccccacatagcactgtttacaat

SEQ ID NO: 9107 - DNA, 92 bp, Glycine max
  Clone ID: jC-gmfl02220099g11a1
gaaaatctagcagtcgtccagaataaggcccgaggcgccgagctgactaatactcttaccgaccttagctttttcaatttattattttttat

SEQ ID NO: 9108 - DNA, 533 bp, Glycine max
  Clone ID: jC-gmfl02220099g12a1
cagctctttctgttctctctttcttctccaagcgattcattcaattttcaattgggggcgatcgcattcttcttctacattctcgattccttcctttctcaacaactattatattatgcatcttcgtctccctctctcaccaaccacctagggtttctctccgacgttaggtttttttttttcgtttctcgccgggattttgggggcagacttaatctccggcagctatggcctccaacttgcagatgagccctcaggtggagcagatccacggtgaaattcgcgacaactttcgagccctcgcaaatggctttcagaagctggataagattaaagatgccaatagacatagtaatcagctggaagaactcacggacaagatgagggagtgcaaaaggttgataaaggagtttgatcgtgagattaaagacgaagagggaagaaatcctccgaagtgaataagcagctcactgaagaaaagccatcaatgatcaatgagcttacctcatatgtggcattgagaaaacggacat

SEQ ID NO: 9109 - DNA, 518 bp, Glycine max
  Clone ID: jC-gmfl02220099g12d1
aacaaatgttatttgatttaattgaagtatgctgttaagttaactaaggaactagatcatactagctaaaattaacggtgaaaaatatctaataagaacaggaaggactaatttaactaaacaatatggtgagcttcatagccagaaaaacacccctattacataacagattgtccacaaatataattctttttccactatgcccaagtcaatcaacagatagaaaataaacagaagactaaattaagacgaaaaactcaaacttaaaatccaactatatttttcagtatttcccaccttgcttctacccctgttgaaagtaacaaagtaaagctgctctgcaacaaagtagatctaaatttacaagacaggaaacgaccaacaaagttaaataaaagaaagaaaaaagaaaaaaggccaagagaaggataaacccgaacaaaaaccaaaagatataagcatcttaggcagaaaccctaaaacccaaaaaaccctaggagtaaagcctgttaggagct

SEQ ID NO: 9110 - DNA, 403 bp, Glycine max
  Clone ID: jC-gmfl02220099h02d1
agagtaagaatcacatttatatatatataaaagggtggggtgcaagaagattaaaaaaaataatagcatatacgaaagggataactagacaaaaaatgggaagaaggaatggcatcaaactgtgaagccaatccatccccgtataaatcgaaattacaagagagcacatttgtaaactcagatcttgcctccctggaattggaaagatgatgacagtatcctgaagagtccatccgggttatcagtatgcacccagtggccagcatcttcaaggacatgcatttcaactccacctccttcctcaacagcaagctcttcagctgcatggatccgctgaagatcttcaagagcccatctatgtaagcttctttctgctttcaaaaagttcacatgcaccccacga

SEQ ID NO: 9111 - DNA, 514 bp, Glycine max
  Clone ID: jC-gmfl02220099h03d1
caaattaacctgatcaggtgaatacagtaacagatgattcctatcatgttcaaccaaaattccagatggttgttgcacaatttcagcagcagcactagcatcattctttatctcagaatcaacatcaagaggttgctgcttaattttatccagagaattgttatcacccgaatcgtcttctgattttttgtcgttcaaaattgcagacttgtttttatcctctacttgttccactttaacagcttgtccacaattctgtttatcaccttcaacagaggtaccagagtccctcttttgcattgaagatgcaggaagcaaatctgctccctgagtctcattgtcatcaaacatgacatccaatcgggaaaagttttttatcaaggttgatgtcatttcaatctcaagtctcttgtcaattcttttatctgatagtggagataaaaggtctcggtttcgtttctttaatatagatggtgtacctgtgagggtttagccgcacttttttaactcgagc

SEQ ID NO: 9112 - DNA, 451 bp, Glycine max
  Clone ID: jC-gmfl02220099h04d1
aactgtaattatttttcagccagtgatcagaggggatttttatcataattctaagtgttttggaaacacattgtgcaccaatacagaataattaaaagggagaacttattttttttccctttttaagccttctccttagatggaactgtcccatctgtgcctgcaagcatggcatattagctcttcctagtcaaatttgtgcactcaaatcccaaagtcccttgaagaaccctttgaatgtagtttgcaactttaattgctgatttccctccactgcatgtgagctccttgggaagctggttcaagaaagtgatctcatatgttggcattggattcatgaacacaaagtacgggtacaacaacttgtgtccgttaacctcggttccgtataacacactttgctttgagttaatagcaactgggacaattctatcaactgtgttcagcaaat

SEQ ID NO: 9113 - DNA, 432 bp, Glycine max
  unsure (1)..(432): unsure at all n locations
  Clone ID: jC-gmfl02220099h05a1
gggagaagggaataaagaaaaaataagaagaagaaaaataaattaaataaacagagataagaaataaaataaaaacagatgaaaaaaaaaggtaataataaaataaaaagaaggggatgatcgtgaataagaaaaaaccccaggggggagaagaggaaganaaataaaaaaaaaaaaaattatagaagagagaaaaaagaaaaataaaagggggtgggaaaagaaaaatngagggggagaagaaaaaaaaataaaaaaaaaaaaaaaaaaaaaaagaaaagtataaagaaagaaaagaaaaataaaaaaaagaagaaaaaaggaaaaaaaaaagaatagaaaagtggaaaaaaagaaaaagaaaaaaaaaagagaggaaagaagaaaaaaaaaagaaaaaaatggtaagaaaatgaaaaaaaaaaaaaaaga

SEQ ID NO: 9114 - DNA, 400 bp, Glycine max
  Clone ID: jC-gmfl02220099h05d1
gtgggttataaaggaaacattgattagaaaccagtcaaaggggtgcccaccaacaacatcagataactaaaatctgtcactgaaatcttcagaaaaatagcggaaaaaacatctccacaagacatcacagactatattaagattattactaagtagtaatgaaaacacagattatgatgtaagcaataacaagtttgtaacaaagtacaaaatcaaattaagtagtgagaatagggggggaggtagtcatctttgccaccaagaatgccagccttggtgtctggaaagaatttaaatcctggcagctcggcgacatctatctcacttggaaccccaatggggtagcggagattgtgacctggaaggtcatgctcaagtgacttcgtttaattcagatccc

SEQ ID NO: 9115 - DNA, 462 bp, Glycine max
  Clone ID: jC-gmfl02220099h06d1
ggaatccaataaatgtttcaatatggaattgccaaactttaaaaagcttacaacatacaaaactgcacattattctcattctcatagtaactaaaaaatgataaggcagaaaagagagatttaaaagaataaggatttctccccctaggcatattaatcccatggactcaatgaacactcctctggggtagttggataacgttcagaatcctggcagtagtcatagatcacaaggttcctctgaacccaagcataatcctttttctgatcatcagagaggggccaagcatcatactgatcccaccaatttttggttgtggttgagacacaagcagggtatgggtcttcccattggcaaccatccacactgaagtccttgtaggatgacacaaatggggctaatttccagtttgtcttcttaagcccacctcttggggcccagtcatctgcattccatatgct

SEQ ID NO: 9116 - DNA, 437 bp, Glycine max
  Clone ID: jC-gmfl02220099h07d1
ccccccaaaaaagttcccgggtatttcccaatattttaccccccgggggggaatgttaggaaacccaatttgttgttcccgaagggcccaaaaagaaaatttttggcgctttttcccggcttcccccctaggggggggttaaaaatgatttggggggccccctttgggaatgtcccccttgggggggggggcccttttttccataacttggttaaaaaggggaaaagcaattgccccccttttttgaagggggggggccttcttgtattgtttttggaaaaaaatgggggccccttttgcccctgaaccaaatttttttcctttgtttttcccaaatgggcccgaggggtccggggaatttaagcgggggcccttcttctttgccccgcattgggaaggagatcccccagggggggggacggggtttttttcccctt

SEQ ID NO: 9117 - DNA, 325 bp, Glycine max
  Clone ID: jC-gmfl02220099h08d1
acggggaaagtgttcatttttaacccgctattgtggggtcaaaccccaaatatgaaaaagaccaaacaaacacaaatcaaacaccttaaaccaaaagttcaaacccaactaacaccacctacaactgggggatccaaatttaacagccatccccggttcaaggttttacagctggaccctactcgcaagggcctgggtcacaggggcacctaggaccacaaaagccccccccggtgttagaggcaacacccatttcacccccctctaattgggcccttaaagggccaaaacccaaaacaaggggccttggggggggttcttccag

SEQ ID NO: 9118 - DNA, 315 bp, Glycine max
  Clone ID: jC-gmfl02220099h09d1
ataaaaagcaacaccatcgtatatatgtatctatatctatagtaaatgtcatatttgacattgaaatttaaaggacagatagaaatataaggtcaagaaggagttaaaaaaaaagaaaaagaaaggattaaatataaggtcaagaaggagtaaaaagaaaaaagaaaaagaaaggttttaaacggatgttgatatatgtgacatcagactactgcagctcttccgtttaagttagagagctgaaagccacttggtttcaaatcttgatcaccatcctcatcatttttactcttgcaagagcagtagcaagcatac

SEQ ID NO: 9119 - DNA, 511 bp, Glycine max
  Clone ID: jC-gmfl02220099h10d1
ggccttcataaaaccaagcgcacgcttccgccactcactctcacccctcctatcccccactttcaagccatattcttcttcagcttcggccttagttcccgaacttgatattcaacccgacactccccagaaccctaatctctcccccgaagaaacaaccttagccgacaagttccacgccgcaattaaagagcaccaccgcagaaaccccacacccaaccctaacgcccctcccccaactcccaacctcaccatccccgacctctccctcgccttttccgctatctccgccgcccacccaatctccccctccgtcgcccaccgcgtcatcgagaaatgcggcggcgtccgccacggcatccccttcctccaatcccttgccttcttcaactggtcctcctctctcgacggcttccccgcctcgccggagccctacaacgagatgctcgacctcgccggaaagttgagacaattcgacctagcctggcacgtcatcgatctcatgaagtct

SEQ ID NO: 9120 - DNA, 321 bp, Glycine max
  Clone ID: jC-gmfl02220099h11a1
gtaatcagatccaactgtagtatgctgataagtgaactaaagaactagatcatactacctaaaattaacggtgaaaaatatctaataagaacaggaaggacttatttaactaaacaatatggtgagcatcaaattcagaataacaccctgttctcatacccgatagttcactaatataatttttttttccactatgctccaattgagtccacagatagaccatgaacagtaagactcattttaagaccaaataactcaaaccttataatccaacttttttttttgagatattccccaccttgtttctacccctggtcgaaa

SEQ ID NO: 9121 - DNA, 471 bp, Glycine max
  Clone ID: jC-gmfl02220099h11d1
atctctgaacaagaagcaaatacattctaaatgggggcatactacatatttcatctcctatcctagtagtgttaaagcttccacgcacatttgttttcccggtataaggagacgccgggtagaaaatgatatgtccatgctactgtaggatttcaagtaatgattctttcaccagtaatccccacaagagcattttccatccttgaaatgatgaaaccttttgttatctctgacaattaattccctccctacaatcctggacatgatcttgatggcattgtgacagtcaccacagactcgaaggttcttgatgattctaagaggtgttcttggtggagtactaataagaccataggcaattgctagacgttcactgtggtagagcaaggcttgctcctttgcttcctgatcaatgtcatgaagaacatatcttgtgtcaggaacataccctgcttctttcatcccactcaa

SEQ ID NO: 9122 - DNA, 392 bp, Glycine max
  Clone ID: jC-gmfl02220100a01a1
caaacaaagggagataaattcttttttttttattccgtttttttttttcatattattttctctggggccctaaccctaactttattaccttggcacccacaatacatcactcaactggggctcagctgctcagggggttaattccaaatctccatcacgtttttgtttcagttattctcttcgttcgcgacgccattttgtttcgctgaaaagggcggtatcctttgtagtcacgggtttcgttttctctgttcgatttttatatttgttttgttgggtttccaacttctgcctttcatttttctgcttctgaataggacgctatttcgtttcgtctagttaggggattgggaatttttctgataattgcttttgtttttgttgagaatttg

SEQ ID NO: 9123 - DNA, 429 bp, Glycine max
  Clone ID: jC-gmfl02220100a02a1
gcccttataatggttggcgctttagcgcgcgacctatacccggccgtagtggcatgggccaagtcctgtttagtaggagggcgctgtggtttctgcaaaacccatgtctcgagcctcttcggagcggtcgtcgatgcatatctaggtggtatttgcatctattcaaatgagaactttgtaggccgtatagggtaaaggttccatgtaatctgcacttgcacatgggttagttgatcctacgggacggtggaagcctgtctgatatcgctctgtgcgcgtacttctaaagggaatcggtttaatatttctgaaccgggacgtggcggctgacggctgcgattgggagttctgagacgttcgcgggggccccggactgagttatcttttctgtttaacagcctgcccaccctggaaacggttcattcggat

SEQ ID NO: 9124 - DNA, 69 bp, Glycine max
  Clone ID: jC-gmfl02220100a05a1
ggcatatgaaactcagaggatgtacctgccgtggacccttcaaccccattgacgctggctgaccatcca

SEQ ID NO: 9125 - DNA, 411 bp, Glycine max
  unsure (1)..(411): unsure at all n locations
  Clone ID: jC-gmfl02220100a06a1
ccaagttcactttggtggcagttgaacgagtttgcaaccccacacacaaaaaccaaacccttaaaaatgtcatccccctcgccggtggccacggtggtctccgccgccgcgctgtacgaccgcgccaaagccgtgaaagaattcgacgaaaccaaggtcggagtcaaaggtttgatcgattcgggaatcagaaccatcccccctttcttcgtccacccgcccgaaaccctagcggacctcaagcgcggaaccaaacccgggtccgcgccggagatccccacggtggacctcgccgccgaggagagctcccgcgccgccgtggtggagcaggtccggcgggcggcgagcaccgtgggattcttccaggtggtcaaccacggcgtnccggaggagctgctatttgcgaacgct

SEQ ID NO: 9126 - DNA, 526 bp, Glycine max
  Clone ID: jC-gmfl02220100a07a1
agaaaatgccgatgtcattataatggatgataacttcacgactattgtcaatgttgtcaaatggggacgtgcagtatacataaacattcaaaaatttgtgcagtttcaattgacagttaatgttgttgctctggttatcaacttcttttctgcgtgcatcactggatctgctccactcaccgctgttcagttgctttgggtcaacttgatcatggacactcttggtgcattagccctggctactgaacctcctaacgatggacttttgaaaagacccccagttgcaaggggagcaaactttatcaccaaacctatgtggaggaatatcataggtcaaagcatatatcaattaatcatcctagggattctaaattttgacgggaagaggctactcggacttagtggttcagatgcaacgaaagtgctcaacactttgatattcaactcctttgtattttgccaggtgtttaatgagataaacagcagagatattgataagataaacatattcagaggcatgtttgac

SEQ ID NO: 9127 - DNA, 232 bp, Glycine max
  Clone ID: jC-gmfl02220100a08a1
actcaatcagagataaactgatacatccaccaccctcatcagtggcatgagaaggtgtgggcttttcaccaatgaatccaacataatctccctgcctaattctatccaaaacataacgaagcctgttaatgatggttttattatcaggtaacccatcaatatttactctggcttacttacccacctactgaaggaggccaagagccacggatcttactctggatatggttag

SEQ ID NO: 9128 - DNA, 481 bp, Glycine max
  unsure (1)..(481): unsure at all n locations
  Clone ID: jC-gmfl02220100a09a1
gccgcgtgtgaatgaaccatccggacggacagccgaaattttacatgtggcgttcaaaatctgatgcaatagtagtgaaccaattgtatctgtaaacatggctgataacgaagattcggtgttcgatcctagccttctgaaaaagaagaagaagaagaagaccacagcatttgatatggatgcggctatggctgaaggttctcctgcggatgcatccgacaacactgacaaagagaacacggaacccgcatcaaacgtggataatatggacatggatgatttagaaagttttggaaaaaagaagaaaaagaagaagaaggctttcaatttggaagaattagacagtgctctaccaactgacacaacggcagacgaacccagttgaaccctgcangaagatatggttgatgatagctttgactatgatatggacttcagcanngacgaaaagaanaagaagaagaagagggcctagatgatt

SEQ ID NO: 9129 - DNA, 551 bp, Glycine max
  unsure (1)..(551): unsure at all n locations
  Clone ID: jC-gmfl02220100a10a1
ctaatccctcactcttgttcttcagtctcctcctattatccgccaccgtagccgccgccgaacggatcgacgatgaagacgaccttctgatccgtcaagtggtgccggatgcggaggaccaccacctgctcaacgcggagcaccacttctccgccttcaagacaaagttcggcaagacctacgccacgcaggaggagcacgaccaccgcttccgtatcttcaagaacaacttgctccgcgccaagtcacaccagaaattggatccctccgccgtccacggcgtcaccaggttctccgatctcactccggcggagtttcgccgccagttcctcggcctgaagccgctccgccttccctctgacgctcagaaggctccgatcctaccgaccaacgacctccctaccgatttcgattggcgcgaacatggagccgttactggagtaaaaaatcagggttcgtgcggatcgtgttggtccttttagcgccgtggagcgttggaggtgctcattntctttctacaggtgagctcgtgagccttagcgagcaacaac

SEQ ID NO: 9130 - DNA, 516 bp, Glycine max
  Clone ID: jC-gmfl02220100b01a1
gtccataatggattgagttcctcatcttataaaatgagccaaacttgttatgctttgtgctgatcacttttggagttcactttttattctcatcaagatatcatcataattccaatgtctaaacttgtgatttcactagatcattctcaaactatgcataaccattcccaagcctttcgaatttgtatagataatcattaggagttcttttatacattctgccattgaaggtctttcattactctcagtacggacacatcttgatgccagattggcaaacatgactatagactgaatggtgtaagaatttcgagccatctctggatctatcaccttacgaagcttcttgcggtcattcagtatgtgcctcacctgtagtacaaggttttgatcgttgggaccttggtttagatctacagctcgacgtccagtcaaaagctccaaaagaacaacaccaaaagcataaacatcactctgtagagtgagtttccctgtcgatgtatactcttgatcaaa

SEQ ID NO: 9131 - DNA, 545 bp, Glycine max
  Clone ID: jC-gmfl02220100b02a1
gtggggtggtgagcgtgccaaaatctatgagaatggaaaccttctcacactctcccttgacagagcctctggctctggctttcgttccaaaaaagagtacttgttcggaaaaattgacatgcagctcaagcttgtgcctggtaactctgctggaacagtaactgcctattatttatcttctctggggcctactcatgacgaatagactttgagtttttgggtaacttgagtggtgatccttacactctccacacgaacgtattcagccaagggaaagggaacagagaacaacagttccatctatggttcgaccccaccaaggacttccacacatactccgtccaatggaatactgcaagcatcatattctctgtggacgggaccccaataagggagttcaagaatttggagacgaaaggggttccattcccaaagagccgacccatgagaatatactctagtctttggaacgctgaggatagagccacaaggcgtgggcttgtgaaaacggattggagcatggccccattcacagactcatacag

SEQ ID NO: 9132 - DNA, 537 bp, Glycine max
  Clone ID: jC-gmfl02220100b03a1
cgtttctctctctggattttgttccctctgtaggtgatggcgagtacaaacacatagtggggactctgttgaaagcaacggggacaccgaacttggtggattattttccagtgttgagggtgtttgatccacaagggatcaggaggcacaccaccaactacattgacaagttgttcgatgtgttcgatcccatgattgatgaacgcatgaggaggaggggagagaagggttatgccactagccatgacatgttggatatcttgctggatatttctgaccagagtagcgagaagattcataggaagcagatcaagcatttgttccttgacctattcgttgcggggacggatacaacagcctacggcttagagagaacaatgacggaactaatgcacaatccagaagccatgagaaaagcgaagaaggagatagcagaaacaataggagtaggaaaaccggtggaggaatccgacgtggcaaggctgccatacctgcaatcagtaaaagaatctctgcgaatgcacccaccagcaccac

SEQ ID NO: 9133 - DNA, 545 bp, Glycine max
  Clone ID: jC-gmfl02220100b04a1
gttgaactcaagcccgactggtccaagggttacagccgtctcggtgccgcgcatcttggcctttcccaatacgatgatgctattttggcttacaaaaggggtctcgaaatcgaccctcacaacgagccccttaagtctggtttggcagatgcgcagaaggccttggccgcggcctccaggcctcgcccctcggcctctaaccccttcggtgatgctttctctgggcctgagatgtgggcccgtctcaccgcagaccccaccactagggcttacctccaacagcctgatttcgtgaagatgatgcaggatatccagagagatcctaataacctcaacttgcacttgaaggaccagagaatcatgcaggccctaggagttttgctcaacgtcaagattcaaacccctcccacgggggctgacaccgatatgccggattctccatcgccctctgcggcagcgtctgagaggaagagagctgcggaagccgagcctgctaagcagcccgagcctgaacctgagcccgagcccgtgcccatggaattgac

SEQ ID NO: 9134 - DNA, 522 bp, Glycine max
  Clone ID: jC-gmfl02220100b05a1
aaatcttatcttaactaccctttcacaacaaccacgatactatttctcatactctggggaggcaaaaacaccaccaaatgggagaggaaaaggagcagcctaagaatgacaccgagaaaaagcccgaggaggtagcccccaagaaagacgacggacccatccctgtcgtttacaaactcgacttgcattgcgagggatgcgtcaagaagatcaaacgcacctgtcgccacttcgaaggtgtggaaaccgttaaggcggatctatcgtcgaacaaggtgactgttaccggtaaaatggacgccgagaagctgcgagataagattgccgagagaacaaagaagaaggttgatatcatatcagctccgccgaaaaaagaagccgacgttgcggaaaaaccgccggagaagaaggcagaagacaagatgcctgatgagaaaaaaccagatgaaaaacctaaagagagtacggtggttttgaagatcaaactacactgtgacggttgcattgcgaaaattcgaagaa

SEQ ID NO: 9135 - DNA, 460 bp, Glycine max
  Clone ID: jC-gmfl02220100b06a1
atcaaattcaagagattcccaaacttttttactttttattccctttttctcactatacaatacaaatacacattcaacaattttcgattcaagttcaaagccatcgacgagtgttgaggaagaataacaatgggaatgatagtggattatgaaaatgaccaaaacgacgccgttctggttccgccccttaacttcgccatggttgaagactgcgttttccgatccagcttccccaccccttccaatttcccctttctccaaaccctaaaccttcgctccatcatgttagctcctctctctctctctctcaatttgcacttgtaaagattctttcatgctccaatttttcttttctgttgtttcccctcacattagttaattgaggaaaaggaatggatattatgtgtgtctgcgagtgtgggtcttccacacaatattttgcgtgtgtgtgtgtgtgtgt

SEQ ID NO: 9136 - DNA, 625 bp, Glycine max
  unsure (1)..(625): unsure at all n locations
  Clone ID: jC-gmfl02220100b07a1
gaatagtctaatatttattttcctcttccaaatactttgaatgaggccactatgggaacaacgatactctttgctatgcatgctaggttgaacttcatctgccatgtaaattcatatttgaacaaagctaaatactaaatagtgttaacaagggttattttggttctcttttctggccaagtgagatcacttttacttctggaatacattcaaaaatcaaaatcatagtggtgatctgaggatgcaaaagtttctgtttatgactaaagcacacaattgcataggtctatttcaacttttagttaaaactttttgcagattgaaataattctcaatctgtttattcatgagactcacagtatataaagtactaaacttttcagtgtattatatatagattggttatttattctaactgaaaatgtcttctacttttttctcagcaaagtcatcttagaaggttcaacaagattttatcagtgagcacttgtttactatctctcaagactgaaatttngtatgagctgagtgaataaaaggagaactatgtcattggttatatctacagagttggctgatacatcatatgggaatgccagctctaacactaaaggaactgatgttc

SEQ ID NO: 9137 - DNA, 513 bp, Glycine max
  Clone ID: jC-gmfl02220100b08a1
aataaaggctgcagcatcattcgctatgtgtgtgcggtgtaggttggtattatcctcctggggcttggatgaatgctacgtgtgaaggtgttgatgtttgatttgtggatgcataggatgcaataattctactgcttctaaatgaatataagtgtcgggtgtataaggggccttctactcccctcgcggtgctttcatctctagattagtactcacaccttataaaagagaaagaaaaagaaaaagagagtgatgaaagcggagatgaaggatggagctcctcaagttgtgatgaatcataatggtaaccacggcaaattctcacacctacttgcttcccaagatcgtgactatcttctctctccaactggggctcaggtgaaagtttctgatcttgaagggaaagtagtgggtctattattcgctgcgaattggtacccaccttgccgtggattcacccaagtcctagctggaatctacgaggagctaaaaagcagagtccctcaatttgag

SEQ ID NO: 9138 - DNA, 498 bp, Glycine max
  unsure (1)..(498): unsure at all n locations
  Clone ID: jC-gmfl02220100b09a1
ctcagtgtacccaaaaacagatgcagaaggaggaagaagtagaagaagattagagagagtgagtgagtgagcgagggataattggcgagttagggtttcgaattgactcactgagtctttgcattgtgtcgccggttttttttttcgccggagaaaactcgtgctccgatctcctctgcttttgttttcgatagcatagctgtttgaaaggttcggttttcccggcgaggatagtgggattttccggggattccttggtgaattgagtttgggggaattcttgattttgacctaaagcaaaggtctttactcaaaagttttactggattttgngtttttatttttattttctatttttttttttttttgcgttgagtagaccgagcatgagtgagtgtcattgtgtntgagatttggggttgatattttttggtaaataaaaaacaagatanaatttattcttttaagattctgaaaactatcttatcctttttttta

SEQ ID NO: 9139 - DNA, 414 bp, Glycine max
  Clone ID: jC-gmfl02220100b10a1
accgattgctagaatggaatttcgatgctcagtcatctcttttaccattctcttctctcttgctcttgcaggagagagccatgtccatgcatcgctacctgaggaagattattgggaagctgtttggccaaacactcccattcccactgcactgcgagagcttctaaagcctctccctgcaggtgttgaaatcgatgaactccctaagcaaattgatgatacacagtacccaaaaacattcttctataaagaagaccttcatccaggcaaaacaatgaaagtacaattcaccaagcgtccctatgcacaaccttatggtgtatatacatggttaacggatattaaagacacctctaaagaaggatatagttttgaagagatatgcatcaagaaagaagcgtttgagggagaaga

SEQ ID NO: 9140 - DNA, 408 bp, Glycine max
  Clone ID: jC-gmfl02220100c01a1
gaccgtgaaaacactcttattacttgcaaaccgatcggggggagtcaaatacagacatacaggccataataaccatagacaagtattggttattttttttcaaagccaccatctataagccaaccacacacacctttttatatggggaaactggtgggaaatcctttgaaacacaaacctttctcacttgaacgatggagcaatgtgtatggaagctgaactggcccatgtcggcttttcaaacctggatcattgttcccctgtgggaattttccctcaatttctggccggttggttcccaaccttttgaaagctttcaatgcctttgaatccgcagtccaatttggattattcctttgggccagggagacctcatcagaagcatgccttgacaatatctctatcact

SEQ ID NO: 9141 - DNA, 546 bp, Glycine max
  unsure (1)..(546): unsure at all n locations
  Clone ID: jC-gmfl02220100c02a1
gaagatgtggtgcattagattaccttagtctttgtcctagtgtcttccacaacaacttggtccaacgtttccaaatattcacataagagaagaacaatagttctctccctagaaactcatgatatgctagataagccatccttaggagcaatatatccgtcctcttcaatttattagcagaaggtgtgttgcgtattagaccatagtctttttgtcattgttgtttcccaacaacgcagtttagcctttgagagcatcagcaatcacatggtgatcagaatatcattcagcaattgaagatcagtggcatcaggcataggctagcaagcaatgatatggctttcttcccagcaaatttcatgctacaaacacctcaccaagatgaccatcaacctccaccttcactcaactcaattataacttcatgtgcacctcaagagtaccatggtggaggagcatcctttcttggcangagatctatgtcattttcagggattgaactnggagaagaagctaatgctgaggaagattctgatgatggatctc

SEQ ID NO: 9142 - DNA, 454 bp, Glycine max
  Clone ID: jC-gmfl02220100c03a1
aagctacagcacggcactactactagcatcaccctccaccattgacgcgtcctttgcttgctccgcacgtcacttcgcgtttttctcagattcactctcgccgtcgcagatcccaaccaccatggatggttacgacgccaccgtcaggctcggcgccatcaacctcaagcacggtcgcgccgccgattttgactccgcctcccccgacgtatccgtctcctctccggtcacgcgccagaaagccgccgccgccaagcaattcatcgagaatcactacaaaaactatctccaaggattgcaggatcgcaaagacagacgcagagcgcttcagagaaaagtgcaggagtctcagatatcggctgaggagcaggaggaaatgatgaggaacttggagcgccgagaaactgagtacatgaggcttcagagacgtaaaaattgaatggatgacttcgag

SEQ ID NO: 9143 - DNA, 227 bp, Glycine max
  Clone ID: jC-gmfl02220100c04a1
tagcgccgcgaggccaaggcaacactcatctgaatttctgaactctcaaaaatggaaacgccaactgtaacgatacctaaaattggaccaaaaccgtcaaagaaattgaagcttcccacaccaaaggagctgatatcacactatgagtcttagggtatggactcgcaagatgcgtccttgaaggtcatcgaggatctttagaaggcgctgtttggagtaatatcttt

SEQ ID NO: 9144 - DNA, 404 bp, Glycine max
  Clone ID: jC-gmfl02220100c05a1
ggccattccaatcttcgctttttttcacatgcaatcaaccactgatgctgcctgcgggggacaaatcggtgggatacatcccaaagcgtctatagagcccttactcaaataccgtttcaaccctaatagacagctttgtcgcatagcactttttttacgatgaccctgagtccgtcaccgttaaccttgggtacatcggactcttggcctatactgttcacaaacagaagccgctcctcccatgctgcttgcgggactggatgacattctctgtttgttacaaggtcatcttgagaatgttgctgaccttaagcaacaatgtggattgaacaatacatctactgacgcgaccattatcattcgaacatgcaggactctacacagatcgtggtccctatcctgct

SEQ ID NO: 9145 - DNA, 132 bp, Glycine max
  Clone ID: jC-gmfl02220100c06a1
ttggggagaaagaaagaaagaaccaaattcatctctctcttgctctctctctcgttatctcgggggctaacacactcgcacttactctctcttaaaaccaccatttacgaggtcgcgtctactctggctcta

SEQ ID NO: 9146 - DNA, 300 bp, Glycine max
  Clone ID: jC-gmfl02220100c07a1
ctaccaactattctctctcgttctctgatttctgaaatccctcacccatggcttcctcttccctctctctctcactctctctcaccctttgccttgtttccactctctgctacgctcacacatcttccctaaccctacctgtgacaaaagaccattcaacacaccaatacctaacaatcctctcttatggcacccctgttgagtctgcaaaatttgtgcttgatctcggaggctcactcctctgggctgattgtgcatccagaaccaccccatttttcacccttcgccccattttccacc

SEQ ID NO: 9147 - DNA, 511 bp, Glycine max
  Clone ID: jC-gmfl02220100c08a1
cagatgctccacctacctagtttactcccctacggcagagcatgaaaaccaaccacgggcacattggcctgaacccattgtgcgccctcaatccttatccgaaaactgcgaacattcaatccctgaaaggtacatcaagccttatactgatagaccatccataaaaagttgtaattttgatgatgccaatattccaatcatggaccttgggggactatttggtgctgaccaacatgtctcagcctcaattcttaagcaaatcttacatgcttgcaaagaatggggctttttccaagtcactaatcatggtgtcaaccctgatttgatggacaaggtcagggaaacttggcgtgaattctttcacatgcccatggaggtgaagcagccatatgcatacttcccaaaaacctatgaaggctaccgaagcagacttggaattgagaaaggtgctttttctgattggagtgataactactttttcactaatctcccttttactcaaggactataa

SEQ ID NO: 9148 - DNA, 197 bp, Glycine max
  Clone ID: jC-gmfl02220100c09a1
ccagaattcacatgtgcttgtgtcaccaacaacatctcagaattcacatatgttcatgtcaccaacatctcaacccataacccgaaaaaattcaaatggaaggttgaactgtctatgctcacccaccacacatgctggttcctttagatgtcgacaccatcgatcttctggaattcgtcggggcaaaatccgtgggt

SEQ ID NO: 9149 - DNA, 302 bp, Glycine max
  Clone ID: jC-gmfl02220100c10a1
cagcaggatgtccaacatctgcattctatgcagtagtcattgaccaagatatttcccaatgcaaagagggagttaaagtgattacttccaacataccaatgaagccttctctatttgccacagccaaaaatgtgaactatcttccaaatgtcctttcagtaatggaagctgaagagaaaggagcatcttcttctatatgggttgatgaggaaggttatattgctgaaggtccaaatgtgaatgttgctttcttaactcaagacaaggaacttgtcatgccttcttttgataacatcttacat

SEQ ID NO: 9150 - DNA, 119 bp, Glycine max
  Clone ID: jC-gmfl02220100d01a1
ataggggcccctaagcccccgggcggaaatccgggtttacctaaccgggggaggggaaaaataacttttttatgggggcaccaaaaaaaaaataaaggggcgggggttaaaaaacaggg

SEQ ID NO: 9151 - DNA, 531 bp, Glycine max
  Clone ID: jC-gmfl02220100d02a1
gctgaaactgcagaagcggctcgcagccagcgtcctcaagtgtggcagaggaaaggtttggcttgaccccaatgaagtcaacgaaatctccatggctaattctcgccaaaacataaggaagctggttaaggatgggtttattatcaggaagcccaccaagattcactctcgctcacgtgcccgccgaatgaaggaagccaagaggaaaggacgtcactctggatatggtaagcgtaagggtacaagggaggcaaggcttcccactaaaatcctttggatgaggagaatgcgtgtgcttagacgcttgcttcgcaaatacagggaatctaagaagattgacaagcacatgtatcatgacatgtacatgaaggtcaagggtaacgttttcaagaacaaaagagttttaatggagagcattcataagtccaaagccgagaaggcaagagagaagaccttgtccgatcaatttgaggccaaacgtgccaagaacaaggccagcagagaaagaaaaattgctcggagggaggagcg

SEQ ID NO: 9152 - DNA, 492 bp, Glycine max
  Clone ID: jC-gmfl02220100d03a1
cttagctcaaacctcaccttaataatctttcgtgctagctagcttaatcatattccggttccaacagaaccaaattctgctagctagctagtacgtcaaaggaaataaaataatatggcattcagcgggacccaacagaaatgcaaggcttgcgacaaaactgttcacttggtcgaaggtttatctgtcgatggggctgcttatcacaagaattgcttcagatgcagccattgcaatggccttcttgcgataagcaactactcatccaccgaaggggttttgtactgcaaggtgcactttgagcagcttttcaaggaaactggcgcctaccccaagaaataccagtcgtctggaaagccttcactcgagctgaatagagcaccaagcaaactttctgccttcttctctgggactcaagaaaaatgttcaaaatgcaagaaaacccgatatccattggaatagttgaccgtggaaggcgagttttaccataaa

SEQ ID NO: 9153 - DNA, 153 bp, Glycine max
  Clone ID: jC-gmfl02220100d04a1
attattgcgttacaagtggtttcttgtacatagtgataaaaaggctgctgattggggtgaacattcttcagatcctgccacactgtagtgcctaagtttggtaaagtctaaaatacctgttgccaaaagtttccactgttcttcaaagtgttt

SEQ ID NO: 9154 - DNA, 507 bp, Glycine max
  Clone ID: jC-gmfl02220100d05a1
ctcttcctcctcttcaccatagccaaagggcttcacaaccccaaatgtgatgctacccatcaacatgaccatgatggctcaaccctccaagtgttccatgtgttcagcccatgttccccatttaggccctcaaagccaatgtcatgggaagagagtgtcctaaagctacaagccaaggaccaagccaggatgcagtacctttctagcttggtggctaggaggtccattgtcccaattgcctcagggaggcaaatcacacaaagccctacttacatagtgaaggccaagattggtaccccagctcagaccctcctcttggccatggacactagcaatgatgcttcctgggtcccttgcactgcttgtgttggctgctcaacaaccactccctttgctccagctaagtccaccactttcaagaaagttggatgtggtgcttctcatgcaaacaggtacggtaccccacttgcgacggaagcgcgtgtgcattcaacttcacttatggca

SEQ ID NO: 9155 - DNA, 500 bp, Glycine max
  unsure (1)..(500): unsure at all n locations
  Clone ID: jC-gmfl02220100d06a1
cactccctcctcttcacacattttcttagctctctccaacaatccctctcgttcacactttcagattgtgtgaagatgggggctgggggccgaactgctgttcctcctgccaacaggaagtcagaagcttgancctttgaagcgggtacccattgaaaaacctcagtttagtctcagccagattaagaaggccattccacctcactgtttccagcgctctggtctccgctcattctcctatgttggttatgacctcaccatagccttctggctttattaaggttgccaccaattacttccacctctttccgggtcttttctctttcgtggcatggccaatctattgggctgtccagggttgcatcctaactggntgttggggtcattgcccatgagtgtggtcaccatgcattcagtgactaccagctgctngatgatattgttggccttatcctacactccggtctcctagtcccgtacttttcatggaaatacagcca

SEQ ID NO: 9156 - DNA, 441 bp, Glycine max
  Clone ID: jC-gmfl02220100d07a1
cgttattcgcccgacacattttttctccgatcccctattcctctccattctccgttgggtcgatttttgttactcaaaagggaaattgatttgatagatagacagatagatcggttctatgggttaaagtgaaatccgaatccgaatctgaatctgaatctgatccaatcattttcatgttagggcgtgcgatctccaatcaagcgcggttgtgtttaggtttcattttgttgggcgtgtgagtcgtagggggtttcgaagagcatagaataatgccttcggtgcccgttgatctccgtctagtcccttttttcaccgtttaccatggggaaccctctttttcatcgtctgaaaaattttaaaaaaggtgagcggggtgttaattttaaataacactagtttgttatttttcccccctattttttttttcctctttttttg

SEQ ID NO: 9157 - DNA, 569 bp, Glycine max
  unsure (1)..(569): unsure at all n locations
  Clone ID: jC-gmfl02220100d08a1
gaaatggagttccaagataagcgtttatctctgagatcgagcttgacgttcagcgagacgctgtgcgcagtgttcattccgttcataggaatagtcgaagctttggttttcacattcactagttgcttcgatttccaatctcccaggaataagaagaaacattcttctaccttcgacgacattctcaccctcgccgaggattctccatttagtattaatgaaatcgaggccttgcgtgagttgttcaagaagttgagtagttctatcattgatgatggcctcatccacaaggaagaactcacattggcactgttgaagaccaccaccggggagaatcttttccttgacagggtgtttgatgtctttgatgaaaaaagaaacggcgttatagaatttgaggagtttgtgcatgctctcagtatctttcatccttgtactcctctggaaaagaaaattgattttgcttttagattgtatgacttgagacagactggatatattgagagagaagaagttaggcanatggttgttgccattctgtcagaatgtggcatggatctggatgatga

SEQ ID NO: 9158 - DNA, 448 bp, Glycine max
  Clone ID: jC-gmfl02220100d09a1
ggcagaggaaacttagaggaggaggcaaatgtcaagcctccaaccccattgacgcttgctggagatgcaataaagactgggccaatgaccggttcaggctagccaagtgcggcaaagggttcggaagacgggccaccggcgggctcggtggtcccatctatgtcgtcaccgataattccgatgacgacatggtgaaccctaagccggggaactatccgtcacgctgtcacccaaaaaggccccttgtggatcatcttcggacacagcatgatcatcagtttgaggcaagagctgatgatttcctccgacaagaccatcgatggtcgtggcgcaaacgtgcaatttaggggcggtgctggcctcaccattcagttcgtgaacaacgttattatccacggagttcgcatcaaggacatcgtacctaaggatggtggcatgattagggact

SEQ ID NO: 9159 - DNA, 496 bp, Glycine max
  Clone ID: jC-gmfl02220100d10a1
cgagtcactcggtgaggcttcttttcttctttatcaaggatcatctctctgtgtcaggatggggggagcgtgttctaggaagcaagagcgggacaacaaagatagtcctaccagaggactatcacgaagatattgcaaaagcgggactttgaaatggtggacatcctctttttcttatccatctgtagattttcacctacgaaaaggagaatgtccaccactgttggacttgtgcatacagaaaataaatgaggatattgataaatataacacattttctatgctaccacgagatataagtcaagtaattttcaataatttggtttactcccgacgtctaaccagtgcttcccttgaagcttttcgagagtgtgctctccaggatctttacttgggagagtatgatggcgttaatgataataggatgggtgtcatctcatcccagggttcatctttgctttctgtagaatcttctgggtctgatgtcactgatttt

SEQ ID NO: 9160 - DNA, 293 bp, Glycine max
  Clone ID: jC-gmfl02220100e01a1
atcaaattcaagagattcccaaacttttttactttttattccctttttctcactatacagtacaaatacacattcaacaattttcgattcaagttcaaagccatcgacgagtgttgaggaagaataacaatgggaatgatagtggattttgaaaatgaccaaaacgacgccgttctggttccgcccactaacttcgccatggttgaagactgcgttttccgatccagcttccccaccccttccaattttcccttttttcaaaccctaaaccttcgcttcatcatgttagcttc

SEQ ID NO: 9161 - DNA, 508 bp, Glycine max
  unsure (1)..(508): unsure at all n locations
  Clone ID: jC-gmfl02220100e02a1
gtcgagcccaaacacgtgcgacccggcattcgcgccctcctcggcaagctggaaagtgaattggaggagctcgaacggaacgtggaaccgtcgtggccaaagttggtggaaccgttggagaagatcgttgaccggttatctgtagtttggggcatgatcaatcatctaaagtctgttaaggatagttcggagctacgttctgctattgaagatgtacaggcagaaaaagttaagtttcagcttagactgggtcaaagcaaacctatttataatgcattcaaagccattcaggagtctcctgattggcagacactcagtgatgctcgaaaacgtattgttgaaagccaaataaaggaggcggttcttaatggagtttctcttgaagatgataaaagagaaagttttaacaaaattgaacaggagctggaaaagttatcacaaaagtttggggagaatgttctggatgcaacanagaagtttgaaaagctaatcacttgatagaaggaaa

SEQ ID NO: 9162 - DNA, 563 bp, Glycine max
  Clone ID: jC-gmfl02220100e03a1
acaaaagaagagagagacagatagaaagagaaccgtttgagaattttagagacgttatcggatttcaaatccacaattcgccggaatttgggaaccgcggttgcgtccggagcctcggttagtagttagttagggtttcttttttctctttcttctcttccattcggtttcaaattttcgcgattagcgatggaggaacgaggctgaggccgaatttcaaggttctggtttcgtcgtcgctgtggagtgaagaattctgtgctgctgctggtggtgatgtttacgccgcagagggtttggtcgggctggtccctgacttcgaacaggagcggggttcggggcggaaccgggtcgggttccgatttgggtccgaattcgggagatggagcgagcacgaagggaaaaggtgtcgcgcttgttgagaatggtgggaacttggatcgcgaagttttggttgagagggtttccagcctcgagaaagagctttatgagtaccaattcaatatgggactgctcttgattgagaaaaaagagtggaattctaagtatacttgactaagtca

SEQ ID NO: 9163 - DNA, 181 bp, Glycine max
  Clone ID: jC-gmfl02220100e04a1
attctgtatcaaatctcagtcttatattggctgtgtacatagggttatattattgagggactgtatttgtgttcaaattccaattccacatggtgaacataatttgattgctgttagttttccaggttatgtagactatgtgacaatgcaacattatttggattggcccaatattctggct

SEQ ID NO: 9164 - DNA, 524 bp, Glycine max
  Clone ID: jC-gmfl02220100e05a1
taacgttgggagtgggagtgggagtggtgtggagttttattccgatcttactccgggggcggattgattttctcgcgcgctcccgttgcttctcgttttcctgaattccttcagtgctgatggtcattatggatctatgactttacacgagcagagttagcctgtgatgcattagtccgctatccagagtttactcgatgagtccagcatttgaacttgtaccccttagaagcctattcacaatcccatcctcttctaaaacactactctgaagtgatttggtggatgaatagatcaagtgtcctcttggcatgccctgctgccattctgatgatactcattatgataatctgaatgagattgtaaaaattggctgcgaccattgaccttcatcatggatcgaagccatacagccgatcccagaggtgcaagctgcaatcctacggtcacctttgttccaacatcattgatcttaaccagactggtgagcgtgctgctgctctttcttgttattaacactccct

SEQ ID NO: 9165 - DNA, 611 bp, Glycine max
  unsure (1)..(611): unsure at all n locations
  Clone ID: jC-gmfl02220100e06a1
ttccaatatattccattctctctgtgtatttccctacctctcccttcaagatcttcgtcaagaccctcaccggcaagaccatcacccttgaggtggaaagctctgacaccatcgacaacgtcaaggccaagatccaggacaaggaaggaatccccccggaccagcaacgtctcattttcgccggaaagcaacttgaggacggccgtacccttgctgactacaacattcagaaggagagtactcttcacctcgtcctccgtctccgtggtggcatgcagatcttcgttaagacactcaccggcaagaccataaccctagaggttgaaagctccgacaccatcgataacgtcaaggccaagatccaggacaaggagggtatccccccggaccagcaacgtctcatcttcgccggaaagcagctcgaggacggccgcaccctcgccgactacaacatccagaaggaatcaacccttcacctcgtcctccgtctccgtggtggcatgcagatcttcgttaagaccctcaccggcaagactattaccctagaagtcgnaagctccgacaccatcgacaacgtcaaggctaagaatcaggacaaggagggaatcccc

SEQ ID NO: 9166 - DNA, 489 bp, Glycine max
  Clone ID: jC-gmfl02220100e07a1
ggcactatcagttgcaaaatctctcttagaacttccagaatgttccagaatttacatctttctaggccatgtttatgcagcagaggctctctgcttgatgaacagaccaaaggaagcagctgagcacttgtcattctatttgtctgggggaaacaatgttgacttgcctttcagcctagaggactgtgagaaatggcaaccggagaggactgccgattttgaagaggtgaatggaggatccacagctgctaagaattcttctcttgaaggcactcagagtattgttttcctcaagccagaggaggcacgagcaacaatttatgcaaattttgctgtaatgtcggcgatgcagggtgaatttgagaaatccaatatactggctgcgcaggcattgtccttattacctaacagtccagaagccactcttactgcagtttatgtggatctcttgctcggtaagccacaggaagctttgaccaaattaaaacg

SEQ ID NO: 9167 - DNA, 491 bp, Glycine max
  Clone ID: jC-gmfl02220100e08a1
tgccacttcaaaatctcttcattttcttaagtatttatacactgtgggtccccgcaattaaattagttttcggctacataaacagccagtaatctttatatttttctcaaatatatatgaccgtcatcatgatcgttgtggtttgaaactgtatataataggaacaagagtttatttcagttacttgggggaacattaagcttggttcatcaaaaggcctcatcacttgaagggttactatatactacttctgtgactgaaaagtgagctgaggtgtataactgcaaatgggtgtttggtggtggaagctgtttgttgctgctcttgctgggattctcttctcaacccaacattgtgcttcccaaaaagttccaaactacacatttatgcacaatgcaacgacagcaccagacgtatcatactacgactacatcgtaattggcggcggcaccgcagggtgtcctttagctgcgacactgtcccaaaattac

SEQ ID NO: 9168 - DNA, 530 bp, Glycine max
  Clone ID: jC-gmfl02220100e09a1
aaatcttatcttagctaccccatcacaacaaccacgatactatttctcatactctattaggcaaaaacaccaccaaatgggagaggaaaaggagcagcctaagaatgacaccgagaaaaagcccgaggaggtagcccccaagaaagacgacggacccatccctgtcgtttacaaactcgacttgcattgcgagggatgcgtcaagaagatcaaacgcacctgtcgccacttcgaaggtgtggaaaccgttaaggcggatctatcgtcgaacaaggtgactgttaccggtaaaatggacgccgagaagctgcgagataagattgccgagagaacaaagaagaaggttgatatcatatcagctccgccgaaaaaagaagccgccgttgcggaaaaaccgccggagaagaaggcagaagacaagaagcctgaggagaaaaaaccagaagaaaaacctaaagagagtacggtggttttgaagatcaaactacactgtgacggttgcattgcgaaaattcgaagaatcattctta

SEQ ID NO: 9169 - DNA, 368 bp, Glycine max
  Clone ID: jC-gmfl02220100f01a1
ctttattttcccttcaatttggattaaggccagccatagttgtttcctctccaaaattggccaaagaggtaatgaaagacaatgaccttgagtgctgtggacgacctaaattactaggccaacagaaactaacctataatgggttagacatgggattttcctcatacgatagttattggagagaaatcagaaaaatttgtgttgtccatgtccttagctccaaacgtgtccaaagctttacctcaataagacattttgaggtcaagcagatgattaaaaaaatatctaggcatgcctcatcttcaaaggtacaatttaaatgaagtgctatattctttattaaactattggatgagaaatggtttggg

SEQ ID NO: 9170 - DNA, 425 bp, Glycine max
  Clone ID: jC-gmfl02220100f02a1
ttggcgtctctactccgtcacacgacaggggaaaacaagcgtaacaataaattgtcgagcggaggagggctttagaaaatgttgaagctggtctctatgtcgagttctggatgcaaaacggtggcactgttgggaagaccacgaaagatgctgaatgacagtgcgacgaccggcacaatcttctgataccggaaggggagggtgagtttggcgatacatgaggacactcgggcaacgcctgtatttctgatggagatgccgaagcttgccaacgccctgaacaaggagaatgcgtcagacatagtgaggattgctctcgagagcgagaccaagagctacaaccaacaagcttctggaggagtactgcgtgggctgtgtattgcaatgggaggaaagttggctaatccataaggaggaagcaaatg

SEQ ID NO: 9171 - DNA, 528 bp, Glycine max
  Clone ID: jC-gmfl02220100f03a1
cagcgctagctcttgttaaattcttctctaccttactactccctcactttgtgttagaatcatcatgggtttgcaaaaccaattaaacgacgtgtcgtcgggttcgattccgcttctggtgttggcgcagatagccacctgcgtcaactacctccgctccatgcttttcgcgcttttgcaaaccctaggtctcagccgattccactccgaccagatcgtcgacgagcgcttcctcgccgccgtcggatccggcctcgccggacttatcatgctctccgatcagctcaccctcagcagccaattcttccaccatcaccacggcaccgccgtcgggcacgaccacgaccacgaccaccacccctgcgtcgtgtgccatgccaccttcgaggacggcgaccaggtccgcatgctcccctgccgacacgtcttacaccggcgatgcttcgacggctggctccaccactacaagttcaactgcccactctgccgctctccgctcttctccgacgagcgcgtggcactcacgga

SEQ ID NO: 9172 - DNA, 443 bp, Glycine max
  Clone ID: jC-gmfl02220100f04a1
gtgacacagaaattaagctagagcttcatagtttcttcttcttttctcaccttccttctctcccttcagacaaagggacaaaaaatcagtgtgtgagagagagagagagaaattccaaaaccatgtcccacagtcatctaagtttcgcctttgggattctaggtaacattgcctccttcgtgtgctttctggcaccactaccaacattttatagagtttgtaagaagaaatcaaccgaagggttccaatcaattccatatgtggctgcactcttcagtgcaatgctttggatcttttatgcctatgtgaagaccggagaaacgcttcttatcaccatcaatgcattcggttgcgtgattgagacaatttaccttgccgtatttatcacttactgcccgaagaagctaggatgtcgacattgaggatgattgttttggtaaatt

SEQ ID NO: 9173 - DNA, 260 bp, Glycine max
  Clone ID: jC-gmfl02220100f05a1
ggcaaaagagatgggacctgtaaagttgagcaagttataaacatattgaaatgatcatgacgaaaaacgaactagttataaacatattgagtactttataaacatattgagatagcctatttgtgattgggattctgcatacttatctataataatatagccgaaccttttatatgtggttcaaaagtagttgttggataagaccaacgtgtcacttatctattttgaagtcaataaatccatcctggcttccattatat

SEQ ID NO: 9174 - DNA, 517 bp, Glycine max
  unsure (1)..(517): unsure at all n locations
  Clone ID: jC-gmfl02220100f06a1
atacgtgttgtaattagaagaattattggatatcatagataatctctttatcaagaattatatatcggaagatgcgattctagatatggaaaaaaatatgtatagaaagtattttgattggatgggaatcaatagagaaatactaaatcgttccatatcgaatccagaattttggttcttttcaaaatttgtgatattttatgacgcatataggggtaactcgcaggttataccaatcaaattactttttttttcttctaatgtaaatcaaaatgttagtgaaaataaaaagaacattactagaaagaaaaaaaatgaatctcttgaattggagttagagactcgaaatcgggcaaaagcagaataccctgatcaacgaaatcttgaatcatctatctcaaaccaagaaaaagatattgaaaacgattatgtaggatcagacagtgaaaagaatagtaagggtataaagaaaaagaaagacangaacangatggaggcagaacttaatttcttacta

SEQ ID NO: 9175 - DNA, 373 bp, Glycine max
  Clone ID: jC-gmfl02220100f08a1
cagctcctccaggccaaggtatcactcatctgaatttctgaactctcaaaaacgggggcgcaatctgtcactaatcctaaaaccctaccaataccttaaatgaaaatgcaattttccacatctatggccctaaaatcacactattagtatcagggtatgcactctcaacatgccttctaccaggtcatcatggatcttcttaaagacttgattgtataaagtccatttgcccatgttaacatgacaagctattgactgaatcttttatgaagattgatgcaattagcaatcgactcactgttcttgacatgaatctcgattccaaccctgcttttattcatacttttgcacttgcacttgcctcgttagctgc

SEQ ID NO: 9176 - DNA, 563 bp, Glycine max
  unsure (1)..(563): unsure at all n locations
  Clone ID: jC-gmfl02220100f09a1
gttcattccgctcttcgctttctttcacatccaatcaacgaaaaatgctggctgttttcgacaaatcggtggcaaagagcccagagggtcttcagagccctcactcaaattccgtctcagccctaaaagacggttttctcgcagagcacttctcttccgttcaccctggttccgtcaccgttaaccttggctcttccggtctcttggcctattctcttcacaaacagaaccccctcctcccaaggctgtttgcagtcgtggatgacattttctgtttgtttcaaggtcatcttgagaatgttgctaaccttaagcaacaatatggattgaacaaaacagcaactgaggtgatcattatcattgaagcatacaggactctaagagatcgtggtccctatcctgctgctcaggttgtgagagacttccaaggcaaatttgcatttattctgtatgacagtggttctaagactgcatttgttgctgcggatgctgatgggagtgttccctttgtctggngaactgatgctgatggaaatctcgttttctcagatgagacagagatc

SEQ ID NO: 9177 - DNA, 436 bp, Glycine max
  Clone ID: jC-gmfl02220100g01a1
atctacggagctgattataactgtcataaaaatcctctcagatctatgtttacatcgaagtgcctctgctgcatccaatgataacaagccttatgatcccttctctatgaccagacatgattctgaactggatcagctcagagactatcaagagaatgagactttatccatcagttccactggaaagtaccacggtgtggagagagcctcttctgctaagagttctaatgcttctcagatcaaccgaatattgacatgtaatcggttggaaagttcgctatccatttctgaaactcccagcacttcaactactgatacttattcactaaagacgagggtcaggtcttccatgtctgggtcttgtagcggtgcatctaagagttcatactgtaaaacatccacgatccaaaatagtctgggaagaatgttcgtttat

SEQ ID NO: 9178 - DNA, 421 bp, Glycine max
  Clone ID: jC-gmfl02220100g02a1
agagcactaaccagggaacatatgtatacacacatgtagtgagagagaaaaaaaaagggtggtttttggtttctcttttggttcctttcttatatgccatatttgcatctgatgcagcaattcctctgtaacggttattatttttgtgaaggggttggagagaaacactgatcagtgactactgcttggttgctactactgaaaatggattacagcaatgacaacaaggagccatgggattggcatagggaggattattgtctccaaaggagtttcaattatgaaatttcaccagggatatggaatggagtttctcaaaatgaagatctttcctttgtgttcaatgatgaaacaaccccagtgaaagctttgggggactttgcgtacaatgtcaataatagtgagtcaaataatgtacaaa

SEQ ID NO: 9179 - DNA, 570 bp, Glycine max
  Clone ID: jC-gmfl02220100g03a1
atggaaaccatgccgggtgctagagttatgagtgacatggttttactccccaacggcgacgttttgattgttaatggagcagctgtggggactgcgggctgggaattgggccgtaacccggtgttaaacccgtttctttataaacccaacaagcgggtcgggatgagatttgaggtccagaacccgtctcatattccgaggatgtaccactccggtgccgttttgcttcgcgatgggcgagttcttctcgctgggagcaaccctcacacgtattacaatttcaccaaagtgttgtttccaacggaactgcggttagaagcgttttctccttggtatcttgagcccggattctctaacgtgcgtcccgcaatagtatctcctgcgtcccaaacaaaactcaagtacggtcagacgttgaggcttcggtttaaggtgagcgcgactttggttggggattcggtgtctgttaccatgctggcgccgccatttaacacgcactcgttcttcatgaatcagaggctgttggtgctgagcacgaccatttgagtggggttggagaatcaacgcacg

SEQ ID NO: 9180 - DNA, 241 bp, Glycine max
  Clone ID: jC-gmfl02220100g05a1
accgattgctaaaatggaattttgatgctcagacatcatttttaccattctcttctgggttgctcttgcaggagagagccatgtccatgcatcgctacctgaggaagattattgggaagctgtatggccaaacactcccattcccactgtactgtgagagcttctaaagcctctctctgcatgtgttgaaatctgatgaactctctaagcaaatcgttgatacacagtacctcaaaacatt

SEQ ID NO: 9181 - DNA, 521 bp, Glycine max
  unsure (1)..(521): unsure at all n locations
  Clone ID: jC-gmfl02220100g06a1
catcacacccctcgtcacaacttatgaccatcttatgctatttcctctcaatttcatcttggcacactcatttcatcatttttcatttgggtccgataaaatggtgtaaaaattgaacctttattttttaatttgtttgcctctctctctctctctctctctctctctctctctctctagaattttggcttttgagtttctctctctctttgatattgtatcatctgtcagatattaatgggcactgcagattcctgtggtttgcaacttgggttggggctttttcaaccccagctgtccctatttgtagcaaagcagttgttgggatgggaccaaattgacccatcatgaacctctctgtggtttttcaagacaaccatcaatctcatttatgatttgtgtgtgagttctacccttgaaattttcaccaaatattagggttttaacttaaacctgaatttattatctgtgtgtttgtgttttttactctttaggttgtctntntcagattgaatgggaat

SEQ ID NO: 9182 - DNA, 120 bp, Glycine max
  Clone ID: jC-gmfl02220100g07a1
aagctacaacacgtcactacttctatcttaacccttcaccattcctacactctttcgtggctctcaaatacactattccttattctcccaaacccaaaactcttatcaaaaactaaacac

SEQ ID NO: 9183 - DNA, 477 bp, Glycine max
  Clone ID: jC-gmfl02220100g08a1
tttcttgcgttacaagtggtatcgtgtacagagtgataaaaaggttgctgtttgtagtgtacatccttctgagccggccacactgcagtgcctaggttgtgtaaagtctaaaatacctgttgccaaaagttaccactgcactccaaagtgtttttcagatgcatggcagcatcatcgtgtcttacatgaccgtgctgcaagtgcagccaatgaaaatggaaatgaggaagaagagttatatgggcgatttaataattctggatctggatcaatcaataccagcttatctgcctctgcatcaagtgctagcttgacaaatgggtctgcacctgtgtatccggcagccgttacgcaacgaagtggtggtgaaacttggtttgaagtagggcaatttaagacgtataccccaacagctgatgacattggacatgtccttaaattcgagtgtactgtagttgatgcagaaccaaacttact

SEQ ID NO: 9184 - DNA, 474 bp, Glycine max
  unsure (1)..(474): unsure at all n locations
  Clone ID: jC-gmfl02220100g09a1
atataatattgcttcttggttcattctagctaattttgatggctcttccaatttgtctcaccgttattgcaattttcaccctttgttgtgtcattaattgtaacaatggcgttgaagcgtttcatgacatatacccggatcttcaatccatttcagcacgttcggtgagcaaacttcagagaactggataccattttcaacctcgtaagaattggatcaatgatccaaatgggcccatgtactacaatggaatctaccatctattttaccaatacaacccanaaggagcagtttggggcaacatagtgtggggacacgcagtatcaaaggacctcatcaattggaaagaacttgacctgccctatacccatcanaaccctttgacanatacggngtttgttccggtcagccactgtactcccgggtaagggacccgtatccttatactggagtcattgacaagcaaagcaatga

SEQ ID NO: 9185 - DNA, 552 bp, Glycine max
  Clone ID: jC-gmfl02220100h01a1
gacaaagaggtaaaggaagaagaacaaaaaggtggattcagggcttccatgtttatttttgtgttatcagcattggacaacatgggttttgtggcaaacatggtgagcttggttctatacttttatggggtgatgcactttgatctgtccaactctgccaacaccctgacaaactttatgggctcaactttcttgctctcactcgttggtggcttcatctcggacacttacttcaacagactaaccacatgtttgctttttggatcactcgaagttctggctttggtaatgctgacggttcaagctggtctggaccatttacacccagattattgtggcaagtcaagctgtgtcaaaggtggcatagctgtcatgttttactcatcattgtatttgttggctttgggcatgggaggagtgagaggctccttgactgcatttggtgctgaccaatttgatgaaaagaagaacccaggagaagcaaaggctcttgctagcttcttcaattggattttgctgagttcaacattgggatcaattataggggtcact

SEQ ID NO: 9186 - DNA, 434 bp, Glycine max
  Clone ID: jC-gmfl02220100h02a1
gaagcactgtgttcgacttcgtcaaaagcatcatgagccgctacgacagccgctccggcgacccagcttcctatcgtgatcggaggagtgattctgggctaggtgcacctacagggtttggtggctctgtacaacactcttcatcaaacaggagggattatgatgatggtgggtcaccaaagaggaacctcagtttggatggtttacctcattttgagaaaaacttgtacattgagtcaccagctgtaagggcaatgacagatgctgaagttaatgagtatcggcagcagagggaaataactgttgaagggcgagatatcccgaaacctgtcaagacctttcacgatgctggttttccagaatatgtactgcaagaatttacaaaagctggttttactgaacctacacccattcaatctcaaggttggcccatg

SEQ ID NO: 9187 - DNA, 490 bp, Glycine max
  Clone ID: jC-gmfl02220100h03a1
aatatcatctagctagctagctagctagcaaatagcaatgttaaaaaaccaaccacgaccagattggcctgagcccattgtccgggttcagtccttatccgaaaactgcgaacattcaatccctgaaaggtacatcaagccttctactgatagaccatccataaaaagacgtaattctgatgatgccaatattccaatcatcgaccttgggggactatttggtgctgaccaacatgtctcagcctcaatacttaagcaaatctcatatgcttgcaaagaatggggcttattgcaagtcactaatcatggcgtgaaccctgatttgatggacaaggtcagggaaactaggcgtgaattctttcacatgcccatggaggagaagcagcaatatgcaaactcgccaaaaacctatgaaggctactgaagcagacttggaattgagaaaggagctattcttgattggagtgattactactttattcactatctt

SEQ ID NO: 9188 - DNA, 362 bp, Glycine max
  Clone ID: jC-gmfl02220100h04a1
aaatcagaggcagctaaaccgttccttccacagtggttacagaatgctaaaactaatgaagataacggcaaagtaatggatcaggctcagaaccaagaagtgaatgtgaagaataggactcaagaaatacagaagaaatggcatgattcctgtttgaagttacatcctaaatttcatcagctaaatgtgagcacagagagacttgttccaacttctttgtcaatgactggcctatacaatatgaatttgctggggcgccaattccaacccaaaataccactgaataaaaatcttggaaccttcttgcaattgagctcaaatccaacgccaattcacccatcagagcatgtggtcagcccaca

SEQ ID NO: 9189 - DNA, 314 bp, Glycine max
  Clone ID: jC-gmfl02220100h05a1
gaaaattattataccctttaagatgaaaccgtacctacgtgccatattctttattgcttatccttctcgaccaatccatttcggcgagtgcttttttaaatttaaatggattgctaaacattgaaaagtggccctctggcgagaaaagtttggaaatgggaaagatagggaaggagacgacagatcatatcaaagaccttttaaagaaactgattgagtcccctcccgaaccaccgaagcaaatcaatattgaagttgaaggcctgtctgtcgtcaaggattacttatctgactacggctacattgaatcctct

SEQ ID NO: 9190 - DNA, 527 bp, Glycine max
  unsure (1)..(527): unsure at all n locations
  Clone ID: jC-gmfl02220100h06a1
ctcgagccgctcgagccgcaattactactttctctctctttgtaacttgtaagcatggagtcctcaaagatctatgcttacctcttcctttgcatgctcttcctctcctccgccactcccattctcggttgtggctactgtggcaaaccccccaaaaagcacaagcctggtaaaacaccaaagacacccacagtacccgttgttaagccaccagtcacaatccctcccattgttaagccaccagtcacaatccctcccattgttaatccaccagtcacaatccctcccattgttaatccaccagtcacaatccctcccattgttaatccaccagtgacagttccacccgttgtgcttccaccaatagtgaagcccccgggttttctccctccaattcttaacccaccaagtacaccaacaccgtcgccggggaagggagggaacactccatgtccaccaccaaagtctcctgcacaggctacatgccccattgacacgctcaaactaggtgctngtgtggatcttct

SEQ ID NO: 9191 - DNA, 545 bp, Glycine max
  unsure (1)..(545): unsure at all n locations
  Clone ID: jC-gmfl02220100h07a1
cttagctcaaacctcacctcaataatctttcgtgctagctagcttaatcatattccaattccaacagaaccaaattctgctagctagctagtacgtcaaaggaaataaaataatatggcattcagcgggacccaacagaaatgcaaggcttgcgacaaaactgttcacttggtcgaaggtttatctgtcgatggggctgcttatcacaagaattgcttcagatgcagccattgcaatggccttcttgcgataagcaactactcatccaccgaaggggttttgtactgcaaggtgcactttgagcagcttttcaaggaaactggcgcctaccccaagaaatcccagtcgtctggaaagcctccactcgagctgaatagagcaccaagcaaactttctgccttcttctctgggactcaagagaaatgttcaaaatgcaagaaaaccgtatatccattggaaaagttgaccgtggaaggcgagttttaccatanatcatgttntaggtgtgcacatggaggatgtttcctgaccccttcacctatgct

SEQ ID NO: 9192 - DNA, 180 bp, Glycine max
  Clone ID: jC-gmfl02220100h08a1
attctgtatcaaatttcagtcagatattggctgtgtacatagggttatattattgatgcactgtatttgtattcaaattccaattccaaatggcgaacatatttgattgctgttagtttcccaggttatgtagactatgtgacaatgcagcattatttggatttgcccgatattctggct

SEQ ID NO: 9193 - DNA, 344 bp, Glycine max
  Clone ID: jC-gmfl02220100h09a1
ggagagagagaagcctggggagtataattggggagggtacgttgaactcatggagatggcgaagaagcatggcctgaaggtgcaggccgttatgtcatttcaccaatgtggcggtaacgtcggagactcttgcactattcctttacccaaatgggttgtggaggagattgataatgaccccgatcttgcatatactgatcaatggggaagaagaaactatgaatatatatcacttggatgtgatacttcgccagtgctcaagggccgaaccccagttcaatgttatgctgatttcatgcgtgctttcagagacactttcaagcacctccttggtgacaccattg

SEQ ID NO: 9194 - DNA, 389 bp, Glycine max
  Clone ID: jC-gmfl02220101a01d1
aaggacctaaaaatcaagtttaccatgttcaaagatcgaactatagtttggtttatagaacaaatgcctttggtcaccatgcccaaaagtttgtttattgggttatagtccttgagaccaaacttttgaaatgaacagccatagtatgacttttaaggtcccaaaatgcaaaactccctttagaaaaaaaaaaaaaaaaacattcttttggacacgttaaatgtgattaattattgaaccagaacaaataccttccgctgtcatgtccaaaagttcgtttattatgttatgggccttcagaccaaacttttgaaatgaacaggcatactattcattcaaaatgatgaatatgcctcttttaggttaggcatttctttcctactcgggca

SEQ ID NO: 9195 - DNA, 554 bp, Glycine max
  Clone ID: jC-gmfl02220101a02d1
acttgccggcagatttgccgtctacatgtgtagtagtgccgccttcttgggggggggggggggtagcgaacagtgggtagcgagagtagaagccgaacgacggcacgataaaaaccccggccacaaacctaggaggcaaaaacgaacaaccgagataggagggtgttgtaaactcttctactatacatgtactcaacagggcggctgggttggtgtgcgctgggccatgaccctcacaagatggtacagagttagtttaaccaattgggggaactttactgtcagcgcacaggagcgtgtgaatttgtgtgctaaaggtaagcccgcgtgttttgcctggtaaaggggcgcctgttaacgattaaatagtataaatgatactttaacagcgtaggaaggctaacacagcacggcgcaagcaggctgggtcatgaggttaaaaactagtgatcaaaaggggcggcgatggcaggctcatgccctaaaggcgctacttaacggtaaatctatttggtggcaatagcatacacgacgcaggagggatataacggttg

SEQ ID NO: 9196 - DNA, 412 bp, Glycine max
  Clone ID: jC-gmfl02220101a03d1
cttcccagccaatttaccgctactacacgtctagcactaccaccttcttggggggggggggggggggcgggcgggggggggcgggggggggggccggggggggggccgcggggggccccttttcatttcgggggtttaggggtaaaaaagcctaaatagcagggttaactgcacacatttagggttggggaaagcctgcagctcggcgaacaatgtaaaccccgggcgctaacccagacattgtggtgcccccaaaaatttgcggggtgggatatcaacacggacaacgctcttttaccaaataaccttagcccggacaacaaacccgcccccttttcggggattaaccccaccaatgcgccatggagttttgtggaaaccccggagggaccttataaacccccccacaaag

SEQ ID NO: 9197 - DNA, 487 bp, Glycine max
  Clone ID: jC-gmfl02220101a04d1
ctcccgaggtaatttaccctgctacatgttagtagtccacctgcttgggggggggggggggggctgagaggataacatgagaaccggagggaacttgacagcgcccgaaggggagagagagatcaaggtgaagcaacagggaggtaatttatagcagtagtaattgaccaaacatttggctagttacatgtagcagccttattgccgactaacccgtactagagtatcatatgcgggaatagtgaataatgagcaatggtatatgctagttgtatgtgtacttatcctggcaacttgtcagcctgaatatgtctatatactggtgcggtggccataaacaggcaatcattgtgtttagtgtcagtgttaattacataggatggagtatgggatcaaaggcataggtggccaactcagtaggcttggcaactgcccagttaaataaatggaatcacgagtctgatgcttggcgaaaatatgatgcaga

SEQ ID NO: 9198 - DNA, 120 bp, Glycine max
  Clone ID: jC-gmfl02220101a05a1
aaatgcacgaatcacccatatttttttcagggcgctgcacccgggcctcccttggggcaggttaacatcacatttcctgtgccggtaaactggctctacttaataagcaacttcataaac

SEQ ID NO: 9199 - DNA, 410 bp, Glycine max
  Clone ID: jC-gmfl02220101a05d1
cccccagttattccccgtgctacacgtctagcactaccacctgcttgcgtgggggggggggggtggagggggcacgcggcggaataggaaagagcgcaaagcacaccaacgggataacaacataatagtgaagttaaaccggactgacacaagtatttaacgtgtgactggtaatttggatagtaacactttatccacaacctttccctgtcccaacgatatatgtacttactatggcaatgcatcctgagctttaaacaacagcttctagagttcgttcctgggctctaagctagcatgggtctagctctttcgcgagtggtgtccttactatccctcaataggcctagttaaccgtgatgctatttcggatggtgcatagccctccaagcctgcgtgacctactcaat

SEQ ID NO: 9200 - DNA, 474 bp, Glycine max
  Clone ID: jC-gmfl02220101a06a1
cccaaccactactactcactcactgcagatctcaattgcatcgctgtccatggctaccatcgttagcatcaaggcccgccagatcttcgacagtcgtggcaatccaactgtcgaggtggatttgacttgctccgatggtacttttgccagagctgctgttccaagtggtgcatccactgggatttatgaggcccttgaattgagagatggaggatctgactaccttggaaagggtgtatcaaaggctgttgacaatgtgaacaccgtcattggccctgctttgattggcaaggacccaactgagcagactgctattgacaacttaatggttcaacagcttgatggaactgttaacgaatggggttggtgcaagcaaaagctaggagcaaatgccatattggcagtgtctcttgcagtctgcaagctggtgctagcgtcctgaaaattcctctttacaagcatattgctaatatc

SEQ ID NO: 9201 - DNA, 529 bp, Glycine max
  unsure (1)..(529): unsure at all n locations
  Clone ID: jC-gmfl02220101a06d1
gtcgcctgctgtggttgcgttggtgtggcgtcttgttgtgctcacattttgggttgtgctgggggccactgcggtagcatctcattcgcttaggctgtacgtcctgttgcaaatagttcaacccctccntnnttnnnnnnnnnnnnnnnntcntcactgtatgacgtcctccttctcttctttgggggggggggggggaggaaactgaaagagtaggaaatattgggtaaacgtggaacatagaatgcgttgactgtgcgcaagtacaatgtaaaccaggcctttccgtgggagtagattaacatgaagcggttaatgagtaatggacagagtatattcaaaattctctatttaaagtgtaagctgtaaatgtcgcgccagtgttaccggggggttatggcaaaatgggacgacccggtaatcccccgatccaacggactgttcctcgatatgctggtactattaactgttgatgtaaggtgtaacactgccggagagggactaacatctgtacattgctagccactgt

SEQ ID NO: 9202 - DNA, 516 bp, Glycine max
  Clone ID: jC-gmfl02220101a07a1
ggaagggcgcaagaacgacgaccacgtgtccctcgtgaagcactacagatccaaggtcgagaacgagctcacgcaggtctgcgccagcatcctcaacctcctcgactccaacctcgtaccctccgtcttcgccagcgagtccaaggtcttctacttgaagatgaagggcgattaccaccgctatctcgcagagtttaaggttggggatgagagaaaaaccgctgctgaggataccatgttgtcttacaaggctgcccaggacattgcttctggggatcttccccctactcaccccatcagattgggtctcgctctcaacttctccgtcttctactatgaaatcctcaaccagtctgacaaagcgtgtgccatggctaaacaggcttttgaggaagcaattgctgagctggacaccttgggagaagaatcctacaaagacagcacgctcataatgcagcttttaagagacaacctcaccctttggacttctgatgtccaggaccagctagatgagcc

SEQ ID NO: 9203 - DNA, 548 bp, Glycine max
  Clone ID: jC-gmfl02220101a07d1
aagacttgaccggccaatttaccgtgctacatgtgtgtacgtcctccttcttgggggggggggggggggggggggggcgaccgaaacaggctaatacagagaagaaggaaggaaggccagagtttaggagatacgagttgggttaaaagagtagcacatagaaaaagaaaaaataaacaacttgccgtgtgcggtagataataggagagtatacaggcttaagtaggggagaaatgaccctcaggtggaagggactataaacaaagcataggtaaactttattgttagcacaccaacaagattatttagtaaattgagaagccagagtaccctgtagtgactgccgttgccatagtacaacgttaaacccgcacccggcgtgtggaaaactgctaggagcactcgctgcgtgggcgaccaggtggtgtttaaccgcgttactgtactaaggctggttgtaaaacttgcgggacttagcctatatctgggcgtacatgccagcaacagggtagacgacaacatccacaacggcacactcacatttaagt

SEQ ID NO: 9204 - DNA, 479 bp, Glycine max
  Clone ID: jC-gmfl02220101a08a1
tttggccagactcttgtggccaaagccttcagatcgctggttccggaggctttggccagactcttgtggcatgtttctttgtattccgcgatctgaaggagctcatcataaccgcgttcaacgccacggccgaagagatcgcgaaccaaatcaaaaactcgacgctctaccatgaactcgccaccgaccacatgacaaaacaggccacggacatctgcaaggaggtactaggttacgctgtcgacgacattcgccgatccgttcacacgttggaaaagttcgacctaaacaagttgaacgattacgcctatgacctcaaggtctggatcgcgggtactctagctcaccagcagacatgtttggatgggttcgagaacacgagcagcgaggctggaaagaccatggctaaggttctgaacgcgtctttggagctcagcaacacgcgttggacatagtcaacggtgtttcgagtctcttca

SEQ ID NO: 9205 - DNA, 557 bp, Glycine max
  Clone ID: jC-gmfl02220101a08d1
ttaacttgaccggcagatttaccgtgctacatgtgtgcacgtccaccttgcttggggggggggggggggggggggggggggggggggggggaaattccccacaaggcaaaggcacagtaaaggtttaaccaagtccgaagggactgacaagaacgtgctgctaaggatgacttactagccccaaatgaataacgctcgcaacaaaaccaaaatgcaaggaataaagcacgattatgccagtagtatggggttgggttggaaatatgcttacatagagagagaatagcgtaaaaacctgtgcacagcagcatccactcactagctacccagagagcctgatagacgtgaggaccgaaccatggagaaaaaaacattagcaaagcaaagtacagcaaggaactgcggcccaagcctactctaagaacgcccttaacccaagaccctattttacatttggccagttaacaagtatctgtacgtcaaggactcagtgcaaacaagggcttgcccgacgaggtaatacttgtaagcccaggaacaattggaaaattacctta

SEQ ID NO: 9206 - DNA, 409 bp, Glycine max
  Clone ID: jC-gmfl02220101a10a1
ctgcctctaaaaagaccagacttgttttcgcacggtaagcttcttggaccacaaaagggggtcctgttgtatggaccgcccggcactggaaaaaccatgcttgccaaagctattgccaaggagtcaggagcagtttttattaacgtgagaatatcgaacttgatgagcaagtggtttggggatgcccaaaagcttgttgctgctgtatttagcttggcttataagcttcagcctgccatcatattcattgatgaagtagacagttttttgggtcagcgtcgtacaacagatcacgaggctttgttaaacatgaaaactgaattcatggctctgtgggatggatttacaacagatcagaatgctcaagttatggtccttgcagcaactaatcgtccttcagaacttgatg

SEQ ID NO: 9207 - DNA, 568 bp, Glycine max
  Clone ID: jC-gmfl02220101a10d1
catctccctaccaactaatttaccctactacatgtatgcacgtaccaccttctttggggggggggggggggggggggggggggggggggggggggggggggggggggccccccccaggggggggatgaagatggtggggtgatttaagggaaaaaaaaaaaataaaaaaaaaataaaaacaaaacccccccaaaaaaactccaaacatatccccccctgtcataaatttacccccaaaaaaaaaacccccatataaaaaaaaaaaaaaaaaacaaacaacccccaaaaacacccaaaacatcaaaacccattcaaaaccccccaaacacaaaattatctgacccccccttttaacaaaaccaccccccccaaaagcccccaaaaattttttacccccaatttctccccccctctcaaccaaaatcacaacatttcccatttaacaccttccctaattaccccccccttcacccctccaatttttcccgcatatctaataaaaccccccctaaaaccaaaactaacccccccttaaaaaaaaaccgccccctaaaacctgaaacccccc

SEQ ID NO: 9208 - DNA, 400 bp, Glycine max
  Clone ID: jC-gmfl02220101a11a1
cttttatttccttacatttttcaactcttcattactattcattaactttcttgttaagggaatcttcgtcgtggaatctgaggaaacgtcagtatgaaaatcatggagttttcctcgccataatgaacgagagagaatcactagaggcacatgttgttggtagaagaatttctctgggattgactttgattgaatgattgttcactgttcatgctaaacaacacaaaccaaacggctattctgactactttttgatcctgtttctaatcttgtttctaggatcctgtctgtctctcttggtttggtttattagacttgtgctgtgtctaagtctttctttcagggctctgtgagttgaattcaggtgtcacatccaaggcaacaaaacaggatgatgagt

SEQ ID NO: 9209 - DNA, 354 bp, Glycine max
  Clone ID: jC-gmfl02220101a11d1
aactattgctaaactggaatccaatttgaaaaaaaaaggcaaaccggaaaatgaaaggagaaccccagaaatgatgactgggcaccaaatggccaaagagtaagaacatgtccaaggaccacgaacaaagcgaggagtcactaggaacgggtgaggcatctaggagcgacctgagcacggaagggcgagctcaagacgctatggctggccacctgaccggggatggaccaccagaatgccaatgtacttagaactgcctggattattcacgactgacactatactagcaaactgacattatacctgcaagttgacaacttaagttcaaggtgggaacctgggaccccggtggga

SEQ ID NO: 9210 - DNA, 518 bp, Glycine max
  Clone ID: jC-gmfl02220101a12a1
cttagaaacagcaactatgtctctcatgcagcttactagctcccctgttggctcactggtccgtttcattgtaatatttgctttatggtacagaaccatggctttggccaagttgccaccaaacgcttcatcagttccagcagttttagcgtttggagattccatcgtggacccaggcaacaacaacaacataaaaacattgatcaagtgcaacttcccaccttatggaaaggattttcagggaggaaacccaacgggtcgattttgcaatggaaaaattccttctgacttaatagttgaacaattgggtattaaggagtatttgcctgcatatttggatccgaatctcaaatctagtgatcttgttaccggcgtctgcttttgctccggtgcttcaggatacgatcctttgacacccaaaataacgtcagttctatcgttatctactcaactagacatgttcagggaatacataggaaagcttgaaggcatttgtggagagagcagaacaaactaca

SEQ ID NO: 9211 - DNA, 454 bp, Glycine max
  Clone ID: jC-gmfl02220101a12d1
aacaacaaaataacatttttacttgggaactccaactaacaaggaaatagctatttccaaccagtaaaatcatcaaaaatcatatttaaacacctgaattcaacaacgtacatccactttaaaggtaaatatttcacacaggaaaaatgtggaacgtctgtgagatggatcgatgcctgtgaacattgaaatctacaaaaagtaccgaacaatcacaccaaaactcgacaaatcaaaatactcattggcttcgttgacatcaacataactaataattgatattacttcccgtaggcaaacttaatcgagctcaaaacaatcgatctatgtacttttcaagaacataatttacgagctttctgtaaactccttctgttggatgataactatcccaaaagacatattccgaagcattggaacaagtggcatccaaagggttgcataacactgcaac

SEQ ID NO: 9212 - DNA, 222 bp, Glycine max
  Clone ID: jC-gmfl02220101b01d1
ggggtggatcctaatttatagcacccgtccgcgcgccggcaacgttatacctgggggaaagggacaccaaaataaaaggcagggggcggcaataaacaacggggggaggggaaaacccatggggaagccaaacataatggtcttaaacaaaattcccaaaaaaaacgggggggtaaaaaggaaagggccgagaccaatcaccctcataaaaaaaagctaaac

SEQ ID NO: 9213 - DNA, 525 bp, Glycine max
  Clone ID: jC-gmfl02220101b02d1
ttgccggcgatttaccgtatacatcgttagcagtgccaccttcttggggggggggggggggaatcaaagaggggcagagcgacaggaaagaaatatatcaacgataaagaaataggccgtgtgtgaagtataaaccacaggaacgttaggcgccgcgcttggtagcatgcaaggagattaaacgatgatttggaatagatgtacgaaaacttacactaagtaaatttaatagactaaagtgtttaggttatacggtgctagtgcaccatagcaatttgggccatggacatgttatctgcatattggccaacacgccaagtaaccaactaacccgaaccattatatggcgttttaacaattagcccagcttattaggccagagggcggtgaatatattggctttgggcctgatggttatgcttaggctacttataaatttaagtagccttaattggttaggcagttgtgtaacgctgcctttatgcaagcttaatatagtacaaaatggacgctgtattgggccgc

SEQ ID NO: 9214 - DNA, 538 bp, Glycine max
  Clone ID: jC-gmfl02220101b03d1
tctgccagcaatttgcgtgctacatgtgtagcagtgccgcctgcttggggggggggggggggtctgggaggtaataaatagggaaggaagaataaccataacgggataggggggggggttattggatagagcgataaggctaactaagtctatcctggcacacgtagagaggtattttgttaggtggtggtagctgataaatgagaggagagggaaggtttatagggggcggggttggggggggtgaggcttatgcggatcgatatgggctaagaaaaccaataataagaaggagcaaacttgacacttaaggaacaggcagggggtgtgaatgactttaaactagagcgggaagtggaagtatggctacttattactattaaatttaaggtggttattattaatagtagatataattgtgaggcagggtgctgctatcggtttagagagacgaatagtatgagtcgtattagggctactaaaacttaactaaatggctggcctatgccttatcgacacgagtttggctcctccaact

SEQ ID NO: 9215 - DNA, 541 bp, Glycine max
  Clone ID: jC-gmfl02220101b04d1
ctgccagcaatttacgtgctacatcgttagtagtaccaccttcttgggggggggggggggaccaatccttgcgccacccctattcaagtgaagttgcttaaaaggactgaataaggcgtgtgatagagattaatcgaacgatcgaatttacaaaagattgtttaaggaaagaccgtgaaacatttgtgatttttgtattaaagagtttggggtgagtatgataaaatgctgcctgctgggggactgtgtgcaaatacttaaaaaatacaggaagggggggagcaaaccaatagggagtaaatataacaaggctagggataagtaagggtttgtaaggaactgtggtaattgaggatccctggtggtacatacatgctaacggggcaagtggtcttgggccccgccatagcaggtaataagctgggtaagccctcataacgagatcataagtatacgcacaggagtgcagcgagggaactctaagctggttggcatgactgtgagcctataggctgcgcccgtagtagcttggtggaagttg

SEQ ID NO: 9216 - DNA, 519 bp, Glycine max
  Clone ID: jC-gmfl02220101b05a1
ctcaatcccggtcagggggtcgatctgagcatagatcaaggtcacgttctcgttcacgctcaaagagcaaaaggactagtggttttgatatggctccccctgcctctgctatgttggctggtgcttctgctgttgcaggcaatgttgggctactagccccactctgctgacaattggcgtgagccgacatctgtagcttttatgtccacggaggaatcaatgcacctgtttttggtcagatcactggggctaaccctacaattcctggaatgtttccaaatatgtttccgttggctacaaatcagatgcaacaatttagtgctctccctgtcatgccagtgcaggctatgactcaacaggctactcgacatgctaggcgggtgtatgttggaggcctccctcctacagctaatgagcagtcagttgcaactttcttcagtcaagttatggctaagattggtggaaacactgctggcccaggtgatgctgtggtcaatgtttacattaatcatgacaaga

SEQ ID NO: 9217 - DNA, 519 bp, Glycine max
  Clone ID: jC-gmfl02220101b05d1
ctgccgacaatttaccgctctacatgtgtagtagtaccaccttcttggggggggggggggggggggggggggggggggggacattcagaaaatgagggggaagaaaggccttagtagcatgggtggatgatgtctagtgaacgggagcgatgagcattataatgtgactggataacgggagcagaagaagataaaacaggagttggatgaagtaacagacaagttaaagaatagataaggacttggtagaagtgtttgcactaaagggcggtgtgccagacaaaatactgatgatggcagggttagtaaaggggtctttagggaagttactatccctggggcgactattagtaagagtaatcgatgttaaaaatattgggttaatgttgctcctaccggtattagtacctccgccgtcgcccagtattataggtattaaacgattgctagaaacgcaaaataaaaaatacgcaaagagctaaagaaaggggtagacatagctaagcaataactagcgca

SEQ ID NO: 9218 - DNA, 479 bp, Glycine max
  Clone ID: jC-gmfl02220101b06a1
ctctttctttctctctctctcacagtctcacatacacattcgaatccttttaacaccgccccattattgcttgctcgttaattacggcaatgactcggctatttcgatccaagtcttgcggactggtcgagttcaacgctgctccacccagtccacttttccatgatgtgaaaagcgaggatgaatacaatgaagaagaggaagaagaagaagaagaagaagaagaagaagaagaagaattggacagtgatgatgatgatgaggatgcagacgaagatgatgatgtttcgagcaaccatgtttcaacgccgttcatgaatccagggtcaaaagggcatggctgccaatcgaaccagtttgcgatattggatattttggtggctgcgttgaagaagtcgttggtaacttgcagtgtggaaagagaggatgtttcttcgttggatattagctggccaacagaggtgcgccatgtctcgcat

SEQ ID NO: 9219 - DNA, 446 bp, Glycine max
  Clone ID: jC-gmfl02220101b06d1
atcccaataatttacgtactacatgttagcttgcacgtctaccttcttggggggggggggggggggggggggggggggggggggggggggggggggggggggggggggggggggggggggggggggggggggggggggggggacccctaaaacccccggtttttggggggaaacccccaaaaatttaaaatttcccttttataaaaagcgggtgcaccattaatatgcccaattggaaaattttccaaattttgaaaaaatcccaggtgttgaaaaaatttaatttaaaggtttattaaaccgggccgctaattaaaagcaactattttgggggattgggaaaagtagttattttagaaatgaaatttgtttgcccaaatggcctcggggtccttaaaatttggtaatttctggttttgcgggggataatttttaaaagccctttt

SEQ ID NO: 9220 - DNA, 477 bp, Glycine max
  Clone ID: jC-gmfl02220101b07a1
cttttaaaaccctcttttcttccccctccaccctaacccgattcgcttcttcacatctctcttttcactcaaaactacaaactttatttcctctccgtattctcacatttccacaacatggacgaggatttcgacatggcggcggcggagcccatgggcgaggacttcgacttcgccggcagcggcagcaaccccgtcctgaaggtcggcgaggagaaggagattgggaaagagggtttgaagaagaagctcctgaaagaaggtgaaggatgggacacccctgaagctggtgacgaagttcaagttcactatactgggacgttgcttgatggcacgaagtttgactctagcagagataggggaactcctttcagtttcacgcttggacaagggcaagttattaaaggatgggatcaaggtattataacaatgaagaaaggtgaaaatgcccttttcaccatcccagctgagctagct

SEQ ID NO: 9221 - DNA, 500 bp, Glycine max
  Clone ID: jC-gmfl02220101b07d1
acttgcttgccgattaatttaccgtcatgtgtagcagtgccgccttgccttgcttggggggggggggggggggaccaaaaacaataatcgtataaagcgggaaggggcttcccagggttatcggtggccaatgactcaaataaaagggcgtgttagttatagctagaagttagtaaaagggtgaaagcgttatcaagatagaaaaacaaactacatgtgtcaaaggacagcaagggttagccgcgggagcagggctgcgtgagagggagccctgcactagttggtcatctgccgggatgaggcgtaacacaagtgactggcgctacgggcagcaatagagggttagaaaaggggcttgtgggtggcgacgatgttggtagtggggttggtaaacgtatcgatgtaactggcatagtttgcggcggaccggtaactgtaacactgggtggaagagtaaaggtacttaaagtgaaagtacttaatgccagagagcttgcccg

SEQ ID NO: 9222 - DNA, 529 bp, Glycine max
  Clone ID: jC-gmfl02220101b08a1
gtttagtgttatatctccgcagtggatcaaatcaaacaaacacttccatccatcaccctggctctctgcttagggttttgatcgcatcggatcttcactctcttctccgatctcaaaatgcccgccgtttatggagctcgcttgaccaccttcgaagactccgagaaggagagtgaatacggttacgttcgcaaggtatcaggaccagtcgtcgttgcagatggcatggctggggctgctatgtatgaactcgtgcgtgttggtcatgataatctcattggtgaaattattcgtctcgaagggaattctgctaccatccaagtttatgaggaaactgctggcttgatggttaatgatccggtgttacggactcacaagcctttatccgtggagttgggacctggaatactggggaatattttcgatggaattcagaggcctttgaaaactattgctaaacgatctggtgatgtctatattcctcgtggtgtctctgttccagcactcgacaaagatacactttgggaat

SEQ ID NO: 9223 - DNA, 493 bp, Glycine max
  Clone ID: jC-gmfl02220101b08d1
ccgagctggccgggtaattttccctgctacatgtatgcacgtcctcctgcttgggggggggggcgggcaggggggggttaagaaagaaggaaagatgtaggctgatcacaacgttagggagcaaagataccaggtaacagaagttatggttattaaaaaggttattgagagcaagttacaagttctggctgcgagcatatggtagcgttgaacagaagtggaggtgttgaaagatagaggcaaacactatcgtgtcgggtggaggcgtaagggataaatgcaccagcatgctagtatagcaggggactgatgtagtagatggcagtaaaacttatgttactattaagaaaccagaggaagcacagatgaagcaagtcaatacatgaagagcacaatatgtcccatcggctaatttgctcagctgacatgcgcgtggataagcccaaagaatataagcgggcactaaatgattaaagtggtaagtaggaagtag

SEQ ID NO: 9224 - DNA, 456 bp, Glycine max
  Clone ID: jC-gmfl02220101b09a1
gtggatattagagtagaagaagaagaagaagaatcccaaaaagagaaaccaactcaaacttgttttatccatgggttgatcatcccaaaaaagtttgctttgtttgggtaaatgacccttaaccctgtttgtgaataataatagagttaggaggttccgatgacggtcgatttggacaacgcttccaccgcttcaggtgaagcagccagtgtctcttcctccggcaatcagacaaaacccgccgctccaaagaaaaaacgaaacctcccgggcatgccagatccggaggcagaggtgatcgctctgtcgcccaagactctcttagcgacgaaccgtttcgtgtgcgagatatgcaacaaaggattccagagagaccagaatctgcagctccaccgccggggtcacaacctgccgtggaagctgcggcagaggtctagcaggaggtcagaagagagt

SEQ ID NO: 9225 - DNA, 572 bp, Glycine max
  Clone ID: jC-gmfl02220101b09d1
ttgagttggccggttaatttaccgtgctacatgtgtgcacgtccgccttgcttgggggggggggggggggggggggggataaaccaagatgataagatgggagcatagggatagaaaaatatgatggctgacaacaaggtaagtaattaggtatgccgataaaataagcccctagatctccaaaatgattggcggataagaaagtcataaggcaacaaaatgatgattgtagtaaacgggttgcaaggagcttaataatgatcaattaaactagttaagcttcgaagggaaagggaagtaaaatgcgccacattaaaccacttcaaataacagcagatgagtggtaaatcgcgtatgcgtcttaaaattgatcataattagattaaacggtaaatttggggcggctaaataattggaaggtaataatgatttggtagttacactaactcgaggcgaatggcgattattggctcggggtgaatatacgaaagtatacgggtgggtttgcctaaggaaaccccctaatataagttacaacctttttagtagagatggggctttgcagaacgcta

SEQ ID NO: 9226 - DNA, 435 bp, Glycine max
  unsure (1)..(435): unsure at all n locations
  Clone ID: jC-gmfl02220101b10a1
ctcacaaatcagctgttctcaatcagtttcaacagctccaaagtatgttatcacctataaatactaatttgctgtctcctaagaatgttgagcatcctctttttcaggcttcttttggtgtctctccttctggaaggatgtcaccaagaagtgttgaaccaatctctccaatgagtgctcgtttatctgcatttgctcagcgagagaaacagcagcaacagctgcgcagtgttagttcaagagaccttggtgccaacagtcctgcctcacttgttggctcccctgcaaacccttggtcaaagtggnggttctcctattgggaaagctgattgctcagtaaatggagactcccttggtcgtcagatgcgaagatcatcctcgtttgagcgcaagaacaatggggaagagcctgatctctcttgggtccaatctctg

SEQ ID NO: 9227 - DNA, 559 bp, Glycine max
  Clone ID: jC-gmfl02220101b10d1
attgaccttgccggttaatttaccgtgctacatgtgagcacgtccaccttgctttggggggggggggggggggggggttggtaccgaatggtctacttaattaagttgttaggttggggatgatatggtgggttggcggcgtggtttaaaaaagggtattaaaacaagagcgattggatcaaaggaaagattgagtgtaataacagagcgaaacccgtaaggggcatgacatgataactgcagttactgctagggctgtaacttacctgttgaaaatacaagccgtaagccaggtaagggcccaagggcaaggtccgttagtactacagctacgacctagaccacagctaaatggtgtgggcagtagtgtaccgccccatgttggtattacacaggccatttaacacacagtacctgtggttttaggcggtggctctgtaaatcaccagcagtggtctagtgcatcattaacccacgtgttagggatgcattaagtactgggtttaagaccacaattttatgggcattaacccgggctaccccacttaataacgcacct

SEQ ID NO: 9228 - DNA, 496 bp, Glycine max
  Clone ID: jC-gmfl02220101b11a1
tggagttagttctaaacagcacaacaattggagttggagttgtttctctgatcctcctcttgtacttgtttttgcgtggtggttcatggaagagtggggaagagggtcctccaacagttgcaggtgcatggccaataattggtcacctcccattgttgcttggttcaaagacacctcataaaacattgggtgacttggctgacaagtatggacccatattctcgatcaagattggtgccaaaaacgcagtggttgttagcaactgggaaatggctaaagaatgctacaccacaaacgacatcgccgtttcctccctccccgatcttatctccgctaacctcttgtgctacaaccgatccatgatagtcgtagcaccctacggtccctattggcgccaacttcgaaagattttaatgtctgagttcctatctccttcccgagtagagcaactacaccatgttcgcgtctctgaagttcaaagttccatcacggagct

SEQ ID NO: 9229 - DNA, 500 bp, Glycine max
  Clone ID: jC-gmfl02220101b11d1
aaaacagattacatatagtttaaaaataaaaaatacagacagcaggttcacacaactaacacataattaaatattagatactttcataacaactaggagataggcgtggtttaataagaatctcaagtggagtggctttagtgttggttgctctaaagacttcagtcatatcaagaggctcagttgatggatttaagatttcaaaggaatgcaaaaaactagcaagtgtcaaacgaactgtttgaaggcctaagtttattccaggacaaatcctcctaccacctccaaatggtaatagctgaaaatgttgacccttcatgtctatatctttatcagtcgtaaggaacctttctggtttaaactctaatggatttgaccaaacgttatgatctgtgtggatcttggaaagatttgtaattagacgagttccctttttgacagtgtagccacctatagtgcaatcctcttcaaactcacgaggtcttgagagaggagctgga

SEQ ID NO: 9230 - DNA, 450 bp, Glycine max
  Clone ID: jC-gmfl02220101b12a1
cttcacgttcgatctttcgcttctgaatctccaacgatggtgctcgaggcgactatgatctgtattgacaattcggaatggatgcgtaacggggattactctccttctcgatttcaagcccaaacagacgccgtcaatcttatttgcggtgctaaaacccagtctaatccagaaaatacggtgggagttctcacgatggcggggaagggcgttcgtgttttggtgacccctaccagtgatctgggcaagatcttagcttgcatgcatggactagaaataggcggtgagatgaatctagctgctggcattcaggttgcacaattggctcttaagcatcggcagaacaagaagcagcagcaaaggattattgtctttgctggaggtcctgttaagcatgagaagaaaatgttggagatgattgggagaaaattgaaaaaagatagtgtagct

SEQ ID NO: 9231 - DNA, 372 bp, Glycine max
  Clone ID: jC-gmfl02220101b12d1
cttaaccataaaaccatgttttcccttggtgatgaacatagacaatgggcttttgaaatgggctctactcaagggtctcggatttaatcaacagacatttactcgttccaatcagcaggggaactcaacaattggaacacgtgaaataactacccgagtaaaatcactttccaacatgctaccaatatgcctcccaaaggaattctacaaataaaaccccaaggggacttttaagattatttttcctcctcttcatttgggggcttggcttcattcttttggtggggctcaaactgattttgcatggaagccagcaaatttttgacagatgggtcatttgggccaaccccaggaagcgatgcaaggatagaa

SEQ ID NO: 9232 - DNA, 553 bp, Glycine max
  Clone ID: jC-gmfl02220101c02d1
ttgccaggaatttgccgctctacatcgttagtagtaccacctgcttggggggggggggggggggggggggggggggggttgcaagagggcggactggcggggaaaatataagaagtaaggacgccgttgggcaccggcgcctagtaaaacaaccaaatcgtatacgggagaccgatatggataaagcgcaatagagggatgggcataaaataattgcagcatattgcagcaggagcactgcagacgtatatgggagaagcagaatgtggccacaataaacatagataacggtacggcagaaaagcctacctgactgggataaacggcgttggacaaaggcgattattaaagaaagaatgcttaccacgacgctaagtgccgagctagttgcggcaaaatgcgtcgtttgtgccaacaatggccggccagtattgcaaccagtgccagatagtgttaacggtgtggggggccggcataggggatgatgtaaaggtggactatgcgtatttaaagtgggcatacaggtaatactactaaacacactatcgcagcg

SEQ ID NO: 9233 - DNA, 543 bp, Glycine max
  Clone ID: jC-gmfl02220101c03d1
ctacgagcaatttaacctactacatgtctagcactaccaccttcttgggggggggggggggggggggggggggggggggggggggggggggggggggggggggcccggcggggggggggggggggggggggggggggggggcgggggaaaaaaaaaaaactttaaaaacccctttaaataaccccccccaaaaaaattaaagagactatgacccgccatcaaattttaaaaaacccataaaaaacaacaaaacaaaaaaaaaaccccccagagaccaccccccagggaaataaaataaaacccccctaaacccccaaaattttttccccaaaccttataacaatcccaatttctttttaagcttttagccccaatttaaaaaaaatttccccggggccctttcccccccttgagccctaaattccaaaccccccccgggtttttcccaccttgggggcacttttaaaaacccccccacccaatttttacccccaaaggggcttcccccatataaagccccccaaaaatccccgcaaaaatttt

SEQ ID NO: 9234 - DNA, 486 bp, Glycine max
  Clone ID: jC-gmfl02220101c04d1
cagacttagcggtttacgtgctacatgtgtagcactaccacctacttgggggggggggggggaaaagaatagggggggggaggagagagggatgtatgggatagcacagaaagtgagggattgtaggaggtatgacaggttgaggattattagtaataaccgctttatcgccttattgatgagaaaaaggtgccactaactagcaaaacgctaagagctatatgggtgaaagaaatggatgccagaaagagaattttaaaaggagtggcaggaattgcgacggctagagccgccaaatattggtgcaagaaaggttaccaactcagctcaagacaatcgatccgttatactgcacagacataagcaagtaaatgcaacacagggagaactagcggtaagttgtggacttagcggcaacgttgctaagagcgtaagcagattaaccggtactattatagccgatatggtagcaaatagggctggggt

SEQ ID NO: 9235 - DNA, 491 bp, Glycine max
  Clone ID: jC-gmfl02220101c05a1
ggaatgggataggatctatgattatgatgtctacaatgacttgggcgatccagataagggtgaaaagtatgcacgccccgttcttggaggttctgccttaccttaccctcgcagaggaagaaccggaagaggaaaaactagaaaagatcccaacagtgagaagcccagtgattttgattaccttccgagagatgaagcatttggtcactcgaagtcatcacatcttctcgtttatggaatcaaatcagtggctcaagacatcttgcccgtgttgactgaggcgtacgatggcaatctttcgagcctagagttcgataactttgctgaagcgcgcagactctatgaaggtggagttacactacctacaaacttttttagcaagatcgcccctataccagtggtcaaggaaatttttcgaactgatggagaacagttcctgaagtatccaccacctaaagtgatgcaggtggataagtctgcatggatgactg

SEQ ID NO: 9236 - DNA, 617 bp, Glycine max
  Clone ID: jC-gmfl02220101c05d1
cgagccggcgggtttgccgtgctacatgtgtaggagtaccacctgcttggggggggggggggggagataaatacaagggtggtaggaatatggaatactaaatatcaccataggtaagtattttaaagatagaatggaattagatagaccgacagcaaccaagtagaggttggtgaggtatggggaggcaaaattacccaaacgatgctaataattagacacttttgacagccacagatgcggcccaaggttgtgcaaacgtaagtttgttgtatgacaaccagacactaaacgcgaacctaggggacttcctttatgctccgggtgtaatcgtgtcgttggcggtggtgcgagaactggggcggtaagtgtggcaactggtgggttaaattgtggcaaccttgtgacgccattactagtacaacgttaagacgtattattagtgtgtgttttaaccgacaatgtagtacagcgcgcttggcataacagggtgagaaggcgaaccgtaagcaaccgtgttggtggcttacgaagacgtggtaaaaatgttggtgtacccggtggacttaaactgctggatgtactacatttgggtgtaactagcaagtggtgctgaa

SEQ ID NO: 9237 - DNA, 504 bp, Glycine max
  Clone ID: jC-gmfl02220101c06a1
aaaggggtcacttttcagatccgagattgagctcctttacccatcatcatcatggagctcctcgggtacctgaatcagggtcacccttctagaggaacaacacttgttattactctttcattggtgctttcgacacttgtgtccttctccactttcacacatgccttctcttcttctgcgtttccggaactgaatcctataaaacctaggcactcacgtcttctcaggagtgccgtgcaacatgaaactcctacatcacagctttctgaaatatggtcacctctggaaagccaaggatggaaaccttatgttgaatcaaataagccaacattaccagagaagtccgagggatatatccaggtctttcttgatggaggtttgaaccaacaaaggatggggatatgtgatgcagttgctgtggcaaagatactgaatgctactctggtgattccataccttgaattaaatcctgtatggcgagattcaagctccttcatggatata

SEQ ID NO: 9238 - DNA, 505 bp, Glycine max
  unsure (1)..(505): unsure at all n locations
  Clone ID: jC-gmfl02220101c06d1
ttgccaacaatttacttaccgtgctacatgtgtgcacgtcctccttcttgggggggggggggggggaggcaaggagaaaaggagaaaggaagaagagcctgcctgttgctgaacaagcttagtagtgcagaaagatagtgtttatataagatataatgaatgtgtaactatgtggagtaacaataatagaataaatgttaggaccaagaccacgccaaagactggggggaggggtatgacagagaagcggaaagaagaacatattcaatgagaaaagatatacctgatagttcgcactaagaagaagaagggaacgagagatgatgatgacgtatgatgaactggcctatagctaagtaccactgccagatcgagagaggcaggcagggcctggttgtacttggacggttttggcgtgaggggccgcattggtaattatgctagttgcaaatgtgcattatgtgagccggngaggtagcaaaactgcatttagtaagcttagagg

SEQ ID NO: 9239 - DNA, 459 bp, Glycine max
  Clone ID: jC-gmfl02220101c07a1
gtcattccaaggaagatgacatgtcttcgaagaaaaaatcaagaaaaagggcaagagagagagttaaacggagtaagaagaagtcaagtgacagcggttctcctgaatgtgaagttcttactgaggaatatgtctgtgtaagtttgacttctgaaacctgcagcagcaatgatgtggctaaggagggcgtgggagaattttcaacttctgatgatcggttagtaaaatctgattgtgaatggaatggcggcatcaaagtgatgcaagcacctaatagatgcaactcttatcttgatcgggaggccaattcaaaagctactgcgcctattgctcaaagttctgctggagaatgcaccacatttgaacctaagaatcagctccaagataggggccctgattttgaagtctttgtttgaggaataaaggacatccaacacgttgagccatgctgttttaatg

SEQ ID NO: 9240 - DNA, 593 bp, Glycine max
  unsure (1)..(593): unsure at all n locations
  Clone ID: jC-gmfl02220101c08a1
cgtcaatcttggagatcatgctcattatctgagcaatggaaggttcaagaatgctgatcaccaagcggtggtgaactcaaaccatagccgtttgtccatagccacttttcaaaacccagcaccaaatgcaactgtttaccctctgaagataagagaaggagagaagcctgtgatggaggaaccaatcacttttgctgaaatgtacaggaggaagatgagcaaggacattgagattgcaaggatgaagaagctggctaaggaaaagcatttgcaggaccttgagaatgaaaagcatttgcaagaacttgatcagaaggcaaaacttgaggccaagcctttgaaggagattcttgcttaattaataataattacatatgtatcatttgcatgcccccttggtgtttttagtattttttaagggccatgaattaataatagtccttacctttgtgcttttgtacgtcttatgatttatcctttgtggggatatcatgtgtngtgttcagtgcctatgtcttattagctagcttgctcatctatgtataccttataattgcctctattataatgaaaataagtggcactgtcttatt

SEQ ID NO: 9241 - DNA, 516 bp, Glycine max
  Clone ID: jC-gmfl02220101c08d1
taccttggccaaccaagttttccgtgctgcatgtatgcacgtccaccttctttgggggggggggggggggggaagaaacatacgcttatggaggggtagggagaagacacctaaagagaaccgagatagacagcacttactgactgaagaacatagacctaatgcaatataatatagcagagttttataaaccagaaagtagaacatcgataaaactataaaccgaaccatgaggaggaaggtagcctttggaaaaaagatgaaaaatattaaccccctagctaaagcagatagagcgaaggaggaggaaggaactaacaagtgttggtaaacctggccttgtaacggggcttggtgcagtaacggtggctaaagctggggtaggtgtaaccgttgctaaagctggggttggacttactggtggtagttggctaagtgtaagcgttggctgtagtggttgttgcgatagggtactaaaacgcaggccggttgttagtatacctggtgtgttggtgt

SEQ ID NO: 9242 - DNA, 350 bp, Glycine max
  Clone ID: jC-gmfl02220101c09a1
ccatgatttcccaagaattcctggaaacaagcttcacaaggtgaaggagattgctccagagttttatgataatttagcgtcctacagatcttggagccagatcatttacatgtacattatggatcgaacagttggaccttttagccgaatgaagagaaaatccagtaaagccgaatagatgttcccatacacatcattcatccccacctttccctcttgtgatgtctcctactttgataatttttgtgcaagtgaagaatggaatgtagtttttgacccaaatagcaagtcatttgttcattagccaacattttgtataaaatatcttggatttggggcttcctccttct

SEQ ID NO: 9243 - DNA, 512 bp, Glycine max
  Clone ID: jC-gmfl02220101c09d1
cttgctaccaattaatttaccgtgtacatgtgtgtagtaccaccttcttggggggggggggggggacaaccaccaacttttaaaattaacagaggggagataaaagcggcctgaagcaataaagcatggctgagggcccgtaaaaatgataggttaggtggtatggctataaaaaggagtaaacgaccacatagtataacacccaaaccgccccagcaagcagcgcgagcccaatagtgaggtcctgggatgccaggggtgtggtaggtcctgaaaaccgttaatgcggtcagttagaagcgatagcgaaagcagtgcctgttaacagtgcgaccatctgaaaggagtagaaaatgtgccactaagtgttggtattggcgcaactggcaggttaccaaggtggcccaaagtagcctgtcacttcaaggttcactggatcgatctcgctagctcatcgtagactgtggtgagacgcgtattgaaaggtaaggtatgccttcgtcggggataat

SEQ ID NO: 9244 - DNA, 572 bp, Glycine max
  unsure (1)..(572): unsure at all n locations
  Clone ID: jC-gmfl02220101c10a1
ggaagcaatcacgagcttcattcccaaagaagagtacttggagggctacacaggttctacaactaattcatgcagatatttgttggtgttttcagggtttaaatacgctttaccagcagagtatggtatatggtttgccaacaatgaaaacaccaacaaaactgtgccaggacttcttggtagggaagcaatcacgagcttcattcccaaagaagagtacttggagggctacacaggttctacaactaattcatgcagatatttgtggaccaatcacacctatctccaacagcaaaaagaggtatctgctcacctttattgatgatttcagtagaaaaacttggatttatttcttgacagaaaaatcagaagctcttcctgtctttaagacatttaaaattcttggtgagaaagaagctgactcattaatcagaagtttgcgcactgatcgtggngggagagtttacatcacatgatttcaccaatttttgctgtgancatggtattcgtaggcaactgacagctgcatacacaccacaacagaaacggattgcagaaacggaaaatagaac

SEQ ID NO: 9245 - DNA, 607 bp, Glycine max
  unsure (1)..(607): unsure at all n locations
  Clone ID: jC-gmfl02220101c10d1
ttagttggcggctaatttgccgtgctacactgttgtagtaccaccttcttgggggggggggggggggaaaccaaccaaggtaggtttgcggaggcaaaactaaatggcctgaagagagacttggatagtacaagaaacaaaatgcaaaaagaaaatgctgtatctagatagcatttatgagggttgaagaagcgctgacatagaggtaaaaatagaatgctgttgaaaaagagccaattagaactgtatgaataaagttgtttggaaatgcaagctgagagctaaggacgggagagtacatgtgcaatataggttgacgcattgctcgactgggaacaaacgagtaactggcacgccgggccgtagaagagtacttatggcggtggcgcgtttataagctagtagtggcagacggttccttgggcgaacagtgtcaaccaaagcgaagtccatcgtaagagcgggataatcattagctagtatgccaggtggtcaaactggaagactacaatgatgagtataatcaaggatacgactggccgtggctaggggctataagcggtttaatatttggggtaattagagcctgncgatactatagcagctg

SEQ ID NO: 9246 - DNA, 500 bp, Glycine max
  Clone ID: jC-gmfl02220101c11a1
gagagatcgcacgggggttgcccggggtctcttcctcttgtgtggtgtggtgtttgctgtgctctccttttcgttatgccttttattattacctatctgtcgctccactccgtattacgactctggatcagaggatacatcagaggattcgctccaacccctatcgagtaaggtattatctgtcaatttacattcgaaagggttaggctattgaattttaaataattacagataaaataatcgatagctttgattttaaaaattaatcataatcatcggttaggttgcaacataatacttaattcgcttaattttttaactgcgcctcagagtattcataacatattctattaaattaataagctggtgatgtaattaatattaatatgtagttctggcaatcttattggcagaagatgctaggtggagttcatcaatattctggtaggtataatatcttcatgaatctaaatataacgtattcatagtgaaaataaatc

SEQ ID NO: 9247 - DNA, 236 bp, Glycine max
  Clone ID: jC-gmfl02220101c11d1
ttgttttttgttttttttttttttttttttttttttttttttatttttttttttttgcgttttagagagagattgatcatattccataagaagaagaagacgaggctgtgcacatggagaagatgagactcggggtgatgaagcgcccagaggagacggagtacgtgaagaaagtgtacgggggatagcctggagaagtcgtgagaatgctggccgaagaaggagagacatgggac

SEQ ID NO: 9248 - DNA, 380 bp, Glycine max
  Clone ID: jC-gmfl02220101c12d1
cagagaggagttatgatggctcggttgatcacagtggtgtggtgcggggtcatggtgctactgtgcgccgcggtggccgcgttgtgggtggaggatgcggcgaacccgatacgaatggtggccgatgtggaggcggaagtggttcgcacgatatggcagtgccggcgcgcgctgaagtttgctaggttcatgagcaggttcgggaatagttaccgtatcgaggaatagatgagggagaggtactagatattctcgcagaacctcaggatcatccgcttccacaacaagaaccgtttgccctacactctattctgttaatcattttgctgattggacttgggaggagttcaatagacaccgactttgcgctgtccaaaatt

SEQ ID NO: 9249 - DNA, 470 bp, Glycine max
  unsure (1)..(470): unsure at all n locations
  Clone ID: jC-gmfl02220101d01d1
aaagcaagacggacgtattgagattgcaatatgctcaattgctcaccaactgtgaacatgaggctacaactttccaatgtaagtttcacgtttctaatttgtccattgaacaactacattctattcaaagttttgtacaatatgcaatgatttcacatccttcaaaaaagcttgggaatgatcatgctgcatgcaaatgaatagttacaggtttcacattttcatataagatcaccatattgtcctgtctaccttaagtacagggaaaaccaacaaatgagagagaatcatgatttcactaacagaagaagcaggagagtgtatgcccagcaatggtataacagttctctccagctgacacaaccacagggggccagctacgtgtcctatgattataagttataacagtagccctccctgtctaccttangtcatgctgcatgcanatgaatattacaagttcacaatta

SEQ ID NO: 9250 - DNA, 571 bp, Glycine max
  Clone ID: jC-gmfl02220101d02d1
actgccagcaatttgccgtctacatgtgtagtagtgccgccttcttgggggggggggggggggaaaagcggaaggttgttgtttttaaaaaagagacagacctagggacgggccgatagttgacgcggcggttaagggcagactgataatgataaccacctagagcaggcgaaaactgaaaatcccaacgattaaaagattaaggcgttcgggagagtgcattagcataacccaaataaatacaatacaataattgccgaggggggtaagttgaaaattaaataaaatacaataaaaagatgcataatataagagatataaaaggaatacaaatataaacacctgactaataggagggtagggccatacgaaggggtaccataggtaaaagaatagcaagcacagaacggtaactcgtcgtccgccggggccgagtactactcatacctatcgtcgtactccaactggtcccaatcgtcgtcctccgccggggaccaacactagtcgtcgtccccgtatcggcttccgtccaaggcgtcagccactatcgttggccgaaacacccgggcac

SEQ ID NO: 9251 - DNA, 411 bp, Glycine max
  Clone ID: jC-gmfl02220101d03d1
ctcctaggttattgctttaacctagctgcccgtaagcacgtcctcctgcttgggggggggggggtttcgggggaaagcaaatgctatgatatgggagaataaaggcgtaacagggagatacatggctcggtggatatgagccttctacctaatgttatggcttaacctggaagaaccgttagatggcggtagattgaaacattgattatatgcgggagaaagcattagcatagcccgcatgttgccaagtcgtaggtgcattagagctatgagttataatttcatccaggccaggaactggtgttaataggcctggcaaatatccaatgggatacgcctattaaggcccggatgtgcatgagctgcgggtgctcactatggagtgcctagctagccatttaggaagaattc

SEQ ID NO: 9252 - DNA, 331 bp, Glycine max
  Clone ID: jC-gmfl02220101d04a1
gatatatttcgtgtttggtgttctaatttttatttctctggtttggcattcttatttactgtgatattctgtttgttctattagtattacttggttgttcatcctctgcctttttaaagttcctgtattctcccttttgctttatcttgtttatttttgatagcgggagaaacatggtattttgagcacttctacagtcctgctttgtggatggttctttttagttcttcattggctcattatgtagccctggagtttgttgtaggttggtgtaggtttaagatgatgaatttagtgcttctcatccctgttggggctagcctatgtagtt

SEQ ID NO: 9253 - DNA, 547 bp, Glycine max
  Clone ID: jC-gmfl02220101d04d1
tttgccggcaatttgccgctctacatgtgtagtagtaccacctgctttggggggggggggggggggggggggaacaaaggaaaagtgagagggagagagaggtatatatagaaagcaacgataggattacgcgagaaggttaacggtcatggacgaataaaagtaccataaatgcgggtccccatcaacaaaatagtaaagagagccctgggggtattatgtgaactaccaaggttttaggtaggaatctggagtagtggcctgtgggcgtacgggtgctacgggcagcctagaaatgaaggcgcatttaatgctccacagccaccacaataacgaaggagttgaaattaagtagagaaaacgtaacaaaggaaacgatacgtaactaaagggtgggccctatagagggtacaaacgaaatgaccacaactaaaagtgagcaggtgcacgaaacagggggactttgagagcatgcagttacttgggtattgctaatagagcggactataaaaataaagctagaagagacgtaaactattagggaaat

SEQ ID NO: 9254 - DNA, 475 bp, Glycine max
  unsure (1)..(475): unsure at all n locations
  Clone ID: jC-gmfl02220101d05a1
caatatattccattctctctgtgtatttccctacctctcccttcaagatgcagatcttcgtcaagaccctcaccggcaagaccatcacccttgaggtggaaagctctgacaccatcgacaacgtcaaggccaagatccaggacaaggaaggaatccccccggaccagcaacgtctcattttcgccggaaagcaacttgaggacggccgtacccttgctgactacaacattcagaaggagagtactcttcacctcgtcctccgtctccgtggtggcatgcagatcttcgttaagacactcaccggcaagaccataaccctagaggttgaaagctccgacaccatcgataacgtcaaggccaagatccaggacaaggagggtatccccccggaccagcaacgtctcatcttcgccggaaagcagctcgaggacgggcgcaccctcgccgactacaacatncagaaggaatcaaccct

SEQ ID NO: 9255 - DNA, 590 bp, Glycine max
  Clone ID: jC-gmfl02220101d05d1
tcgcctagcggtttacgtgctacatgtgtaggagtaccaccttcttgggggggggggggggaaaataatatcagagcataaggaagtagggtagagggtatataggtagaataaatcgaccgcccagaggacacgatgaggaggaagcccatataaggcacggtaatataaattcaatggaggggtaacccataggaggatacatttaggaaatagtaaacggtggtaaagcggggcccaatatagttaataggatataatcactggaaaattttttatccacatccaccataaccgcaacccggcaggttggtgccagcggcgacgtactcacccgttggttagttgtcactgctggcttactaaaaagtacttgtgctgccgttccgcccagcttggttggcgttgcaagtggccttggtataggcgtaagccgcgtacactgtgttattgtcacccgaagacgtggatttcgaacacgtggtatcaaaagtgctagattattatcaacatctaatattaacgccacacggcatgttggtgccagcggcgacgtactaacccgctcgatcgttgtcactgctggtttc

SEQ ID NO: 9256 - DNA, 531 bp, Glycine max
  Clone ID: jC-gmfl02220101d06a1
gaaaaagatggaactggaacatgtgaccagcttgtcaagaagagatcatgaaagaccaaatcccttttttcgagtgagagcagttagcttgggtggttggttggttactgaaggttggatcaaaccttctctcttcgatggcattccaaacaaagacttattggatggaactagtcttcggttcaagtctgtgtcaacagggaaatatctatgtgccaagtctggagggggaaatgtcctacttgcgaacggcacaggtgcttcaacggcttgggaaacaattacattgtggaggataaacgaagatactttcagactaagggtgttcaacaaacagtttgtggggttagatgggattaacgttgttgctgtttccgatactcccatccattctgacacgtttcgaatagtaaaagaaagtgacagttcaagtcgtgttcgaatcaaagcacccaatgggcactttatgcaggcaaagacagaggagctggtgattgctgatgtttccaatgctaacggatggggagatga

SEQ ID NO: 9257 - DNA, 567 bp, Glycine max
  Clone ID: jC-gmfl02220101d06d1
cagcttggccggccaatttgccgtgctacactgttgcacgtccgccgtgcttggggggggggggggggggggaggggcaattcggggtatgaagcaaacccgtgataatgggcagagggtgcttgggttccaacgcaacaatcggaaacagtgagatcgacataggaaggagcagagtaagagtagaaggcagaggcacaaagaggaaaaccctagaagagcagaccaagacacccgctatatcctaacaccaagggggggaaaatggaaagcgacttaggtggcagtagttaggttaaatgttaagcaggaggcatcggtggcacgcgttaagaatattatttaaagcggctgtctttaaaaatagtgaaggtacttggcataaagtgggcagaagttgggggccgacttttggtaattggttatgtactacgttaggtatttatcaaacgcacaccattagtgatccggcgaagaggagttaatgcgcagcaatccatgggcgacagcaaagtaagcggtgtggctctaggtagcgtggctaagagagtagaagacacagccacg

SEQ ID NO: 9258 - DNA, 466 bp, Glycine max
  unsure (1)..(466): unsure at all n locations
  Clone ID: jC-gmfl02220101d07a1
taaaaatattcattcaagctgaccctgcttgagcctaaaaggattttcttgtcaagagtcaagtataatttgaactagtcaattattattccaacttttgtatttgtgtaatggagtcttctaactagcttgttgatttataattctttttttacttatctgcataatcaaagtccaaatatgtaagttttaaattatttttttatttattcttcataaaaaaattatttaatttttttccttaaaataataatttatttaatttataaaaaaaatataagctatattaaaatatttaaaacttattaaaaaatataagttctaaatatgcaactcctttaaatatttagaagaaaaactttatgattcataatgattttatttcacttaaataaaagtatctcctataaaaaaatatatttgatctctacaaaaagatatttgattaataattacanttaagaga

SEQ ID NO: 9259 - DNA, 442 bp, Glycine max
  Clone ID: jC-gmfl02220101d07d1
ctgccgagcaatttacttgccgtgctacatgtgtgcactcctgccttcttgggggggggggggggcgtttgtgaggagaaatagctttgattgtattttgagccacaagcagtgtaaaacttgtactaatagtggtataagacacagactgttgtataggacatttagttttagcaaggccaacacgttggttgggtagccttaacactaacaatgggccaagtaatggtgtaccaaatgcaggacctttagaaataggcggtttgtgtcgtcggagaattcctaaattagatcagtgattagatcttagcataactagggtactattactggggcgcctacaagagccaggccgaccgaataaggcacaacttgtagccgggttaattatactagttgtagtgcgtgtattagaaattgtagtacgctgtatagcaagcaa

SEQ ID NO: 9260 - DNA, 465 bp, Glycine max
  unsure (1)..(465): unsure at all n locations
  Clone ID: jC-gmfl02220101d08a1
ggactagttctagatcgcgatctagaactagctgttctcttctcttctcatcatttttattttttccaatcaaaccaaacaaaacataagcaccgctcttttctctccgaaatccccatctcccttcacttctgagctctggacgagatcccagatctcaccatctttcacgcactcttccatcagattcaccctttcgtttaacgcaaactcataacttgaaggttaatggctgctccaccggcaagggctcgtgccgattacgattatctcataaagcttctcttgatcggtgacagcggtgttgggaaaagttgcctccttctgcgtttctccgatggttctttcaccactagtttcatcacaactataggcattgattntaagataagaaccattgagctngatggcnaacggatcaagctccaaatttgggatactgcagggcaagagcggtttcggaca

SEQ ID NO: 9261 - DNA, 569 bp, Glycine max
  Clone ID: jC-gmfl02220101d08d1
actagcttgccggccaatttgccgtgctagcatgtatgcagtaccaccttctttgggggggggggggggacatagctaagtattataagtatagggacggggccagggaagcgaatggcggaaaaaacgtacacatatgatggagtatataaagggagaaacaagcataaccggaactataaacgtactagtagcagtaggagatatcgaagggtggtgggtggtggcggtggcgataacaagcggcttgttaagggcgaatagggcgttgtaattataataacttcagggggcgctacttgcgttacttttgttgcatgccgtggccagcaggggcaggcggcagcctgtgcttggccgcgtacgcgtacttacttgggcggggagagtgtggctgaggcacaacaaaatggttgttatcgggacagggcgtgggctatgacgggtaaacaagggcagtttagatgtagtacttacgctggcctttggcgatcgagctatcccttggggctgggtagttagagtactgagcggttttattacgaggggcggaataggcgtgcaactag

SEQ ID NO: 9262 - DNA, 549 bp, Glycine max
  unsure (1)..(549): unsure at all n locations
  Clone ID: jC-gmfl02220101d09a1
taaagttagaataatattccctacaattagcagaaaaaatggttcagcaagaaatccgaaggggtccctggacagaacaggaggactacaaattggtgtattttgttggcatgttcggagatcgtagatgggactttatagcaaaggtatcaggtttgaaggtggagggagactgtaaataaaataggtatgaatatttggacatgctaagttatactatgaagcaccctttaaccacctcactttgttgtaggtttgaatagaacaggtaagagttgcagattacggtgggttaattacctccaccccgatctcaaacgagggaagctcacaccccaagaacaacacctcgtcatggaccttcattccaaatggggaaataggtttgagaaccatgcagaaattaaactataagctagctacctgctgatcatcactcatatttttaattactcttttcctaccctatatatagnactattaattagntcttncgcttatttaatttttattatttgtgaaaatctaatacagcgctcaatcaatcaa

SEQ ID NO: 9263 - DNA, 506 bp, Glycine max
  Clone ID: jC-gmfl02220101d09d1
ttgccggcaagtgacttaccgtcctacatgtgtagcagtgccacctgcttgggggggggggggggggacgaggggatagaaggtagaatagcattatgttttaggccagggggtgggaaacgaaaattataaatataggcatagacatgatacgcatagggcacagtcaggatactgcgcgtatatgagccaccaccattagcctcaaactgtaaacagatgagctgcgataccggaacatggaacttggtggaggcgcatacagcctatatagaacaataaaagaggcagaaggcaaaacacaaacaaaaaaaacaagtgttgaaggacttccgtacaaaggtcggtttggcggtagacgcacaaaaagaggccgtatggacgcgacccaagaatagtggcggatgggtggtggtagttagtatttacaccccggcacaacaaagcggcgatgcagtttagcagccgccacaacctagaagtagtaggccgccaccataacacac

SEQ ID NO: 9264 - DNA, 473 bp, Glycine max
  Clone ID: jC-gmfl02220101d10a1
taaagttagaataatattttcttcaattagcagaaaaaatggctcagcacgaaatccgaaggggtccctggacagaacatgaggactacaaattggtgtattttgttggcatgttcggagatcgtagatgggactttatagcaaaggtatcatagtttgaaggtggagggagactgtaaatgacataagtatgaatatttggacatgctaagttatactatgaagcaccctttaaccacctcactttgttgtaggtttgaatagaacaggtttgagtcgcagattacggagggttaattacctacaccccgatctcatacgagggaagctcacaccccaagaacgacacctcgatatggaccttcattccatatggggaaataggtttgagaaccatgcataaatgtagctataagctcgctgcctgctgatcatcactcatatatggaattgctcttttcctacactatata

SEQ ID NO: 9265 - DNA, 493 bp, Glycine max
  Clone ID: jC-gmfl02220101d10d1
atatcccggccgatttgccgctgctacatgcatgtgagcagtgccaccttgcttgggggggggggggggggacgaggggatagaaggtagaatagcattatgttttaggccagggggtgggaaacgaaaattataaatataggcatagacatgatacgcatagggcacagtcaggatactgcgcgtatatgagccaccaccattagcctcaaactgtaaacagatgagctgcgataccggaacatggaacttggtggaggcgcatacagcctatatagaacaataaaagaggcagaaggcaaaacacaaacaaaaaaaacaagtgttgaaggacttccgtacaaaggtcggtttggctgtagacgcacaaaaagaggccgtatggacgcgacccaagaatagtggcagatgggtggtggtagctagtatttacaacccggcacaacaaagcggcgatgcagtttagcagccgccacaacctagaagtagtagg

SEQ ID NO: 9266 - DNA, 516 bp, Glycine max
  unsure (1)..(516): unsure at all n locations
  Clone ID: jC-gmfl02220101d11a1
aagaaagccttggagttcattgcaaaaggctggaatgctttgaaggaggttgatagagtcatcgattattccgatcccaagcattcgggcattgtttctcttctcaggctaaggagaatttcgagcttgctttggaagctgataataccaatacccatgctaggtattggttgtccagattgcatatgaaataccctgttccaggagctaataaagctgtaggggcagcattattggtagaagcagcagaaatgggtgatcctgaggcacagtatgcattgggttgtcatctaagagttgaggtgagggtactctaacccttatttatgtacatatagccaactttgcaaactgagtttatgattgtaataattcgttgatgcctccttgaatcactctntgcagatttaagattctgattgttctttgtggttaataaatgagatattaccttggngagagcgatggtaggctaaagtgcagaanaaatggcctggctgtgatcttctgtattca

SEQ ID NO: 9267 - DNA, 531 bp, Glycine max
  Clone ID: jC-gmfl02220101d11d1
acaatgacaaaaatcctcacctttatttattgtttttcaccgatgattaaaatccacaattcagacaagctaaatcatatgattcagatcggattctgctacgaaaaaaaaaagaacgaaacaaaaagcacactacacttctcaatttcatctcaatgttcccccgtgagtgcccgtttctcttcctcctctaaccttgcaagccatttgaatccaagctcacaccctgcttttgccgctatctgaaacttttctcttgccatctctactggatcaattgcaagagctcccttattcctgccccgtctatgagctgcagcacctctcgtcaaactgaactttattaccgattctggaacctcaacacctttaagaagaagagatccatatgctatagcagccccagcatggcccttttctgatgctctgtggaaacaccacagtgcagaagcaatatctttcctgacacagtcgcctgtcaaatatacagcacccaaaaggcaaagagcacctggatgcaactggtccaca

SEQ ID NO: 9268 - DNA, 435 bp, Glycine max
  unsure (1)..(435): unsure at all n locations
  Clone ID: jC-gmfl02220101d12a1
ggatgacggaagtccagtggggtctccaatgattccatctatgcccgcaagcccaactccactttctactgctgccagctcaagtgaaagaaatatttctgatgagagtaatgatagggcaagccgagtagttcgctccctctttaaggaaacaaacacttcccctggagagtctagcttctctgcacccagaaccagttcagatagtcagcttggcacatcctctgagaagttgctagcagagaatgaagttcttgtaaatgaatttcttcacgagcatcactatagtgttactgatgaatttgatgtctctgatcacattcaaaacagtggtgaggttagtacctatggtatacatggtagcattgaataatggctaatttggataccagcttgttngatgctctttctggccttgatgtgatctgtcatata

SEQ ID NO: 9269 - DNA, 573 bp, Glycine max
  unsure (1)..(573): unsure at all n locations
  Clone ID: jC-gmfl02220101d12d1
gaaaagttccaagatccaatcatatattagcaattcaatgttaaggtttaggcacctatatacatttctgtttgttacatcaaaagaattctacaaacaatgtcacttctctacaaacctaagatacacagcttacaattttacacactcctatgtacaaatgtgtgtatttattattattattattattattattacgcatgtacgtagcaaatatatcacaggttatcagtcaaatgtttataccaaggtccatgaacactaactgaaatagtggctgccacaatcaaaacaccagcagtttccactaccttatcagtcagaataccagccccaactttcatgagagccatttctgctaatttcctcccacggatcccacttccaccaagcacaacgccgcgcaaagctgaatagacagcattaaacaccctctcgaaaacaacatccncagcttgtaagctctttcctagcatactagcagcaactaccttccttgactcaagtttccccgtatcttcaacttcaactgtgggaaaatngcagagcacttctacaatgcttcaatatcag

SEQ ID NO: 9270 - DNA, 477 bp, Glycine max
  Clone ID: jC-gmfl02220101e01d1
tagttgccgggaatttacctgctacatcgttggagtgccgccttcttgggggggggggggggggggggggggggggggagatcacggcgtcagaggagaaagcgcgaagctacaggtaaccgcaagctagttaacaggacactagaaaacctcacatggtgtaaccctcaaagtgcctgcgttaccataaatgggggaacggcttttttgactcgattggagggactggatgccttaaaagtattaaccccgcttggctttgccttacttgtaaacggcaaaagtactagacttaatagactaagttgactagctggaagtgcacttaagggtacgtgtgtgactggcgtgctagttccaagcgaaatcttagttggcagactgttactaaagtttaaacccgtaaacaaggggttggtacccgacttggcggtattacgtcacggcttaaacggtgtactacgggggcattagcca

SEQ ID NO: 9271 - DNA, 553 bp, Glycine max
  Clone ID: jC-gmfl02220101e02d1
cagcttgccggccgatttgccgctctacactgttgcagtgccgcctgcttgggggggggggggggggggggcagcaatgaacaaggctaggtaggaacattagataagataagtaaaaagtagcgaaaaggtacggaaaacaacaagcagtacacgaataaaagaatttacgaataatgcacgcgcgatccgatacgatactgttgtgacgcaaacgcataggggcacgcacaataacagtaaaggggggtgagtttctataagatagggagtacaaggctaaaataaagatatacaaatgaaatagatatatacgaggttacgaggcatatagtgtgaatacgacagctacgactgactaaccgcaggcaacaattgcagagggacggagagacttacaggctggtaaactgtaaaggtggtagtttgaactctaagtgtcctacttgtggtggttgtggtcgtcactataaacgatgtaggtggtggtataccttgaaatagagacaatagcataatagaaaatctcacatgactacttgttgtcctcaca

SEQ ID NO: 9272 - DNA, 490 bp, Glycine max
  unsure (1)..(490): unsure at all n locations
  Clone ID: jC-gmfl02220101e04a1
gttggcagcttcactaactttggcagctgctagaaggatagttgaggcagatgagttcatgagagcaggattatatgatggatggctacctcatctatttgttggaaacttgctcaaggggcaaacagttggtgtaattggagctggtcgaattggatctgcttatgcaagaatgatggttgaagggttcaagatgaacctaatttattatgatctctaccagtccacacgactagaaaagtttgtcacagcctatgccgcattcttgaaagcaaatggtgaaaccccagtgacttggaaaagggcagcaaccatggatgaggtcctccaggaggcagatataattagtcttcatcctgtcttggataaaaccacttatcatctagtcaacaaggaaagactagctcagatgaagaaggaagcaattcttataaattgcagtagagggcctgttattgatgaagctgcactcgtggagcatntaaacata

SEQ ID NO: 9273 - DNA, 512 bp, Glycine max
  Clone ID: jC-gmfl02220101e04d1
atcttggccgaccaatttaccgtgctacatgtgtagcagtaccacctacttgggggggggggggggggggacccatagaaccaagaatggtagggagcgggaaggaagcgggcaaagatgataaatatatcagctggaggaatagtatacgtgggagagctatacgcttagtcatatgtgatagacgatagatataaaaaacaatacatgacttttacacttgaatttaatatataaaaaggccttagggcgctaagggcacctttggcaattagcgcgcgggagactgggcaacggcctaaatttaccctggggctaggaataagctggccctagctactgccgccgtcactaggtgtaggcaccaagccggttattggaggcctagtaaattaaatgcccgatttgggaattggttttactatcgggacactgctgacgcgacttaggtttgtatcacgttatggccaactacagctaagcgccccgattataagcctaggtggtaatgt

SEQ ID NO: 9274 - DNA, 498 bp, Glycine max
  unsure (1)..(498): unsure at all n locations
  Clone ID: jC-gmfl02220101e05a1
gagacatggttttcagatccagatgtctgtagggaattagagttgtggtacacactttcaaagactttggctgaggatgctgcctggaaatttgtaaatgaaaacagcattgacatgatttctattaacccaactatggtggcaggacctctcttacaaccagagattaatgaaagtgttgagccaattttaaacctaataaatggtaaaccatttccaaataaatcttttggatgggtcgatgtgaaagatgttgctaatgctcatattctggcctatgaaattgcttcagctagtggaagatattgtttggttgagagagtcatacactactctgaacttgctacgattntacgtggtctgtaccccacattacaaattccagataagtgtgaggtagatgagccgtatattccaacataccagatttccacagaaaaggcaaaaaaggacttgggaatagagtttactcctttgggagtgagtctcanggagact

SEQ ID NO: 9275 - DNA, 512 bp, Glycine max
  Clone ID: jC-gmfl02220101e05d1
atcttgccaacagatttaccgctactacacgtgtagcactaccaccttcttgggggggggggggggggggggggggggggggggggggggggggggggggggggggggggggggggggggggggggggggggggggggggttttcaaaaggcctttccccaaaaggataagaaaaaccccataaacctggaaggctttttaacaccgtaccaaagggggattttagggatttgggaaagggtcccttgggaaaaaaaaagcccaattcccccccaaatttaaggggggattccccaaaacgtttggggcaaccttctttgggggtagccttttaaagccaatcccccccaaaatattctttgggggggggggcccaaaaattttcccggaaacccctaaaaggggggggtttaaaaccgggttaaacgggtttccaaatgtagggttaaccccccaaatggggggtttaaacttgggggcctttgggtcccccaaaatcccctgccccccaa

SEQ ID NO: 9276 - DNA, 498 bp, Glycine max
  Clone ID: jC-gmfl02220101e06a1
gagacatggttttcagatccagatgtctgtagggaattagagttgcggtacacactgtcagagactttggctgaggatgctgcctggaaatgtgaaaatgaaaacagcattgacatgatttctattaacccaactatggtggcaggacctctcttacaaccagagattaatgaatgtgttgagccaattttaaacctaataaatggtaaaccatttccaaatgaatcttttggatgggtcgatgggaaagatgttgctaatgctcatattctggcctatgaaattgctccagctagcggaagatattggttggttgagagagtcatacactactctgaacttgctacgattgtacgtggtctgtaccccacattacaaattgcagataagtgtgaggtagatgagccgtatattccaacataccagatttgcacagaacatgctaaataggacttgggaataaagaatactcctttggtagtgagtctcacggagact

SEQ ID NO: 9277 - DNA, 374 bp, Glycine max
  Clone ID: jC-gmfl02220101e06d1
agacttgaccagtcaatttaccgtgctgcatgtgtgtacgtccaccttctttggggggggggggggggagggggggggcgggctagtgcgggggggggctggggggggtagggaggagggtgaaggacgggcgggttaagaataaagaaaggggatccggtaccaaggcccatacatcctagcacaggggaattaaagatgtgactgtagcgcaagaataaagcttggggagaaacatatgtgggaaaacacaccaatatttcgattttacatgagagactacgtctagaatagtagcagagttcaaatggtgttgaacgtagatgcgcactactggttggactaacaactggtgatgggctgtgccagtgttt

SEQ ID NO: 9278 - DNA, 477 bp, Glycine max
  Clone ID: jC-gmfl02220101e07a1
tctatttgcatctcataacagagagctgagaaaggaagaaaaaagcgtgtgtcagagatacttaacaatggttgtagaagatacccaaaagtcagtcatcacggaggaccaataccctagcagggtcgtcagcgacaacaacaacgacgacgacgacgatgatctcgaagagggtgagatccccgtcgacggcgaagatagcggcgccaccgccacaacgaagcctccggccgccctcgcccgaaacccccaccctctggagaattcctggaccttctggttcgacaacccttcctccaagtccaaacaagccgcatggggcagctccatccgacccatctacactttcgccaccgttgaagagttttggagcatttacaataacattcaccacccgagcaagttgggtttgggggcggactttcactgcttcaagcacaagattgagccaaagtgggaggaccctatctgcgccat

SEQ ID NO: 9279 - DNA, 456 bp, Glycine max
  Clone ID: jC-gmfl02220101e07d1
ttgccaggagatttgccgtactacctacatgtgtgcagtacctccttcttgggggggggggggggggagcaggcatataaatcttggtaaatcctaaataagggggtaggaacaaaatagtggggtcagggtagggcttggagaataaataaatggcgcagtaaccaggtgtttgggagagttaagttacgtaaagagttgttagttataataaagagctaacgatgataaacagccccttaaaaccctgatcaaggtactgaactgatagcgaacacaccaaacattacctagtaaaagctcatggtagctaaccaagcgatgcttggttggtagggctgatttacggaaaaatctgagatatggtagataatcgagggagggggactattgtgcgttactggtgggctagttgtagcaaagagaaacttaaggcgcgtaggcgaagtaacaaat

SEQ ID NO: 9280 - DNA, 403 bp, Glycine max
  Clone ID: jC-gmfl02220101e09a1
agttcgacatcggaaaatgtgaggattttgtctgggtgacaaaggatgaattgacggagtattttcccgagcaagccgagtttttaaataagatgatcattagctgatgaaagtggagaacagttgtttaattgaaatttttgccagttagttcctagaatgacagtggagggccttgcaagaagatcaatgtaagataaagtttctgggcacattggaagatttcgatttaaagttaaacgtgacatctctagttttggagacttgtccgagttaatggatgctggaaggcttttttgtttaaaaacgtattttgttgtttcttttaatttgccatagctcttcttgtagctgtactgtaataaataagttgcaatggtgattatgacgatttgaatatgtt

SEQ ID NO: 9281 - DNA, 545 bp, Glycine max
  unsure (1)..(545): unsure at all n locations
  Clone ID: jC-gmfl02220101e09d1
cggtgatcacaaacgctattttttgtgcacctcgtgtgnagtacctcctctttggggggggggggggggggggattgaggtaaagtcgtagaagtattaggctaatggagggaggatacgataatgataacaacactgagcctaaaggaaaacaaataataaaagatcgggggaaataaaaaacttggttactagttaggaatgtccataacgtgttaaaatgacacagcgtatcgggaatgggaaagtcaaagtggttaagcgctttacaaatgggagtggataggcagtggtggctaacctttgttatgcgtaggtgaccaatgaatgcctaaaaagggtaaggaaataatgcggtgttatgggtagtactgaagcagtagtggagggaaaaatgtcctggctgtcccaaaagatgttcgtaaggtagttgggcgtatttacataaaagttgtataggggttcagcgtcaatgtgtcacttcaaggttcactggatcgatctcgctagctcatcgtagactgtggtgagacgcgtattgaaag

SEQ ID NO: 9282 - DNA, 436 bp, Glycine max
  Clone ID: jC-gmfl02220101e10a1
agccacatgaatccttcatacgacgattcatgaggcacgcccacatctgctaataattctccatgcacctctccaccaattcctaatattttttttcattgccgcacacaacattcataagttggggccatattttattaaacaatatcttcacatgctactacaatatcatcactctctcaactctgcataccacaacccacaaaaacactcagacattaacacatccatcaccagctaccaaagccaacgccccaatcataattatataacacatcccgatgcctatattgcataccaatcccccaccattggccccacactagaggcttaccaacaaaactgaatacctgaccaacgtattgtactgcacatgacatggcttcttgtatagatctaaactttactcatgatatcagccttcaacttatctttt

SEQ ID NO: 9283 - DNA, 313 bp, Glycine max
  Clone ID: jC-gmfl02220101e12a1
ctctctgtcttcttgttcctcgtaaacggggaaaaagggggaaatctttctttgggggggaaccttaatctttctctttccatctacacatccactcgattggaggttttcacggcatcgttggagtgaaacaacttacagtgtgtgacgcgaccccgtgttacatcagacagaaaagagacttacactcggccccaactaatccaacggcgggagcatacaaagaactggaagaacatcttctccaagtccttctcaagcttgtggaagctgcttggccagcggtggagcacctctcacctctacaacaggc

SEQ ID NO: 9284 - DNA, 550 bp, Glycine max
  Clone ID: jC-gmfl02220101e12d1
agcatcgcctttctgcgactcgtcaactatacaatagctatgacagtcgcctacgctcagtacgtcagctgccgatcttgcttcgagatcccctcacttttgccgtgtcatctatatcacattgccactcaaggggattttggagtattggtgcaccattcatcttactacatcttaatattacgcataactcgaactctccataccttaaattttaactaccagctaggtccgacacagactaagcaatggcaacgaccgagttagaggtgactgttgagagcaagaacaaagacctcaagcacctggggtttgtgaggattgctgctattcaaacatttgtgattgtgtcaaatctgtatgagttcgcaaagcagaattctgggcctttgagatccgtcgtatgaacggctgagaacactgtaaccaccattctcggtcctgtctgcaacacattcaaggacgtccctgatgatgttcctgtttttgttgacacaaggtggatgaagcgttccacaagttcaatgagcacgctccttcttttgcttaa

SEQ ID NO: 9285 - DNA, 512 bp, Glycine max
  Clone ID: jC-gmfl02220101f01d1
catagactggcaattgaccgctactacatacatgtgagcacgtctgcttggggggggggggggggggggggggggggggggggggggggggggggggggggggggggggggtttgcaacaaacaacaaaataattgggtaattggggatgcccaataagatttagaatatgggataaaaaggccctgggggaagttttgggaccagttaataagccctttagcagcacccctgtagggggttaatgtacaccaagaggggaccttggataatagcccgcaaaaagacctagatgccccagctacgtaatgaaaacactgcattccctaattgtttgcagtaacgaggcccgcccttagggaacccccagacggaatcatgcaaaaacttaccgttactgtcacaaacaactgttgggttactagttggatttagtgggagtagagtggtcaaactagggcaattaaggtggcaacgggtcatatctcccggttagtaccccaactaatgaag

SEQ ID NO: 9286 - DNA, 492 bp, Glycine max
  Clone ID: jC-gmfl02220101f02d1
tagttgccaggaagggacttgccgtactacactgagtccgcctgcttggggggggggggggggcaaaaataaagaactggatcgtatatgtaaggtagtggaaaataacatgataacaataaatacaagcatggcctaagttagccgcggtattagaggtattaagcgctatagccactagatggagggagcagaacggaggaggagcctgacaaaatacagacaaaaacataaatggaactagaattattggaggaatgattagctagtataggaagtagctagcacggaatgtagccgctactgccgctgccaatatggttattatgcttcccaagcccaattgtagaattacccgggcccataaaacgcgtagtattattaccaatagaatgctgattgccgccgcagttgcagttgcggctccagttgctgttgttagggttaggcttattaacgaagccaggggcaccgcgcacagcaaagggagcg

SEQ ID NO: 9287 - DNA, 523 bp, Glycine max
  Clone ID: jC-gmfl02220101f03d1
gctgccagcaatttgccgctctacatgtgtagtagtgccaccttcttggggggggggggggggggggggggggggggggggggcaaaccaaagataaagaggagggaaattaaaaagacacaaggacggtgaggtggccaagaagatagataaagtaagggataatcctaagctgcacaacaggaggcacctaaagcaatgctagagaggtgaagataagctataacacgatcagaccagggtgatacaaattttcggcagcggggacaataaatcgactgagaggccaaagacaagcccagaatcggtgaacgataagaaggggagaccatatccttaaagtagtggagccacggcaaaggcgaccaaggcgaggcccaaggccaaaagcgacaacattcgctgggagtacagggcccgcaacgggaccaagaccggggtgcaacaaacgtgtgcctggaaaaaagcatgggcctggaacccagaccgggaataaggccaaagccgggaacgagcgccggaa

SEQ ID NO: 9288 - DNA, 402 bp, Glycine max
  Clone ID: jC-gmfl02220101f04a1
agccagtgcaacgcagagctattacgtcgcatgccccccctcagcagggaataattctggtggaggacatgtgaatacctaggcttatttgaaacgagctgcccttggtgatatacacgggtggggcgatttatgactacacaacctcgttccaaacttggagccagagcatttacatagccattatggatcgaacaggtggacctctcaggcgaatgaagagaaaaactctggcagccgtattgatgattgcatacacatcagtcatccccacctttgcctattgcggtgtctgctaccctgataattcttgtgcgagggaagaatggaatggtgctgatgacccctatagccagccctttgttgatgtacctgctctccttataagataacttgggtatg

SEQ ID NO: 9289 - DNA, 345 bp, Glycine max
  Clone ID: jC-gmfl02220101f05a1
aaaggctctctctagtctcttgttcagatctcacctatgccacaattttcactcagtggtagcctctcaaaacgaatattctttgcttaaattttcataatatttttatagaatcactatctttttctttctccaaccgccactgcatccgatgctgtttccctcatcatcttgacggcaattttgctggttcctcaccaaaagttcaagacttcaagaaatggatcaacaagttgagaggcagaagcgtagcaaggagatgaagaggaagagtagtagtcaagtgaacaagcgcacaagttaatgatatgttgtcgttgcccctgtcgtgcagcaacgtgcatg

SEQ ID NO: 9290 - DNA, 524 bp, Glycine max
  Clone ID: jC-gmfl02220101f05d1
ttacctgccggtttgccgtgctacatgtgtaggagtaccacctgcttgggggggggggggggaacattggacaataatgttgttaaagggttaaaggcgggagttagaagcaaaacaagcagcgaaactgagcgatgacgaggatgagtattacaccaaacagaatacaattaaacgcacaatgcaattagggaggtagttggtgtaaaagggttgaaagtttgttagaacaagctggcacgtgaggaattaggggccggccgcgtattaagtaaacgctggctaagcagccgcctcagcgtgagcggtagttaactttaactatgctataatacccgaatagcgcataaatagctattgcttgagattgtccaatagctatcggctgctatcatacccctaatcataatagagtaggaatggcggctctggcggtatgggatgatgatgtggttgtggtagtgttggctgatctggtgcttgtgtaatggcggcagttagggtggcaacgtggcaatggggcc

SEQ ID NO: 9291 - DNA, 519 bp, Glycine max
  unsure (1)..(519): unsure at all n locations
  Clone ID: jC-gmfl02220101f06a1
gagcaactagagaatgttcgtgtctccgaagttcaaagttcgatcaaagagctcttcaatgtttggtcaagcaacaagaataatgagtctggctatgcgttgctggagctgaagcaatggttttctcaattgacatacaacatggttcttcgaatggtcgtcggaaagcgacttttcggtgctagaactatggatgatgagaaagctcagagatgtgtgaaggctgtgaaggagttcatgcgtctgatgggggtgttcacggtggcagatgctattcctttcttgagatggtttgattttggtggctatgagaaggccatgaaggaaactgccaaggatttggatgagatttttggtgagtggttagaggagcacaaacaaaatagggcttttggtgagaacaacgttgatggaattcaagacttcgtggacgtcatgctntccttgtttgatggaaaaacaatttatggcatagatgcggataccatcatcaaatccaatttacttgacataatttca

SEQ ID NO: 9292 - DNA, 519 bp, Glycine max
  Clone ID: jC-gmfl02220101f06d1
atgcttgaccggccaatttaccgtgctacatgtgagcacgtcctccttcttgggggggggggggggccgagaagaggagataggcagagggacgcgttagccggtgtataaggatcacggatagacaatgggtatcaaaaaaaaaacccaaggatacaaaagtaataaacttggaaattggaggataatatcatggaggataatattatagccgcataaggggcgcaagggtaaaaagctttggggcatcaaaagagaagggagtacctaaattgcagggagtgaaaacaacagtatagacgggaataagccatgggttataaagtctgaacataacaggtatagctggggagaaagaataatgacaacagaagtcgcctggaaggaaaagtgtaacgccacgactgggacgtggcctgaagttaaaccgggtacgtagagtaagaccgggagggcagccagggaacaagcaaaaacaagcaaaaacatgcctaacaagtaaagcaattagggcaacct

SEQ ID NO: 9293 - DNA, 443 bp, Glycine max
  Clone ID: jC-gmfl02220101f07a1
tgacaattgataatggtgtttttgaggttcttgctacaaatggagatactcatcttggaggtgaggactttgatcagagaataatggagtacttcattaaattgatcaagaaaaagcatggaaaggatattagcaaggacagtagagcacttggcaagctgaggagagaggctgagcgtgcaaagagagctctcagcagccagcaccaggtccgtgtggaaattgaatcactttttgatggtgttgatttttctgagccactcacccgagctcggtttgaggagttgaacaatgacttgttccggaagaccatgggtccagtgaagaaggctatggaagatgctggattacagaagagtcagattgatgagattgttcttgttggtggaagcacaaggattccaaaggtacaacaacttttgaaggactactttgatggaaag

SEQ ID NO: 9294 - DNA, 473 bp, Glycine max
  Clone ID: jC-gmfl02220101f07d1
aatgcttgaccggtagatttgccgtgctacactgttgcacgtccgccttcattggggggggggggggggggggggggggcatctaaccgcacgccgaaaatgacttaattaaaaataaaggtaactagggagtggggaaacgaggggtcctattaaaaagataacactgccccaactggggtgtaatggttattgcggagaaaaatgggaacatgttctggaaatgatatgatgctgtagtaggtaggctgatctaacaatagtgtgacactgtcgtagcacaagtattagttgttgtcttgcagctattattattgcccctgttattgcagtgtgcagagatactatgcagcaggcccggctaaatactggctattgtgggcactggtgttgtagaggtggtgggtgttatatgtgccggcatagttagttaggttaagctggtggggatgctacgtgtaaggggtgttggg

SEQ ID NO: 9295 - DNA, 487 bp, Glycine max
  Clone ID: jC-gmfl02220101f08a1
cgttctaacaattctcattcaagtttcacctttcgccggaaaaagaaaaactcatcgccaacgctgaacctctccgtttctcctcctccgtcgaccgctccgccagctttccccagcggaactccgtccgcgccgtcgcggaggaggcggtggagacacggcggccggcagccagcctctacgatgtgttgcgagtcgagcgagacgcatctccgacggagatcaagtcggcgtaccggagcctcgcgaagctcttacatcccgacgcggcggtgcggcgttcgccagagacagacggaggcggcggttacgtcgacggagacttcattcagctccgaaacgcgtacgagacgctgtcggatccgtcggcgaaggcgatatacgatatgacgctggcggcgccgcacggcggaagacaccgccggttttctactccacttattcggaaccactcgtcggcgtttacacaacgcgaagggggaaacag

SEQ ID NO: 9296 - DNA, 530 bp, Glycine max
  Clone ID: jC-gmfl02220101f08d1
aagcttgccggcaatttgccgtgctacatgtgtgcagtaccaccttcttgggggggggggggggggggggggggggtgtaaggccgctaggagaggacaagcgcgtaggggtccgggcataactggggaatgataagtaaaatatatatatagtcggacgtagtggcgaacgctcgcaaaagcggcctagtatcatatgtgtagcacggggttaacaacaggaaggaagacacaaatatgggctgggatgcgggggctagacgaatggggctatagacggtgtattcaggtccacaggttgtgggtggcggaataaagttataagggggtgggcggaaggtttcaactaagcggaaggttgtgattactaggccgtgcgggtttattggtctcggcgcgaaaatcttcatcacgccggttcaagaacgccacgacaaaattcctccgcgtggttcttcgctcctcttcttactcgtagagtcgagagtcttggtcttcatccagttcatactcgtgtcgatctcgggtcc

SEQ ID NO: 9297 - DNA, 516 bp, Glycine max
  unsure (1)..(516): unsure at all n locations
  Clone ID: jC-gmfl02220101f09a1
atcatagttgacattgatggagttgcaagatttgccagaaggatgcattgcaaaaatactgtcatacaccactcctgtggatgtatgcaggctctccttagtttccaaagcctttcgttctgcagctgaatcagacactgtgtgggattgttttctcctttccgatttcacctctatcattcctatttcctctacctctaagaaggatctctatttcactctctcagaccatcccaccatcatccaccagggtagaaaaagtgttcaattggacaaaaggaccggaaagaagtgttgcatgctttccgctagaaatctgaccattatatggggtgatactgttcaacattgggagtggacaagcctgccagagtccaggttccaagaagttgctatgcttcaggctgtgtgctggtttgacattagtgggagcataaatactcttaccttgtcctcaaatactcattatgcaactnttcttgtgttcaagatgatcaatgccagtggatttcacta

SEQ ID NO: 9298 - DNA, 581 bp, Glycine max
  Clone ID: jC-gmfl02220101f09d1
tacctgccggccgatttgccgtgctacacgtgtagcactgccgccttcttggggggggggggggggagagacaaggggacaaggagggggggggagcaaagcacatgaaagggagagcaacataagaatgaaggggaagaggagggtgacgggtatgtactatgtgactaaacatttggttagtagcaggtagcccgaccttgaacaatggcgggtatagagtacatagcgggaccttgaagggtgaggttggtaacaagcaaattatatggttacagagcatggcggcgtgttagcatgggtagggctattgcgggggtggtggccttacaaggcaacaatgtgtttagtgtaagtgttaattatttagtatggtgtatgggaccaaaggcgaaggtggcgaactcagcaggcttggggaacggcccagttaaataaatagagggacgaggctgaggcttgctgaaaatattgatgcagaatatgcgaccagccgacgcaaagttatgcctaggcagtagtggcaatataacaaaacggctagaagcacgagggcaccataccccgacacgagggagctg

SEQ ID NO: 9299 - DNA, 454 bp, Glycine max
  unsure (1)..(454): unsure at all n locations
  Clone ID: jC-gmfl02220101f10a1
tggacgctggcggaaagatcaagaagggcgccggaggtagaaagggcggcggcccaaagaagaagccggtttcaaggtccgtcaaagccggtctccaattccccgtcggaagaattggccgttatttgaagaaaggaaggtacgctcagcgtgtcggtaccggtgctcccgtatacttggctgcagttctcgaatacctagctgccgaggtgcttgagttggctgggaatgccgcacgtgacaacaagaagaacaggattattccaagacacgtgcttttggcagtgaggaacgatgaagagttggggaaattgcttgctggagtgacaattgcacatggtggcgtgcttccaaacatcaaccctgttttgttgcctaagaagactgagagggcttncaaggaacctaaatctccatccaaggctaccaaatctcctaagaaagcttagattac

SEQ ID NO: 9300 - DNA, 424 bp, Glycine max
  Clone ID: jC-gmfl02220101f10d1
gattgaaaacaagggggtttccacttttcattaacgaagcaaacttactcctacaagcaacaaattgggacaagaattacagggttttcgaaacccataaaatatcctgttacaccaaaagcacctaaacaccgatttacaacactaaattaaatatggaaaataaaaaagtaatctaagctttcttaggagatttggtagccttggatggagatttaggttccttggaagccctttcagtcttcttaggcaacaaaacagggttgatgtttggaagcacgccaccatgtgcaattgtcactccagcaagcaatttccccaacttttcatcgttcctcactgccaaaagcacgtgtcttggaataatcctgttcttcttgttgtcacgtgcggcattcccagccaactcaagcacctcggcagc

SEQ ID NO: 9301 - DNA, 505 bp, Glycine max
  unsure (1)..(505): unsure at all n locations
  Clone ID: jC-gmfl02220101f11a1
ctcattcaataaaagaagcctgcatgctattggaagtacacctaacccttacgagaaggccatctctattattggcaagacattggctccctttgatgatgataacttgattccatgttttggatttggtgatgctactacccatgatcaagaagtgtttagctttcacagtgatcattcaccttgccatggctttgaggaagttttggcctgctaccagaaaatagttccaaacttgaaactttcaggaccaacttcttatgccccggtgattgaggctgctatagacattgtggagaaaaatcgtggccaattccatgtgttggttatagttgctgatggccaggttacaagaagtgtcgacacaagtgatggagaactcagtcctcaagaagaaaaaacaattaaagcagtagttgatgcaagcgcatatccgcttgcgatagttctggttggagttggtgacgggccttgngaagacatgagaaaatttgatgacaagata

SEQ ID NO: 9302 - DNA, 409 bp, Glycine max
  Clone ID: jC-gmfl02220101f11d1
gcagagcaaaaatttgattagagaccgtaaatatatgaaacattatgggcagggatataggaatatacaacttgaaacgcattgacacgaaccatgcatacatgtagaaaccttggacaattcatgtccatttttaaatacacttgaaacatcccaaacagagacaagctatcattttcagacttttaaccccaccatatataaaccctattgagaaaggcctgttatgcaaactatgtaatcaatgtgcatggatttgattgcaatcaccccctatgcaccctgagacgactagggatccaatttcggcacatgggacaaccagttaattagggcccacactctatgtaagtcatgtgcccacatccaaaggccagatctcttgcattggtcaaacaaactgggcaag

SEQ ID NO: 9303 - DNA, 368 bp, Glycine max
  Clone ID: jC-gmfl02220101f12a1
gttttctctctcaatctctctctgtgtttgctgcgaaatacgaaattaaaaaaaaaaccggaagcttttgttcgctggttaatgattttaattttattggtctcagattaacctttctctttgcgaatcctattgattcaacgtcgattgtgaatctgagtgtttttactttgattcgattcgatatgaagcgagcgaggaaatccaacagggtttcgtgggctactggagataatctgggtcaggtaaaattggtcttgtctgaggattttccctcaatagttggtcagaaatcgcaagatcatcttcaagcaaagacatcatcaatggtacattctaatattaacgaacctaatgatttgcccccc

SEQ ID NO: 9304 - DNA, 358 bp, Glycine max
  Clone ID: jC-gmfl02220101f12d1
gttgttctgattttaaccttttttttcaggacttcttattatcccctgcaaactaactagttaccggggcggggtccttcgggccctcgttggcaacctcttgtccgtaaccgcccaaaattgcccaacccggcaaattgaaagtaccctctatgacaaaaagcttcttggtaatttttccgaacaactgctgcgtactggccctgggggacgttaaaatcgttaaccccctggttggaaaaattttggcctatcgaaacctggcggcctaaaacctttgcgcgagctttattctgccccccttttattacctggccgctttttacttggagtacctttttgcaagccctgctttttt

SEQ ID NO: 9305 - DNA, 524 bp, Glycine max
  Clone ID: jC-gmfl02220101g01d1
atctcctaccgagtgggactggtcacgaactgagcacaaataagaggttaagtagaggcatagggggcttgttggagggtggcaaaagcgccaaggccaaggttttcaccaaggttcagtgtagggttgggcctggtaccagaccttgaagaacaaaataaagaaggttaaggtagagagcaatagggggcttgttggagggtggcaaaagcgccaaggccaaggttttcaccaaggttcagtgtagggttgggcctggtaccagaccttgaagaacaaaataaagaaggttaaggtagagagcaatagggggcttgttggagggtggcaaaagcgccaaggccaaggttttcaccccagttgtgacacgtcattgctagctagctaactggcgtgtgtttgggacgcacccggactggcctatgccttcgtcggggataatcgtcgcatgcccaaaatttgcctcggatttaatggaagtcttggctactatagttcttgggtcgtactgcctcgaagactca

SEQ ID NO: 9306 - DNA, 490 bp, Glycine max
  Clone ID: jC-gmfl02220101g02d1
tcacttgccggttagacgtgctacactgttagtagtgccgccttcttggggggggggggggggggggggggttggcacattgtaataggatgctatgagctggccgtaagacactagatagaaggaaagcgctaaacaagtacggagacaggggagagacggaagaacggcacataaggtaatagttgtacaataactatgtggttagggcccatgcaaagaaaatatgtttttatgtgtacaattaccaagaataaaacagaaaccaaatcccgcagccattagaattacagtgatggttagtaggttgacttttggaaagcggcaatggggcgccaatcgtaaacgtagtaaacgtagagtgggcgtgtgtgtggttacttggacataaagataatgcagtctagcaaagggcggtcgtgcgtctacgaacgggttggcacacgcttaggaggtgggccaggcagcaagtaagagcggtaagtagggt

SEQ ID NO: 9307 - DNA, 526 bp, Glycine max
  Clone ID: jC-gmfl02220101g03d1
atctgccggcaatttgccgtctacatgtgtagcagtgccaccttgctttgggggggggggggggcccaaaaactaacgaataggaacggccaggtccagatataacagaaggtataggagtgcaacgatggtattaaatataaagtgaaaaatgtgtaaaacgtagggtcggtgggcatctgtatgggttccccatcaacggccgcctagacctttacctcggcggcggcatacccgtactaaccgcagtcctcaccggtgttaagccatttgggttccgcataagccttgcaataaacaacttaaatagacacaatagccttaagtcgttcggtggcacggttggtattggaactgtactaaaacttgtgcccgtagtactaacctttaagcccgtcaactgcttattgcccgacaggcccgtacgcattgtattcacccccttattactaagatccgaattggtaatcctatttaggaccagaatggcgcgcctttacagcctcaacagctgtgccctcgccag

SEQ ID NO: 9308 - DNA, 431 bp, Glycine max
  Clone ID: jC-gmfl02220101g04a1
gagaaaactggcaagtctgcattgtctgcatcttcaaggaagggccttggatctgtggctgggaacaaagggaaggtaaatatgcgtagtgtttcacgaccgctatcggtatcatcatatgtttccacttccaactcttcccttcgtaaacaaaataatgctgcttctaagtccaacaaaagaggacatgatcatgaaggtgagaatgtgaagatggggtacaaaatcaggccaaaagtaagcacaaaagttggtgcagcaaataaatctgttcttgcagctcggaaattgaatttcaggagaggaaaagtgattgaacttcagcctcagagcaacgacgttccaaggagactcaaattcaggccggcacgcattcttggcgatgacatgaggagagacataaatagtgcaagaaaaaagaccattgtgga

SEQ ID NO: 9309 - DNA, 474 bp, Glycine max
  Clone ID: jC-gmfl02220101g04d1
ctagcttgccaactaaccgtactacatcgttagtactaccaccttcttgggggggggggggggggggggggggggggggggggggggggggggggggggggggggggggggggggggggggggggggggggggggggggaaaattttacccaaaaaaaaaaaaaaaatttttaccccccccaaaaaccgcccctttaaaattttaataaaccccccgaccaaaaaaccgggttatgggttttcagaagtaaaaggaaacccaaaaacccttttgggggaattttaaaacccgaaaaccttaaattttttttccccaaaaccccttaagggggaaagggaaaacccttttaacccaaaattccaaaaattcccaaattttgggaataatcccccaaaaaaaaagtttatttttaaaaaccccccgcggttaaaaccccttcccggaaaatttaaatggggggatttaaagggggg

SEQ ID NO: 9310 - DNA, 346 bp, Glycine max
  Clone ID: jC-gmfl02220101g05a1
ggaaatcgctgtgttaacggcgttttgaacgtcgttttcgtttgtgacatcgcaatggacataggaagcggattccaagtgtttgcaaagagagagacccaaatcgtcttgaatatcagctatcacaacgtgtgctccatgcttagagaagagtcttgcagtggcctcacctataccgctagcaccaccactgataagagccactttcccttcaagccttataaatatttgggtatgacatgttaggttagcaagaagacagctgtcacagttctataattttatctaagacaattggtatttgttaacgtatataatcctttattttagtatgaatgcattagat

SEQ ID NO: 9311 - DNA, 513 bp, Glycine max
  Clone ID: jC-gmfl02220101g05d1
cgacccggacggtttaccgtgctacatgtgtagtagtaccgccttcttggggggggggggggggggggggggggggggggaataaaggggagtgaagctaggtagatgaaaagaaaccaggagagatcggaataaagattaaggcgtggacagaaaaggagacaatgcgcatactgcgtggtggctgaattgaatagcgtagatttaaagagggagaacctggcaacccaaacgcctgtggagtacgccgccgctgactccgagaccgcaccttatgctaacatgtggtgtgaactagccactatatcggcgcagactgcagaggtaacatcagggcccgtgtgtgtgggctaaatatggccaagttctggttgagcgttaggctcagcgtataaatcaaaatcatcggtaaaatcttcggaatatactcagggtttgtcacttcaaggttcactggatcgatctcgctagctcatcgtagactgtggtgagacgcgtattgaaaggtaaggt

SEQ ID NO: 9312 - DNA, 466 bp, Glycine max
  Clone ID: jC-gmfl02220101g06a1
tggtggttcacatcataattcaatgcaaaagagcaatggttataaagaggaatgggaatcatcagaagaggttgctgagcagattctaaaggaaccaaattctagattcttaacgtcaggccataatgatgaccaagcttgtgtctctgaaaaggccactggcaattctcagcagagtaatggatttggtcagactgagagggacaatttaggggaaatcagggtaattgcacctggaagtattctcccatcgacccctgacacaaaggacagtactgaacccaaccagggaaatggtgaaaactcatcgcgtgtgtttggacttagtcgtagattactaataaatagctttcagcggaaagtttcttttgatgaaaaatctgaacattataattctctgaaatctgttatattggaccagagtggacaaaatggcattgtaggaccatcacttcctgagacaaca

SEQ ID NO: 9313 - DNA, 538 bp, Glycine max
  Clone ID: jC-gmfl02220101g06d1
agcttgccagcaatttaccgtgctacatgtgagtagtgccgccttcttgggggggggggggggggggggcaaagcaaatgctatgatatggaagaatacagaaataacagggaggtatatagcgcgatagataataaacttgtaactaatggtatggtaacacctgaaaaaatagaaaccatgatgtcgcgagcaaagaggggggggtgggaggaaaaaaaatagcgtagcgagtatgttacggagtagtagtggtattagtagtatgtctaataattgcatccaggctagggcttggtgttaaaaggctgcgaatgggcatcgggctgcgccaattacgccgagtagggcatgggttgcagatgcgcccttggaccggcaagcttgcaattaagaaagaaagcctaacgtaagctaaaacggcatgataaggaatagcagggaggggaagcggctgacaatagcggtgccaggcagggggcgtagtaagggcgaagggacaccatgaaggacagtgaaaaaaagaatgaacgaggga

SEQ ID NO: 9314 - DNA, 482 bp, Glycine max
  Clone ID: jC-gmfl02220101g07a1
caaaactataataatgggttcttcttctcctccggacactagcaagagcataaagctagagcgatacaacagctacatcaggagactcaacagcaccaaactcctcaacgcctcctccaaactcctcttccgtgccactatcttagtcgcactcatcctcgtcttcctcttcaccttcaactaccctcccctcgccccagacttcacctcccaccgccacctccactcccactcccacttcctctcctcctcctcctccttcgcctcctgggagaagcaggtccgccactcctccacccctcgccgccccaacggcctcaccgtcctcgtcaccggcgccgctggcttcgtcggcagccactgctcccttgccctcaaaaaacgcggcgacggcgttctcgggctcgacaacttcaacagctactacgatccctccctgaaacgctcccgtcaggcaatgctctggaaacaccaggttttca

SEQ ID NO: 9315 - DNA, 456 bp, Glycine max
  Clone ID: jC-gmfl02220101g07d1
aggctggcggggatttgccgtgctacatgtgtgcagtgccgccttgcttggggggggggggggggcagttaaccgaccgagggcaaggagggcgggggtgggcgggtggcgaaaaataaaaataaccctagcgccgcgcaccagaaggaacctggcccgatcgatcgaccgcaggaggtaggcgtaaccgcagaggttggggggacttgggctgccaccttcgaagaattcaccgattatggcatcaatggttgcacattccgcctcacagtccgccgcccaggcgaacacaaagtttgcgaccttaactgcataggcctcgcgcgcaacccaatcgtcttcgggcagcctagtggaagcatcgctggtggccttggccgctggactacattggttacaagccatattaaccgtttaattcctattgcgcaacgcggttttacaggcgagatgtgc

SEQ ID NO: 9316 - DNA, 492 bp, Glycine max
  Clone ID: jC-gmfl02220101g08a1
cgcagtttgcctcaccggtgtgtttttcctccgggagactccccccgacgtctccgccggtgatgacgacggcgaagaggtaaagtacttcggcttcttcaacgtggtggcggtggcggtggcgctttttctgttggcgtatgggttcatccccagccctagcatgttggtgtcaagattgtttgtggcggttttggtggtgatgctggcttcgccgttggggatcccggtgtactcgtacttgaagggacggctcggagggggaaatgacgtggagaggcagaggctgaaggagccgttgcttcagattccggagaaggagaatgaaggcgtggtggcggaagaagaggcggagatagtgaagagggcgccggaggtgggtgaggagcacacgatagtggaggcgctgagaagcgtagatttttggatcttgttcgtgtccgttttgtgtggggttgggacggggttggcagtgatgaacaatatggggtc

SEQ ID NO: 9317 - DNA, 605 bp, Glycine max
  Clone ID: jC-gmfl02220101g08d1
taacttggccggttaatttgccgtgctgcatgtgtagcagtacctccttcttgggggggggggggggggggggggggggggggggaagaagaatatactcgcagaggggaagtgagtaaaaaatgtgtatcagatgaaagatatggaggggtagagccaataaaaacaaggtgtgtgcagtttatagtagaaaaaaaatgaagaagaatacgatagccaccttgaaagccaaggaaaaataaagcctttgttgggaggccaaaaagcacggggaatgagtacagaccataacgtattggctgcatccagatgcacagagtatggcactagaaacggtagtaagtttaccaagcgtagattaggtgcaagtatgcttgagggcagcggttgaaccagggtggccctggtggctgtcgccaaagtggccgcgaaagaggtggccggtgcaggcataatacaagcgtgaacaacaagttaataagctagctgttacgtagcataagaaacatgacttgcgaataagcattgttaatatagcgcggcttgttgtttgtgcggcgacggcttgttagagtagacacgagcttactaactacattacacaa

SEQ ID NO: 9318 - DNA, 282 bp, Glycine max
  Clone ID: jC-gmfl02220101g09a1
gttaaaaaaaagagaaactagttccatattcattctccacacttgactcaggtggggtacaaccctcccaatacttgattatacccaacaaagaacttcactcactcttaatttcttatggcatcatccgagaacggagccagtattgagccatgcacgctccgtccccctgtcaccgattcctggcctcgatagtatttagctcgtgacgccaatgccttacaccgaggctcgtcagacgtctgtctcctacactgacttgccgggcgaggaaaacacact

SEQ ID NO: 9319 - DNA, 374 bp, Glycine max
  unsure (1)..(374): unsure at all n locations
  Clone ID: jC-gmfl02220101g09d1
gtcgacccggccgggtagccctcctacatgcatgtatgnacgtcctcttgcttgggggggggggggagtacataaggaagatgtatcttagaggtaggggattggcccaccccgatacaacagatagatgattgtcggacgttgctgtttagagaaatttattaaagcgcaaccgtcccacaactgcgatttatgaatttaagagattggggtgaggtatgataaaatgctgcctgctgggggactgtgtgcaagtatatcatggatataaggaggcgggcgagcaaacaataggagctcatataacaggacttgcggtaagtaaggcattgcaaggccctgcggtaattgagaatccactgggtggtacattt

SEQ ID NO: 9320 - DNA, 515 bp, Glycine max
  Clone ID: jC-gmfl02220101g10a1
ctcaatcccggtcagggggtcgatttttgcatacatcaaggtcacgttctcgttcacgggggaagatcaaaaggactagtggttttgatatggctccccctgcctctgctatgttggctggtgcttctgctgttgcaggcaatgttgggctactagccccactctgctgacaattggcgtgagccgacatctgtagcttttatgtccacggaggaatcaatgcacctgtttttggtcagatcactggggctaaccctacaattcctggaatgtttccaaatatgtttccgttggctacaaatcagatgcaacaatttagtgctctccctgtcatgccagtgcaggctatgactcaacaggctactcgacatgctaggcgggtgtatgttggaagcctccctcctacagctaatgagcaggcaggggcaactctcttcagtcaagttatggctcagattggtggagacactgctggcccaggtgatgctgtggtcaatgtgtacattaatcatgac

SEQ ID NO: 9321 - DNA, 305 bp, Glycine max
  Clone ID: jC-gmfl02220101g11a1
gggaagacgaaggactaaagcaccagctggatgcacttcccccttcttcacataatgctgcacgtaacataaagatctttaccattttattatgatacaaaatagataatgttctgtatcaaatttcagtcagacattggctctgtacatagggttatattatcgatgcactgtatttgtattcaaattccaaatggcgaacatatttgattgctgttagttttcaaggttctgtagattatgtgacaatgcagcagcaatatttggatttgtcccatattcacatgctattttaatttgcttaa

SEQ ID NO: 9322 - DNA, 295 bp, Glycine max
  Clone ID: jC-gmfl02220101g11d1
ctaaggaaattaaaacatccctggaatttggggccaatccaaattttgcggttcttatggcccaccatgatcaccaccctggacaactgacagacctacaatttgaggcgccaacggagtttgcgctccaattccgggcatcgagtaattgaccctttttaccgagcccaattgtgacggaactttgaatccaagcattttcttttacgggtgataacaaagtgggaaatatcttcattttccatgcagccttccgtgactaagggggaactgcttccagcgggaagtttgcacc

SEQ ID NO: 9323 - DNA, 464 bp, Glycine max
  unsure (1)..(464): unsure at all n locations
  Clone ID: jC-gmfl02220101g12a1
caggcatagcatgctacactcgcgggcctttcctgcctagtgtttcttccaagcactctccaccctccatctctccatcttttggcttgaggagtctgaaatcgagctctttatttggagaatctctaagagtggcatccaaatcaacactaaaggtttcaaagacaaagaatacttcactcgtgaccagatgtgaaattggtgacagtctggaagaattcctcacaaaagcaacaccagataaggggttgatcaggttgttggtgtccatgggagaagcattaagaacaatttccttcaaagtgaagacggcttcttgtggtggaacacaatgtgttaatacttttggggacgagcagcttgcagtggatttgctagctaatcagcttctttntgaggccttaaattactctcatttctgcangtatgctngctctgaagaaaatcctgagctcctggacatg

SEQ ID NO: 9324 - DNA, 391 bp, Glycine max
  Clone ID: jC-gmfl02220101g12d1
aacgggaccaacataatttaccttggctttatagtgataaacaaagatggggctaaaatggcggtccctaggcgaaaataggatacatgtttttttaaaacggggataaaatgaacatggaatgcggaggttaaccgcttgcgaggctgctgcaacaggtggacctcccttggcccaggattttccatacgggggatgttaaaaccggggtcttctattcgaggacccttgaggcaattgagttccggccttaaggtgactggggcctttcaggtaaggaagctggtgaccattgctgccagaactcagacgttttttaagcagaaacccccacggggcgacctctaacaagaagctccgcatgggattggctcatggtgattacacgctg

SEQ ID NO: 9325 - DNA, 515 bp, Glycine max
  Clone ID: jC-gmfl02220101h01d1
ctgaccggccaatttgccgctgctacacgtgtagcagtgccaccttcttgggggggggggggggccaacgccgataaacccgaaatgcgaaggtcgggaataagacacgcaacggataaggcgctagagagaagaattagacgatagaagtagtggtccgggtgtgggtgtttttatgagttcgtcgtgtgcgggcttgcggcccggcgcgatatggtgggtgatgggtaaactactaagacaaagataaagcaaagaaagtcaaaaggtaaaggagatacccaaaaaaagtacaaaagatgcaataacaaagtgataagggcgcttcttaacgtaaactaaaggagaatacttgatacacctgcgtaaggtaggtggctatcagttagagtgtgctagaggaggcattctatatgaacacagagagggcgtgtgagggggaaagctagagttatagacaagtgcggctggcttaataagccgcgtaggcaagcaaagtaccggggtatagaagt

SEQ ID NO: 9326 - DNA, 522 bp, Glycine max
  Clone ID: jC-gmfl02220101h03d1
ctgccagcaatttaccgctctacatgtgtagtagtaccaccttcttgggggggggggggggggggggggggggggggggggggggggggggggggggggggggggggggggggggggggggggggggggggggccccctaaaacccaaaggggaaaaaaccccaaaaagaaaaacccttttgcaatccccaaggggcgggaaatttttaactggcggttccaaacaatttttagacgccccccaaaaaaaatcccttaataaggaaccccccaaaaagggaaaaaaatggttttttaggcccccgggctaaatttaattgaataaatacccgcccttaaaaaagggtttgggggggccaaaaattccccccccgaaaaaattccaaggaaaggggggcctgcggcccaaactggcaatttttgaaggccccaaaatttttggggccaaatttggggagggcgggcctttttaaaagccggggcggcccttgcttttaaaggaccccccaattgggtttgggg

SEQ ID NO: 9327 - DNA, 494 bp, Glycine max
  Clone ID: jC-gmfl02220101h04a1
ctcgagccgtctctctctctgagctcgtcgaattcgaaatctgatctccaacgattgatctcggtagaggctagtgcactctccaatctgcaaaaatgcctctcagactcgaaatcaagcgcaagcttgcgcaaagatcagagagagtgaaatgtgtggatctgcatccaacagagccatggattctggcgagtttatactctggaactgtctgcatctggaactaccaatctcagaccatggccaaatcttttgaggttaccgagttaccagttagatcggccaagtttattgcacgcaaacagtgggttgttgctggagcagatgatatgtttattcgtgtatataattacaacacaatggataaagtcaaagtatttgaagcacatactgattacattaggtgtgtggcagttcatcctacccttccttatgtgctttcatcatctgatgatatgctcataaagctctgggatcgggaaaaggctggatct

SEQ ID NO: 9328 - DNA, 463 bp, Glycine max
  Clone ID: jC-gmfl02220101h04d1
atacaatcccgggaacttgctacatgtgtaggagtgccgccttcttgccctgggggggggggggggggggggggggggggggggcccaacaagtaggaggggtgtgccccattaggtagcgggataagttaccaaaagagaaaaaggaaaaaaaagcagtaacaaaaaaggggaaaaaaaaagaatgagtgaaaagggaaatacctatttcggttgacggttcaggggtgataggtataagcctatcacgagaggcaccgaaaacttttaaaacaagcgctgagagagaaatgtgacgaaaggccaatgcatttgaaacaagaggccgtagattatctctaaaagcataaaaggtaccctatgataaaattataatattaccaaataaataattacgctagaaaagtgtggtcgcctattggcagaacattgtacagacaaagtttacaactgccaattaatg

SEQ ID NO: 9329 - DNA, 469 bp, Glycine max
  Clone ID: jC-gmfl02220101h05a1
gcctgcaccagcattgttagatgtggcttccattgctgcagacaagattttgttgctagattcatattttagtgtggttatttttcatgggatgacaatagctcaatggcgcaacttgggataccagaaccaacaagaacaccaggcatttgcacaactattacgagctccgcatgacgatgcccaaatgataattagagaacggttcccggtgcctagattggtagtgtgtgaccaacatggttcccaggctagattcttattagcaaaactgaatccctcagcaacgtataataatgcacatgaaatggctgctggttcagatgtaatctttactgatgatgtgagccttcaagttttctttgagcatctgcaaaggttggctgtccaatcatgaggacagataatagtagagattgacattctatgggttctggactttgggtttgggaattcaccaatgatgtgt

SEQ ID NO: 9330 - DNA, 566 bp, Glycine max
  Clone ID: jC-gmfl02220101h05d1
actggccaactagtttaccctactacatgtgtggagtgccgcctgcttggggggggggggggggtaaaacagttaggctattcacagcacgttgagatctggatggcataagagataagataaaatacgagtaacacaagcagagtaaatgtaatcgcataaaagcctgggtcggatgggctgattgcgccaatagagaaaacgaaaacaatgagagaaaggaagttactgcaccaatttaaaaaggtacagtgcccttaaaataaagaccaaaaatgcacgaaaaaaaagtgtttgtagggctgaggatctgctgcgcctacaccgccccctgtggaatgtcaggggtgagttgggtgggttctaagatttaaatggaatagatggggcaatttgggaggggtgttataaaacaaaaggtcattacaattggaaacaaggagcggggaccgtggttggaggtggtaaggtagcacctgttcactggtgtgagcggaacaataaagcaaacaaaccaaaacgatgcaagctaatactataatctaccatatatatagtaggccgca

SEQ ID NO: 9331 - DNA, 500 bp, Glycine max
  Clone ID: jC-gmfl02220101h06a1
tgaactcctccaccaacacctcgaattctcagtcaatggctgcagcagccagtgatgggtctgggaagaaggtaagaaaaccttacaccataaccaagtccagggagagttggactgaggaagagcacgacaagtttctcgaagctcttcaattatttgacagggactggaagaaaattgaagattttgtaggttcaaaaacagttattcagattcgaagccatgctcagaagtacttcttgaaagttcaaaagaatgggacagtggcacatgtgcctcctccccgtccaaagcgcaaagctgctcatccttacccacaaaaggcatcaaaaaatgttttggtgccactaccagcttctgttggttatgcttcatcaagaaatacgcttgcacctgggtttgcctcatgggatgaaacttccctgctgatgaatgccggagctgataaacccatgacctgtcaggatgaactcaacaatgttcatcatggaaatgaagct

SEQ ID NO: 9332 - DNA, 475 bp, Glycine max
  Clone ID: jC-gmfl02220101h06d1
aagacctgaccggttgatttgccgtgctacatgtgtgcagtgccgccttcttgggggggggggggggtacgaaagaaagaggagggacataggcccatatgggataggcaaaagagtggataaagtgaatcaacaaacttaggtaatgcctaaattaccatgtataacctgcaactataaaaaaagcgacgagcgtaaacgcgcatgggatatatataaaggtcctaataaaaccttatcgggtgggggggccgcaaaatcaaaccttatcgtcagaggacgtatgacataagacggatgtttgttttgggggtgaaggggcgcagcagatagggcgagtaggaaaaagagtggataaattgagcgtgtgatgacaacctaataaaagtatgctaagataataaggcgaagaacaagtactgcaaaaagataggcgctgtggtactgggtgaatagaaatgaggggcctgcgccg

SEQ ID NO: 9333 - DNA, 473 bp, Glycine max
  Clone ID: jC-gmfl02220101h07a1
caacatcataacatcaaattcgtatgtgcttttgcttaccctaaaatctccatccctacaaaaagaagaagaaaaacaagaagaagtttaacatgtcagctgccgtggccgcttccgctgccgccgctaccatgtcgggttaccaccacaactcctcctcgagacaacaacaacacatagaccatgaattggccttaacaccacaacgagtgtgtgtctctccacctctgagcaggtacgagtcacagaagcggcgcgattggaacaccttcgggcaatacctgaaaaaccaccgaccacctttgactctctcacgctgcagcggcgcgcacgttctggaattcctccgctacctcgaccagttcggaaaaaccaaggttcacgccgaaacctgcggatactttggaaactcccaccctccgggtccctgcgcgtgtcccctgaggcaggcgtggggcagcctcgacgcgctc

SEQ ID NO: 9334 - DNA, 586 bp, Glycine max
  Clone ID: jC-gmfl02220101h07d1
tacttggcgaccaatttaccgtactacatgtgtagtacgtcctccttcttgggggggggggggggtataagatggggttagagacaatcaaaggatcagaggaaggacatatgatttgcatacctggtgaggtacaaacaaaacaaaaaaaaatttgcataactggtgaagaagcattatatgacggcaagttggcactttgattatagtctgaattagacaagacaagacaagaagagtaggaagtcggaaggggttattagctagtagaatagagaatatcaagaagcggaaacatcgacggtacggccggcaacaaccagcgcttatggaggcgaaagggggcatatgagggggcaggtggacccagtaaagaatatctagcagtctaagtaaggaaatttattatatgcccagcagcagcacaaagaacaaattttagtacagcgacaactgcgtttaggtcaagtacataatagggctgcagcaccaataaacctattattattattattatgagatttgcaacaagaaggtatagtatgtcgacaatttattagtagtagtctagtagcagtagcagtag

SEQ ID NO: 9335 - DNA, 419 bp, Glycine max
  Clone ID: jC-gmfl02220101h08a1
gtcatggcagcaacattgatggcagcaacaacaagttctggtactcttaaagcaactcctttccttggccaaggcaagggtgccaatgccaatgctcttagggatgttgtctccatgggaactgggaagtacaccatgggcaatgatttgtggtatggaccagacagagtgaaatacttgggacccttctcagctcagaccccttcatacttgaaaggagaattccctggggattatggatgggacactgctggcttatctgctgacccagaagcatttgccaagaacagggctcttgaggtgatccatgggcgatgggccatgcttggagcactaggatgcatcaccccagaggtgctagaaaagtggttgagagtggacttaaggagccagtgtggttcaaagctggagcccaaata

SEQ ID NO: 9336 - DNA, 563 bp, Glycine max
  Clone ID: jC-gmfl02220101h08d1
tctgctaccggcaatttgccgtactagcatgtgtgcactacctccttcttgggggggggggggggggccaaacgcggaaaacacacgagtaaaggtgtgggaaataggctagtttcatggtaataggctgagattgggtgtaggccggctggtacataaaatgagaggaataaataacacatagttcaccgggaaaggcaattggacgttggaacaacgatatgaagttaataaggaggcgcagtagagaagtgatatagaaagtataaaccgaactatcacccagcccagtagacccaggacccaacaacaacgtagagataggggaacatttgccccaaaatggacgcctagacatttaactaggcggccttatacccggcgtgaccgccgttaaaaccggtgttaagccattggggttacgcataagactggcaataaacaagttaaatagacacaatagccttaattggttaggtggcagtgttggcatgggcactgtactaaaacgcatgcccgtagtactgacctttacgcccgtaaacgatgcctttttaaccgac

SEQ ID NO: 9337 - DNA, 449 bp, Glycine max
  unsure (1)..(449): unsure at all n locations
  Clone ID: jC-gmfl02220101h09a1
gtgagttttgtttatttgaaattaacaagtagcaaagatgtttggaatcatcggaggaaacaagggtcacaagataaaggggaacttggtgattatgcgaaagaatgtgttggatatcaacagcattaccagtgttaagggtgtcatcggaaccggcattaacatcattggaggagtcgtcgacaccgttactgctttggcgtcccacatctccatccagctcattagtgccaccaaggctgatggacatgggaaaggaaaagttggaaaggctacaaatttaagaggacaagtgtcgttaccaaccttgggagctggcgaagatgcatacgatgttcattttgaatgggacagtgacttcggaattcccggtgcattntacattaagaacttcatgcaagttgagttctatctcaagtctgtaactgtcgaagacatttcaaaccacg

SEQ ID NO: 9338 - DNA, 462 bp, Glycine max
  Clone ID: jC-gmfl02220101h09d1
atcacgccccgaggaatttaccgttctacacgtgagcacgtccaccttctttggggggggggggggggggggggggggggggggggggggggggggggggggggggggccccgggggggggggggatatccctaaccaaaggggaaccataatttggccccgaacccaaaaccgggatagaaaacccacaggaaggtgaccgcccttgggcttagcttacggggaaggccccaaaaagctctcacaatttggaaaactaggggagataaatacaagggggggaggaatatggaataccaaaaatcaaaatagggaagttttttaaaggtagaatggaattagataggcccccagcaaccaagtaagggttggtgaggtatggggaggcaaaattacccaaacgatgccaaaaattaggcacttttggaaaccaaagattccccccaaggttgtgcaaaccca

SEQ ID NO: 9339 - DNA, 474 bp, Glycine max
  Clone ID: jC-gmfl02220101h10a1
caagtttataaatatacatgacgttccttgttaatttcatgaagaaaataatacgtgcatacatagctatctatttatctatagcaagtgcgtcaagagacacgtggtaccctagctagagtgccattctgtggtttctttctttctttctttctgcatcacatcacaatttgcattgcctcgtgtcctttttcttctttgctctccaaaaatctcacacacacaggtatctagcaaatgggttctcaccaacaagaaccatggctattggagaatgggaaaccaagggttttgaccaaggagaccaggcatggccgttctgcacacagaatgtcctccacctctttgcgcaagaaatctagccgaactcttgtctcaaaggttccatgtgccactctcagaaactttctttcaaatttgcaagaggttattcttggcaccaagctttccattctcatccctgctattccagct

SEQ ID NO: 9340 - DNA, 529 bp, Glycine max
  Clone ID: jC-gmfl02220101h10d1
gatgcatgctttcactttcacagataaaagattgtcacggtcgaggaagatcaaggtttggaccatccaactacaactcattgaatgtgaataagtgtgggagttgaattagttcaagggcaacctcatgcaagagactcccattacgagagtagctatacatgtacaaaaaattctttagaattttaatttgtaataattacacgaaaacgatttttcttgagtgtaaactcatgacattctcaaataaaaattaaagacaaatctgtagaagtatcaaaaaaattcatttaagaaactgattttttctaataattgttttttatcagttcatataccatttaaaaatttaacctactgatcttatatttaaaagatgaagttatttatcacattttaataattactttgaatgattgaattagttgagttgatgaatgattgagttagttggaactgagaaaacaatgcatacatgtgcaacatcaacaacaactaattaagtggagtgatgatgagagggactcac

SEQ ID NO: 9341 - DNA, 108 bp, Glycine max
  Clone ID: jC-gmfl02220101h11a1
gataactagaaacagcgtgatttatatgaaggccctagttttcttcgtcgctgggggggtggtagtatgacaacgccctgcataccctatgcgccctctcacattgaa

SEQ ID NO: 9342 - DNA, 412 bp, Glycine max
  Clone ID: jC-gmfl02220101h11d1
tgaaaagaagtatatcctgttttcggaactaaccgacgacatccctcgcaacattttctacaaactcgacgacgatcctcgccactgggctcgcttagcctgtgtctgcaccaaattctctttcctcgctagggaatttctgttggaagaccaaatgctccctcaccatcccccaagacctcctctccgacgacgcctccgacccccctctctccctccacaaactctccttctgctgccccggcctccgccacgccggcctcctgttcgacaccttcgatttcagcctcgaacgcgacctcggccccggcaacttcaacgtcatcaccgatgattctccttcgaacaccactccaccaccaccaccaccaccaccacaacaacaacaacaacaaccttctcaatccgatga

SEQ ID NO: 9343 - DNA, 350 bp, Glycine max
  Clone ID: jC-gmfl02220101h12d1
aactcgacgctttacccaccatccagaaaatgctaggtgctactgcgtggcacttgtctctgcggcatacgcaggccgtgccacttcccgacagctacatgagtcctctgacactgttcccaatttttcggaataactttcaacttatcaacgtttcgcacgtcttacacggactacgctcatgacctctgtattagggaagcttcattatcgctctcggcggctaacgctacctcaagctagctgaaattggccttaaatgtaacactagatacgttgttgcgaccctgcgaattcagcgatgatactgttagagctatgatcgacaatagtccacgggagcatgtggc

SEQ ID NO: 9344 - DNA, 554 bp, Glycine max
  unsure (1)..(554): unsure at all n locations
  Clone ID: jC-gmfl02220102a01a1
ggttgatttgacagcttatgtggagaaacatgagttttgttttgatgctgttcttgacgagaatgttaccaatgatgaagtaaggttgctccttatcaaagattgaatttttatgctgtttcttatttaaattaaattaaccttttttcttcagtagttatgacgccaatatttggcttgtttgttgttgttggtatttatgaaagtgattgcttgcctttgtcttggtcttgactcttgagttgttaatctaaggcatggttgctgctttgcaataacaggtatatcgagttactgtagaaccaattattcctacaatttttgagaaaactaaagctacttgttttgcttatggtcagacaggtaagcaaattattcttccttgttcatatcataattgtaccaaacattatgaataagcactatccaatttactttccaaaccttnttctttattcaatataatattctctatgtatgactntntatctgtgtgtgtgtgtgtaactagttgtgaatggttctntgaagtgttagtagctgagcataatggc

SEQ ID NO: 9345 - DNA, 474 bp, Glycine max
  Clone ID: jC-gmfl02220102a01d1
ggcggaataaaaaataatttacacttaaatccaatttgcaagggcattaaggtggacacaatatcacacgagggacaaatatacatttgagtaaatttaatttgaatacccaacaaaagatccttttttttttttaataaaatgaacaaaagcctttaaaactatattgctaacaaacacggagatattacatcaagaacatacacatcatcactgaacaagagaaatggagcctctcaacggggcactctttttctacttagtatctcttgttcttttagtcgatgttggaatcttgcaaggcgtgcttggagactaacgagactagctgctttgcgagaaagcacgaaactcaactgggttacgtagttgtcaataagacttcctggctggtccacttctgccagtagtttcatttcttcacgaacaatctccattgtgtcttcaatttcctttctatgagcagcaattagt

SEQ ID NO: 9346 - DNA, 216 bp, Glycine max
  Clone ID: jC-gmfl02220102a02a1
ggacgattatacagcatatgtggagaaacatgactacatgcgagatgctgcacttgactagaatgattccaatgatgatggaaagtgtcgacttagcgctgattgcatgggaatgctgtccattaggcaaaagatagcaatcttaaggctgcacggaatatctcgccaatgagatacttgattggtgatcgtagtacgtatgctagcgaaagtttg

SEQ ID NO: 9347 - DNA, 449 bp, Glycine max
  Clone ID: jC-gmfl02220102a02d1
cttggtttatactataggtctcgcccattacctactctccgttcccaagagcacgcaccaggactattgcacttcttcctcgttctccctctttttcttcttcttcgctaaacccttttttctatctcactaacacaacaatgggagacgagaagaagggcaagcctgctgcttccggctgtgtggtccaccatcaagcctttcgtcaatggtggagcctccggcatgctcgccacctgcgtcattcaacccatcgatatgatcaaggtgaggattcaacttgcgcaaggatcagctgcgcaggtcacttccaccatgcttaagaatgacggttttgctgccttctataagggtctatctgctggattactcaagcaggctacatacaccactgcccgtcttgggtcatttaaaattcttgacggccaaagctattgatgctaaatgat

SEQ ID NO: 9348 - DNA, 504 bp, Glycine max
  unsure (1)..(504): unsure at all n locations
  Clone ID: jC-gmfl02220102a03a1
gaggtactcttattgatacggatggcagcaccattggcatgtgttgttgggagtggtttatccatacagagtaataaaattggcaaggacgtcaatggaagatatctcttctcatatcataggctttcagtactgagtaaggagtcaaagacaatatgcataaaggcttccttggatcaaaggaagcatgaaggtagaagaggatttctgaaattgttgaatgtgggagttggcttacctgtattattaggaggtgggaaagcttatgctgatgaacaaggaccttcctcctccagaatgtcttattctagatttcttgagtatttggataagggtagagttaaaaaagtggatctgtttgagaatggaaccacggctgttgtggaggctgtttctcctgagttgggtaatagggtgcagcgagtgcctgttcaacttcctggacttagccaagagcttcttcagaaattcagggaaaagaacattgattntgcagctcataat

SEQ ID NO: 9349 - DNA, 361 bp, Glycine max
  Clone ID: jC-gmfl02220102a03d1
acaatgatacaatgagttaatatcattactattcactaaggatacattatgtactaattgtgaagaaacttacattttccgttgccaacacaagaaaaacagaaattaagaagcaagctatgatcttgacattactaaaattggagccaggggtatattacaaatatttcacaatttcagaaaattcagtaagtggaaagctacactacattgcagtggcatataagcaattcaaacagcaactggagagggagttgaatgagggacccgattttcagcaggaatttcaacatactcggacaggagagcttggaattcatcttcagacattggctcaggctgcaatagaacttccacaatc

SEQ ID NO: 9350 - DNA, 486 bp, Glycine max
  unsure (1)..(486): unsure at all n locations
  Clone ID: jC-gmfl02220102a04a1
cttttatttcactccatgatcatcactcacacatcaaacactactactagctccttgtatgagtgtcattccttctagctaaatctctctcttttggggtatggaattcaacaagttcagaatcagaagctatgaggggcaatctgatagggctcaagtggaagatcttgagagaagatgcgaggtagggccatcagaaagcgtgtttctcttcacagacactatgggtgaccccatttgtaggatccggaacagtcccatgtacatgatgctggtggcagagttggacaatgaattggttggtgtcattcaagggtctataaaagtggtcacagttcatggtcaccctccaaaggatttgcaaaggtggggtacgtccttggcctaagggtatcacctcagcacaggagaaaagggattggctcaagccttgtgagaaccactagagaatggttcacttcanaagatgtggactatgcatacatg

SEQ ID NO: 9351 - DNA, 484 bp, Glycine max
  Clone ID: jC-gmfl02220102a04d1
gtgagatcatgcatgctttaaacctctcttgggtctacaaaaagagctcttgttggtggggttttggttgttaattcatggaacttgttaatttgccccttcatttttcaacgcctttatgcaccacaagtcctccgggcatgagagccatttccaatgtgggatatggtggttgagctcatctcttcctccaacttcagtcacaatgatcctgcaattactctcatgcttggactcagtacccatgttgtgcacaaattggtacaaggccctaactatcttccctgaaaatggcccttcatggtgcaccccatacatgaaatagaacccaaatgggttgaagaaatcacgtatggatggcaatttcaaacatgggaagatcctatgaactaaccaccaacttttagagcataccaagcaagaaaaaggtgctttccctagccttaacttgaatatcttcccactattgcatacactaagcata

SEQ ID NO: 9352 - DNA, 451 bp, Glycine max
  unsure (1)..(451): unsure at all n locations
  Clone ID: jC-gmfl02220102a05a1
catccattcattgtcttaatgttagcaatgtcttcctctttctccatccatttcttcctcctcctctcaatagcccttttctcagtttgttgcttagcagcatctcaagctcccaccaccaaatcacacccctatatccttcccattaagaaagaccccgcaacaaatttgtactacacttcagttggcattggaactcctaggcacaactttgatttagtcattgatctttctggtgaaaacttatggtccgatggtgacactcattacaactaatcatcctacagacctatagcttgtggctcaaagcaatgccccgaaattggatgtgtgggttgcaatggccccttcaaaccaggttgcacaaacaatacatgccctgctaatgtaatcaaccaattagccaaattcatttacagtggtggcttangtgaggatttcatattcattc

SEQ ID NO: 9353 - DNA, 459 bp, Glycine max
  Clone ID: jC-gmfl02220102a06a1
catggcctctaagtgtgaaagttggatgattttgggtttgttgattgctatttcgttctcaagcatgcatatggacatggcattcgcagcaaggaatctcctgcagacagaattgatacctgagctgcagccagtagtgccacctgtcatacagcctagagagatagacatctctgacttgccgccactgctaccagtaccatcaccaccaattacccttcccatcccctaagcacttggatttggattcataaataatcactcatctccactctccattttcattcagttccctgatgttattgttgctttcaataagtgatcttttttcacatctgtcttgttcaatttcttctgatacacatgcttgtgttcttttcaatcttcctttgcactatttcatgtacctggactagtggagaccagttgctgttataatatatacaagctattctatct

SEQ ID NO: 9354 - DNA, 344 bp, Glycine max
  Clone ID: jC-gmfl02220102a07a1
gtctcggaattcggctcgagctagcatctctgtagccctatagttaggacaaagcatgtgaggactgctgatcatcattggaacaagtactggctaccagagatgagtactatattacgtggatactacataaatgctcactctgcacaatctacgttgaaaattgatccggtatatgatattgcatcctgatgtctaggagagggtctctagaagccctaatgtgtaatggccatgccaaccctaatcttacttgcgctactcataaagtaatattcaattgtgcgcctactgggatactcgactctacatcatgctcaccaacactgagtagattcagagat

SEQ ID NO: 9355 - DNA, 507 bp, Glycine max
  unsure (1)..(507): unsure at all n locations
  Clone ID: jC-gmfl02220102a08a1
cacaacaacactctgaaactaacaacaacaataaaagaccatgtcggtgaaggagtgcgagcaccacaaggggaagaagaggaagatcttccggcaagtgttctggtgcttagtggtgttccttttcatcgtgctggtcacaattcttttgatatgggcaatccttagacccaccaaacccaccttcacgctccaagacgtcaccgtctacgccttcaacgccaccgtggcgaacttcctcacttcgaattttcaggtcacgctcatctcgcgtaacccgaacgaccgcatcggtgtttactatgatcgcctcgaaaccttcgtgacctaccggagccagcaggtcacgtaccgaaccgncatccctccgacatatcaaggccataaagagatcaatgtttggtctccgtttgtttatggcaccaacatccccgtcgcgccgttcaatttcctcggcctcagccaggaccagagtaacggtaacgtcctcgtcaccatccgagccga

SEQ ID NO: 9356 - DNA, 547 bp, Glycine max
  unsure (1)..(547): unsure at all n locations
  Clone ID: jC-gmfl02220102a09a1
tttctttcatatactaccagtcacatttcttatacagaaaagcagtgtctgcagcacccaaacgaaacgacagtgaccaaaacagcaaaacgacattacagagagagagcgacgatgccggaagaaacgacgtcgatcgactacgtgatggaggcggcatctgggccccacttctccggcctgagacttgacggccgtatgccgtcctccgccaccgccgccgncgcgtcctcctctgccgattctaccctaacccccgatttcctccccaatcaacccttcgtcataggtgtttcgggaggtactgcctcgggaaaaaccaccgtctgcgacatgataattcagcaacttcacgatcaccgcgttgttctcgtcaatcaggactcgttttatcgcgggttgaatcctgaagagttggaacgcgttcacgagtacaatttcgaccaccctgatgcttttgacacggagcagtttgtagagtgcacgatgaagcttatcagtggcncaggcggtgcatgttccatttacgactttcagaagcaccaac

SEQ ID NO: 9357 - DNA, 407 bp, Glycine max
  Clone ID: jC-gmfl02220102a10a1
cacaaatggcaaaagatgaatcatgatagacaactatggaagttaggaacactgccgcctggtcttataacattctggaaacgcactttccaactgcaccgatcttggcatgtgttgggtcttggctataaccccaatatcaaccaaaaagaaattgaacgggctgctgttatacactacaatggaaacatgaaaccgtggctggagataagtattcccaagttccgaggttattggacaaagtatgttgactacaatcttgtgtatttacgagaatgcaacatcaatccatagaaggatctggtggcatgtgtagggcatgaaatttatttaaagcttttatgattattttttatacattttcctccctgtatggaaaaagatcccaagccaaaatcaagagtatg

SEQ ID NO: 9358 - DNA, 189 bp, Glycine max
  Clone ID: jC-gmfl02220102a11a1
gttattcctattccgtatgcttccccccagtttatttgcaggtgtcttagatgttttgttttagtcagagtactaaggaagtttatgttcttggtacttttggtttcactttttttcgtatctgaattgctgtaggatggattagcataacttgttggatttattagatatgcatttgcggtttggatt

SEQ ID NO: 9359 - DNA, 518 bp, Glycine max
  unsure (1)..(518): unsure at all n locations
  Clone ID: jC-gmfl02220102a12a1
ctcaaactctcggactcaaacacacagcacgacgaaacctagcagcctcacgccctcatcgcagcagggacctagccgtcgccggagacgcactgagtctgagagcagcggtgactaaatcaggtttgtcaaagaggaaaaggagagttacgattcaggtttgaagcactaaatcaatcaaaattgtagcaatgggtgagagcaagaaacgaaagagacacagaaacaaacgtggtggtaaggaggagcaaccggttcttccttctccttgtgctaagcgcacaaagctgaaggaaccctcnttctttcttcanaagatgcgagcaaggttgtctggtgggcatttcaggatgattaatgaaaagctctacacttgcactggggaggaggcgctagattatttcaaggaagaaccttcgctatttgatgtgtatcatacaggatacaaaacacanatgtcaaattggccagaacagccagtaatggaattataagtggctgaaaaacagagcctttct

SEQ ID NO: 9360 - DNA, 517 bp, Glycine max
  Clone ID: jC-gmfl02220102b01a1
ttcttggacgaggaagaacatggtcctgtcgttgaccatcccatctggtacatccgcaccaccggtctccaacaagcagtcatcaccgccatcaccgtctgcaattacaaaaaagacgaaggcttgatcgaaggtacagaatgttcagtttgcctcagcgagtttcaagaggacgaaagtctcaggcttttaccaaagtgtaaccacgcttttcacttaccttgcattgacacgtggcttagatcgcacaccaattgccccatgtgtcgtgctcctattgtcactgacccaacaagggttccttcttccatggaccctactgcgtttgaaacaagttcttttgtggaggagatttttgaaaatagtgcggagaatactcaaaatagtagtgatgatttgttgaggggtgaggaagaggaaagagtgcaagaagatgagcgtgtgaagagaacttggcttctgaacttgtggtgactgtgcagcagccgagaagatcggtgtctctggattcttcttc

SEQ ID NO: 9361 - DNA, 377 bp, Glycine max
  Clone ID: jC-gmfl02220102b01d1
gcaaggataacaaccttctattcattcataacttttttgctttactattaaactttatacacttgatcatcacatgacctacttcattaattcacacataaacccttgaaaccctcaccttgttgacagtaaaaaacccactttaattggccagaaccagaaaaattattaagttgtccaagatcattatgaaactcacttaacctctatatgacatattggagtattattaattggaaaaaaaacttgactatctgttacaaaaagattgaacgagactatccaattgcaactatttctcggactacctaataatttctcgaataacaaacctgattcaatcaaaagcttctaaaaggagcatttggctttctttg

SEQ ID NO: 9362 - DNA, 555 bp, Glycine max
  Clone ID: jC-gmfl02220102b02a1
aacaattaaggtgaatccaaagttatcacagcatgtgaattctgagtcgaagcaagtgctagaagataataaagtttctagaaatgaggatcaggttcttagttctgaaaacgaaaccaaaggcaccgaacatcttgcatttcatcaagttccttctgttgaacaaaatcagaatctagcatctaaacttccagacctcaatttggctgaggtttctaccagggagtctgataatgatactaaggtccaatcccagacttttcctttaactggaaacacaggccaagatgtttctcaagattttcccccagaagctaaatccagacctactcagggtgacattctgattgatatcgaggacaggtttccccgtgatttcctttatgacatgttctccaaagcaataatttctgaagattcctcaagcattggtccattaccaacagatagagcaggtttgagcttaaatatggacaatcatgagcctaaacgttggtcatattttcagaacttggctctaaaggggtttgataatgtatctctaatgatcaggat

SEQ ID NO: 9363 - DNA, 462 bp, Glycine max
  Clone ID: jC-gmfl02220102b02d1
cgtccaaaattcactttggaaatagcattaagtccaaatgttaatttgcacagcctatttatgtggtttttcacatgcacacatatacatattcacaatcaaatacaaaaagagcaggggccagaaaactacaatacaaacaactattgttggcccttgtataacaataatatatatcttttttggagcataattgaatgaaccgtgtgtggcaatcagatcaaatccgctggttttcatttagatgccttgtggccctgtcctttgatctgactagcggctgcagacatcacacgcaagcggcgagcaatttcggcaaaggatggccttactgctggattaggtgcccaacactgctccattagtgttttccactcaagatcacaataactagggattgtaggtcttaatgtgttattcacaatgcctcctatgattgcgccatagtgcatattagcatat

SEQ ID NO: 9364 - DNA, 423 bp, Glycine max
  Clone ID: jC-gmfl02220102b03a1
caagttttcccctacgcggaacaaaatggggatgggaactagcacctttgttacggagatggatcaactttctcaccatgcttttggccattgttgtgataatatttggagtgtggatgaacactcattatgatggttgcctaaagtctctcactgtgcctgtaataggcctcggagcagttattttcttaatatctgttgttggctttttgggtgccctgaaaaacaactccatactattatggatttatctgatcacgttgttctttgtcttggtgggaattctggtcttaacagtattggagttcatcgtgactatcaatggatcgggtcataatgttactggactgaggtataaggaataccaacttcaagaatttagttctttgttcttaaagagtaaacaattcttgaactgggaaa

SEQ ID NO: 9365 - DNA, 543 bp, Glycine max
  Clone ID: jC-gmfl02220102b04a1
ggactatccttatgcttctgatgggctagagatatgggatgctatcaagtcttgggtggaagaatatgtctcattctactacaagtcagatgaggaacttcaaaaagaccccgagccccaagcttggtggaaagaacttgtagaggtgggtcatggggatttgaaggataagccatggtggcaaaagatgcaaactcgtgaagagttggttgaagcttccgctaccctcatatggattgcttcagctcttcatgctgctgttaactttggacagtatccatatggaggtttaatcctgaataggccaactattagcaggagattcatgcctgagaaagggtctcctgaatatgatgcgttagctaagaaccctgagaaggagtttttgaagactattactggcaagaaagagaccctcattgaccttacaattatagaaattatatcaaggcacgcatctgatgagttctacctcgggcagagagatgcggtgactactgggactctgattgccggccattagaggcctttaagaggttggaa

SEQ ID NO: 9366 - DNA, 496 bp, Glycine max
  Clone ID: jC-gmfl02220102b04d1
agcagttgtagatggagcacgacgaatttgaagagccacctcttgctgttcagattcaagggaatgatgaatccgtttctcagcaatcttcttctgttggggtcactctcatcaccggttatcttggatcgggcaagtccactctagtgaatcatattttgaattcgcaacatgggaagaggattgctgtcattttaaatgagtttggtgaggaaattggcgtcgaaagagcgatgatcaatgaaggagataagggtgcattggttgaagaatgggttgagcttgccaatgcgtgtatatgttgcacagtcaagcatagtttggttcaagcacttgaacaacttgttcagagaaaggaaaggcttgaccatatattgctggaaaccactggattggcaaaccagctcctttggcatctgtctatggttggatgaacagttggaatcagaagtgaagctcgattctatagtcacggcggtggatgcttaaaatttgc

SEQ ID NO: 9367 - DNA, 534 bp, Glycine max
  unsure (1)..(534): unsure at all n locations
  Clone ID: jC-gmfl02220102b05a1
atgaaaatgggttcttctttgtggactttgtgtctaattttggcttcactagcctcttctgcattctgtgcctttccacggaggccagtggatgttccattcggcagaaactacgttcccacttgggcttttgatcacattaaatacttcaatggaggttctgagattcaacttcatcttgacaagtacactggtactggcttccagtccaaagggtcatacttgtttggtcacttcagcatgaacataaagatggttcctggcgattcagctggcacagtcactgctttttatttatcttctcaaaatgcggagcacgatgagatagattntgagttcttggggaacagaacaggacaaccttacattttgcaaacaaatgtgttcaccggaggcaagggtgacagagagcaaagaatctttctctggtttgatccaacataagcataccacagatactctgtgctgtggaacatgtatcanattgtgttcctagtggataacatcccaataggggtgtctaaaacctaaagg

SEQ ID NO: 9368 - DNA, 471 bp, Glycine max
  unsure (1)..(471): unsure at all n locations
  Clone ID: jC-gmfl02220102b06a1
gcccaccactaatttggtggtaggtggcagagttggacaatgaattggttggtgtcattcaagggtctataaaagtggtcacagttcatggtcaccctccaaaggatttggcaaaggtggggtacgtccttggcctaagggtatcacctcagcacaggagaaaagggattggctcaagccttgtgagaacactagaagaatggttcacttcaaaagatgtggactatgcatacatggcaacagagaaagacaaccatgcctcagtgagtctcttcatggacaagtttggctacaccaagttcaggactccagctattcttgtcaaccctgtgaaccatcattgctttcaaatatcacccaacattgagatagcaaggttgaagattgaccaagctgagtacctctatagaagattcatggggtccacagaggtcttccctaatgacatanggaatatacttaggaacaagc

SEQ ID NO: 9369 - DNA, 496 bp, Glycine max
  unsure (1)..(496): unsure at all n locations
  Clone ID: jC-gmfl02220102b07a1
gttaaactgtcgccattgtctccaaagattttagtgtatattgattggtctcagaagcttctggagaagtatgatactcatccacttgagactttgcctgaagttctaaaatatggacctgtaaccaagaaagctcgtactgaacctctctccttgtacacctgcttggaagcttttctgcgtgaagaacctctggtgcccgaagatatgtggtactgtcctaaatgcaaagagagacgacaagcaagcaagaagcttgatttgtggagactcccagaggttttggtcattcatttgaagaggttttcctacagcaggtcaatgaagcataaactggagacttttgttaactttcccattcatgattntgatttaaccaattacatagccaacaaaaacaacactcggcgtcaactgtacgaactgtatgcccttacanatcattatggcagtatgggtagcgggcattacacttgacatattaaagctttagatg

SEQ ID NO: 9370 - DNA, 498 bp, Glycine max
  Clone ID: jC-gmfl02220102b08a1
ttgatccgtgagaacttaaactcagactcctaaaatagtttgatcactttcgcattgacctgtaaccttttctctccggttaccaaaaccgtaagttgctgaacatggacccgcaatcgccggttcgggcggaactggagcctccggttccgacgttctccccacggttcgcgctcacatccagttcgcagcggaaaatcgcgatcgcggtcgatctgagcgacgagagtgcctacgcggtacgctgggcggtgcagaactacctgcgaccgggcgacgccgtgatcctcctgcacgtgcgtcccacgagcgtcctctacggcgcggactggggctccgtggatctgagcgcggcggaggacggcggcgacgaggagtcgcggcggaagctggaggacgacttcgacaacttcacggcgacgaaggcgagcgacctggcgcagccgctggtggaggcgcagataccgttcaagatctacattgtgaaggaccacgaca

SEQ ID NO: 9371 - DNA, 570 bp, Glycine max
  Clone ID: jC-gmfl02220102b09a1
gaaaatgtaattgagtcactgtttgcagaaaaaggatggtttatttaacatatgcacattcatagtcatttcattcttgagtgatgacaagataaaaatatagatgacgtccaagggtgccaccggtgcagaaaacagccaaagcattaaatacggtgtaatttacatcacattttgtcaaaatcttttttctacatttgttgagcaaatggttggtaggacttgttgtatatataaatttagagcatttgtatataagaatgatgataaaaacttaaaaacattcattctcctttgaaagttgagaaaggagaattgaggaaatggcaggagggtctttcacaacaggcactgtgagcaaggagagggcagagcagtacaaggggagagtcactgcttatgtcatcatctcttgcattgatgctgccacaggaggggctctctatggctatgatattggaatttcaggtggggttacatccatggatgactttcttatagagtgcttcccctcagtatacagacagaaaaagcatgcccatgaaaacaactaactgaagtatgacaatc

SEQ ID NO: 9372 - DNA, 464 bp, Glycine max
  unsure (1)..(464): unsure at all n locations
  Clone ID: jC-gmfl02220102b10a1
ctccaaaacccaactttctctctcaagaaccatcaaatctcgatcctcccctctccctgcaagatccggtggtggttccgattgctcacatagggtttggtctcgggtcggtcaaggctggcgggtatttgggtgaagtaaatggcggatccggccggaatccggctccgtgagtggtgcaagcgtggtgttgcggcggcggcgttgatagggttacagtgcggtgacgattgttgccaacaagagtgaagcatgctgagcgtgctgcgcgtgcaccttccttctgatattcccattgtaggctgtgagctcacgccttacgtgctcctacgccgacctgataagaccgttaccaccgatgatttcccggaaaccgncccgttagacggccatttcttgcgtacaagtggtatcgtgtacagagtgataaaaggttgctggttgtagtgtacatccttctgagc

SEQ ID NO: 9373 - DNA, 586 bp, Glycine max
  unsure (1)..(586): unsure at all n locations
  Clone ID: jC-gmfl02220102b11a1
gtgaaagaaagaaaaaaacaccatgatcctaatctactacctctcggagcacccggctatcgtgggcttccggtggagccacgcccaatcatggggagccacctggtccttcctcttcacctcaatcgcctcctacctcttcctctcaatcctcctccacctctctctttctctcctcttccgccgccgtcaaatccctcttggcccattccccgccgtccacagcctctccgcgacacgcggtggttctggccgcgctccaaaacccccttacagtggctcctctgcttccccctcggcacgcgcccctcggggcgcgtgttcttctggtcctacgtctactacctctcccacttcctccacatgttccgcactctcctcacaatcgtacgccaccgcaggctatccttttttcatctgcttagccactcaatctccgccttcgcctcctttctctggctcgagttctcgcagtccttccaggtaatgagtataaacatctactagaatatatntgatgatattctatactcanagattaatttgtattctcatggtatgacttattcatcattatcaggttcta

SEQ ID NO: 9374 - DNA, 570 bp, Glycine max
  unsure (1)..(570): unsure at all n locations
  Clone ID: jC-gmfl02220102b12a1
aagacgataacaaatggcatcatctcagtcgaggaagagagttgacgccgtcgattctcgcgctgcttccgttctcgttcgcgccaaagatggcagtgcttttgctcgttgcgacgattgcaagaagaatgtgccggttgcactcatcgacatgcacagttgcagccttgaagctaaaattaaaatgaacctagacgctcaagttgtggaacaggctgctgaagctaagaagccggagaggaagaagcccaaatctaaagagcctatggcaaaaaaagctaaagttgggaaggggaagaaagtcaaggatcctaacatgcctaagcgtcctcccacagctttctttgtcttcttggatgattttagaaaatctttcaaagaagctaatcctgattctaaggatgttaaaagggttggtaaagaggctggtgaaaagtggaggtctatgactgatgaagagaagaagccatatcttgacaaagtngctgagcttaaggaagagtacgagaaagctatggaaagctatgaagctggtcaagatgaagaagatcaactgtgtctgataaggaa

SEQ ID NO: 9375 - DNA, 528 bp, Glycine max
  unsure (1)..(528): unsure at all n locations
  Clone ID: jC-gmfl02220102c01a1
gtttacgtgaagtcacagaaatcaaaagcctacttcaagaggtatcaagtcaagttcaagagaagaagagagggaaaaaccgattaccgtgccaggattcggttgattaatcaggacaagaacaaatataacaccccgaaatatcgctttgttgttcgtttcagcaacaaagacattgttgcacaaataatatctgctagcattgctggcgatattgttcttgctgcagcatatgcacatgagctgccacgatatggtcttgaagtagggcttacaaattatgctgcagcttattgtactggtctcctgttggcccgaagagtcctcaaaacacttgaaatggatgaggagtacgaaggaaatgttgaggctactggagaggactattcagtggaacctgctgagagcaggaggccattccgtgctctccttgatgttggtcttattaggactacaactggcaaccgtgtctntggtgcccttaagggagctctggatggggggttggatattcctcatagtgaccag

SEQ ID NO: 9376 - DNA, 416 bp, Glycine max
  Clone ID: jC-gmfl02220102c01d1
cgttaaactaaacaacttcctgatagaaacaaagcgtatatcataaaataaggtaagacatcaattcatgttgacacgaaattgaccaaaaatacggcttactcaacttcaaaaagtatccaaaattttggacctagaaaataaacagcacatgtaaataaaatgattgactgaacgcaaaataagagagttttagttgtgcaacgatgacatggaatctgcaatgaactttcactcatcatcttcatcattatcagcagcagagttgatagccgccacacgagcaatcaacttagccttcctctcctcataagtgagtttcttcagattgtacctcttgagttccttcgggggctgcttctcagatttcttgagagaaggatcagcacggatggcagcatgaaccttcttgtaca

SEQ ID NO: 9377 - DNA, 540 bp, Glycine max
  Clone ID: jC-gmfl02220102c02a1
acgaaaacgacttcggctggggcagacccgttgcgattcggagtgggaaagcgaacaagttcgacggaaagatctccgcgtttccggggagagagggaaacggcagcgtcgatttggaggtcgttttggccccggcgaccatggcggggctcgaaaacgacatggagtttatgcaatacgtaacgcaattcgtttgaataagtttgttcatgaagtttcggcacagtagtagtgatagtgaaactgggaggagggagggagtgaaaaaaaaattataagtcggtgatgaaacgacggggaaggtgggtggggtgattgcacgacaatagtaccatggggtgtgggcgtcgttttgtgtcagtcaaaggtcaaaccgttcgggagtggggtctcttttttaggctgtgtttgagtgtttcggtggttggcccaaatgatataatggtttttctgtacgtgattcccgggagggttttcagtcttcacttttcaggtgacccaatacaggacgaaataataatatggatgatgatgatgatg

SEQ ID NO: 9378 - DNA, 375 bp, Glycine max
  Clone ID: jC-gmfl02220102c02d1
ttatcgtttgttctttcttttttttttaatcagcctatggcggcttcaacatacttaactgttgtttaccaaagctcaaagctcgtcatcatcagcaaccagtaggatcatgaaagacctgtcttcgggaacaggcatagcgctgacggatcaacatgaccggtgtaaccgacagtagagccggtggatcattcgggccataccaccgcgacattgagacagagtctataatagagacccgattctgctaacgaagaaccgttggctgacacaaaacgacggatcacatatccagtggctatgggcgagcatcatgtcagatgttactgccggtgtaacatacacgacatgatcatacctggcaccgtgatcttt

SEQ ID NO: 9379 - DNA, 430 bp, Glycine max
  Clone ID: jC-gmfl02220102c03a1
ctcggaattcggctcgagccgagaagctctccgctctcaaatccgccgtcgccggattgaacgaaatcagtgagagtgagaagaacggattcatcagcctcgtcagccgctatctcagtggcgaagcgcagcatgtggaatggagcaagatccagacgcctacggacgaagtggttgtgccttacgacactttggcgccaactcctgatggttcttcggacgtgaagaatctattggacaagcttgtggtgttgaagctaaatggaggcttgggcacaactatgggttgcactggtcctaaatctgtaattgaagttcgtgatgggttgacatttctagatttaattgcgatccagattgagaatctcaatttcaaatatggaagcaatgttcctttggctctgatgaattcattcaccactcatgatga

SEQ ID NO: 9380 - DNA, 277 bp, Glycine max
  Clone ID: jC-gmfl02220102c03d1
ctggctatatcgaagctctgacgcggaattcacgcctacgtcacgctgctaattagtctcgaggctcgccctgaccgattcttctttttaattacaatacacaagattatactaaatcgcattaaggggcagaacatagcgatctttttaggtgggtcattatcggattcgatggcaatcgaaaagggactcttcggtcttatgcattgtaactggtgaattctatatgatgtttgaacaacattattgcattgacagtgctttcagtggaacactt

SEQ ID NO: 9381 - DNA, 504 bp, Glycine max
  unsure (1)..(504): unsure at all n locations
  Clone ID: jC-gmfl02220102c04a1
ttttcgagactctgtttactgtcgttcagattcgcattgaagcaataagcaatggtaactgcagcatgtcagtcaggacgtgtgagtttcaaacatccttcttctcatttccacttacctcaatgtccatccttgttggacttgtgcatccgcaaaatcactcacactctgactcgggaggacatacataaatataacactttttctgcactcccaccggacttgagtcagcgaattttcaacaatatggtttactcctcctatctcacacctgcttccctccaaccctttcgagattctgccctccaggatatttgcttgggagaatatgaatatgcaaatggtggtggtgctgctgctgcaattgtggatgatgcctggatggatgtcatctcatcacagggatcctctntacttcatctagatctcttctgcctctgatgtcactgatcattgtctcacctttcttggacattgcacaaatatcatctctttaaatcttaa

SEQ ID NO: 9382 - DNA, 498 bp, Glycine max
  Clone ID: jC-gmfl02220102c05a1
ctcttttctcttctccctttttctctctgtctctctctctcggtctcgctcttcttctcatcaagcacagagttacagactcaccgatcttccgattctctttcgtcttggtttatgagctcgaaggagagacccactcttggtggcacgcggattaagacccgcaaacgaaatattgctgcgccgctggaccctgcagcattctcggatgcagtggtccagatttatttggataatgctggtgatctggaacttattgctaagagtattgaatcttcagaccttaacttttcaagatacggtgacaccttttttgaggttgctttcactgggggtcgtacacaacctggaactaccaagcctgatgagggggaccggcacccatactctataatagagtgtgagcctaagcgtgaagtcattttaccatctggaatctacatacaaaagattttgcggcgaaggccatttctcatcaagaaccttgaaaatgttatg

SEQ ID NO: 9383 - DNA, 197 bp, Glycine max
  Clone ID: jC-gmfl02220102c06a1
tcgcgagcggccgcccttttttttttttttttttgaagaaaaacaaaaactatttataaaaggtttcatacattacatagaacaaagaatgccgggatatacaatccaacaaaacctatgacaagttttcacctacaattgataaagaatctattgatatacaaccgtgaaaaaaaaaaataagaatacaatataag

SEQ ID NO: 9384 - DNA, 509 bp, Glycine max
  Clone ID: jC-gmfl02220102c07a1
gaagacgcttttgtttctagggacattcatctcttacagatatgtagtgggattgatgagaatgctgtgggggcttgttcagagctcgtatttgctccaattgatgaaatgttccctgatgatgctccattggttccttctggtttccgcattatcccattagattcaaaaccaggtgacaaaaaggatgctgttgctacaaatcggaccctggatttgacatctggttttgaagttggtcctgcaacaactgctggtgcagatgcatcatcaagtcaaaacactcgatcggtgttgactattgccttccagttcccttttgacagcagtctgcaagacaacgtcgcggtcatggcacgccaatatgtccgcagtgtgatttcctccgtgcagagggttgccatggctaatatctccatctggtataaacccatcaattggagctaaactttctcctggttctccagaggctgttacactagctcactggatctgccaaagtatagtta

SEQ ID NO: 9385 - DNA, 543 bp, Glycine max
  Clone ID: jC-gmfl02220102c08a1
ctttcacgagggcatttggtagtgctatgttttttttctgctttcgtatgacaagtgtataattctcctgaatacccagcagaagctatcaacaaaagccacaccatgtctggacccctgtctccaaagacatctcttgaaaagagtgaccgtgttggttcattgaagaaaatgctgaggaattctctaacaaggagtaagaggcgaagcagcagcaaggtcatgtcggttgaaatcgaggatatccgcgatgctgaagagtccaaagctgttgatgagttccgtcaagctcttgtcttggacgagctactccctgagaagcacgatgactatcacatgttgcttagattcttgaaggccaggaaatttgaccttgagaaatctaagcaaatgtggtctgacatgcttcaatggaggaaggaatttggtgctgacaccatcactgaggattttgaattcaaggaactcgatgaagtcctgcaatattatcctcaaggacatcatggagttgataaagatggactgaccaattacattgagaga

SEQ ID NO: 9386 - DNA, 519 bp, Glycine max
  unsure (1)..(519): unsure at all n locations
  Clone ID: jC-gmfl02220102c09a1
gaaacagtgtgatgaaaatgaaggtccttgttttcttcgttgctacaattttggtagcatggcaatgccatgcgtacgatatgttccctctccgaatgaacactggctatggtgcccgtactccggaggtgaaatgcgcaagttggaggcttgctgtggaagcacacaacatctttggctttgagaccattcctgaagagtgcgttgaagcaacaaaggaatacatccatggcgaacaatatagatcagactccaaaacagttaaccaacaagcttacttttatgccagagacctcgaagtccatcccaaggacacatttgtgttcagtatagatggcaccgtactctctaatattccatactacaaaaaacatggatatggggtggagaaatttaactcgaccttgtatgatgaatgggttaacaagggcaatgcaccggcactgcccgagactcttaagaattacaacangctggtgtctcttggcttcaagattatattctggtcaggaagaacac

SEQ ID NO: 9387 - DNA, 493 bp, Glycine max
  unsure (1)..(493): unsure at all n locations
  Clone ID: jC-gmfl02220102c10a1
atacagaccaacctttgcaaatccaaatccctggattatccacaattacagccgatgattttccaaacgaatgcaaagaccccttgagttacgcttgccaagtcttccttcagatagcggaaaccatgatgggtggtgccgggattatagtaaacacatttgaagccattgaagaagaagccatcagagcgttaagtgaggatgcgacagtaccaccacccttgttttgtgtcggacccgtgatttctgcaccgtatggagaagaagacaaagggtgtctgagttggctaaacttgcaaccgagtcagagcgtcgtgttgctgtgtttcggaagcatggnaaggttctcgagggctcagttgaaggagatagcttttgggttggagaagagtgacaaaggttcttgtgggttgtgaagaccgagttgggtggtgctgatgactcggcggaggaactgagtctggacgagttgctgccagagggttttttgaga

SEQ ID NO: 9388 - DNA, 535 bp, Glycine max
  unsure (1)..(535): unsure at all n locations
  Clone ID: jC-gmfl02220102c11a1
ctcaccctcctcttcacacattttctgtgcgctctaacaaacattctcgttcacactttcagattgtgtgaagatgggggcgggtggccgaactgatgttcctcctgccaacaggaagtcagaggttgaccctttgaagcgggtgccatttgaaaaacctccatttagtctcagccaaatcaagaaggtcattccacctcactgtttccagcgttctgttttccgctcattctcctatgttgtttacgacctcaccatagccttctgcctctattatgttgccacccattacttccacctccttcccagccctctctctttcttggcatggccaatctactgngctgtccaaggttgcatccttcctggagtttgggtcattgcctatgagtgtggccaccatgcattcagtgactaccagttgcttgatgatattgttggccttgtccttcactccggtctcctagtcccatacttttcatggaaatacagccatcgncgtcaccacttcaacactggttctcttgagcgggat

SEQ ID NO: 9389 - DNA, 482 bp, Glycine max
  unsure (1)..(482): unsure at all n locations
  Clone ID: jC-gmfl02220102c12a1
ctcaccctcctcttcacacattttctgtgcgctctaacaaacattctcgttcacactttcagattgtgtgaagatgggggcgggtggccgaactgatgttcctcctgccaacaggaagtcagaggttgaccctttgaagcgggtgccatttgaaaaacctccatttagtctcagccaaatcaagaaggtcattccacctcactgtttccagcgttctgttttccgctcattctcctatgttgtttacgacctcaccatagccttctgcctctattatgttgccacccattacttccacctccttcccagccctctctctttcttggcatggccaatctactgggctgtccaaggttgcatccttactggagtttgggtcattgcccatgagtgtggccaccatgcattcagtgactaccagttgcttgatgatattgntggccttggccttcactccggtctcctagtcccatacttttcat

SEQ ID NO: 9390 - DNA, 538 bp, Glycine max
  unsure (1)..(538): unsure at all n locations
  Clone ID: jC-gmfl02220102d01a1
cagaaaaccaggcctaaaccttctcctcctatctccttctctgcaaacccaatcagagtgacaacaacctagtgcggttccaatcaaacaaagatggttaatgcaaaaaccgaggtaccccataagagtgtccttagtatcaagcaagatgacaagttcttctgcaggcttctttcaaaggaaagctccatggccaacccttctttcagaatagcccttgctgtgccatttgtgtgggaatctgagccaggcaccccaaaacacaggttctctgaggacacactccctcctttaactcctccaccttcttaccattttagcaatatcaatagctacaagaagaaagagaagaagcactcatcaaagtccagtctcttgctcacaatgctaccaaagatgaacctcatcaagaaaatgattctctcatccncatcatcatacccttcttcgtggccctcatcttcttcaagctccttcaaagttgtccctatgngcaagtttggcaagaagaagctcttaagctatgatcatgtatgat

SEQ ID NO: 9391 - DNA, 491 bp, Glycine max
  Clone ID: jC-gmfl02220102d01d1
acaataaaaaccacatttcttgcttaatatgaggttacataaaagtaatgtacctcagttctcatatggcacattctaagcacacaaaaaaaaggaactatgatcatttcaaactgcacaaaatgtttaagatacactcacaccagaaaatatgaccttggaagcaagcttgtaatttgagaggacaaaactctcaagaccaattctagcatagaaaatagattgtcctctaagcatgaagaagagtattagctagctagaaaaatttacaaagaaatactatataagcagcacattgtccactccagatccaaggccaagcaatctaacaggtcttattaccttaagaactttagaatccactgtcttaactgcaggtggcacggggaacgctaaagcacaatttggaagagggtgaattagcaccaccaccacattcttcacaatctcccttgaaatcattacatgatccatagcttaagagcttcttc

SEQ ID NO: 9392 - DNA, 519 bp, Glycine max
  unsure (1)..(519): unsure at all n locations
  Clone ID: jC-gmfl02220102d02a1
tgatattctgcttgatgccgcagtatatgctgagactgattacttgaggggagtcactgaaaacataatgttaggtcaacttgcccccattggcactggcgaatgtgccttgtatcttaatgatgaaatgctgaaaaatgccattgagctccaattgcctagttatatggatggtcttgattttggtatgactcctgcccgttccccaatatctggaactccatatcatgaaggcttgatgtctcccagttatttgatgagcccaaatttacggctctctccaactagcgatgcacagttttcaccttatgttggtgggatggcattttctcctacttcatctgctggttacagcccatcatccccaggctatagtccctcatcacccgggtacagtcccacttcacccggatacagtcccacgtcacccgggtacagtcccacgtcacctgcgtacagtcccacctctgcgacttatagtcctagctctctcggatatagtcctacaagtncagctta

SEQ ID NO: 9393 - DNA, 443 bp, Glycine max
  Clone ID: jC-gmfl02220102d02d1
attgcaaatgtatctttttataggggccaatatcatccgtcaaaactttacatgcccatgtggaataaatgttttcaagaggatgacccatcacaacacaggcctcaaaaaaggttcaagttcaaagcgaaatttgaattcatacttggacaaactggtccgaaaacattggtaacagagactcaaatgatccggatgattaatacaatgcaaactaatagccctcgaacagctcaaggggtgatcccagcatagcataaggcctctgtccagcctaaagttgacctcagcgagggcctacatcatccttcgcactagtttgtggagtgtaccgcctggttaaaaattgagagtaaccaggttgacttggggacgaacccggactgggactaaattggggcgaacttgggctatagactgggctcacaccagaattataaggg

SEQ ID NO: 9394 - DNA, 501 bp, Glycine max
  unsure (1)..(501): unsure at all n locations
  Clone ID: jC-gmfl02220102d03a1
cagaatcgtcatcctcaaaatttatgattatattttctttctctacttcgtcactacctctttctcatgagagagtatgttactgcgcaaagaacaacaaactaattaggtactgaccatttccgtctatatataaggccaataacccaacacgttctataaacatatagtgactaacctcccactgaagagtaattggtggattccagcaatggccgtggttcatggcagttgggtcaagcttgatcaaagaggagaagggcaaggagcgagaagctcacatgctatagccatagtagcacagaaggtgtatgcatttggtggcgaattcgtgccacgtgtccccgttgataacaaacttcacgtgttcgacctagagactntgacttggtccgtggctgatgcatcaggggatgccccaccgncacgtgtcggtgtcacaatggccgtagtgggagaaaccatatatgtctttggtggaagaganntgtgacacaaaga

SEQ ID NO: 9395 - DNA, 401 bp, Glycine max
  Clone ID: jC-gmfl02220102d03d1
gagaattgatcacacacttaataatatattccagtacaaaagcacaagtacattcacaagctacatacaatcagtataaaagattccctaattcccatgccattgtcctctgacagggtgataaatctagttgtaattcatcatatcatctaattgagaattaagcacacacttcctaatttgtttcactacgcaagaacattcacaagctactaaattgaccatcaacgattcataagttctcatgtcattgcccactcattgacatcatagacacatttagaatccatcatagattatgcgaccatatcatactattgcaccaacccttgagaaagagcaaggaagaagatgtcatccagcctattattactaggagagttgccagcatacagcaacaa

SEQ ID NO: 9396 - DNA, 312 bp, Glycine max
  Clone ID: jC-gmfl02220102d04a1
gcatttagaacaggtatagcccgccgattgtgatgtcaaaaccgtgggcgatactctgctacgtactctaattcgtactgcgcaatgccaatcattatagcgaacccttgcccggttacactgacaacccctaccgacaacaatgactaccctgttcaggctaaccataacacatccctacaccccaccgcaccagatccaatacctgacaactgagacgacgccgacggcgacactttcgactgatacaccttaaattccccgacgcccgagtctggaaacgacgcttcgctctccaaatttcaaaacaaa

SEQ ID NO: 9397 - DNA, 478 bp, Glycine max
  Clone ID: jC-gmfl02220102d05a1
tttaaacttggcagaataaccaccatagttatctcctctcctcaagtagccaaagaagtactacttgaaaatggtcaagtcctttctagcagaacaattccacattcagtccatgcacttgaccatcacatatactctactgtgtggctgccaccatcagctcaatggaggaaccttaggcgagtttgtgcaacaaaaatattctgtccacaattgcttgactccactcaaatccttcgccaacaaaaggttaaagatttattggattttgtgaaagaacgatgcaagaaaggtgggcgctgtggatattgcagaaggttgtctttacaacaatccttaattccatttcaaccactttcttctctatggatttgcctgattctacatctgaaaagtctcatgagttcatgaacattattcgaggcataatggacgaaattggtaggcctaatgttgcagacttgtttcccattcttcg

SEQ ID NO: 9398 - DNA, 489 bp, Glycine max
  Clone ID: jC-gmfl02220102d06a1
cctttaccataccattacaataattatcaaacctaaccagctaaaatggtgaccgtggaggaaatccgcaacgctcagcgttcccatggacccgccaccatcttggccttcggcaccgccacgccgtccaactgcgtctcccaagccgattaccctgactactacttccgcattaccaacagcgaacacatgactgatctcaaagaaaagttcaagcgcatgtgtgaaaagtccatgataaagaagcgatgcatgcacctgacggaggagtttctgaaagagaacccgaacatgtgcgagtacatggcgccatcgctggacgtgagacaagacgtagtggtgatggaagtgccgaagctgggaaaacaagccgcaacgaaagcgattaacgagtggggtcaaccaaagtcaaagatcacacaccttgagttctgcaccacttcaggcgtggacatgcaccgagcagattaccagctcacgaagcttctc

SEQ ID NO: 9399 - DNA, 522 bp, Glycine max
  Clone ID: jC-gmfl02220102d07a1
atttcttacctcttggcatggccattcaaatgtcttcttttgtctttggttctcttacaattttattttgcttctcttccttggagaagagttttgcctttcaaacaacaaaggaggacacagaaagcaacaatcttcatcaatatactcatcttgttcacctcagctcactccttccttcatcttcctgcagctcttctgccaaaggtcccaaaagaaaagcatcattagaagtggtacacaaacatgggccatgctcccaactgaataatcatgatggcaaagcaaagtctaaaacaccacacagtgagattctgaaccaagacaaagaaagggttaagtacattaactcaaggatctcaaagaacttgggccaagatagtagtgtgagtgaattggactcagttacactaccagccaagtctggtagccttattgggtctgggaattactttgtggatgttggtcttggaacacccaagagggacttgtcactcatctttgacacttgcagtgatctca

SEQ ID NO: 9400 - DNA, 534 bp, Glycine max
  Clone ID: jC-gmfl02220102d08a1
gcaacacgtatcactgtgtttggaaagttgtaaggagcttttaggcaggcatcgtggagcccttttggctctcaatcatgttttgggcagaacaattcaagtagcaatccttttgctcttaagccatttggtagtacaactccatttggctcgccaattgattttggaggttcttccactggagttgctcaactgtcttctccattcgcttcaaatacagcattcagttcttcatcgtcaccagcttcagtagttcagttccctctttttggtcatcttcaactcctgattttggtagttcatcgtcatcatttggtggatcatcagtttttggtcagcagcctgcttttggaggctctgaatctacttctactcaaacaggaccatttggtgccacccagccatcacaactagcatttggaaacagcatatttggtttctcaacatcttttggtgcatcatctcaaccagcatttggggcttcaagaacattgcatttggcacttcaagcactccatttgggacctctagtac

SEQ ID NO: 9401 - DNA, 480 bp, Glycine max
  unsure (1)..(480): unsure at all n locations
  Clone ID: jC-gmfl02220102d09a1
cgcaagcaaaaagaaagaatcccaggcgaggagaaagatggaggggaaggagcaggatgtgtcgttgggagcgaacaagttccccgagagacagccgattgggacggcggcgcagagccaagacgacggcaaggactaccaggagccggcgccggcgccgctggttgacccgacggagtttacgtcatggtcgttttacagagcagggatagcagagtttgtggccacttttctgtttctctacatcaccgtcttaaccgttatgggagtcgccggggctaagtctaagtgtagtaccgttgggattcaaggaatcgcttgggccttcggtggcatgatcttcgccctcgtttactgcaccgctggcatctcagggggacacataaacccggcggtgacatttgggctgtttttggcaggaagttgtcgttgcccagggcgattntctacatcgtgatgcaatgcttgggtgctatttgt

SEQ ID NO: 9402 - DNA, 519 bp, Glycine max
  unsure (1)..(519): unsure at all n locations
  Clone ID: jC-gmfl02220102d10a1
aaagaaatccactggtgttgtgcagtttgacacaacccaaaatcgatttttggctgctggtgaagatggccaaatcaaattttgggatatggacaacattaatcttttaacaagcactgatgcaaagggtggactacagacccttccacacttgagattcaacaaggaaggaaatcttcttgctgttactactgcagacaagggattcaaaattcttgctaatgctaatggtcttagatccttgagaacagttgaaactccaggatttgaagcattgaggtcaccaattgaatctgctgcagtcaaggcatctggctcttctgctgttaatgttagtcctgtcaactgtaaagtagaaaagagctcacctgtcgggccttctccaattcttaatggagtcgataccacaggtcaaaatgcggagaaacctagaactgtagaagatggagtagatagagctaaaccatggcagctgtctgaaatgtgggatgctgtcaatgtcngtaagtaccatgcctg

SEQ ID NO: 9403 - DNA, 531 bp, Glycine max
  unsure (1)..(531): unsure at all n locations
  Clone ID: jC-gmfl02220102d11a1
gagaatggctcccaagggtttaacctttctggctgtgttaatatgcgtttcagcactgtcactgagtccttctgttgcgggggaagggcaaaataatggccttgttatgaacttctacaaggaatcatgccctcaggctgaagacatcatcacagaacaagtcaagcttctctacaagcgccacaagaacactgctttctcctggctcaggaacatcttccatgactgtgctgttcagagttgtgatgcttcactgttgctggactccacaagaaggagcttgtctgagaaggaaacagatagaagctttgggttgagaaatttcaggtacattgagaccatcaaagaagctttggaaagagaantgccctggagttgttcatgtgctgatatcctcgttctctctgccagagatggcattttttcgctggaagtccccatatccctcttaagactggaagaaggatggtagaaggagcagagctgatgtggttgagcagttccttccagaccacaatgagtccatttctg

SEQ ID NO: 9404 - DNA, 457 bp, Glycine max
  Clone ID: jC-gmfl02220102d12a1
cattagccattggctaaacactcatgcggttgtggagccattcgtcatagcgacaaacaggcatctgagcgtggttcaccctatttacaaacttctgtttcctcactatcgtgacaccatgaacattaattcacttgcccgcaaatccttggtcaatgccgacggtattatagagaaaacattcttgtggggtaggtactctatggaaatgtctgctgttatttacaaggattgggttttcaccgatcaagcattgcctaatgatcttgtcaagagaggagttgctgttaaggatccatctgcttcccatggagttcgacttttgatcgacgactatccttatgcttctgatgggctagagatatgggatgctatcaagtcttgggtagaagaatatgtctcattctactacaagtcagatgaggaacttcaaaaagaccccgagctccaagcttgg

SEQ ID NO: 9405 - DNA, 472 bp, Glycine max
  Clone ID: jC-gmfl02220102e01a1
cgaagaagaagccacagagaactagtctcctactctcacccgcaagaaaaaaatggcatctcacatcgttggatacccccgtatgggtcccaagagagagctcaagttcgctctcgagtctttctgggatggcaagagcagcgccgaggatttgcagaaggtgtcttctgatctcagggcatccatctggaagcagatggctgatgctgggatcaagtacatccccagcaacactttctctcactatgaccaggttctcgacgccaccgccaccctcggtgccgttccaccaaggtacggctggaccggcggcgagattgggtttgatacctacttctccatggccagaggtaatgctaccgtgccagctatggagataccaagtggttcgacaccaactaccactttattgtccctgaattgggccctgatgtgaacttcacctatgcttctcacaggctgttgatgaata

SEQ ID NO: 9406 - DNA, 393 bp, Glycine max
  Clone ID: jC-gmfl02220102e01d1
gcacaaaactggtaaaattccagatcaataaggattgcggcgaagccgcaaagatacaacattcattagggaaaacaggagtggggaaaaataaggggggaggggttgaggaagaatcaattgcttacagagcatgctaagacacctaactatttcacacacagttattgaaacaacccaatatagagaaaatttttctacggtgtattataatataaagcagagccaaatgactaggaagattctactttcttataccattcacttggcaagtttcgtgcggatgagtgttgctgcggcaaccatgtctgtgagggctggcttcacctaagtgtacttacgggtcttgagcccacagtcagggttcagccacaggatgtgcttttacgagca

SEQ ID NO: 9407 - DNA, 531 bp, Glycine max
  unsure (1)..(531): unsure at all n locations
  Clone ID: jC-gmfl02220102e02a1
cgcacgggtgcgtagtgcgtaccccagcaggaaatggattacactaggatacagaagtaatctgttatcgttattccttccaccctgcccggtggaaccaaacgaagaagacgttccgttttccctctgcttttccaagttttcatcgactcaaccatgctattcttacataactagggttaggagttagggcgttcttatcgttttcgctccgttaattacaacaacggccaacatggttgttctttcgctttcacctcccagcctctctaccgctttcctcgcaaagaaactgtctccccaagaacacgcggtgaagctagcgacctttcgcaacaattcatttcgcattagatgcgcggtggatacgccctatggaggggaatgttcaaaaattccctcgaccaatgtttgggatccttaccgacgccttggtattagccctgatgcctctgaagaagaaatctggngatcaagaaattntctggtgcaacaatactctgggcatgaaaggagtgaagaatcaataga

SEQ ID NO: 9408 - DNA, 284 bp, Glycine max
  Clone ID: jC-gmfl02220102e02d1
gcttgcatgatccgtttgtgttttcgatttgctacatatcggattggtctcgggtcggtcaatgctggcaggtatacgggtgaaggcaatggcggatccggccggaatccggctccgtgagtggtgcaagcagggtgatgcggccgcggcgttgacagggtcacagtgcggcgaaaactgctgccaacaagactgaagcatgctgagcgtgctgcgcgagcaccttgcctctgatatcaccaacgtacgctgcgagcttacgccttacgtgctacgacgccgac

SEQ ID NO: 9409 - DNA, 499 bp, Glycine max
  unsure (1)..(499): unsure at all n locations
  Clone ID: jC-gmfl02220102e03a1
aaaaataacaattaaccacacgactcacgacccagtaaccgggttctgcaaatttcgccacttgcagatgaaaagttccaaactttccactccaatccccggttaaatcctaaccccttgttcctttcactgtaagcattcctcaatttgacaattttctcctctctccacaaaatgatgtgtgtgccactttctctctcctcaattggggtgtgaaagtttccacctttttctttctttctttctttctttctttccattatctatgttagttttgcattgtttgttgtttggcttgcaatcttgttgcatgctggtgttggtgttggtgtcccaattcactctcaaatttcacggttcttagaactactaggaccttgccaccaccatggctgccaaaaaggcatgtgagacattctcaaagtcattgattgaggatgtgaatagatggngttgcttgaagcagacaggtgtgagtctcaggtacatgatggaattc

SEQ ID NO: 9410 - DNA, 346 bp, Glycine max
  Clone ID: jC-gmfl02220102e03d1
agctactagtctgaggccgacctttttatttttttttttgaaggccaataaggggggtcatcaccatgcacaatgtttggtaccacatatttacaggaaatttgtctaatgattagaatgtgaaaaattgacagcagatagttctttgtgtgaattatgctatcaatggtgttgtacctagcataatggaactgagctacttacgggaactgactgaaaagtactttcaaggccaaggctgttgcgaatgttccaaacgagacagatggatatttgcatgactgccatatcctttcatagaggatattcgaagagcacgttcaaagtaccgagcatatatactact

SEQ ID NO: 9411 - DNA, 502 bp, Glycine max
  unsure (1)..(502): unsure at all n locations
  Clone ID: jC-gmfl02220102e04a1
attcggctcgaggaaggctgccaaccttttgatggatgaaaattgtgtacaatgtttcctttatctgttgtttcttaaaagtataatctgatgcaatgcttcttctgctcctccccccctcaatgactaacataatatagcacatgtgtggctaaatacagtgaattctataaactgggcatacagaactgaaagtagtacatttgttccattgcagactgtaaaggtcgctgattttggggttgctagagttaaagctcaatctggcgtcatgactgcagaaactggaacatatcgatggatggctcctgaggttatagaacacaagccgtatgatcacaaggctgatgtatttagttttggaattgttttatgggagttgctcaccggaaagcttccatacgaatatttaaccccactacaggcagctataggagtggttcaaagggtttgcgacccaccatcccgaaaacactcatncaaagttgtggagcttcttgag

SEQ ID NO: 9412 - DNA, 550 bp, Glycine max
  unsure (1)..(550): unsure at all n locations
  Clone ID: jC-gmfl02220102e05a1
gtttctgcttgcggccaaccaagcagcaataaacgcaaacttacaaactggtttattctcaaacactttctttttctctctcttcaagctctctcccttcttctatacgatacgaagtttcctctatcttctcttctctgagggtagctttgattcattgaaggtttttccttcaccaactttccagaggaagaaagtgacttgatttctgggcctgctcgttctattactgagaaaccaaatacatgatactaaaaactcaaatggaagaaaagcagttagattttaatcagcctcttttatcggtaaggcgaatctcatcaacggcggcctctgaaaatgacaataaaagaaaagctgagtaatcagtgcggaaacgacctcctcttccgttttacaaatcagagttaaaatcaggtccagtgactaaccctggaactgttacttttgtatgggagaagactcctggnagacctaagaatgaaagcaaactacaaacaagggctgtcgaacggccttccgttgctccaaagcttccacccgggagggt

SEQ ID NO: 9413 - DNA, 512 bp, Glycine max
  Clone ID: jC-gmfl02220102e06a1
ccagttcaatccttttcagtcatctctttggtcacgttttcacagtaacataacatattctgtggaaatatggcaaaacttggagactgtgcagctcatttttttattgcagcaatggttttgagcacgttttacgtgaccaaaactgtggcacaatcagaaattgcacccacatcgcaaatggagactggtgcagggtttgctttgtctgtttctggggtgaccttatgttcttctgtgttggtttctattgtggcatttatgatgcagtgaattgcaaggcatattggctcctattcatgtttgattggtcttatcatgtacgtgttgaaattatattttatgatgaatttaaagggttgtttctgtttctttactatgcttgcttcttgaacacggtcctgtcgtttttggcattgtaacctagtactagctatatgatgagttacatgtctgtaattttcgccaagtacttaactggtgcatgtgaatagatatgatgtaattatata

SEQ ID NO: 9414 - DNA, 525 bp, Glycine max
  Clone ID: jC-gmfl02220102e07a1
cttcgtcaagactctcactggcaaaaccataaccctagaggtcgaaagctctgacaccattgacaacgtcaaggccaagatccaggacaaggagggaatccccccagaccagcaacgtctcatcttcgccggaaagcaacttgaggacgggcgcaccctcgccgactacaacatccagaaggaatcaacccttcacctcgtcctccgtctccgtggtggcatgcagatcttcgttaagaccctcaccggcaagactataaccctagaagtcgagagctccgacaccatcgacaacgtcaaggctaagatccaggacaaggagggtatccccccagaccagcagaggctgatcttcgccggcaagcagctcgaggaccgacgtacccttgctgactacaacatccagaaggagtcaactctccacttggtgttgcgtcttcgtggtggtatgcagatcttcgtcaagacccttacgggtaagactattacccttgaggtggagagctccgacaccattgacaatgt

SEQ ID NO: 9415 - DNA, 526 bp, Glycine max
  Clone ID: jC-gmfl02220102e08a1
gcgtcgttcctttctttctctaccttttcggtctctctctctctctctctttccaagtacctgtataatatgcaaagagacagaaagaagggcagtaagtatcctcccggggagtcttctaatcctcaatcatcagaaaaagatgatcacaataatgatacaaatcttgctgaaggatctagtaaaccagagctgagtaacaagaatactccacaatcactgaaggccaaatctaaaattgttaagaaatccaagggtggtaagttcaagaccataataaataaaggttctcaacagattgggggaaagagaagacttagaaagaacaaaaaagtagtgggcaatagtgatgaactgcctaaagagaagagtgagaaagatggaaggaataaagagaaggaaagtcaaaataggagcactcatgaaaaaagtcctattgagaatagccatcgagctgaaaaaaataagatcattaaggtggataagagcgaacagaagcagaagaataaagagaaacatacagagt

SEQ ID NO: 9416 - DNA, 535 bp, Glycine max
  unsure (1)..(535): unsure at all n locations
  Clone ID: jC-gmfl02220102e09a1
gagatgagtggatgaattaattgatgaatgaaattcaaatactaattgttgctatcacaattcacaagagattggattttggaatggaaagggtgttgtcagtagatgagatatcggagcaatactgggtggctgcatcatcttcttcatcatcatcatcatcatcgttcaagtcaaagatgaaccggagcgaatccgaatgggcctttcagcagttcctacagcaggaagctgcttcttcttcatctaattctgatcatgatgatgatcatcatcatgctaaactcaaaaaggaatccaacaccaacatccctgttactctacatgttgattcccaagactaccatgctattcttaagaccaagcttaatctcgcatgcgctgctgntgctatgactcggggatctttggtcaaatctcaaaaccctgacagtggaccacaggcatctaatttttctgaagttggatcgcatggctaccttaaaggatctggcccttttggaaatgatgatcccctctaattacaaaataaaga

SEQ ID NO: 9417 - DNA, 487 bp, Glycine max
  unsure (1)..(487): unsure at all n locations
  Clone ID: jC-gmfl02220102e10a1
tgtctgtcagtcccatttcatttcacctctctttcctaacccccaacgccacgccactgtcactttctttctctcacaaatcacaatgtgctccgataactacaatctctcaattccccattaattaaaatcaaaatcaaaatctaatctgggtttctcccatcagaggacaaagcttccgactttgcgggattcgttcgtatttgtttcagtgctgtgatggggaaggtcgcggtgggagctgccgttgtctgcgccgccgccgtatgcgctgcggcggcgctggtggtgcgccaccgcatgattagttcccggaagtggagtcgcgccatggcgatactgaaagagtttgaggagaagtgtggcaccccaattgtgaagctaagacaagtggctgatgccatggatgttgagatgcacgcgggtctcgcatctgaggtngtagcaagctcaatatgttgatcagttntgtcgataatctcccaac

SEQ ID NO: 9418 - DNA, 536 bp, Glycine max
  unsure (1)..(536): unsure at all n locations
  Clone ID: jC-gmfl02220102e11a1
caggacgtaggtgagacactgagctcacttaattttgcaactagagtgaggggtgttgagttaggtcctgttaagaagcaaattgatacaagtgaagttcaaaagatgaaagcaatgcttgaaaaagcacggagtgagtgcagaattaaagatgaatctatgcgaaaacttgaagaaaatttgcaaagcttggagagtaaggccaaaggcaaggatcaaatttacaaaaatctacaagaaaagattcaagaacttgagggacagattgagttgaaaagagccatgcaaaatgactcagagaaaaaaatctctcaattatctgccaaattgagagggaaagaagaaacctgcggtactcttcacaaaaggtgaaagagctagagaaaaagatgaaagaacaactgcagtcagagtcagcaagttttcaacagaaggtttgngatctagagaaaaaactggaagatcagatngcagggtctgagtctgaaatctgctatttgaaaagatagatcaggagcttgagagaaactgaagag

SEQ ID NO: 9419 - DNA, 501 bp, Glycine max
  unsure (1)..(501): unsure at all n locations
  Clone ID: jC-gmfl02220102e12a1
ggaaaagtcagagaatctacacaaaggcactttcctgctgatggaacatatacaattaaggaaactgatgacaggaatcattcacattaagccacgatgcaaccttttggtttctaatgcaaagaggtttgttgatggtcttctctttgattgcttgtgtgccttgaattacacactgaggatagtttggttccatagttgcagcaatttgtggtttgtaagaaatttccaatttgctgactcatgcaagttcattgatgctattcatgctggaaatggggagattgaccctacacttctctctaattttagcataaaaagtgtggcaagtgtttgttgtaagctgtaaacgccacttgcattcaaaataatgcacaaagattttctgcctaagtttatggtaggtgctgtgctaggtgtgcatatctcttccacttcggtccgttgtaaagatctctaggttggatgatnttttatttaccactagaaatttagaatctg

SEQ ID NO: 9420 - DNA, 546 bp, Glycine max
  Clone ID: jC-gmfl02220102f01a1
gaagcgccttgtgccagtgggtctaggtgatgatgatcaatgcattgaggatgactttactgcatggaaagaagaactgtggccagcattggatgaattgcttagagatgaggacgatgcaactgtgtctacaccttatactgctgcagttttggagtaccgggttgttattcatgatccattggaagcatctgtcgacgaaaagaagtggcataatgtaaatggtcacgccattgtggatgctcaacatccagtcagggcaaatgtggctgtgagaaaggagcttcatactcctgcatctgatcgatcttgcactcatttggaatttgacatttcaggcactggagttacatatgaaactggggaccatgttggtgtttactgtgagaatttgtctgaaactgtggaagaggcaataaggttaataggtttgtcaccagatacctatttctcaatccatactgatgatgaagatggcaaaccacgtagcggaagcttcttgccacctacattcccaccctgactctaagaacagcacttacacga

SEQ ID NO: 9421 - DNA, 505 bp, Glycine max
  Clone ID: jC-gmfl02220102f01d1
acctccaaacatttttttatagttcatacagtacaaggaattgtctgcgtctctgaacctttctttgaggttcatcatacattacaaaaagaaaactgaagtaaaatagttcatagtctaggtataaacagtatataataaattacacgaaccaaaaagaatcctttagaaaatatagtgaaaaagaatcgtaggaaatgtcgtcgcgatggcaacaagcgccccccctcaattttgagggcactaatgaaaggtggcacaaataaggccctttcaaaatcctctagccacaactctatgtgttattaatatcttcgtcacccccacggattgcattcagatatcatcaccatacatcgcgcaaatatctgccagtagtttgtagattctttaccatgctctcagccttggaactatcgagagaaccctgctcttgcaaaattgtgtgcagggcgcggtgtacatccctggccatgaccttggatcaccacacacataaatgtaa

SEQ ID NO: 9422 - DNA, 526 bp, Glycine max
  unsure (1)..(526): unsure at all n locations
  Clone ID: jC-gmfl02220102f02a1
tcattccataacctaaccctaaaccaaaattcagagagaggcttttgtgttaacctttctgtcgatgctccgtgttggtgctaccaaggctcagtcggagaggagggtttcattgttaaatgctctctctcttcactctctgctcacccttttcccctttcatgtcttcaatcaccgcctctccttcagggtctccaaaaaccctactttttaatttccatcccaacccttttctttttttccatactgggaatttaatattcaattttagcctcctgggtttccaacctccatctcctcaccaacacgagtgattcaaagatgtttctatttgggtcatttactgaagatgaaactcaatcattgctgtcaaagcagtcttctggaaaaaaggaaaaacctgtggagaagaatcagctgcaatttggttctctgaattctggtactggtgagtcaaacaacctgctaaattcatcgaaatcaccagataattcttcaccctctgattctcagaaatgtnatggag

SEQ ID NO: 9423 - DNA, 367 bp, Glycine max
  Clone ID: jC-gmfl02220102f02d1
ttctttctttgttttttcattttcttgtattattcacatttacagttcgatgattttttcaaactgaatgcttagaccccttgagttacgcttgccaagtcttccttcagatcgcggaaaccatgatccgtggtgccgggactatagtacacacattggaagccatcgatgaagaagccatcagagcgctaagtgaggatgcgacagtaccatcacccatgactggggtgggacccgcgattacggcaccgtatggagaagatgacaaagggcgcccgagttggctaaacttgcaaccgagtcagaccggcgtgttgctgtgatgcggaagcatgggatggttctcgagggctcagttgaaggagat

SEQ ID NO: 9424 - DNA, 476 bp, Glycine max
  Clone ID: jC-gmfl02220102f03a1
ctcaaaagcctgaaagaaaaaaaaaatcatctttctctttctcatattttctctgtgtgtgaatttgttgttctttcacaatggaacaacctccttcctcgtctcttcaggtggagacagcacaacaaccgggacctagtcctctccgaaaaatgttcgctgtctcgtcaatcgccgcgggaattcaattcgggtgggccctacagctctctcttctgacaccgtacgtccagaccctcggcgtccctcacgcatgggcgtcgttcatttggctctgcggcccaatctctgggctgcttgtgcagcccattgtagggtacagcagcgaccgatgcagatcccgctttggtcgccgacgtcccttcatcttcgtcggagccatcgtcgtcgcaatagctgcgttcctcatcggctatgcagccgatataggacacgccgcgggtgatgacctcacgaagaagagccgtccacgcgcg

SEQ ID NO: 9425 - DNA, 437 bp, Glycine max
  Clone ID: jC-gmfl02220102f03d1
aatacgaagcatttgatggatttataattttttaatgttggtgtacatatatttattagagaaaacaaggataaaacttaagcccaccctaaagagttatttgatgggtctaatacctaaatgatacacactcaccaaatttaaattaaaagtctccatctaatattgtcccatgcatgtaaaactctataatatatactaatggaaactcccagcagtgacggaagtaaccttggtcacatctgctggctatggtgttggcagcagaacaaccgctaacacggcactcacggcagtcgccacggcacccaacacaaacgccggtcagttggcaccaccaaaccacttatcccactgtccacttatagccgatactatcatctgtggcacgacaattgcaacattgaggacaccccaggataaaccttggcctgctc

SEQ ID NO: 9426 - DNA, 505 bp, Glycine max
  unsure (1)..(505): unsure at all n locations
  Clone ID: jC-gmfl02220102f04a1
caggatacaaagcctacagtgtcaatgctgccccttcgtccagtgaatcctgttcaagcaaatgtgaacattttgaacaatctctctcaagcacgacaggtgatgaactctgctgccttaagtggtggaacctctatgggacttccgtcaatgggtcagactcctgttgccatgcacatgtcaaacatgatatctagtgggatgacatcttctgtacctgcggctcaaaatgtattttcatctggacagtcaggaataacatcaatgactagttctggacctcttactgttcctgcacaggttggacaaaattcaggtctcggatcattaacttcgaacacttctaatttgtcttcaagttcgaacattgggatttcacaaccattgggtaatcttcaaggggttgttagtattggacaacaagtgtctcgtatgagccaaggaaacctttcangggcccaaattgttcaaggtggagttagcatgaaccaaaatggtatgagtg

SEQ ID NO: 9427 - DNA, 546 bp, Glycine max
  unsure (1)..(546): unsure at all n locations
  Clone ID: jC-gmfl02220102f05a1
ggcattttatcgtacccacataggtaatctaggttgtgttttgcttaagaaggaccactatatctcaccaaacataaaagatggatgatccaaagggtagttcctcatggttaaaaattctaaatataagtgacatatttggctggaaagatcatggagagtatggagctcttgcagctatagtcataagcattcttgttcctgtcttgttttcagctttgttctttggaaaaaaaaaaaggaaaaataagaggtgtgccggtagaagttggtggtgaggaatgttttgcagtacgtaatgctagaaaaactgagttggttgaagttccttggaaaggagccccaaccatggctcatctatttgagcaatcctgtaataaatatacctgcaatcgatttcttggaactagaaaactaatacaaaaggagttggttacatctagtgatggcaggaagtttgagaaacttcatttaggagactatgaatgggaaacctatggagggtattngctcgcgtgtccaattntgcatctggtcttcttaaat

SEQ ID NO: 9428 - DNA, 510 bp, Glycine max
  Clone ID: jC-gmfl02220102f06a1
caggttgcttatatatatatatgggtcacataaaaattcttttttgcctttcttggggtgattgttttgtattgtttctatgagttttaaactgtggaccattgttttgtattaggttgcatttactccgtttgtgtaaaacatgcaacatttacagcccttacatgcttttaaacaaagcaaaaagcaccgaataaagtaggttctgactctgcatgctttcttgctcttgggggtggtattaaaggcatacttttatagcatgtcattgtttgaacacaggaccagtgtgcgatgtggggctgctgctttattcatctttttttatttttatttatctcttattgatttttcggaaagggtcttctaccttcctagtttctagtggaagataaattttggtgtcttgggtttaaatcaattgccttttagttaaatagtcacggttgtagtgagttggctcctttatgataatgtgggctcaagacttccaaggtcataaatgtacat

SEQ ID NO: 9429 - DNA, 502 bp, Glycine max
  Clone ID: jC-gmfl02220102f07a1
ctttgtcaagactctgattggtataaccataatcctcgaggtatgaagctctgacaccattgacaacgtcaaggccaagattcaggactaggagtgaatcccgacagaccagcaacgtctactattttccggaaagcaacttgaagacgggcgcaccctaggcgacttcaacatacagaaggaatcaacgcttaacctcgggctccgtttacgagctggcatgcaaatctttgctatgaccctgatagtgatgactatgaccctagaagtcgacatgctacacaccatctacatccgtaaggctaagatccaggacatggatggtgtactgccacacctgcagacgctgatcttcgtcggtagcacctcgaggacggacgtacccttgctgactacaacatccataaggagtcaactcatgcacttgtgaagcatcttcgtggtagggtgcagatcgttagtatgacccttacgggtaatactattacccttgaggtgtata

SEQ ID NO: 9430 - DNA, 476 bp, Glycine max
  unsure (1)..(476): unsure at all n locations
  Clone ID: jC-gmfl02220102f08a1
gggaagaagaggttttcgtttggttaagcaagatggatttggaagcagagaaagagcatgaagctgcatttgcagtggcctcactctccctctctctccccaccattttccccttcgtccaacccacgaatatcccatcaaccacccttcaaccaaccaagctcaaagtcccaacccaagcctcatccctcacacacctttctctctccaccaccactcctcctccttccaaaacctccttcaaatccaccgtctccgccaaccccctccacgcccctctctccctcgctccccaccgcccccgcgacccttccaacgccgccgccctccgacgcgccgccgtcgtctggttccgcaacgacctccgcctcctcgacaatgagtgcctcaccgncgncaacaacgactccctctccgtcctccccgtctactgcttcgacccctccgactaccgcaagtcggcatccggcttcgac

SEQ ID NO: 9431 - DNA, 538 bp, Glycine max
  unsure (1)..(538): unsure at all n locations
  Clone ID: jC-gmfl02220102f09a1
ctctctctatactataggtctcgcccaatacctactctccgctcccaagagcacgcaccaccactattgcacttcttcctcgttctccctctttttcttcttcttcgctaaacccttttttctatctcactaacacaacaatgggagacgagaagaagggcaagcctgctgcttccggcgtgtggtccaccatcaagcctttcgtcaatggtggagcctccggcatgctcgccacctgcgtcattcaacccatcgatatgatcaaggtgaggattcaacttgggcaaggatcagctgcgcaggtcacttccaccatgcttaagaatgagggttttgctgccttctataagggtctatctgctggattactcaggcaggctacatacaccactgcccgtcttgggtcatttaaaatcttgacggccaaagctattgaggctaatgatgggaagcccctgccactgtatcagaaagctctatgtgggctgactgtggtgctatcggagcaactgttggagtccagcagatntggcactca

SEQ ID NO: 9432 - DNA, 402 bp, Glycine max
  unsure (1)..(402): unsure at all n locations
  Clone ID: jC-gmfl02220102f10a1
ggtgaaggcatagttgagagatcgctgaacagcttaggaaagggcttcgacttggcctcagatttcaggctcaagttctgcaaaggcgaagagcgtttggttcttctcaacgaaacagagaaacgagagctcatggtgccaggtttcagacccatcagagatgtctccgttgacatcaaatgcgacaagggcgatcgcacccgctaccaatccgacatcctcaccttcacccaaatgtcagagctcttcaaccagaaaagttcaatccctgggagaattccatctgggtatttaacaccgtgtttggatttgacgagggttcatgggcaactgatgcagctaaccaaagtgtntgngtattgatggctactntatcaaactcttcaatgctcatattgatcg

SEQ ID NO: 9433 - DNA, 538 bp, Glycine max
  unsure (1)..(538): unsure at all n locations
  Clone ID: jC-gmfl02220102f11a1
aataaagcacagaacagttgaagtgaatggcataaaaatgcatgttgcagagaaaggagagggtccagtggtgttgttcctccacggcttccctgagctctggtactcatggcgccatcagattctctctctcagctccctcggctaccgcgccgtcgctcccgatctccgtggctacggtgacaccgaagcaccaccttcaatcagcagctacaactgcttccacatagtgggtgatctcgttgcgcttattgactctctgggtgtccaacaagtgttccttgtggctcatgactgngggagccatcatagttggtatctatgcatgtttcgccctgacaaagttaaggcctatgtctgcctcagtgtccctctcctccgcagagacccaaacatcagaacggtggatggcatgcgtgctttgtatggagacgactactatgtctgcagatttcagaaaccagnggaaatggaggctcagatggctgaagttggcactgagtatgttctcgaaaacattcttacaactcgcaatcct

SEQ ID NO: 9434 - DNA, 506 bp, Glycine max
  unsure (1)..(506): unsure at all n locations
  Clone ID: jC-gmfl02220102f12a1
tggatctcttcaacccaataatcaaactcaccattttcaacaacaccctcagcctcaggggcagagttttggagcttcggctccggctaacggtggcggttcgggtcagccgaagcagagggttagagccaggagaggacaagccacggacccacacagcatcgccgaaaggttacggagggagagaatcgcagagcgaatgaaggccctacaagaactagttcctaatgccaacaagactgacaaggcctccatgctggatgagatcatcgattatgtgaagttcctacagctccaagtcaaggttttaagcatgagcagattgggcggtgcagcagctgtggcaccccttgttgctganggtggcggtgactgcatccaagccaaacgcagcaactcaaacgacagcctcgccatgacggagcaacaggtggcgaagctgatggaggaagacatgggttccgncatgcagtacttgcagggcaagggtctatgcctgatgccta

SEQ ID NO: 9435 - DNA, 515 bp, Glycine max
  Clone ID: jC-gmfl02220102g01a1
cccatccaaggcacccaagctcactgcattcttgggttacaaggccggtatgactcacattgttagagaggtcgagaagccaggatcaaagcttcacaagaaggaaacttgtgagcctgttacaattattgagacccctccaatggttattgttggtgttgtgggttatgtgaaaactccacgtggtctccgaacattgaacactgtctgggctcagcatttgagtgaggaattgaaacgtaggttctacaagaactggtgcaagtccaagaagaaggccttcaccaagtactctaagcagtatgaaactgaggagggaaagaaaaacattgaggcgcagctggagaaactgaagaagtatgctactgtggttcgtgttttggctcacactcagatcaggaaaatgaaagggttgaagcagaagaaagcccatatcatggaaattcaggttaatggtggtagtattgcacaaaaggtggactttgcatacagtttctttgagaaacaggttccta

SEQ ID NO: 9436 - DNA, 437 bp, Glycine max
  Clone ID: jC-gmfl02220102g01d1
gaaattcattaaacacggataatatagataaactcataaacaaaatttgaaataaacgatcagtcttccctgaaacaaaagtttggccaacttaaggagaaaaaaaactcactacccgagaatccataatatcaaaacagaaacactacaaagtttataagtgatggcaaccaaatagaattccagcatttccatccaattaacataattatgctttgaggcgtccaaagaacttctgcttctcctgtgtggtctggaagcgaccatgcccaaactttgaagaggtatcgataaacttgagtttgatctccttaagagcaacacgagaagtctgcttaaggagggattgacgcaatgtaatgaccctcttcttgggaccaacacagcatcccttgaccatgataaaatcatccttaacaacaccatagtgagggaaa

SEQ ID NO: 9437 - DNA, 507 bp, Glycine max
  unsure (1)..(507): unsure at all n locations
  Clone ID: jC-gmfl02220102g02a1
cgaagcaggaactaaatatggctgacttgttggaatggtcaaagcaagataagaaacgaatgcttcatgtcgtctaccgtgttggtgaccttgatcgcaccatcaaattttacacagaatgtttaggaatgaagcttttgaggcaaagagatatcccagaggagaaatatgctaatgcttttcttggatttggccctgaagaatcccattttgttgttgaattaacatataattatggggttacctcgtatgacattggcgatggctttggacattttgcaattgcaactcaggacatttataaattgggttgagcacatcagggccacagggtggaaacatcacaagggaacctggtccaagtcaaggtggaactactgttatcgcctttgtaaagatcctgatggttatacttttggacttatccaaagacctacagtccatgacccattntgtcaagtaatgcttcgtgttggtgatttagagcgctcaattaagtttatgaaa

SEQ ID NO: 9438 - DNA, 384 bp, Glycine max
  Clone ID: jC-gmfl02220102g02d1
gataaactagtagattaatcataggtagcatgcagaatgaggtttcaattgcggttttaagtcaacaaaagaacccataaaagcaagaaaacaagttgatgactggtactgatacaaaacgcacaatgataaaatgcgagacaacttattcatacaaaagcagcaggactacttatttcatataaagcttgctcttcacttcagttcttccaagaaatcaacgttgtcaaccaagacaggtttccatccatctggatctaaaaacgaagtggtttttgtattaaggccaggaattggccctggatgccgagtaatcttccctccaaccttttttatgacttggttaactacctcagcactcttatatacatcatcagtaccaat

SEQ ID NO: 9439 - DNA, 438 bp, Glycine max
  unsure (1)..(438): unsure at all n locations
  Clone ID: jC-gmfl02220102g03a1
cttcacttcactaatacatcatggcagacgagacccagaacaagtatgagagctctgaggttgaggtccaggatcgtggtgtttttgactttctcggtaagaaaaaggatgaagaagacaagcctcatcctcaggaggaggtcatcgccaccgagtttcaaaaagtcactgtctcagaccaaggagagaacaagcacagcctcttagaaaagcttcaccgatctgacagcagctctagctcttcaagtgaggaggaaggagaagatggagagaaaaggaagaagaagaagaaggaaaagaaagggctgaaagagaagatcgaggagaaaatagaggngtgatcatcatcatcacaaggatgaggacacaagtgtccctgttgagaaagttgaggttgttgaaacagcacatgctgaagaaaagaagggggtcctcgac

SEQ ID NO: 9440 - DNA, 413 bp, Glycine max
  Clone ID: jC-gmfl02220102g03d1
ataaaacacaaatgaaacacactattattccattttcagtacatatttaatttctttttacttcaaagaaggaaacctacacaaactttatcttttgtaaatggaagagatcaatacacaatgatatagtcaattaagtatgcatgaagaaacaccaacgaaacccacacggttgtcatatgatgaaatgaaacctaagcactgcacaatcatgcatctgcaaccaaccaaaaagccttgtctcaatcttaaatatcgatgagcactcactctgcttcagcttttacttttcctcctctgtcttggagtgataaccaggacgctaatctttcatctggaataatatacccttgttgtccttggactctccttcatgatgagcacctttaccatgctccaatgatgcaacatgt

SEQ ID NO: 9441 - DNA, 454 bp, Glycine max
  unsure (1)..(454): unsure at all n locations
  Clone ID: jC-gmfl02220102g05a1
gctcgtactgaacctctctccttgtacacctgcttggaagcttttctgcgtgaagaacctctggtgcccgaagatatgtggtactgtcctaaatgcaaagagagacgacaagcaagcaagaagcttgatttgtggagactcccagaggttttggtcattcatttgaagaggttttcctacagcaggtcaatgaagcataaactggagacttttgttaactttcccattcatgattttgatttaaccaattacatagccaacaaaaacaacactcggcgtcaactgtacgaactgtatgcccttacaaatcattatggcagtatgggtagcgggcattacactgcacatattaagcttttagatgagaacaggtggtacaattttgatgacagccacatatcactcataagtgaagatgaggttaacactgctgctgcctatgtgctattntacc

SEQ ID NO: 9442 - DNA, 517 bp, Glycine max
  unsure (1)..(517): unsure at all n locations
  Clone ID: jC-gmfl02220102g06a1
gtaggagcccttacaccttgcagagtcatctcaacattcccaagggctcctactacgcaataacgccaagctcgatctcaaattaatatatcatttattcctcttaatcaaatattaaataagaaaagatgggagagatgtcaaacttccaattgggtgtgattggtgcactatttctctcggtggcttcttctgtctccattgtcatctgcaacaaagccttgatgagcaatcttggcttccctttcgccacaacgcttactagttggcatttgatggtcacattttgcacccttcatgcggctcaacgcttgaatctatttgtgtccaaatccgttgacttgaaaacggtcatgctttttggtattctaaatggcatttccattggatttctcaacttgagtcttggctntaattccattggattctaccagatgacaaaacttgcgatcataccattcactggattattagaaactattgtcttaaagagcagttcagctcgaaataaaatctc

SEQ ID NO: 9443 - DNA, 544 bp, Glycine max
  unsure (1)..(544): unsure at all n locations
  Clone ID: jC-gmfl02220102g07a1
cttgtgttgtgtccctcttttaagctatttccttctcttaacacaattggttgtgccaattgccatagtcaccaaccaattaacaaaggtatatatatcatcatatcatcaccaaatgaaaaatattgggttgtttttttcttgtggtggtggctacttttgtggtggcagccacagctggtagcttttaccaagactttgaaataacgtggggtggtgagcgtgccaaaatctatgagaatggaaaccttctcacactctcccttgacagagcctctggctctggctttcgttccaaaaaagagtacttgttcggaaaaattgacatgcagctcaagcttgtgcctggtaactctgctggaacagtaactgcctattatttatcttctctggggcctactcatgacgaaatagactttgagtttntgggtaacttgagtggtgatccttacactcttcacacgaacgtattcagccaagggaaagggaacagagaacaacagttccatctatggttcgaccccaccaaggacttncacacata

SEQ ID NO: 9444 - DNA, 514 bp, Glycine max
  unsure (1)..(514): unsure at all n locations
  Clone ID: jC-gmfl02220102g08a1
cacaaacacagacccttcccttccttcctccctccctcattcccttcttcaatttcatcaacacaaccatcaatttcatcaaccatcgcataataatagtattatcatgatagccgtggcccgaaaggacatggaccggatcaagggcccgtggagcccggaggaggacgaggcccttcagaagcttgtggagcggcacgggcccagaaactggtcgctcatcagcaggtccattccgggccggtctgggaagtcatgcaggcttcggtggtgcaaccagctgtcgccccaggtcgagcaccgggccttcacaccggaagaggacgagaccattattcgggcccatgcccggtttggtaacaagtgggccaccattgcgcgcctnctctcgggccgcaccgataacgccatcaagaatcactggaactcaaccctaaaacgcaagtgcgcgtccttcatgatggcgggtgatgaagccgtcgccgtgagtccgaggccgctcaagcgatccttc

SEQ ID NO: 9445 - DNA, 422 bp, Glycine max
  Clone ID: jC-gmfl02220102g09a1
tttggtttggggaagtaaatggactcagtgacaaattatactcatcactcacttgatcctctcactctgtcacacttcttagatccaactccacatattacacatgaccaaaccccctatttgagcatattgtcgaataaacgtcttaccagaaaagcgaccatacacattcatcatggaggtaacagctgctactatatgatcattccctgtcacttcaccggagcctgactatgctaacccaggcaggaaatttgatcaaatcccctggaactcatgtagaactaatatccaactttgcctattctgctggctagaatgcaaaagctcaagccccttctaaaattaatggaaccacagtagttacatataaagaaagcttcaagcatgatgatgatctacctttgcttacccccagaact

SEQ ID NO: 9446 - DNA, 509 bp, Glycine max
  Clone ID: jC-gmfl02220102g10a1
tttggtttggcaaaatggcttgtgaaaatgacaacaacaacaaaggcctattactggccctagggctagtactttgtgtcaccctgtccttcttcccaagggtcacagaagggagggtgccctttgcatgcgaccctaggaacggtctcacgaggggtttcaagttttgcaacacgcacgtgccaatccacgtgagggtgcacgacctcattgcgaggctcacattgccggagaagatcaggctcgtggtcaacaatgccatcgacgtgcccaggctcggcatccaaggctacgagtggtggtccgaggctctccacggcgtctccaatgtgggccccggcaccaagttcggcggagccttccccggcgccaccatgttccctcaggtcatcttgaccgctgcttcgttcaatcagtcgctgtggcatgaaattggacaggtggtgtctgatgaagcaagagcaatgtacaacggtggacaggctggtttgacgtattggagtcctaat

SEQ ID NO: 9447 - DNA, 532 bp, Glycine max
  Clone ID: jC-gmfl02220102g11a1
agcagttgaagatggagcacgacgaagacgaagagccacctcttgctgttcagattcaagggaatgatgaatccgtttctcagcaatcttcttctgttggggtcactctcatcaccggttatcttggttcgggcaagtccactctagtgaatcatattctgaattcgcaacatgggaagaggattgctgtcattttaaatgagtttggtgaggaaattggcgtcgaaagagcgatgatcaatgaaggagataagggtgcattggttgaagaatgggttgagcttgccaatgggtgtatatgttgcacagtcaagcatagtttggttcaagcacttgaacaacttgttcagagaaaggaaaggcttgaccatatattgctggaaaccactggattggcaaatccagctcctttggcatctggtctatggttggatgaacagttggaaatcagagtgaagcttgattctattgtcacggtggtggatgcttaaaaattgcgcttccagcttgatgagcatcgtgatcatcttca

SEQ ID NO: 9448 - DNA, 443 bp, Glycine max
  unsure (1)..(443): unsure at all n locations
  Clone ID: jC-gmfl02220102g12a1
cttcaaagaccatcaaggtccctgaaggctttgactatgagctctacaaccgcaatgacatcaacaggatccttggccccaaggccaattgcatctccttcaaggactctgcatgccgttgctttggctacatggtctccaaaaagaagtacatctacaccattgatgatgactgctttgttgccactgatccatctggacacaagattaatgcacttaaacagcatatagaaaacctcctctgtccatccacacccttttttttcaacaccctctatgaacctttccgagaaggtgcagattttgttcgtggttaccctttcagtctccgggaaggtgtaccaactgcagtttctcatggtctttggctcaacatcccagactacgatgctnctacccagcttgtgaagcctcttgagaggaaacactagtatgtggatgct

SEQ ID NO: 9449 - DNA, 407 bp, Glycine max
  Clone ID: jC-gmfl02220102h01a1
agcttggcatagagaaaagcaaaattgatgacttgtccaacctcctctacaagaactatggaacaactatggctggtttaagggcaattggatatgactttgactacgatgaatatcacagttttgttcatgggagattaccttatgagaatttgaaaccagacccagttctgaggaacctcttgctgagcctaccctataggagactgatcttcacaaactcagacaaagtccatgcagttaaggcactaagcaggctaggattagaagactgctttgaaggaatcatatgctttgagacccttaatcccatccacaaaagcactgtctctgatgatgaagatgacattgaatttgtgtggggttcaggcacaaccaatccaaccacaaaaaaagatgctagcagc

SEQ ID NO: 9450 - DNA, 320 bp, Glycine max
  Clone ID: jC-gmfl02220102h01d1
gttcatcaatgatctaagcagtcacagatgtctccacagcaagcttgccaggataagcaacttctgattttatgtcatcttcccatagttctggcactgcctccctaaggttgtggatgctttctaatgcataatctgctcctttaattctctgagattttccaaccagcacagtgtgaagacccacacgttttccagcttgtgtgttgcggacactatcctcaaagaacaaagttctttgtggattaaggttggctatcttgagggccaactcaatggcattttctgatggtttgcaaataattggtgtctttggaaac

SEQ ID NO: 9451 - DNA, 467 bp, Glycine max
  Clone ID: jC-gmfl02220102h02a1
gctagccgtattctaaaaatggaaaacaatcaaagtgctgcaggaacacaagatagttctatgatgaagtctgttgatcaaagagcacgatcaaaagggcgcaatgacataatgactcaacgtctgaagaatcgagagagacaacgaagatatagggcacgtaagcgtctagaagccgaaacaaagaagtcatttgttgtggaagagacaccagctgtgcaagttgaactacaaccaaacaggaaccccaacaacaacttcgtgacccgtatctattgtaaacgagattggaaaaaggacgcaagacgggcccatattttaaagcatcaacaaatgaatggattcattgatcgtccagccataactagtgtacctgaggtgacatgcttagccattggaaacaagtcagaaacagtgccagagagggaaattcagtctggatcttctggtgttgctagtactgatgc

SEQ ID NO: 9452 - DNA, 477 bp, Glycine max
  Clone ID: jC-gmfl02220102h02d1
aacttcactccactgttactttttttcttttacaaattacaatgtgctccgataactacaatctctcaattccccattaattaaaaatcaaaatcaaaatctaatctgggtttctcccatcagaggacaaagcttccgactttgcgggattcgttcgtatttgtttcagtgctgtgatggggaaggtcgcggtgggagctgccgttgactgcgccgccgccgtatgcactgcggcggcgctggtggtgcgccaccgcatgattagttcccggaagtggagtcgcgccatggcgatactgaaggagtttgaagagaagtgtggcaccccaattgtgaagctaagacaagtggctgatgccatggatgttgagatgcacgcgggtctcgcatctgaaggtggtagcaagctcaatatgttgatcaagtttgtcgataatctaccaactgaggattacgaaagcctctattatgcattgg

SEQ ID NO: 9453 - DNA, 521 bp, Glycine max
  Clone ID: jC-gmfl02220102h03a1
gtgttatcaatggcggaacactggaaggccaaaattctcccatataaacaggccgttgcagcctatggcactgccatagtgggcctcccttcacaaattgcctatggtggttgacaaaaaaaccgccatgccagtctgccatggcggccttagcgccgccatttatcaacattgttagcaaatgagaaaaatgttatctcctgcaatatttattctcatcatcagaaaacattctgatgggttcaaaagatttaatttcgtggcagtggatccaaatgaggggtgtagagtactagagagttcttcttggggagagttgggtatctgtgaagatcatgctattcaggaaccatatgaaggcatggaatttgaatctgaagatgctgctaagctattctatgatgaatatgcccggcgattaggatttgtcatgcgtgtgatgtcttgtcgacgctcagaaagggatggtaggattcttgcccgcagacttggatgtaataaagaggggtattgtgtcagca

SEQ ID NO: 9454 - DNA, 410 bp, Glycine max
  Clone ID: jC-gmfl02220102h03d1
ggtaataacaaatagtaatatttagctgacagtagtttcaaactaagcaagttacaatatcattggtgtttacattttcttctgtaaaattaggggagtacaaaaatgatacaagattacattgcaccctgaggcttaaagggacgtaactagtttgtcagtggccaaaatgtcacaaaacctgttttagcttttaaggactatgacaagcaatgtaacttcacagtttatatatatatatatatatgggggccttctctgggttgcaaagctcgcattattggttcaccaaaaaaataggttagccttaccagaagtttcactgaatcagggaatgccattcatgaacgattaagggatcattcttttgacacgacacattttagtggtcacaccgtgacatgatgcat

SEQ ID NO: 9455 - DNA, 467 bp, Glycine max
  Clone ID: jC-gmfl02220102h04a1
agaaatccaccaatgtatggtggtaattctcagcaaggctaccaagctcgggcacccactagctggggtcccactgctgctcctatgccacaatccggttatggctatgcgcatacagcagcatactatggtccacactactataacatgcctcaccaacaatatgcaagctatcctcctcagccatctggacagatattctgccaccaactgggatcagtccactgacccacagcagcagtcaacccatgcatggtatgattactatagtcaacagcagtagcctaatcctgcaccttcatatgatgggactgctgacaattacagccatgccaccttactctggacataaccaacacgtacaggtctaatctcaggatggctatagaggatatcatgcaccaccacaattacgggatcgtcaggcaccatcatatgatcagcagcaaaggtatagctcatccccc

SEQ ID NO: 9456 - DNA, 520 bp, Glycine max
  Clone ID: jC-gmfl02220102h05a1
aaaagacttccttttttgcaattgtcatttgtcaccaaacaattgttgttagctctcacaagcaagcttcagcaacgacaatgaaggtcagaactagatgaagaaaccaatctcttttataatttcctccctttcatccactaatcaatgtttctaattgagtttaattttctcagggatagccttacactgttttgtttccactagatcttgtatttaactatttcctttcatgttttaaatgtagaagtaattaactattgggtcttaactgctctttgatttgttgtgttacagaaagtagtcttacagttggacttacatggcgatagaatcaagcaaaaagctatgaaaacagcatctggcctttcaggtacatctttgcttttgattcaagaagcacaattaatacatgtcatgcagcatcaaggaatcaatgatttttattaacaaaattgcttgtaattatttttgcacgggttcgatcagtttctgttgatatgaaagacatgaaaatgat

SEQ ID NO: 9457 - DNA, 485 bp, Glycine max
  Clone ID: jC-gmfl02220102h06a1
cccacattttcaaaatggcttgtgaaaatgacaacaacaacaaaggcctattacttgccctagggctagtactttgtgtcaccctgtccttcttcccaagggtcacagaagggagggtgccctttgcatgcgaccctaggaacggtctcacgaggggtttcaagttttgcaacacgcacgtgccaatccacgtgagggtgcaggacctcattgcgaggctcacattgccggagaagatcaggctcgtggtcaacaatgccatcgccgtgcccaggctcggcatccaaggctacgagtggtggtccgaggctctccacggcgtctccaatgtgggccccggcaccaagttcggcggagccttccccggcgccaccatgttccctcaggtcatctcgaccgctgcttcgttcaatcagtcgctgtggcaggaaattggacgggtggtgtctgatgaagcaagagcaatgtacaacggtggacaggct

SEQ ID NO: 9458 - DNA, 523 bp, Glycine max
  unsure (1)..(523): unsure at all n locations
  Clone ID: jC-gmfl02220102h07a1
atcaattaatttccaatggccgatcagctcaccgacgaacagatctctgagttcaaggaagcctttagcctcttcgacaaggacggcgatggttgtattaccaccaaggaacttgggactgtgatgcggtcgcttgggcagaacccaactgaggctgagctgcaggacatgataaatgaggttgatgctgatgggaatggtaccattgatttcccagaattcctcaatctcatggcgcgcaagatgaaagacactgattcagaggaagagctgaaggaggctttccgtgtgtttgacaaggatcagaatggtttcatctctgccgcagagctccgncacgtaatgaccaatctcggtgagaagctgaccgatgaggaagtcgatgagatgattcgtgaggctgacgttgatggtgatgggcagatcaactacgaggagtttgtcaaagtcatgatggccaagtgaggaccaatcaaccataacaaaaacatttgaaagcacatgaacagaanagggacagggc

SEQ ID NO: 9459 - DNA, 530 bp, Glycine max
  unsure (1)..(530): unsure at all n locations
  Clone ID: jC-gmfl02220102h08a1
tagaaacagtgtgatgaaaatgaaggtccttgttttcttcgttgctacaattttggtagcatggcaatgccatgcgtacgatatgttccctctccgaatgaacactggctatggtgcccgtactccggaggtgaaatgcgcaagttggaggcttgctgtggaagcacacaacatctttggctttgagaccattcctgaagagtgcgttgaagcaacaaaggaatacatccatggcgaacaatatagatcagactccaaaacagttaaccaacaagcttacttttatgccagagacctcgaagtccatcccaaggacacatttgtgttcagtatagatggcaccgtactctctaatattccatactacaaaaaacatggataggggtggagaaatttaactcgaccttgtatgatgaatgggttaacaagggcaatgcaccggcactgcccgagactcttaagaattacaacaagctggtgtctcttggcttcaagattatnatctngtcaggaagaacactgggacaaac

SEQ ID NO: 9460 - DNA, 513 bp, Glycine max
  unsure (1)..(513): unsure at all n locations
  Clone ID: jC-gmfl02220102h09a1
ctttcttcaccgttcgctctttctttctcccctacacaaaacatggctttgcccaatcagcaaaccgtcgattaccccagcttcaagcttgtcatcgtcggcgacggtggcacaggaaagacaaccttcgtgaagaggcatctcactggtgaattcgagaagaaatatgaaccgaccattggtgtggaggttcatccgttggattttttcacgaactgtggaaagattcgcttctattgttgggatactgctgggcaagagaagtttggtggcctcagagatggatattatatccatgggcaatgtgcgattatcatgtttgatgttactgcccgtctaacatacaaaaatgtccctacctgggcaccgtgatctttgccgggtctgtgaaaacatcccaattgttctttgcggtacaaggttgatgtcaagaataggcagtgaaggcanagcaggttactttccacaggaagaagaattgcagtactatgagatatctgctaagagcaacta

SEQ ID NO: 9461 - DNA, 565 bp, Glycine max
  Clone ID: jC-gmfl02220102h10a1
gaagtgagtcagatacgaagaagcaaaagcaaaacagaagcaaacaccaccacgcattcagcttcagaagaaagtgaacctatttggtgttttcctaaccgaatcaatctttattctttggttattcttcgacttctacatgggtcgccttcttctctttctcattattcccagccttgtcgcattgtctttcctctcagaggtacaatcagcgtcgttcaagattgtgaacaagtgccgtcacacgatatggccgggattactctccggtgccacctcgacgccgattcccaccaccggattcaccctcgagagcggcatatcgaggaccataaagcttccaaagtcttggtcgggtcggatatgggcacggacactctgcggtcaagactctgacggaaagttctcctgcgccaccgccgattgcggctccggtaaagtagagtgcgtctgctgagccaaaccgtcggcgactttggcggagttcactctcaacggcgccgacggattggacttctacgacgtgagtttggtcgacggatacaaccttgcgatgctgatcgtc

SEQ ID NO: 9462 - DNA, 481 bp, Glycine max
  Clone ID: jC-gmfl02220102h11a1
ctctcccctgctatctctaaattgaacgtgttttctgctacttttgcgcgtgtgcattcctcttcccttcaaagctagcactttacccaccaccacaacaaccccttttgctcccacgtgcacagagtcaaacccaaagctctttttttctctccaaacccacaacaacaaaaacagagcttctctgttttctccattcccaaaacacaaaataaaataaaaaaggaatctttttcacgcataattctgctgaatttcggaacagaaaatgggtgctggtgagtactacaagatcctcaaggtgaaccgcaatgccacagatgaagaactcaagagggcatataagagattggccatgaagtggcacccagataagaaccatcaacaccaccatgttacgaaggaagaagctgaggcaaagttcaagcaggtttcggaggcttatgatgttctcagcgacccaaagaagcgtcagatctat

SEQ ID NO: 9463 - DNA, 462 bp, Glycine max
  Clone ID: jC-gmfl02220102h12a1
ccgagaacaaaaaaaaaaaaaaaaaaaaatccgcgattcgctcttctcttggaaaagtgaaaaccagaagtacgaacgaaagagaagagcgatttagaagtgagagaagatggggttgtcgttcacgaagctgttcagcaggttgtttgcgaagaaggaaatgaggattctgatggtaggtctcgatgctgctggtaagacaaccatcttgtacaagctcaagcttggagaaatcgtcaccactatccccaccatcggatttaatgttgagactgtggagtacaagaacatcagcttcactgtgtgggatgttggtggtcaggacaagatccgtccactgtggaggcattatttccagaacactcagggtctcatttttgtggttgatagcaatgatagagatcgagtggttgaggcaagggatgagctgcacagaatgttgaatgaggatgaacttagaga

SEQ ID NO: 9464 - DNA, 525 bp, Glycine max
  unsure (1)..(525): unsure at all n locations
  Clone ID: jC-gmfl02220103a01a1
ctcgagccgaatcggctcgaggagaattcccaaatccatgatgcctatgttaagctacagatcggtaaccagattttgaagacaagacctgttcaatcaaggaccatgattctgcgttgggatcaagagctgatgtttgttgctgctgaaccctttgaggaacctctgattgtttcagtggaaaatcgagttggtcccaacaaagacgagactattggagctgttattattcctgtagaccaaactgacaagcgagctgatgatagacttatccacactaggtggtatcaccttgaagaatccatatcatctgtgatggatggggaacaaggaaaaaaggagaaagataaattttttagtagaattcactgagtgtctgtctgatggtgggtccatgtttttgatgggtcaacttatatagtngtgatctcagaccaacatcaaagcagctctggaagaagccaattggtcttttagaaattggcattctagtgttgatggacttcatccaacgaaaaccaggga

SEQ ID NO: 9465 - DNA, 334 bp, Glycine max
  Clone ID: jC-gmfl02220103a01d1
ttttcttttttttttttttttttttttttttttttcttattaactattttgctttggttttttttatttgtttttttttttttttttattttgtccaaagaaaaaaacacgccgccccaccccctgttgaacaaacgggagaccggccggggggctcccccaacaaagtggagggcggccccacgggctggcgtttattacccacccccaggggggatgcccccttgtctctcccccccccccgcaaaatttacttgacccccgggctgcggaagacattgttgaagactgtaaaaccccccaaagaatccctttccccggtgtttgtgttgga

SEQ ID NO: 9466 - DNA, 533 bp, Glycine max
  unsure (1)..(533): unsure at all n locations
  Clone ID: jC-gmfl02220103a02a1
cagaaatgaacgccctcccttcctcttcctcttccaccttcactttcttaactcagtccaaaaaccccaactaccacttcaagttcacacacaaagtacccattttacccctacactcgccttctccatgttggctccctgagtgactcgtcctcctcgtcgaccacggtgctggacaaaaatgccctttcacccgaacagaattctcgcattgcaggttcgccagaagactcgagctccaaggaaaacctcgtggttcgccggccggtgacggatttttccggcgaagactccggcaaggaggaggaggaggaggaagaagaagaagatgacccgaaggcttcggtgatcgacgagggtctcgcgagattcgcgaagaagatgccgatgtttgagccggagaggatggaatccanagagaggccactcgcaattaatttggacttggcgttatacagggcgaagcttttgggctagagaacatntcagtatgatgaagcagagtcactactttaaaagtgtataagcttttg

SEQ ID NO: 9467 - DNA, 340 bp, Glycine max
  Clone ID: jC-gmfl02220103a02d1
cattaaaaaatatttcttataatgccgtgttcaacacaaggtaattacacctctcatgccacggtcatactattcaaaacaatttttacaagacaccaacatgtataaagctcaagatcccaccctaaactacattactgtgtgacttgcacttcggcaattccattaattgatcgtcgccatatccttctaggagacttacttctcttcacagaataaaattttggtggttccaactgaatttctagattggacaaatctaaagatagcttttgcttaatgaaagcatccaaatggaagtcatttttcccatctgcatcatcatcatcctgatcgtcac

SEQ ID NO: 9468 - DNA, 562 bp, Glycine max
  Clone ID: jC-gmfl02220103a03a1
cagcaaacagcaagagagaaatggaagcagcatcggccacaattctgctactgatactaattcttgctctgatatgctcatggaaggttctgaactggttatggctgagaccaaagagactagaaaaactgctacgagagcatggttctcgtggcaatccatacaccctttactttggagactccaaggagtttctcaagatgagaaaggaagccgtatccaaacccatgaccctctctgatgacatagtgccacgtgtctctgcctatgtccaacatagtgttaacaagcatggtaagaattcttttatctggttcggaccactgccaagggtgaccatcttagatccgtagcagatcaaagatgtatttaacaagaactatgacttgccaaagcctaatttgaatccacttgtcaagttactagcaactagccttgcaggctatgaaggagaaaagtggagcaagcacagaagaataatcaaccctgctgtcaatttagaaaaagtgaagatcatgttaccattgttcctgcaagttgcaatgatcttgatagcaaatgg

SEQ ID NO: 9469 - DNA, 239 bp, Glycine max
  Clone ID: jC-gmfl02220103a03d1
gggtggtggtgtgtttatagactggaaatatatcttttttgatgatgtttttagtgctgttgatgcacacactggcactgaaattttcaaagaatgcgtgaggggggctctgaaaggcatgaccgttatttttgctcacaccaagctgactctctacataatgcggattttataggggtgaagagggacggaatgatattccaatcggagaagtacgatgatctacttgcgtctggaat

SEQ ID NO: 9470 - DNA, 418 bp, Glycine max
  unsure (1)..(418): unsure at all n locations
  Clone ID: jC-gmfl02220103a04a1
gcccctggcgcgatccgccggtgttgaaggaaaacctctccgccgccggaaaggggaagccgccgctgacgcaaacgcggaggaataataatgaaggtggatgggatgattggggtaacgaggcgaagtccccggagcaagagcaagtcgaccggggattttaggaatttgaacggcggcggcggagcgccggcgaggtcgaggtcgacggaggatatctacacgcggacgcagctggaggcgtcggctgcgaaaaaggaggacttcttcgcgaggaagattgcggagaacgagtcgcggccggaggggctgccgccctctcagggagggaagtatgtcgggtttggatccagtcctcagccgcctcagcggcggaatgaagcgcanaacgattacttctctgnntgttcgaggggat

SEQ ID NO: 9471 - DNA, 479 bp, Glycine max
  Clone ID: jC-gmfl02220103a04d1
gctgaaaatatatttaaccttaacaaaatctttcttcttgcacattgggtctgagtttaaaaaggaacaatgggattaaaagttatagccaacaataaagtatcatgtttggttagtggcatccttgcttggcctgcatgccatcagtgcgtaaactacagtgtttttttgtcacttaaggaagaaatcatgaaactggtaatgaagtccaatcaaccctggtccaagaagtataacaagtgataacttgtttcaaattatgtacttgaaatcttagagaaagcctccctctgtccaagtgccatctgatttcccattatgaccaacacctttcttattagatgcaccttcataataattatcgaatccatcatctttggcattatcccagccagcccaatcctcgttattatggagagctgatcctttagctggttcttccttcctagaatctctgtgttcccaatcatcccaagagc

SEQ ID NO: 9472 - DNA, 553 bp, Glycine max
  Clone ID: jC-gmfl02220103a05a1
gggattgtggtgttaaggatatcatttcgaaacccttcccctttccttttcaatatcagtatcatgtggttggttggttggggttcatagagtgagtgaatggagtctgttatgagaagcataaaaaaaacatgaagagcaaagagtattattaggcgaattatagatgtcctaattttattgaaggtagcctcaacaacttctgctacttcctactccaaccgcacttctgctccgcaattatcatgggcaaggtcaagatcggaatcaacggatttggaagaattggccgtttggtagccagagtggctctgcagagagacgatgttgaactcgttgccgttaacgaccctttcatcaccaccgattacatgacatacatgtttaaatacgacagtgttcatggacactggaagcatcacgatgtcaccgttaaggacgagaagacccttctcttcggtgacaagccagtcactatttttggacacagaaacccctgagagatcccatggggtcaactggagctgacatcattgtgagtcccaccgagttt

SEQ ID NO: 9473 - DNA, 351 bp, Glycine max
  Clone ID: jC-gmfl02220103a05d1
ggaaaaaagggggggccaaatttttcctttaccaataaaaacccgggccctttggggggtttcacccccggccccccggggggtttttaaaaaaccaaaacccggccccccccccccaagaaaaaaccccaaaggccccaaaaaggggtttggcccccccaacaaggacccccccgggtttcaaaacccctttttttccccccccctttttttgggtggggcaaaaccctaaatcggggctaaacaaaaacacccgggaaaatggggaaaacccccccctttgaaggacccccctaaaaaaacttttggggccccaaccccaaaaaaacaagggcccggggggtgttcccc

SEQ ID NO: 9474 - DNA, 594 bp, Glycine max
  unsure (1)..(594): unsure at all n locations
  Clone ID: jC-gmfl02220103a06a1
cttctcacccccacactcccatctcacacacccctcgcatccaacaatgtctctcaccattccctccaacctctccaagcccgccgccctccgccccaaactaagcccaaagctaaggtccgccgccacaaccaccatcgtctgcagcaccaccaacaacaacaacaacaacaacgtgtcctccgacctgaaggcgttctccgccgcgctggccctctcctccatcctcctctccgcccctctccccgccggcgccgacatctcggggctcaccccatgcaaggagtcgaagcagttcgcgaagcgtgagaagcagtcgataaagaagctggagtcgtcgctgaagctctacgaggcgggcagcgcccccgcactggccattaagggcagcgtggagaagacgaaagtgaggttcgacaactacgcgaacagngggttgctgtgcggcggcgatgggttgccgcacctgatcgtgagcggagaccagaggcactgnggtgagttcatcacaccccgaatactattcctggacatctcgggatggatccgctgggtgggtcgagctacctgattgnatcagggacgagaagaaac

SEQ ID NO: 9475 - DNA, 410 bp, Glycine max
  Clone ID: jC-gmfl02220103a06d1
agcaagaacccttcttacattaattgaattggaaaaagaggttgattggggttcacatgccttaaattacatcatatcatgtcccctttataaaaaaagttattccaaaaagagcgcgtaaagatcccatccccatacaaattctccaggctttcctccaatggagccatccccccttttttatttaaacatccttggcaatgagggcgcccctgatgaattctttttaggcagcaacgggccctcttaaaccccttaaaagcaagcgagaagcccaaggaacatcgatgatgacccccctcatgggggggtttttctcggccctgatcgcaatcaggtaggtccgacccacccagccgatccatcccgagatgttcaggaattgttttccgggtgtgatgaacccaccc

SEQ ID NO: 9476 - DNA, 562 bp, Glycine max
  Clone ID: jC-gmfl02220103a07a1
ccattatctcagcaagcatggagttagtgcaatcaggaggctgaggaaaactgataataatagaattgcaaaggcttgtggtgctgttattgtgaacagaccagatgaattgcaggagtctgatgttggtactggtgctgggttatttgaggttaagaaaattggagatgagtactttgcatatattgttgattgcaaagaacccaaggcttgtactgttctactaaggggtgctagtaaggatctattaaatgaagttgaaagaaacctacaggatgccatgtctgttgcaaggaacattataaaaaatcctaaacttgttcctggaggcggtgctacagagttgacggtgtcggctgccttgaaacaaaagagttcatctattgagggcatagagaagtggccttatgaagctgctgccctagcttttgaagccataccacgaactttggctcaaattggggagtaaatgtcatccggactatgactgctctacaaggaaaacatgcaaatggagaaaatgcatggatggtatagatggaatactgcagatcactgcatg

SEQ ID NO: 9477 - DNA, 363 bp, Glycine max
  Clone ID: jC-gmfl02220103a07d1
aaaaaaaaccccccccgataaataatgttttaaaaaaaaaaaaaacaaaatttttttttggcaaaagggggaggggggaaaaaaaaaccgcccccaaaggggggccaaaaccccccaaaaaagggggaaaaaaaaggggggaaaaaaaacccccgggaaaaaaaaaccccaaaaaaaaaaatggggggggggacccaaattttctaggggggggggggggtccctggggagattcccggcggggaaaaaccggggggggaaaagggaaaacccggggggggtttttttttttccccccccccctttttataaaaaccccaaaaaaaaaacagggggggaaaggggggagaaaaaagggggggg

SEQ ID NO: 9478 - DNA, 470 bp, Glycine max
  unsure (1)..(470): unsure at all n locations
  Clone ID: jC-gmfl02220103a08a1
gggattctggtatatgaagccattgatagaatcattgccggtcctaaaagtgtggatggttttttaatgtttttagttgctgcatttggtcttgtggttaatatcatcatggctttgttattgggtcatgatcatggccacggacatgatggtcatggtcacggtcacggtcacggtcacggacatggacatgatggtcatggccacagtcatggatttacagtgtctacccattgtgatgcaaagcatacaaaagatgagcaccatcacacacatgatgatcatgcacaccatcatgatgaaaacctttcaaaagatgctcaccatcatactgaggaaagatcacttgcaccatcatgctcacaaagatgttactgaacctcttcttggtgaatcaaaggtggaactaagaagaagaagcaatggaacataaatgtgcaggnggcttatctccatgttcttgnggactc

SEQ ID NO: 9479 - DNA, 472 bp, Glycine max
  Clone ID: jC-gmfl02220103a08d1
ggggggcggaaaaaaaaaacccaaaaaaaaccccccctttaaaaaaaaatttaaaaaaaacccccctaaaacccccccccattttttttggggggggccccgggaacccccctccccctggggggggaccccggggggggggttttccctttggggcccccccggggggggggggggccccccccgggcccccccctttaaattttccccccctgggggaaaaaaaaaaaggggggaaacccccaaaccccccgggggtttttttcccagggcccatttttttgttgaaaaccccccccctttaaaaccaaaaaaagggggggggtttccccccccgggaacccggccaaaaccaccaagggggttttggggagccccccccacgggggggccaaaaccttttttaaccctccccccccccacaagggaaccaaaaataattggggggccccccccgcccccccccgggggg

SEQ ID NO: 9480 - DNA, 522 bp, Glycine max
  Clone ID: jC-gmfl02220103a09a1
gcttcttgttgttggaaagaaaccctagcaagcggaacaatggcagacgttgaggtcgatgtggcggctgcagcagcagcagggcagccgaagaagagaacgttcaagaagttcagtttcaggggcgtggatctcgatgcgcttctggacatgtccaccgatgaactcgtgaagatgttcagtgctcgcgcacgtagaaggttccagagaggcctcaccagaaagcccatggccttgatcaagaagcttcgcaaagcgaaaagagaagctccaccaggtgagaagccagaacctgtccgcacccacctccgcaacatgattattgtgcctgagatgattggtagcattattggagtgtacaatggcaagacctttatcaggttgaaatcaaacctgagatgattgggcattatctggcagagttttctatttcatacatacccgttaagcacgggagacctggtattggtgctactcactcatccaggtttattcctcttaagtgaaaactggtactgggaa

SEQ ID NO: 9481 - DNA, 524 bp, Glycine max
  Clone ID: jC-gmfl02220103a09d1
aaagatcctaccaagaacgaaattccattctatccattaacacgttcaaatagcatggagaatcggcctttgattccatcaagtcccaaattcgtttaaataccatttcaacaaaataaaactaacttcaaaagattaaacagaaaaatcttgatactatggaattaagtcatgataaaccatacgtccaaaatcatagataggcaactcaaaatcaaatgcgcaacaacaaacaaaatctcttataggagttgaaattttcttgagaaccactacaaactaaaatgtagcttcccagtaacagttttcacttaagaggaatcaacctggatgagtgagtagcacctataccaggtctgccgtgcttaacgggtttgtatgaaatagaaaactctgccagataatgcccaatcatctcaggtttgatttcaacctgattaacggtcttgccattgtacactccaataatgctaccaatcatctcaggcacaataatcatgtttcggaagtgggtgcggacaggt

SEQ ID NO: 9482 - DNA, 505 bp, Glycine max
  unsure (1)..(505): unsure at all n locations
  Clone ID: jC-gmfl02220103a10a1
tttggaagatagataaataaaataggcttgtcatcgtgaggaatcagggacaagtaattgaacagatgtgggtagaatagaatcacctaaattgataaagaaaaatcataaattcatgcatcctaggcaaacaaggcaggctaggtcccaaccttatcaaattttgattttattttatttttatcttctatttttatcttttaattttattatcttatcttttatcttctattttctttatcatatcttaatttaaatattttatcttccctatcttctatttttatctttaaatctcttatcctttcttttaaatctttatcttatctactatattttcttatctttattttaaattctttatctattgcttttaaattgggtttacattaatctaagtactaacaaagtctatgtggattcgacactcggatntccgagtactntactactngtgacaatttggtacactttgccatgagttaacacatacatacctttcttt

SEQ ID NO: 9483 - DNA, 369 bp, Glycine max
  Clone ID: jC-gmfl02220103a10d1
ggcacgctatttatgccatgattttcttacttgatttacagtatcttttaacttatttaatacattataccaacccaaccaggagcaagtgccacaacccaaggacacttatcgacaaactccgaagcaggacaaggaaggaaaaaaccaggggcgatacaaaaatgcaatttatgccacaactggataagacgcacaagttgcaagaccacacatgaatcagcggaacgccagaaggaaggagacattctcaccccaacaaaaaccccatgaatttatttatgagccacccggggagggggggaaaaaaaagacaccccccagggagggcagaaagagacacatccggagaagggccagcgcaaaagg

SEQ ID NO: 9484 - DNA, 489 bp, Glycine max
  Clone ID: jC-gmfl02220103a11a1
gaaattgagggtgaggaaacacaagatcttcatctagcagaggaaagaggcctttaccataactttgatattgatgaagaaaccagattctcttcagtctataggggtaaaggtgttgatgatagtggatatgatgaaaatgaggacaggctcttggattcacataattctgaaacttttgataatatttatggtttagtcaataagagcccaggtgaagcaagtggtcggaaaggcagtaatggagctcaaacgtggtcaaatttctcctctgtgtttcatgcacagaatcactcagagttatctcagtcaagttctggtgtggatttatgtcgctctggttctaaagatcatgctaagcagttagcatctgaactccctgccctgagttgctcattttcagatggagaaagcaggattcagctgaactcagttaataacctacatggagtcaatgattatactgtggaagaacattggatacaagct

SEQ ID NO: 9485 - DNA, 477 bp, Glycine max
  Clone ID: jC-gmfl02220103a11d1
atcgaaatcctcccataagccgaagatattcttgtcatttgaaactcttcaagccatccactcagttcattcttttcaagcagagagaagttgtcaagaatgcattcaactataagtggtcaatgatcccgtcccttatatggcatctcagggaggtaacttggcatgtataaaacttgcctaggatgaccaagaagttgtccatactgtggtccatttggatgaaaatatggttgggatggcatttgtgccgcttgtggattatatacgactggttgtggccctgcaaaagtagtcccaactccaatacccatggacatggctggcatatttggtatggtggatacagtagctgggaaatagaaggaaccatcagacatgggggagcggggcctagcatgtgattgagacggaataaaactctttgcattagggttgagcctgaactccttggcattgggattcagagttgatttt

SEQ ID NO: 9486 - DNA, 314 bp, Glycine max
  Clone ID: jC-gmfl02220103a12a1
gccgtgagagagagggacattccgtgagaatgaagttctggtcctggtcatagaatagatgaagaaagaaggatcgtcaacggcgggaaaaacgacccagtatgatcccctttttagagaatttgctcaagatcacaccgaccgctttgagttggctgattccattctgcataactacatatactgtctcttgatgaagttccatacgaaggtgttcatccttacaaatcaaaaactcaacaatacgcacagatctaccatgggttacatctctcgacttccctttctttcttttccaaatggaagtgctagtc

SEQ ID NO: 9487 - DNA, 464 bp, Glycine max
  unsure (1)..(464): unsure at all n locations
  Clone ID: jC-gmfl02220103a12d1
ctgggcgtcagcaggtcnggtcttgaattaatttccgcgtggcacacgtctactattcgggggccgcccttttttttttttattttttttctttgttttttgcagttccaagatgaatgtggggggggctgaacaacaataaacctctagagttgtgctgagatcatcaccttaggaagccctttattttacaatataccgaataaagaacatccttcaactttcccagttgttcgtaaaaacaggacacgagttcgtttagatccacaattattgggcaatggctagttttttttaacttagtgtatgctcatggaaataataacatgtatgaaacccagctaaaggaaatgtttaagcgtttcctaataccaatagaaagtggttgatgattatttatgagcagatgacacacttagctcctgaatcacatccaccatggttggtccttggtctggaagctg

SEQ ID NO: 9488 - DNA, 653 bp, Glycine max
  unsure (1)..(653): unsure at all n locations
  Clone ID: jC-gmfl02220103b01a1
gattcatcgtgtccttaaaataaaacttttgaattcaaatgagatctaattagtaattaccttatatatatatatatatatatatattgaccaattaacaatctgccacttttaaccatgatcattatttatatatatacgtacaatagttttgggcactggcgatgggaataaagtagtggtccactgctacatgtatgaacttagagctatgattaatgtcaatgaagttattacttaaaaatgttaatacaaaattgaggcagacttcattccttttttttaataagaaaggggccattaggattttgaacttagaattttgttcaagctgctctttccatttaggtcgatcctagtgaatttcaaaacttatagctcatttctatatactgtctattatagtagacatacctgttttaccacacaatatttaattctaattctcttattccatgaacgaacacactataattaatacatgactntgagaaagagattatgtgttaaaattctcttactaaccagaattaaccattnnatattatcaatcanaagaagaaattanaaaaatcaacctcagaatcttcattgtaaatatttatatatatatagatatatatatatatatatatatatatatatatatatat

SEQ ID NO: 9489 - DNA, 456 bp, Glycine max
  Clone ID: jC-gmfl02220103b01d1
gttagaatatctaatacactaaactaaacattaatttgaagcaaaagtattactcatcattttcaacaattataaaatcatttaattatataatacaaaaattaacataattaatgagagtctacaaattttctctaaatttacattactataaaattgagaattcttgaacttataagcaatttaaaagtatgaagggaggaaaaaaaaagactaactagtagcagcatcaacaaattttccatcaaataagagttgggatgtgttctactttaactagtggtttaattggttcttcaatggcagcagcagtgctgaatttactgagccctgcaccaagagcaccacttccacttgaatatcagacaaaagggtcaatttattaaaataaaataagaccattaatgaaagctccaaagcctaaaaacaccaatcataaggcatgatcattcatca

SEQ ID NO: 9490 - DNA, 584 bp, Glycine max
  unsure (1)..(584): unsure at all n locations
  Clone ID: jC-gmfl02220103b02a1
ctcgagccgaatcggctcgaggtttgtcacgagacccatagtgctgccaaattatagtaactctctttctctatctgaagaagaagaagttctgaagaagcatgtgtggaggtgctatcatctcagacttcattggtgtgaagcgtggccgcaacctcgccgcgcaggaactgtggtccgagcttgaccctttctctgacctccttggcttcgataccaccaccaccaccaccaaccaaccaccccttccagacaaaaaagtggtgtcatcatgtgagaagaagaagaagaaaagtgtgagtgcagaaaagaagagtggtgggcgagctcggagaacgtgtacagaggaatcaggcaagggccgtggggcaagtgggccgcggaaataagggacccacatagggggctgccgcgtctggctcggcaccttccccaccgtcgaggaatgccgccgagcctacgacgacgccgtcaagcgcatncgcggcgacaaggccaagctcaacttcccgggccaccgttccgcacccttcaaaanacaacgctgcctcagccctgacaccaccaccgaacanagcagcagc

SEQ ID NO: 9491 - DNA, 371 bp, Glycine max
  Clone ID: jC-gmfl02220103b02d1
gcacgacccaaacgctaacacaccctaattggcctttatttataatcataatgataacatataatcatccctctcatgatacgttgcacctaattatgaaataattcgaccgtacaaaacagaaattaccaaagcgagaggacaagacaaaacagaaaactaagaacacatgcaccaacatagttttataaaactataacttaagaaaacgccatttattaattaatcaattatctcccttctagtaaattaagtgacgggtgggcacaacgacttcgtgcagcatccacaggtcatccatgttgtcccactcagcacccatgttgtccaaccctaaaaaccgttcaagttgtttcaggtcgagttcatct

SEQ ID NO: 9492 - DNA, 556 bp, Glycine max
  Clone ID: jC-gmfl02220103b03a1
tgaaaagaagaagaacctgttttcggaactaaccgacgacatcgttctgaacatcttctacaaactcgaagacgatcctcgccactgggctcgcttagcctgtgtctgcaccaaattctcttccctcgttaggggatttctgttggaagaccaaatgctccctcaccatcccccaagacctcctctccgccgccgcctccgacccccctctctccctccacaaactctccttctgctgccccggcctccgccacgccggcctcctgttcgacacctccgatttcggcctcgaacgcgacctcggccccggcaacttcaacgtcatcaccgatgattctccttcgaaaccactccaccaccaccaccaccaccaccacaacaacaacaacaacaacctcctcaatccgatgattggtcttcctcttgttggtccctttacgatgacctctactacgacacgctctacgtcccaaccgagtccgagtcgccgcgattaacgggaatccgtagcgtaagagcgggcgtggatgtggcttcgatcaggcgtgcagcaaga

SEQ ID NO: 9493 - DNA, 433 bp, Glycine max
  Clone ID: jC-gmfl02220103b03d1
aaacgcgaatgggttttgaatctcataaaagaaaaacctaaaaaggcttttccactgcaatcacactgcgatcggaatttcacaaagcagatttccaatcttaagtaatagctgaaataatggaatggaatgtgaaaacagcgtatagcggccttctcaggagttatttaaaggagaaactaagatcgcgaaaatgaaaatgacataaattaggcataaaacgcagtagagagttcaagtgtagatgggaagatcggtccaggcaccagagacatgtccattctcacaaacataagccctaaccataggctccccatcgtcatggaagccaaagccaggcctcaagcaaaaggaagagtgcagatcccacgtgaactcacacgcgcagaaggcgcaaggcagatccatcttcctgttcttcccatcctgaata

SEQ ID NO: 9494 - DNA, 542 bp, Glycine max
  Clone ID: jC-gmfl02220103b04a1
gcaacttgcatcatcagcgtcttctctttttctcagtttctcctttttttttaaaggtgctgcaagcatacgtgtgattttctggcacaagaaggaaaaagaaaaaaaaaaacaacgtggaatcgcaacgagataaggtgaaacaccaacgttgtgaggtgtgaacaaagtgggctctgttatcaatatcatcgggtaattgaaactttttagtggggtttattggtctgaagcttgttggagttgggagtagttgaagatgagaaacgtgcttcgttctctgcgacatttgcgaccagcctttcagaggcaagattgtgtattgatcagtgttaatgttgcagaagaacctccatgtcacattggaaagagctgtcatatccatagttcagcttcagagttgttgatcatgctgagaccaactttaaaaaccatttgtttacaacaaccacgaaacctctctcaaatgatgctgcaaaactcacaaatagagaaacaaagcaaagctggcctctttgtgagtatgaacgaagaaatgatat

SEQ ID NO: 9495 - DNA, 451 bp, Glycine max
  Clone ID: jC-gmfl02220103b04d1
atcaacaataaatgcagttaaaagacctacattctatttaaattgtttgaatttttgcattacatcaaatcaattatacaatatttttgcaaacactaataaatatttgatgctatctaacacatctctccctgagctggtgtcaaatctaatgctctgaagatggatgtttttttgtttgaaattttggttgttcacaatattattcattttgccccactttcactctatggtacaacaataggagccaaattgagccaaatctaatgctctgccgatggatggttttttatttgaaatttttggttgttcacaataattactcattttaccccactttcactctgtgctacaacaatagcaaccgaactgtgatacgaggttttggatcctttcttcaagcttcaacggcattctgatccactctttctttcttttctgctaacatggc

SEQ ID NO: 9496 - DNA, 512 bp, Glycine max
  unsure (1)..(512): unsure at all n locations
  Clone ID: jC-gmfl02220103b05a1
agacattccaaaccatggaaccattcacttcatatgtaactcctgggtttacaattcaaaacactacaagactgatcgcattttctttgccaacaatgtaagctacttagtgcctaccatgagaaccaaataagacaccacttgtatcaaaaattgaagttattaattatgtaatgcagacatatcttccaagcgagacaccggctccacttgtcaagtacagagaagaagaattgaagaatgtaagaggggatggaactggtgagcgcaaggaatgggataggatctatgattatgatgtctacaatgacttgggcgatccagataagggtgaaaagtatgcacgccccgttcttggaggttctgccttaccttaccctcgcagaggaagaaccggaagaggaaaaactagaaaagatcccaacagtgagaagcccagtgattntggttaccttccgagagatgaagcatttggtcacttgaagtcatcagattttctagcttatggaatc

SEQ ID NO: 9497 - DNA, 524 bp, Glycine max
  Clone ID: jC-gmfl02220103b05d1
aaaaagttcaaacctgcatgattgcatttattattttggtttccattacacaaacatggtttattaatgacaaatacaagtacattcagccactccaaatacataacttaaacatacacaactgatgaaggaatcagattccttctatttcacatttatttaaagccagggacagtacttcagcaaccatagagcccttagatagagatactgttgggaattcctctgaaagtcaatccctcctcactagaaggatagagcaaagtgtaaggcattttagccggcccatagcggtttctcaatgtctcattattgttcttctctataagcttcttttcaatctcttcaagattctttccaaacctcttaaaggcctctaatggcccggcatcagaagtccagtagtcaccgccatctctctgcccaaggtagaactcatcagatgcgtgccttgataaaatttctataattgtaaggtcaatgagggtctctttttgccagtaatagtcttcaaaaactccttc

SEQ ID NO: 9498 - DNA, 597 bp, Glycine max
  unsure (1)..(597): unsure at all n locations
  Clone ID: jC-gmfl02220103b06a1
tagactttgagtttttgggtaacttgagtggtgatccttacactctccacacgaacgtattcagccaagggaaagggaacagagaacaacagttccatctatggttcgaccccaccaaggacttccacacatactccgtccaatggaatcctgcaagcatcatattctctgtggacgggaccccaataagggagttcaagaatttggagacaaaaggggttccattcccaaagagccaacccatgagaatatactctagtctttggaacgctgaggattgggccacaaggggtgggcttgtgaaaacggattggagcaaggccccattcacagcctcatacagaaacttcaattcccaaacttcttgctccactggccaatcactggacgccacggggcaggcaaagatccgttgggtgcataagaattacatgatttacaattattgcactgatatcagacgtttccctcagggccttnctncagaatgctccattgcatgagaatatntagatcactgctgcatatcattataaaatgatcctcatgacgtgacacacatgtgttgcctatacgtaaattaccttctgggtaata

SEQ ID NO: 9499 - DNA, 440 bp, Glycine max
  Clone ID: jC-gmfl02220103b06d1
aaaaactccaacaattttattaatgaaaatactttacaatttcagcacatataccctgccatgaatataattttgcacgctataattatttttcgccacaaacaatggagtagtgctcaacaaagcacaaaccaacaataataacagttttagttgcattaatttacacaagaaagtaaattaacgttataggcaacacatgtgtgtcacgttcatgaggatcattttataatgatatgcaacattgaattaaatattctcatgcaatggagcattctggaggaaggccttgagggaaacgtctgatatcagggcaataattggaaatcatgtaattcttttgcacccaacggatctttgcctgccccgtggcgtccagtgattggccagtggaggaagaagtttgggaattgaagtttctgtatgaggctgtgaatggg

SEQ ID NO: 9500 - DNA, 512 bp, Glycine max
  unsure (1)..(512): unsure at all n locations
  Clone ID: jC-gmfl02220103b07a1
gaatgctgattctccaaaggcacctggctgccaggatcttggcaatatgggaaatacaaattcgtctggtcagaagcctgctctgcatggcgacatctcagagtctaagaaattgacaagtgacttgagagcaccttctgcaagtgctgttggagttgcacattcaaatgaaaagcttagaactgtgagttattctacgaagaaccaaaacggatttactctcccaaggatcttagatgaaagctcaggcagagaaggcaacaactgtgataacaataaggttaaaaggactagtaagggtgtcaaatctatcagtgctgaagtttctgggaaaggaaatgattttattaaagaagatgagccaattagtttattgcctcaaaagaggataaatgaagcttcttttactaaattaaaatcgagaaagaagacttgtgtnccgtcagcaaatggtaaatctcaaggataaaagtgacatctcacgttgatgagccanctgaagtcgatgacta

SEQ ID NO: 9501 - DNA, 504 bp, Glycine max
  Clone ID: jC-gmfl02220103b07d1
gaaatcagcattattttgttaattactaaggattgtacaaaattattattattattattacaactttaatctagggaccagggataatgttggcacaattcaggtatgttccctaaatgaaacgatgactgactcaaaagggggagggaatatgatattacgtacacttggatgaagataagacagtctttttccttttactgggtttgtttgagcagtttcgggtgctactgcactttgggcaaaaccaatcctcctcagggacagctgttagtggaggatcgcagcaatcgatatgggtaccgattccacacccgacggaaccactttcatcaccacaaatcagcattacatctcctctatcccgggatccacatactttgcaaattatatcatcatcacgggaatcttcaggagcaacgagttcttcaacaatctcttctgccttgcttttaagtttatcaaatgatttctctgcccagcatgactgccatataatacatg

SEQ ID NO: 9502 - DNA, 523 bp, Glycine max
  unsure (1)..(523): unsure at all n locations
  Clone ID: jC-gmfl02220103b08a1
gaaaaccctagtgagcatgaggctatgcgaaaaatgaaaaatgagtttatggtaaattgggatggtctgcgtacaaaagataaagagcgtgtacttgttcttgctgctacaaacaggccttttgatcttgatgaggctgttattaggaggcttcctcgacgattaatggttaatttgccagatgctccaaacagagaaaaaattctcagtgtcattttggcgaaagaagatttggcacctgacattgattttgaagcaatagctaatatgacagatggatattctgggagtgacttaaagaatctgtgtgtcacagcagctcactgtccaatacgagagatcttggagaaggaaaagaaggagagaagcttagcattgtctgagaacaaacctttacctgagttgtgtagcagcggtgacattcgtccctaaagatggatgattntagatatgcacatgagcaggtggtgtgcagtgtgtcatcagagtcaacaaatatgaatgagctactcccatggaatga

SEQ ID NO: 9503 - DNA, 356 bp, Glycine max
  Clone ID: jC-gmfl02220103b08d1
ataatatcataaaaaatttaatgtacaatttttggaaaaaaaaaaaaaataaagggaaaaactgaactggaggggggggggggaaaacgccaagggaataaaccaaaaacataattaaaacaagccggggcggggcgggcccaaaagcaaaccacgaaaagcctacgaagcgggggggggggctttaagagggggaaacaaaaaccacaggccatcatgttcaggggaaaccaaaggggataagcaaccttaacctaacatgggggccttccaaacgtgcgaaactgggggggggggaagggaaccaaagggcaggaaaacaaccccgaaaagggcttgagaggggcaaatccggg

SEQ ID NO: 9504 - DNA, 300 bp, Glycine max
  Clone ID: jC-gmfl02220103b09a1
ctttcgtgtacccatcggactttacttaacttattcttctccaatcaacagtagaggtactgtcctacttattttgcggggtctctcctgaaaaacacaaaacagagagagcgagagagtgagacaatgaaccccataaattagaagggtgagcacctaacagacccataccacccaggctttctcttgttgctctttcgacgagccagaccctctcaaatacttgatcccactctttatctaggccccatactacctaaacgatgagatcccacgagacaaatgctgagacactctacc

SEQ ID NO: 9505 - DNA, 320 bp, Glycine max
  Clone ID: jC-gmfl02220103b10a1
caacactggtatgagcatgctcttatgcagagaggggcctgagttataaaaagggggggacaggctaacatggctctctcatccccatcctggggtggcagggaacagcaatctggccccaacaaccccagcagcgggctgggtgagcatgaggaaaaccgcacccaagcaggtctccccaggatccccagggtacgagggcataccgaatgaggtactcggacccattctgtggcggcgcgcgtcctgcctctgcggtgagttgccatgcgactaccggtgtgacactggtgtgttctaatgacacccactcaccttcc

SEQ ID NO: 9506 - DNA, 521 bp, Glycine max
  unsure (1)..(521): unsure at all n locations
  Clone ID: jC-gmfl02220103b10d1
agtantttcggacgttagcagtgccgatttatttttatttcgacgagcccaatctcactaggccgcggccgccctttttttttttttttttttcatttccaaacacactatctcgtgtatattaaattggggtgtgccaaaattttgcctacaataaaaccacaagtgaaaccaggaatataaacaaactttcactggttttttcgagggttccctctcgatcactgtgaaaacactaggcaccgcatcagcatgatatatccctccaagggaacactgtgaaaaacaacggtctaaacggttaaacccggcccgaatccgaatagcaccccccactctaacccttctccagtggtactcttcccttcctcctaagagttattcctcatcccatccagaatgaacaaaacacacgcgcttgacatgtttccgcactcactcaccacatgccgggtggactggaacttctccggattgagccggagcttttccttgacttgatcgaggatcgcgggaccacc

SEQ ID NO: 9507 - DNA, 499 bp, Glycine max
  unsure (1)..(499): unsure at all n locations
  Clone ID: jC-gmfl02220103b11a1
ggaaaacggcttccatgtccctgagcatatgttccacaaactcatctcagccatcacttaatctcaccatagcaaaaaatcatcaccaatcctcaagaatctcattagccattgtggcagacttcaatattcccatctctctttggacctctagacctttcaaacctagcaccaaaaccatgaggttaaatgatgatgaaaccctttccaatctccttgttaatttcatagaagagatccttcattatggctccaacaagcacagtattattccctatatcaagttccccaaacttgattctgtttccaacttccaagacattttcaaccttgcttttctcaccctcttgttcctagtttgcatatatgaagccccttctgatcttcgttctggttgccttagcactttgaaagaacaattggcagggtgtcaatcaaggcaagcatcaaaatttctgatgaaactctngggttccaacctggaagagcagtggatgcg

SEQ ID NO: 9508 - DNA, 468 bp, Glycine max
  Clone ID: jC-gmfl02220103b11d1
acaatcagtcattaaaattaaattcccatggaaatgatcgggtgtttgtgaaaaatgaaaacagaccaataatttcactccgttatcatttcctttaaaattataattaaccacatgttcaataaaacgaagaaaaaaaatacatatttgtgatataataaattggtttctatggtccaaatcaaagttgattgatatattcctatgcgtgactcctaagctatgcaattttgaggtagaccgtttccctgaactcgaacctcctggtttcatggtagaaggtcttgtgcttgttaggccaatacgttatccatatccaaccccttatctcccactccattgtcttccccacagcacctttgtccactttccaacacacactttctccatactcatcaccagcaaagataacccctccttgcctcgtgaaaggacgataagcacttgagtacctgtctttgaaccatg

SEQ ID NO: 9509 - DNA, 400 bp, Glycine max
  Clone ID: jC-gmfl02220103b12a1
cgaccgtcaagagtcagaccatattgccctgccgcgccgggagctcggatcgagaatgaaccgggtctggtacctttaatttctgtcgagacttcattaattgatactggtgctggtggtgcgtgtataattgaaggcgcgccacaatacgacccggcatacgatgacttggtagccttctgcaaccgaatggtgtagcgggagcaacctctacatgccatatgggtgtaccgcgtagcagagcgtacattcctggggtttggtgtgcattttggacaccagtgcttccacagtattccctaacaaacggtggacagagtactaccggtgcattattggatcatatagttgaggaccatgctgtttctgcatgcctgagacatcaagctggcttgccaaa

SEQ ID NO: 9510 - DNA, 412 bp, Glycine max
  Clone ID: jC-gmfl02220103b12d1
ttttcctttttttttgaagaatgaaaaactctataccactgtggaattaaccatgcggggggggaggcacattacattcattgatgatgactaataaagcttgaatgaaccagagaagatgaggactcaatgatgaaggagtaaaactgagaaatgaccactgatgcgcaagagaggagaggagacactcatggaatacatacatggtacttaacaaaaagaaaaagtatacgtacctacgcatatgggatacaaaatacacccttggtcaccagcatgcttgtctacaatgcgatgcatgcgcccatgggatgagtcttatgtcccaaagaccctcgacaactgagattgatgagaggaaaagacgaacaagcctaaattagggaactgctgatacatatctctcagactt

SEQ ID NO: 9511 - DNA, 590 bp, Glycine max
  unsure (1)..(590): unsure at all n locations
  Clone ID: jC-gmfl02220103c01a1
cacagattcccctctttcgaatttcgatactttgatcagatccacaacacttcttcatccatgacgcttggttcttcaggatccagtgtcgtggttccaaggaacttcagattgctggaggagcttgagaaggggagaaaaaggaataggagatggcacagttagttatggaatggatgatggcgatgacatttacatgcgctcttggactggaaccattattggtccctataatactgtacatgaaggaagaatttatcaattgaagctgttttgtgataaagactaccctgaaaagcccccgagcgtccggtttcattcacggatcaatatgacttgtgttaatcatgaaactggagtggttgaatcaaagaaatttggtcttcttgcaaattggcaacagaggtttaccatggaagatatactgacccagctgaagaaggaaatggcggcttcacataaccgcangcttgtccaaccttctgaaggtactcactattagtgtccaagatcacactgatattgatcatattgcatttgagtatgcattatatagatgtaatactctgatccttctaaatcagacatac

SEQ ID NO: 9512 - DNA, 540 bp, Glycine max
  unsure (1)..(540): unsure at all n locations
  Clone ID: jC-gmfl02220103c01d1
ataataagaaaagaacgctactttaagagttgctttcaatatttaggaccaatcagagagcatcccttcaacaaagttgacaatgtattgcaacaaaactctatggaggtaaagatgaagctctttcgagcattccccagtatgttcttgaatttagaaggatccagagtattacatactatatattgcatactgcaaatgcaatatgatccaatatcagtgtgatcttggacactaatagtgagtaccttcaggaggttggacaagcttgcggttatgtgaagccgccatttccttcttcagctgggtcagtatatcttccatggtaaacctctgttgccaatttgcaagaagaccaaatttctttgattcaaccactccagtttcatgattaacacaagtcatattgatccgtgaatgaaaccggacgctcggaggctattcagggtagtctttatcacaaaacagcttcaatggataaattcttccttcatgtacagnattatagggaccaataatggctccagtccaagagcgcat

SEQ ID NO: 9513 - DNA, 551 bp, Glycine max
  Clone ID: jC-gmfl02220103c02a1
cggctcgaggagaaatagagagagaacttcaagtgagggtgagagtgacacaaatctagagagagcactagtactctaaaagtctattatattcttcaaaatatgaccatgcatcgcgagtcttgggcttttgtcttcggcgttatgggcaacatcatctcctttggagtgttccttgctccattgccaaccttttaccaaatctacaagaagaaatccactgaaggtttccagtcacttccttatgttgttgcactgttcagtgcaatgctttggatttactatgctttcgtgaaaagggaaactgccctccttctcattaccattaacacatttggaattgttgcggagtcaatttacctttctatcttcctaatttatgccccaaggaagccaaggcttacaaccatcaagcttcttctcttacgaatgtgtttggattcggggccatgcttctatcaactctctacctgtcaaagggagcatagcgtcttgctatcataggatggatctgccttgctttcaacatcagtgctttgctgcacctctct

SEQ ID NO: 9514 - DNA, 413 bp, Glycine max
  Clone ID: jC-gmfl02220103c02d1
actaaaataattaattttcattactcgaacattaattacgtatacaagggaaaagtgaattaaaatgagtttgactgggggatacactgagaaaagagaatatactacgttacacgtagtagtacaatatgagagtgatatgggccaaattagagaggctaattcttgcgcccaacagttacagctacccgaacaggcaaatttaaaccacacctttacattaatcaaacgaaacacttataccaaagactacgtactattcttgcattgtagatatgagcgatattagatgtgacctcactcagtaaagtaattgaacgtttaattaggttattttctttgtttaacttttcttggcattgatcccttgtttctccacattcatataatctcaatgacgaaatcatatcaga

SEQ ID NO: 9515 - DNA, 515 bp, Glycine max
  Clone ID: jC-gmfl02220103c03a1
agtgctgaagccctaaaacaaagtattggtggaatgagcagtgagaaacagcccttgttgagcaaatggagagccttctttcgaaaatcacctctagaagatgtggtagtagttaagaataatgtttacgataaagggttcttccacaatattcaggaggttatttcccctttctctacaaggcggtcctttacacaaaacaaattgaagtccagctgaatatgctcctaacatacgtgtctttctagtgggtagtgggtctatgcatttctttagattacccaataaatcatcgtgaaaaccagaaaaatgatatattaaattctatttttaaattagagttctagactagatgtagagtgaaaattgattgtttgttagccccttgtgtctctttttttttgggttggttttgatgtattattccctattagaaaaaaacagaaagataccagtagaggaaccaggagtatatcacccaagatatattttctttgcaatattgatccccaagc

SEQ ID NO: 9516 - DNA, 378 bp, Glycine max
  Clone ID: jC-gmfl02220103c03d1
atctgctaaacaagttggcatgttttgaaatttgctcgttgatgtgaattgtaaataggtttgcttggggatcaatattgcaaagaaaatatatcttgggtgatatactcctggttcctctactggtatctttctgtttttttctaatagggaataatacatcaaaaccaacccaaaaaaaaagagacacaagggggctaacaaacaatcaattttcactctacatctagtctagaactctaatttaaaaatagaatttaatatatcatttttctggttttcacgatgatttattgggtaatctaaagaaatgcatagacccactacccactagaaagacacgtatgctatgagcatattcagctggacttcaatttg

SEQ ID NO: 9517 - DNA, 441 bp, Glycine max
  Clone ID: jC-gmfl02220103c04a1
gccgccagcgcctatgcctgcagcgaggccaatttccccagccgctggccgccgttctggcggacggaggagctcgccctcctagatatcgatttcttcgccagagtcatcgacgccatgaaagcatcgcagctccaaaggctcttaccgacgtcgctgcgctcatcacctacacggagcgcgccctacgagatctcgtccgtgaccacaccggcaacggaatccggtcctcagatctcggcgattccgattccagatccaaacagcggaagcttctggaagcaatcgtggatcagttcccctcggagaaagccgcgtttccgatccacttcctctgctgcctcctccgatgcgcgatctacctacgtgcctacgccggctgcaaaaccgagctcgagaagcgaatttcagcgatcctcgagcacgttaccgtcgacaacc

SEQ ID NO: 9518 - DNA, 435 bp, Glycine max
  Clone ID: jC-gmfl02220103c04d1
tcaaactttttagttatattgttttttttttttgagagagggaaaaggttttttccggggaacgtttacacagtgttttaaacaattcccctaccccctttgatgagaagatcgcaagaattagagcggagcccttttttttgaaccttggctttattcatgttcaccaacaagaggcacgtagccgtgaaaaccctaagaattctgcacattctctacacaaattgttttctcccctcaacccgaaaatggttatttttgaacccggggtgtacctcccaaaagaaatatgctcagagattaaggggattcaaattttggctaagacacagagaaccttcttctttggggcttggttaaattcacgttcccattttccaaatgggtttttttcttcgacccgtgttttaacggggttatcttccccaggggttt

SEQ ID NO: 9519 - DNA, 477 bp, Glycine max
  Clone ID: jC-gmfl02220103c05a1
aactcgacgcgccacccaccagccagaaaatgcttggtgtgattgcttgggtcttctcttggtgggtgacgcaggccgtgccacttcccgtcacctccatgtgtcctctgtttctgttcccaatttttgggatagcttcagctgatagcgtggcgcactcttacatggacgacgtcatcaccctcgttttgggaagcttcattctcgctctcgccgtcgaacgctacaacgttcaccggagattggccttgaatgtaacactgctgttttgtggcgacccggtgaatccagcgctgttactgttagggctatgcgcgacaatattcttcgtgagcatgtggctgcacaacgtggcgacggcggtgatgatgatgccggtggcgatgggatcgtgcagcggctgccgcaggcgcacgagcagtcggaggcggtgaacaaattctgccgcgcggtgattcaacggtggtttacgccacg

SEQ ID NO: 9520 - DNA, 509 bp, Glycine max
  unsure (1)..(509): unsure at all n locations
  Clone ID: jC-gmfl02220103c05d1
acacaataaaaaaaatcaattccgttcatctattactggtttaaagatttacaacagctggaaattcatcctatacttaataattgtatctatataatataaccctgtaaaaaacttataaacaaattaacaaagaaatacaaaatagaagcaagaaagaaagagatggagatctttctctccttctcctttgccctgttgatatctacacagggtattccccattacctaaatatagcagaaggccctgcacatttaaattttcattaacctcctagacaaacaagattctgcaatttggagaagaaatcaatcaatttccaaaccaacgagagttttccttggtcaatgtcccttattgagtatcattgtttgttccaaaaacaatagttcctagtgatggcatgagaagagataacacaacaatcccaacaaccttgagtggcacgccaactttgagcatgtctttaatttctatgtgtccagnggcaaagccaactacatttgat

SEQ ID NO: 9521 - DNA, 443 bp, Glycine max
  unsure (1)..(443): unsure at all n locations
  Clone ID: jC-gmfl02220103c06a1
aagcaactgtgcaggtcgtggatttgcaagttttccttttgcctcgtattacttcgaagcctttggttcctagctatccttgctttgcgaacatatacgtctctctcatggaaaagccacatgttgactttgggcctaagctcataggggctgatcttatgtctattccgggggtctataggattgctcaggagcttattaaagatcaggctgccaacatgtatctatggcccaaaaccttggaagttcaagtgttagatatgtcacaagccttgaagaggcctgttggtattttacatgtaacggttctgcaagcaattaagtcaaagaagaatgatcttcttggtgcatctgaccgttatgtgaagctaaaagctactgaggatcaattgccatcgaanagactactggtgagcacacgagctcaaatctgaatgaatgaa

SEQ ID NO: 9522 - DNA, 484 bp, Glycine max
  Clone ID: jC-gmfl02220103c06d1
aatccaaaccaaatcatatctatgcttttggtatttcaaacctttttatctcaaacatgtacatgattgacaaataaaaccaatatatatcccaggaacacatgaaatacccttctcaccttttccttacactgcatggaaaacaaatttttaaaaaggaaagaaggggagaaagaaacagaagtacaaatctatggagaatttaatcatcatgcttccaaggttctccactgcaactctatctggaggcgaccattcttggagtctataagatggtacttctcattgattcttttgttggcaacaacatccccaagattgatgtcgatataacccaatggttccttttggtggagcaggtttcttgatgaagtactgacaacctccacatgcaatctatcattggtgggaggctcctccaccataaattggaactcatcttcccatcttggatctctgttctttttaatgcgcctagtttttt

SEQ ID NO: 9523 - DNA, 180 bp, Glycine max
  Clone ID: jC-gmfl02220103c07a1
cgataatacatcagagctacgacgtcgcatgtacgcgttcgtcacgctacgtaatgctgggtagagcctctcgcgtagtcacacaagtctatggttcctaagacgcttacgactatcattctggcactgaggatagctcacacgcgcagacgcactgacgatcacatcatccgagactaa

SEQ ID NO: 9524 - DNA, 507 bp, Glycine max
  Clone ID: jC-gmfl02220103c07d1
ctggactacaggcgttcagaagtttggattgatttctgccgtaccctatgtctcactattgcaggtcgctcgccctttttcaatatataatttttttttttacgaaagcatattacttagagaataggaaggggattggccctagaacccttccccaaaaagaaaaatggaaagagagaaacatatactatattcaatcattttggggtaatacattttaattttcttccctaaactgatcatttctttagtaaagacaccatagtaaattgcatagctttacttattgctcatcttcagttttaacttattgtgcacacatcactcggttcgtgcttttacatacagctctcgcttgtgttctgaattaccctcaggcagcgagtaacttctggatttccttttcaatttgaaaaggagacgcttgtggtgggtatttttcaataactttaccatttttgtaaaccaaaaatttttcaaaataccacttataagatcacccaaaaa

SEQ ID NO: 9525 - DNA, 512 bp, Glycine max
  unsure (1)..(512): unsure at all n locations
  Clone ID: jC-gmfl02220103c08a1
agaaatttaagtgaggagctagagaatgatgatgaagtctgctatgtgtgcagtggtggttgtagcacttcttcttctggcggaggtggggcccatggctgaggctgtgacatgcaccccaacagagttgagtccgtgtcttccagcaatcacttccggtgctaaaccttccaatgcttgttgcacgaagctgaagcagcaaaaaccatgcttatgtggctacctcaaaaacgctagcttgaagcagtatgttaactctcctaatgcccgaaaaaccgttgcttcttgtgggattccctttccaacttgttaattaattaagccttcttataattaaagtgtgggatatatatatatatatagataaacagtttaatttatacancactttgatcctacaaagcatcttgacacaagcattcaataggatttcaccactttatcgcaacattntaacatgatgcgggtataaagtaaattcttggtgaatattttgataacgatgttatata

SEQ ID NO: 9526 - DNA, 418 bp, Glycine max
  Clone ID: jC-gmfl02220103c08d1
ataccccactctagaacatcattatttatttatttatttatttatttatagctcttaacacatataattccctggatacaacatgtatactggtcatattcaactctagagagctttatctgatatgatcatccttaacatattcaaagatagctaaatacttaactgtttaatatatcacacaaacgttgagggacctatatagagtaaataataaatataagtttaatttatacacccaaactatgagtatataacatcgttatccaaatattcaacaagaatttactttattaccgcatcatgttaaaatgttgcgataaaggggggaaatcctattgaatgcttgtgtcaagatgctttgtaggatcaaagtgtgtataaattaaactgtttatctatatatatatatatatcc

SEQ ID NO: 9527 - DNA, 332 bp, Glycine max
  unsure (1)..(332): unsure at all n locations
  Clone ID: jC-gmfl02220103c09a1
accttgttgggctctttgaagtctctttttattgtgccattcacgcctatcgtgtgactgtggtgcccaaggatattcaactggcaagaaggattcttggcgagcgggcttgagttggagaatcctgtgttagtgaagatggattgttggtgggtgctgatggtagttcgtactaagatttttttttgaggaaaccgatttgctataagatccttcaacgtgtttacttggcagtcctattaattgacattggtatcaactgcctacatacacttngaaggcctggttgatagaaatttgccatgtgtgttgattttatggatcctttattt

SEQ ID NO: 9528 - DNA, 425 bp, Glycine max
  Clone ID: jC-gmfl02220103c09d1
tcgtccttttttttttttttttttttttttttttttttttttttttttttttttagggggaagggtttttttccttaacccggacgggcagacgcgggtgattggggtccacatgccttaaaaaaaaggggaaccggccccttttataaaaaaagttcctaccaaaagagcgccgtaagatcccatccacatacaaattttccaggctttcctccaatggtgccctccccccttttttttttaaacatccccggccacgagggccccgttggtgagttccctttaggcagggacgggccaactgaaacccctgaaaagcaagcgagaatcccaaggaacactcgggaggatcccctctctggggggaaagttttcattccttatctcaaagggggggctccgacccacccaggcgttccattccc

SEQ ID NO: 9529 - DNA, 471 bp, Glycine max
  unsure (1)..(471): unsure at all n locations
  Clone ID: jC-gmfl02220103c10a1
aggaattgaagctcggggtttcatttttggttctcccattgcactggcaataggagcaaagtttgtaccattgaggaaaccgaaaaaattgcctggcaaagttatttctcaagagtatattctggaatatggaagagactgtcttgagatgcatgttggagctgttgaacctggtgagcgtgctttagttgttgatgatttgattgcaactggaggaacactctgtgcagctatggacttactagagcgagtgggagcagaggtagtggagtgcggatgtgtaattgaattgccagaattaaagggccgtgaacggttgaacgggaagcccttgcatgtgttagtggaatgttttgagtgctgtgaatagatgaagatgtaaatgggggagatgcgtcaccaccaagtgggtactttcctatatggaaatnctctgcttncttcttttaacgattaatgaaatagaaagac

SEQ ID NO: 9530 - DNA, 262 bp, Glycine max
  Clone ID: jC-gmfl02220103c10d1
attcaaaggttgggttttatttgaaataaaagggggggcaagccaagagaggatacaccaaagggggcatacaaagccaaaaaactaaagtgtaattgtttctagttccaaatacaattatattgccccaaaaaggattcttttcaaaaaaaaatcccggggcaaagccattcatcgaatcaaaattggggaaggccccccctttcactcccctttaaataggaagaaaccaatgattttcatccacgaaagtacccccttg

SEQ ID NO: 9531 - DNA, 515 bp, Glycine max
  Clone ID: jC-gmfl02220103c11a1
gcattgcgtctcaccagatccttggaaatgaaagcctctcagcttctagatgcaatacctaaaccatttttgtctcttcatcttcgttttgagccagacatggttgcttacagccagtgtgagtacccggacctgtctcctgcttccattaaagccatagaagcagcacaagtggacagaaaaccatggactggagagttagcccgtgtttggagactacgtgggaaatgcccacttacacctaacgagacagctttaatacttcaatctctttccatcccactaacgacaaatatatacctggcagctggagatggtttgatggaaatcgaagggttgatagatacctatgccaacatagttactaaatcaagtcttctcagtagagaagacttcacaagcatgcatggcaacacaaaagctgctttggattattatgtatctataacagtgattcatatatagccacatattttgggaatatggattagatggtttcaagcatgagagctttc

SEQ ID NO: 9532 - DNA, 431 bp, Glycine max
  Clone ID: jC-gmfl02220103c11d1
cggccaaaaatttcattagggatagtaaaaagcatcccattcaatacaaaataataaaaaagctgacagaagctaaggggggacaaagcaaaattaaattaatattgtcaaaactacaaaaacgatgaatccgagatccaaaatcacaacttgaattcgcaaaaaccctcagacagagcagagccttttccctttgcaaaatcatttttgggaagcttccatagggcttgcttaaactcctttccattaaaaccctggggggttaattgtgcaaaacctcttctgctaaaaaatagagtcttggacaaaccattgaaagctctcattggtgaaaccattttatccatattcccaaaatatggggctatatatgaatcactgttaatagatacataataatccaaagcagcttttgtgttgccatgcatgct

SEQ ID NO: 9533 - DNA, 85 bp, Glycine max
  Clone ID: jC-gmfl02220103c12a1
tatcaggcttctggtatctccttctattctctagcaagcggtacattgacaaacattgagggccctgtcctatattagctcaacg

SEQ ID NO: 9534 - DNA, 568 bp, Glycine max
  unsure (1)..(568): unsure at all n locations
  Clone ID: jC-gmfl02220103d01a1
catatatatatatatatatatatatataacacaaactattagcatagcattatagtaggagttgcataatattttcttttatgaaaatggcgcgtggcaagaatctgttcctccaaattctgtggtgtttttccttgatcggtcttagttcccaagcacagaattacacttttgttgtgagagaggccaagtatacaagactctgctccacaaaaagcatattgactgtgaatggagaatttcccggaccaactattagagccaacagaggagacacaatttttatagatgtttacaacaagggcaacttcaatattactttacactggcatggggtgaagcagccaaggaatccatggacagatggcccttcatacatcactcagtgcccaatccaacctggaaggaaattcacacagaggttgatttttactttcgaggaagggaccatatggtggcatgctcatagtgaatggttaagagccactgtctatggtgctatccacatatatccanataagaataatccctaccctttttcccacccgatgcagagattcccatcata

SEQ ID NO: 9535 - DNA, 371 bp, Glycine max
  Clone ID: jC-gmfl02220103d01d1
aaaggaaaatttaatgttataaatctccgatgttgatggacaaaccccgcagtgcaggtgccaaaaataataaaagaacaaaatcatgacaaatcaaagcacacggagaacttttgtctctaaatttgcaatacacgccttcctgaaagaaacgaaaaaggtaaaacaaatgtgtaacttattgttttcaaagttcactgaatagggaaaatccagaatttaattttcttcaacatgggggcatgtctggcggtggtggtggcaatcttagattttcagactctccatccttcacaataaaaactgtctccataccccaagattggtggcgttctatatggcagtgcataaaccatactccagggtttaca

SEQ ID NO: 9536 - DNA, 560 bp, Glycine max
  unsure (1)..(560): unsure at all n locations
  Clone ID: jC-gmfl02220103d02a1
cggctcgagacttcaggtcctttgggcccatctgaaaaggttcactcacttccctatgttgatccaaggcaaccagttccagtaagaattgtggacccatcaaaggacttgaattcttatggtctgggaaatgttgactggaaagaaagggttgaaggttggaagctcaagcaggagaaaaatatggtgcaaatgactggtagatacactgaagggaaaggtggagatgttgaaggaactggttctaatggagaagaacttcaaatggtagatgatgctcgacaacctatgagtcgtgttgtgccaattccttcatctcagctgacaccttatcgtgttgttatcatcctccggttgattattcttggtttcttcttacatattcgtgtaactcaccctgtgaaagatgcatacnccatgtggttgacattcagtatttgtgagatttggtttgccttatcctggctcttggatcagtttccaaaatggtctcccattatcgtgagacttatcttgaacgacttgctttaaggtatgacgtgaaggagaacccatcacag

SEQ ID NO: 9537 - DNA, 392 bp, Glycine max
  Clone ID: jC-gmfl02220103d02d1
aaagaacaaaacacaggaccttgttggctttcattaaatattcgcataaacaaatttatattcagtgggaaaaaaatataacatacacctcaacatgactgattattcttgtaaggaacatgttgataaataaatataaataatagaaacagagagggtaacattcccatctatttcaggggttcaatcctccagacaaccttgataggctgaaaattcttgctatatacacgacagcaaccttgtcatgaatcttacaagagaactaacagttgataccacattgaccattggttaatttgttggagtcagaggtgaagggatcaatcctcacccacagcaaggagaatattgaagcaagaagaacggaccaaacaataacaatggttggg

SEQ ID NO: 9538 - DNA, 526 bp, Glycine max
  Clone ID: jC-gmfl02220103d03a1
gttgaaaaagcataacgaaggtggtttgtttttccgtcttaatcaaaatcgcgaatcgaattggattggatacaaccctatataagcattcaacacctcacctgcgctgcgtgttgtcgtttggcttgctttcctcaccgaacgaaagtaacttaacccgcaaactccaaaataccctctctctctctctctctctcaccaaccactatgttgcagagacctagacgccgttgcgagggcactgccatgggcgccatcgttctcgatctccgtcccggtctcggaatcggacccttctccctcgggatgcctatatgtgaagcatttgctcagatagagcagcaacccaacttatacgatgtggtgcatgtgaagtattttgatgaggaacccctgaagttggatattgctattagctttcctgatcatggattccatcttcgtttcgatccgtggtctcagagactgcggcttattgaaatatttgatgtaaagcgacttcagatgcgctattctacttccttga

SEQ ID NO: 9539 - DNA, 353 bp, Glycine max
  Clone ID: jC-gmfl02220103d03d1
aaagcaaaaggaatttattgcattttctttgtggaagatgaaaatgttagaaaattacataatttaacaggatttttatgtacaatttgttacacagctgtacaattttcatagccccttgccacgacaatgatgatgatggatagctgcaatatttatacacagtgcccgtacaaccctacctgttacccctgaatttccatacacaaccttgggaaatcttggaacaatatggagaagattgagtaaccaaaagcgccatcatcatgattggaagagagttattgatgcaatataaccattcttcatgacctcaaaggcaatattttgactaccatatacaagagtagaac

SEQ ID NO: 9540 - DNA, 519 bp, Glycine max
  Clone ID: jC-gmfl02220103d04a1
gctaatgtggcttgtaaaagtgtgagaatgagaggtaaggataggccttcaatggacaaagtgacaacagttttggagagagcacttgcacagttaatggggagcccttgtattgagcagccaattttgcccactgaggtggttttgggaagtaacagattgcacaagaaatcatcttcaaacaggtcagcctcagaaagcactgatgtggaggatcagaggtttgagtttagagcaccatcatggatcactttccccagtgtcacttcttctcaaagaagatcgggctcggaggccgaagtcgaggggaaaaatgcagaaggaaggaatttgagcaatgttgacgacgtgtggctgtttgcagaagtcttgatgaagagattggtcttgcctctcctcgagagagattgttcttggcacacaacttttaaccgtgggaaatttgaaggaagcagatggtattagtaaattctggtctgctttgcttaactgatgagtttcatcatgcatggatgcaac

SEQ ID NO: 9541 - DNA, 380 bp, Glycine max
  unsure (1)..(380): unsure at all n locations
  Clone ID: jC-gmfl02220103d04d1
gggacccgggggaaaaacccccccccccaaaaaaagggggggggggccccccccccccacagggggtcccttggaaaaaaaaaaaaaaacccccccccaaaaaaaatgaaaaccaccccccggggaaaagggaaccaaaaaaagggggaggggcccccccgcggggggaaaaccccccatagaaacaaagggaaaaaaaatttacaaaaccccccggggggcccaaaaaaaccccaaaaaaaaaagggggggggaaaaaaaacccttctgggggggggggaaaaaaaaattttttaaaaagatgtacaaaaaacccccccccccccncaaaaaggggaaaaggccctcccttgggattttccccccacaatttggccccc

SEQ ID NO: 9542 - DNA, 455 bp, Glycine max
  unsure (1)..(455): unsure at all n locations
  Clone ID: jC-gmfl02220103d05a1
cacgctctgatcttcatgaatctaggaacctgcgccgcgggtgcaccgtaccgttgggtgcaccttctccctcacgaaggaaagagaagatgtgcgagtgtgagagtgagagcgaatgcgagtgttggaagaggaaaaggagatggcgaaacggcgtcgtatttggacatgtggaagaaggcggtggagagagagaggaagagcgcgagcttcaactcaatagcggaccgcgtggcggcaaatactgatgacaacaacgacgacgatctggagaagaagaccagtgagttccagaagctcctccaagtctccgccgaagagcgcgacagggtgcagcgcatgcatggtcatcgatcgcgccgccgacgncatcgccgncgccaggcaactccttcaggaacgcagtgccgncgattccagccaccacgaagccaccgtcgacgaccgacgtgacg

SEQ ID NO: 9543 - DNA, 481 bp, Glycine max
  Clone ID: jC-gmfl02220103d05d1
ggaacgaaatatatgtatattttgctgttgtatgggaaacaatgaacattttattcagtccttaaaggcttaaagtactagaagagcttaaaaatgatcatcatacaagttggcgtattaccatactaaagacgatgggggtttgtaataaggttcctatttattttttataaggtttgagcaaatcaaggttcctgaacttgctgtatttccagtatttcagatggtttgggaacttccctgagctggacggagttttcgaagcaattgaagaaaccataatgggggaatttctcataccaggtttcttctcttgcgtgtgtgtcccagtgttccccaaaactgctctggccgtacttgtgaatccaaccagagccattgtgttgctcaccccaagttcggttccagcggtcgccatgcctaccttcccaccagattttcccctgcttcacaccattagcatttggatcaaaatttttat

SEQ ID NO: 9544 - DNA, 361 bp, Glycine max
  Clone ID: jC-gmfl02220103d06a1
cacgctctgatcttcatgaatctaggaacctgcgccgcgggtgcaccgtaccgttgggtgcaccttctccctcacgaaggaaagagaagatgtgcgagtgtgagagtgagagcgaatgcgagtgttggaagaggaaaaggagatggcgaaacggcgtcgtatttggacatgtggaagaaggcggtggagagagagaggaagagcgcgagcttcaactcaatagcggaccgcgtggcggcaaatactgatgacaacaacgacgacgatctggagaagaagaccagtgagttccagaagctcctgcaagtctccgccgaagagcgcgacagggtgcagcgcatgcagggtcatcgatcgcgcc

SEQ ID NO: 9545 - DNA, 367 bp, Glycine max
  Clone ID: jC-gmfl02220103d06d1
ggaacgaaatatatgtttatttggctgttgaatgggaaacaatgaacattttattcaggccttaaagggttaaagtactagaagagctttgaaatgatcataatgcaagttggcgtttttccatcctaaagacgatggagggatgtaatagggctcctttatcttttttatagggcttgagcaaattaaggttcctgagcttgctgtgttgccaccttttgagagggtttgggaacttccctgaactggacggtgttttcgtggggattgaacaatccatagtgagggaatttttgataccaggcattttattttgcgtgagtgccccagagggccccacaactgttctggccgtacttgtgaatcc

SEQ ID NO: 9546 - DNA, 469 bp, Glycine max
  unsure (1)..(469): unsure at all n locations
  Clone ID: jC-gmfl02220103d07a1
cgagaggtacttactcacagatatattttttttttttgtctccatcattttctcgagagctttcagtttgtgtggttcatctttcttcttctccttccctcccccctctgtaacaccccgcttctctgaatcccctttctgttaatcatctgtctttcaagctaagattttcgggtttgtctattaattcaccaagaagcaaacttagaaggatttttcgaaagccaggtgttttcagaaacgagatccaggttttattgtcgaatttcgctagtcaaattaattttcataattatttttttctttgaaaccagccagagggttatttttgatccctaaagctaatttctctctctctttttttatttccgggactgaagangtatgcctatttgaaatctccttcatcctttcctttcttgtagaaaactttctaaattgttttgtcagtgggtgttttaattaacca

SEQ ID NO: 9547 - DNA, 448 bp, Glycine max
  Clone ID: jC-gmfl02220103d07d1
agtagaataatatattttataagatgatgaaattgaagtagattacagcgatgcacttgaaaaacatattaagcggactaattctccctggtcaagcaagaaaaaaaccagctgtgagcaaggtagagagattatacacagaatagtactagccctgcaattgccaaaaactccattgcagtagcagccacctaagagacactaagacctagactagaccatacataataggacacttcacagagaatcccaatcgatctcataagaggggtacttctggagattataattatccgaatcaccttcccactgagcctcgctcacgtcagcaaacgtcagatccgaaagcggcgaagaaccttccgacgaccaggacgcagcttccaccttacaagagttgttgttctccttgtcggaaacaaccttctccgcgagtttggaacgcgac

SEQ ID NO: 9548 - DNA, 483 bp, Glycine max
  Clone ID: jC-gmfl02220103d08a1
tgacgaaggagaaagaacttgtcctctctgtgctgaagagatggatttgacagatcagcaattgaagccttgcaaatgcggttatgagatctgtgtctggtgctggcaccacataatggacatggctgagaaggatgacactgaggggcgatgcccagcatgtcgatctccttatgataaggaaaagattgttgggacagctgcaaactgtgacagattggtgaatggagttaatattgagaaaaggatgaagactcagaaaacgaagtctaaatcaactgatgggcgtaagcaactcagcagtgtgcgagtgattcagaggaaccttgtttacatagttgggttgcctctcaatcttgcagatgaagatcttcttcagcgaagagagtattttagtcagtatgggaaggtcttaaaagtgtcaatgtctcgaacagcagctggtgccattcaacagtttccgaatgatacctgcagtgtata

SEQ ID NO: 9549 - DNA, 437 bp, Glycine max
  Clone ID: jC-gmfl02220103d08d1
tgtcgccctttttttttttttttttttcttttttttgaaagccatatttccctttattaaatagggattgggtattggtttataatctgttcctcctaattacaaatataatgagtataaccttttctttattcaattattttggggtaatacaagtataattttcttccccaaactgataatttcttttttaaaaacaccaaaggaaattgcatagctatacttattgctcatcttcagttttaacctaattgggcacacataactcgggttgtgctcttacaaacagatcaagtttgggttctgaattacacctaagcagcaagtaacctctggataatctttttaatttgaaaaggagacgccgttggggggaatctttcaataacctttacccttttttggcccccagaaattgtcaaaaataccccttttta

SEQ ID NO: 9550 - DNA, 419 bp, Glycine max
  Clone ID: jC-gmfl02220103d09d1
cctcgcccttttttttttttttttttttttttttttttctacacattttttttctttgggtttggttcattttttttttcctttttttcctggagaaaaaaggggcggtcaaattttccctttttaaaaaaataccccggcccttaagggggtttccgcccccatcccacaaggggtctttaaaaaacccaaaactggtcccccctccccaaggaaaaaccttaaaggtccaaaaaaggggttttggccccccaacaagataccccctgggtttcaaaaaccctttttttccacccctttttttttttttgggccagaaccgtctatcgcactttatgaaaaaccctccgggtttaaggggaaaacccccttccttgagtaaaccccccaaaaaaaccttttggcaccccatcccaaaa

SEQ ID NO: 9551 - DNA, 482 bp, Glycine max
  Clone ID: jC-gmfl02220103d10a1
cccagaatcaatttgttttggcatcacaacagcaacaggtcttggcacaggctcaggcacaaaataaccttggaaattctaattatggtgacatggatcctcgtagactttctggtcttccacgaggtagcttaagtgcaaaggatggtcagtctactagaaatgatggatctatttgctcccaaatgcagtcagattcacctaagatgaagattgctcagtcacaacattcattatctcaacagcaggagcaattacagcagcagagtaacagaaaaagaaaatctggagctgccaatagcactggtacaggtaacactgctgctcctttccctacttcatcaccatcaacacataccacctggtgatggattaaatacagcaagcagcatgcagcatgtccaaaagagcatgatgatgtatggtacagagggcacaggaggccttgcatcatcgtcgaatttgctggacgacatggatcg

SEQ ID NO: 9552 - DNA, 554 bp, Glycine max
  unsure (1)..(554): unsure at all n locations
  Clone ID: jC-gmfl02220103d10d1
ctaaaagcaaaattgtttttatatttatgtactaatagtctagtataccttattacaacatcaacggtgggagaaaccaactaagattaagctagtgatgaggtttggatagactcaaacctcattgccactattatataaaaataaaaaagaaaactttcagagacccctttttgctttcaatataggtctctgatttctttcatatacagtactactgacaaagaatatatgcgatgttagaacctaaatcaggaattttatttccacagctttacatagttgtcatgacttgcagaggcaaccattccagtgacagaagactgagccaaagcagatattacattttcatgtgtagtaattgtcatgcttttgttctctgtcatgttccataactccaaggatgaaattcctccaaccaccaacaaagttgaataacttggatggaaaacacaggaatgaaattggttcccaggggagctgaactcatgaatgcattctcctnctgaggtcagactccaaaccttcaccaaatttgaactcacagatgccca

SEQ ID NO: 9553 - DNA, 301 bp, Glycine max
  Clone ID: jC-gmfl02220103d11a1
gccgtttgattacggtgccggacacgtcgatcccgtggccgctcttgatcctggtctcgtctacgatgccaacgtggacgattacttagggtttttctgcgcactaaactactcgtcatttcaaatcaagcttgctgcgagggggggactatacgtgtgacccggagaaaggttaccgaggggaggatttttattattcctcttttgcgggtcctatggatacagcttccgggattgggggagggtccgatactctgaagaccgggaaggactcttggggtttgacttacgtgggagctcc

SEQ ID NO: 9554 - DNA, 557 bp, Glycine max
  unsure (1)..(557): unsure at all n locations
  Clone ID: jC-gmfl02220103d11d1
gggaagatatggataattcagattcaaagccattatgatacatacatacagatgcgaccattatctttttctatgtacaattattgttattattccatatataaagttttctcctgaacttcagcctacggaataaaaacagcaaagtgaataagtgagatacataataaaaacaagccgtatcgggccgggcccaaaagcaaaccacgaagagcctacaacacttgagtgggcccttttatttgggtcatacattttccacagcccatcatgtccagctgaacgcaattggactaccaaccttatgcttcccatccgtccattccaaacgtgcgaagctggtcgtcccagacggcatcgaagtgtatgtaaacgacaccgtatagtccttcttctcgtacaattccgtgaaactcaacgtattcggttccaccacagtcttcacttttcgaatcccccacgacatcaccgaagctttgtacgttcccggagnctccacgttagtcaaaaccctagagtacttcacggtcttcagagtatcggaaccctccccaatc

SEQ ID NO: 9555 - DNA, 397 bp, Glycine max
  Clone ID: jC-gmfl02220103d12a1
aaaacactcataacacaaagcacaaagcaaagctcatccttgagttaaaaaatggcagcagcttcttccatggctctctcatccccatccttggctggcaaggccgtgaagctgggcccatcagccccagaagtgggaagggtgagcatgaggaagaccgtcaccaagcaggtctcctcaggaagcccatggtacggcccagaccgagtcaagtacttgggcccattctctggcgagcccccgtcctacctaaccggtgagttcccaggcgactacggctgggacactgctgggctttccgcagacccagaaaccttcgccaagaaccgtgaactcgaagtgatccactccaggtgggccatgctcggagccttgggctgcgtcttccggagttgct

SEQ ID NO: 9556 - DNA, 516 bp, Glycine max
  Clone ID: jC-gmfl02220103d12d1
gtaaaaagcaagtaacattaagttggattcggatacacaagataattcacattatctgaagtacttcaccaaacacaaatctaaaaactctcaaaagtcatttcgttctttgacgctcactttccggggacgaagttggtggcataggcccaggcgttgttgttgacagggtcagcaaggtgatcggcgaggttctccaatggaccctttccggtgacaatggcctgaacaaagaagccaaacatagagaacatggccaatcgtccgttcttgagttccttcaccttaagctcagcaaaagcctctgggtcatcagcaaggcccaatgggtcgaagctgccacctgggtagattgggtcagtgacctcaccgagggggccaccagcaatacggtaaccttcaacggcacccattaggataacttgtgtggcccagatggcgaggatgctctgggcgtggatcaggcttgggttgcccaagtagtcgagcccaccctcgctgaagatctgggacccg

SEQ ID NO: 9557 - DNA, 511 bp, Glycine max
  unsure (1)..(511): unsure at all n locations
  Clone ID: jC-gmfl02220103e01a1
tcgattctaaattgttgccggctccagcaacctctgccaatctttaatgggtgtgattgatttctacaacactggtgctttgtgctgggttaagtccaacgccaatctgaagcagcaagtgggtttggcacccaagacccatttgttcatttgaggggaataatcagaggaagtttgtggcaatggcttctaccgttcctgtggagcaagtcaacaatggccccctgcaggtgacaggtgactccttcatcagagagcatctgaggaagttggctccttatcagcccattttgccctttgaggttttatcagctcgccttggacgtaagcctgaggatatcgtgaagttagatgctaatgaaaatccttatggtccccctcagaggtcatggaagccctaggatcaatgcaattcccatatgtctatcctgacccagagagccgcagattgcgcgcagctcttgcccatgattcangccttgaagctgaatatattcttgcanggtgtggt

SEQ ID NO: 9558 - DNA, 514 bp, Glycine max
  unsure (1)..(514): unsure at all n locations
  Clone ID: jC-gmfl02220103e01d1
gatgcaacttcaagaaattgcaaaacacaatatttatcatggtagatttaggtcaataatatataaagctacatccacatcccttgccaaaatcaacatattttcttctaattttgacggctctatataaagattagctaagaggagtttagcatgacgtgttacaatatttattacatcaaattttcctcctacgagagtctcttgaggcacttcataagtgtatctgtttgttcaggcttcccaacagtcacacgaacgtaccctttcagctctttcttgtcatagtgacgaatcatcacacccatttgtgctaggtcctcctttagcttctttgcatcctttcctgatgtaacctcacaaagaatgaagttagaatggcttggaaatggccggaggaatggaacttctttcaaaaggtcataaagtctccctctttctttcaacaaagcattntttacattctctagataggtaggattttgcaatgctgcacatgcagaaatttcagcag

SEQ ID NO: 9559 - DNA, 524 bp, Glycine max
  Clone ID: jC-gmfl02220103e02a1
aagcaatggctcaaaccatgttgctcatgtctagtgtctctagcagttattccgtggatttgaagaaagaccttttcctccaattgcagagtcaaagtttaaggcctaagttctctcagctctcattcaaccccacttccatcatcaacttcttccttttcttcaccccgtacattcacaactctggccctcttcaaatctaagaccaaagccgctcctgctaagactaaggttacaaagccaaagcaaaaggttgaagatggtatctttggcacttctggaggatttggttttactaagcagaacgagctctttgtgggtcgtgttgctatgcttggttttgcagcatcactgttgggtgaaggaataactgggaaaggaattctagcacaattgaatctggaaactggaattcccctttatgaagcggagcctcttcttctggttttcatcctcttcaccctgctaggagccattggaggtttaggtgaccgtggaaaatctgttgatgacgaacctactac

SEQ ID NO: 9560 - DNA, 459 bp, Glycine max
  unsure (1)..(459): unsure at all n locations
  Clone ID: jC-gmfl02220103e02d1
atgatgaactcaatgcattttatgatagatgagcaaacgagtatttgtttaaacacaaacaaacaaaagggttagtgtctaatcatcctccccctcatctgtaacgaatttgccagttccaggattcaaagcagcaatgaagaagaaaagaacattgaacaacactaggggctcgatttcgttgattggtaccccagtctcaatgttgagttgggctagtgctccctttccggttataatttctccaatcaatgagaaaacgaaacccaattgagccaatcttcccacaaatagctcgtttgctttcgtgaatccaaataaaggacctgaaccaagaccaagagcttccctgaagcctttgcctggaggaataacaccntcagtagtaggttcgtcatcaacaaattttccacggtcacctaaacctccattggcntctagcagggtgaagaggatgaa

SEQ ID NO: 9561 - DNA, 502 bp, Glycine max
  Clone ID: jC-gmfl02220103e03a1
ctttcctgtctctagctgtaacgccgattatttatttattttaattatgatcatctcatctcacccaattcaattcacgtaccttggaatcgattcttagggtttctgactcctttatgtgtttgtctcgcaattgatcatcgcaaccacaatgtccggtcccctcgatcgttttgccagaccttgctttgaggggttttcgggcagtgacgagaagaaggagaggagatctgacttcgagaactccgaggatgaaaggaggaccagaattggatctctcaaaaagaaggcacttaatgcatcctccaaattcaaacacactcttagaaagaagagtagcaagaggaaaagcgatggccgtgttagctccgtttcaattgaggacgttcgcgatttcgaggagctccaggctgtcgacgcctttcgcccatccttgatcatggacgaattgctccccgaagcctttgatgattaccatatgatgttaagatttttgaaagcg

SEQ ID NO: 9562 - DNA, 296 bp, Glycine max
  Clone ID: jC-gmfl02220103e03d1
gataggaggggaaaaagcttttcgactaacaaaggctaacaatttgtaacaaggatagacgatggtatgaccattacataagcaaagaggctcacgttttacaagccatcaatgattgcaccttgaatactcacacgcctaaacactaatccattatgtttactgatgtactgaaaatctgcggtctgagtgtcattatgctcaaggagatcattccttatgaacaccccaggctctgagacatcccctatataaagtttcccccactcgtatatgttaccaacataacttatttt

SEQ ID NO: 9563 - DNA, 538 bp, Glycine max
  unsure (1)..(538): unsure at all n locations
  Clone ID: jC-gmfl02220103e04a1
caaatccttggcaagcccatgatccagagaacatgggaaagggcaaagctggcagctacattggatcatattgttgtggcaactgatgatgaaaagattgctgattgctgtcgacaatttggagctgatgttataatgacatcagaatcttgcagaaatggtactgagcgctgcaatgaagccctacagaagcttgggaaaaaatatgatattgttgtcaacattcagggtgatgagccacttattgaacctgagataatagatggtgttgtgaaagctttgcaggcagctcctgatgcagtgttcagcactgcagtcacatctttaaagcctgaagatgcacantgatccaatagagtgaaatgtgtggtagataatcgtggttatgccatttatttttcacgaggattaatcccattcaacangtcaggaatggtcaatcaacagttcccgtatttgcttcatcttgggattcagagctacgatgncaaagttctgaatatataccctgatcttcaacctactttcgtgcaactcg

SEQ ID NO: 9564 - DNA, 488 bp, Glycine max
  unsure (1)..(488): unsure at all n locations
  Clone ID: jC-gmfl02220103e05a1
gaaaaaaccaaatttgcttaacctaagcgaccatgctataaggagcaaacatctaaggtgtgtgtcttaattgcatttgcatagcatggacatcaaaacctttgctttcgccccatcttctccgccgttacccggtaatcgccgccgccaagctcgccggaatctctccctcgattgatacctctctctctcctgactcacctcccgcatttatcttctccgatgggctcaagttgcatggagcatatgctcttctacgttatatcggccgagttgccagccttcccaatttctatgggcaaaatgcattagaatctagccagactgatgaatggctggactatgctcctatcctctcatctggccctgcttttgagaatgcatgcaaatatatagatgagtacctggagaagtgtactctgttgggtgggtattcactgtcaattgcagacctagcaatctgagcaggtcctgcangttctggaaag

SEQ ID NO: 9565 - DNA, 458 bp, Glycine max
  Clone ID: jC-gmfl02220103e05d1
gtcccaaaaataacaaagacgaattttccaattactagtaaaaaatccagatataatggtttgcatataaacagtacaatgtgatggtaaacataaaagtagttccacaaacttgttatcaccattaccaactattctgagtgtgaatgtggcccaaacagtttcaagaccaaaaagattacttcaaacttgtctgttgcctgccatcagggattgcatatagcacgattggttgtgaggggcgaatgaagggtaaatcacacctgaaatatccctttctctccagttgcaataaatctccacgctgaagatttcgcatgttggagtctccataagctaaagtctcctttttggtacatgggttaaccacatcaatgaaatcctccccttcttcaagctttttctttgtaattagataatcaaactccactaatgtcaggctaactagttcatctatc

SEQ ID NO: 9566 - DNA, 466 bp, Glycine max
  unsure (1)..(466): unsure at all n locations
  Clone ID: jC-gmfl02220103e06a1
ctcccacaatggacctccatcgccggccgccgcccgccgctgacgacggagcaatccaccccaagaagaggagggacacttcctctcccaaggcctccgacgctctccctctccctctctacctcaccaacgcgatcttcttcacgctcttcttctccgttgcttacttcctcctccaccgctggcgcgacaagatccgcagccacacccctctccacgtcgtcactctctccgagatcgccgccattttctccctcatcgcctacttcatctacctactcggcttcttcggcatcgacttcgtccagtccttcatctcacgcgcctgcaacgacgcctgggacctcgacgacgcccgtacagattctncctcttcctctccctctacctctacctcgcccgcaattaccaaaatgccctcacgggatgcctcgattatattatcctccgaggatgacgaggagat

SEQ ID NO: 9567 - DNA, 485 bp, Glycine max
  Clone ID: jC-gmfl02220103e06d1
acccttaaacagaaatacattcattaattagataaagacttgagacaatgggatctcaagcttaattgacgggcactagcggacaagagaatattcatcaacccattcggctacaatgatagatatgctaagcatattatatagggggaaaagaattagaatataacacgtcaaatgtcttggttgaggagaaaaaaagtgttaacacccactgaatggctcggcagaagaagcaatgaaaagaagaaatgatccagaaggggacagggaagatctagagtataactctactttcctctctccaaataataaaagatctaaacagacagcaatgcagagccaaacgtggatgccaacaatctaatctaatgtttctccattttccttccctaaatccgcttaccctcaattttttattctagagtccagaattaatgactggaaccacgtccctgacctcaagatgatgatattttggttacatc

SEQ ID NO: 9568 - DNA, 438 bp, Glycine max
  Clone ID: jC-gmfl02220103e07a1
cttctctgcaccctcgccgtaccttctagaaccttccctcagatctcaattccccttccgctttctcctttcatggaaatggcttccactccccgcaccgtcgaagagatcttcaaggactacaccgcccgcagaaccgccatcgttcgcgctctctctcaagatgtggatgaattctacggactctgcgatccagataaggagaacttgtgcctctatggacatccgaatgaaacatgggaggtgactttgccggcagaggaagttcctccggagcttccggagcctgcactcggaatcaattttgctagggatggcatgaaccgcagggactggctttctctggttgctgtgcacagtgattcgtggttgctctctgtggccttctatcttgaggctcgtcttaaccgcaacgaaagagacgtttatttagcttga

SEQ ID NO: 9569 - DNA, 482 bp, Glycine max
  Clone ID: jC-gmfl02220103e07d1
caagcaaaatatagattaatagacaaaaataaaatgtatggaattctattctataaaattatataacatacactgatgattaatcttggtagaagaaattaacttaatctgaaagattatgatcagacatagatactataccgtttacaagaacttctataaaagatacaacaatattacagtatctttgtcggccatgaaacagcattattcacttcacattttgccttcggcttagggcctgcctcgcctcaagctgcatgatggacatttgtattgctttatgctctcagcttttgcaggagtgatcttcacacatttcccatggaaccacctctcacatatatcgcagccaatccaaaattcatctgcattgtaatttccgccacagctcccacaaagggtttcactgtgctcatcatcctcgtcttcataaccatcatctgcaaactttgggttgctcttaacttgcccatcacttg

SEQ ID NO: 9570 - DNA, 525 bp, Glycine max
  unsure (1)..(525): unsure at all n locations
  Clone ID: jC-gmfl02220103e08a1
cagcaacacgtgttttgctttttttccaaaacaacaacacgtcttctctttcttaaagcactaaaacagcttttaattccttcatttcacactttcgtgcactttctcccccctattttgttaccctcttgagtttcttcctcattcactgaactttttatgaatatttttgcatttttatcgtattatgtttgccaagtttttgtttttgttttgttttaacgtgtttgtgagttttctaacatttttcccttccttaatggtgttttattttgtctgcagaacaagatgcagggtatcaggcgcatggatgctgccctggacgcaatgcgtccacttggatttaggacacaactgattctacgaacggttaatgagcttctcgatgttggttaagtcttttcttaattcattgtgattttaagttaatttctgttggtagggattgagggaccaaaaagcctaggtttgcatactctatatgattgtcgtgcatgcactatntatgatgcaatgttctatgga

SEQ ID NO: 9571 - DNA, 560 bp, Glycine max
  unsure (1)..(560): unsure at all n locations
  Clone ID: jC-gmfl02220103e08d1
gctgaaataattgtttatttgattcaatatataccacattttaaacaaattagtgtactattgtgcatgcacagcttttaacatcatgtggttacatttaaatctccagctatggacaatgaaattgtgaattgtattgatgtggaatctgcaaaccaatgtatccaaactccatgtgattgccagcacaaatatatttttttgtttaaagtgattgctgttcttggcatgccaagaaccattgctgcatgtccttccccgttggtgcagccggatattatgagagtgaattatttcttgtcggaattcttatagaagcaaagctttgagtgaaaattgttgaacatcaatcagaccaccctccattagtcctgcaggtacaggtgatccctggaaacttgtcactgaactttttcctgatgacatgcctgttaagagaacacantataaattaagaccacatggagtgcattgntctcatgaatttgaatccctccttacatagtagngcaactctaccaaaaacattngatgatgaaataccataaaacacaatcatg

SEQ ID NO: 9572 - DNA, 489 bp, Glycine max
  unsure (1)..(489): unsure at all n locations
  Clone ID: jC-gmfl02220103e09a1
ttttaacagatgatacagcaatgctttggggagttaagttctacaatgattttctcatgcaagctggccctcttggtaatgtacaatcagaactactattcagaaaggataaatcaactttcacttttgacaagggttgggccttccctcggagagtctatttcaatggcgacgtttgtgtgatgccgccacccgattcttatccatggttacctaatgctggttccaagcaagaggtttccctgcttgctttggtgatgtcctctttggtagccttggtattatatgcatatgcttaaagtttctaataatgccacactcatcaaaagtcttcagtgtgacaagttttgactcaattttgggacaccaatttggaatttgaaccaagccagggtaggatatccagtgacaattcaagagtagctcagttctcctatgattntgtttttctaattttcagcatacgaggaaattgaatctgctaatata

SEQ ID NO: 9573 - DNA, 357 bp, Glycine max
  Clone ID: jC-gmfl02220103e09d1
aaactctgtttatttatgacaaatacatgttcgataaaacaaaccaaataccaagcccaagacctacacaaatggcgaacgaaccagatgcctcctctgccaggaacacaaaagccagaagacggacttgggtgacacaaaaagccacaagctagagatacgggagggaaaaccacaggaagtcaaggccccccaaccaaaaggatagagcaagggagcaggcctggaagccggaccatagcggatcccgaagggcccaaaatgggccacaaccagcagcagattgaaaacctgataaagaaagggtccaaaccgggggaaggggtgtaatggtcaagcaccggaaacccaggaggg

SEQ ID NO: 9574 - DNA, 407 bp, Glycine max
  Clone ID: jC-gmfl02220103e10a1
gtcggagtcttattgggactcgattgcagaagagattaacgagaggcttcaggaatgtagtcagattgctctgaccgaactcgccgcgcaattgaacgtaggtttggacttggtttcctccgtgttggagccgcgccttggaacaattgtgaaaggaaggcttgaaggtggacagttgtatactcctgcctatgtggctcgtgttggtgccatggttcgtggtgctgtgcgggcatcaccgttcccacgaatttgactgtggtatggagctcattgcagcagttgctgcaagaaattgatggaaccagtggtttggctgttgaaggatctttcttccagtctttgtttaatggacttgtgaaggaaggcaaggttctagggtcgcttcgtgcaggagtacactggac

SEQ ID NO: 9575 - DNA, 518 bp, Glycine max
  Clone ID: jC-gmfl02220103e10d1
acatgctagcaccaaactttgatgcaaagccattggccatggctttaattgctgtaaaagttatgttgtacagagcaaaggttgagaacgatgtatataggacgacattacttttaaattgctagactcgttattgacatttttcctgcccttttgctgtcatcaacatcatgatgattgtagtgtgaattagagtaaaatgaatagcgacaaaatctaatctaacttcccagcattgtctactttagcaaaatgcaacgtatgatagctttgttgcacctaagaaaatagacaacacaaaattaatgcatccttacgatgaagcttgattcagcagtcaatttggctttacaaatttttacgaagattgggaggtgctcaaaaccaagcttttgaggtccagcatttggctctctagaagctcctttctactcaaaatcctatcagatgcacaatcctcttcatcaccgggtgaagctgctaataatgtcaaaagagtcactgtggcagtttgataa

SEQ ID NO: 9576 - DNA, 383 bp, Glycine max
  Clone ID: jC-gmfl02220103e11a1
gagcatgctttgaagcaaacaatttctcatacagagctgtggaaatcattatcatgatctgaggagtttgagcaaaaatatttagagctaactaaaggtgccgctgacaattatcatggttcctggcggaaaagacatggtgtcgctcttgatggtgagatagcagctgtggctttttagcatggacattttgatcaagctgcaaagtcatatgagaaggtttgtgcactgtctgctggtgaaggatggcaggatttgttggctgaggtccttcccaatttagctgagtgtcagaagagtcttaatgatcaagctggctacttattatctcgtgcgaggttactttctcttgatgaaggattattgttgaccaaggagcgtca

SEQ ID NO: 9577 - DNA, 385 bp, Glycine max
  Clone ID: jC-gmfl02220103e11d1
gatagcaaaatgatgatattgtatatggtggttcctagcaacttttgttattttatgacacaaacgaacgctagggtccgggtatctgtctatcgtacaatgaatagcacaacattcccactgtacattcgccagggggtggtgatattgattctccgaacactggatgaaggttacaaagaactcatatccttcttcagttagttttcacgcaatgggatgctcctgcacaaagggacaatttacttcttataccaaaaaacttgttacgcatgcatatggaacacaatcttagttaccctttggggatgacacagtgaccactttttaattaactgtcatgcttacggtggagctgtcagggggtggccatacacaaaccaat

SEQ ID NO: 9578 - DNA, 580 bp, Glycine max
  Clone ID: jC-gmfl02220103e12a1
gccccacataccatttgttattcatataaaaactcgttttccttctccatttctcgtcgcaccttttcctcttctctctctttctctctttctagttcgtgttcttcgtcgcaaatccgaagtaggatctctcttgttttttctctaggtttttcgcgatggcgtcgaagcgaattttgaaggagcttaaggatttgcagaaggatcctccaacatcttgcagtgccggtcctgttcatgaagatatgtttcattggcaagctacaattatgggtcctccagacagtccctatgctggaggtgttttcctagtgactattcatttccctccagattatccctttaagccacccaaggttgcattcaggaaatagggtgttccacccaaatataaatagcaatggaagcatttgccttgatatattgaaggagcagtggagccctgctctaaccatttccaggtggtgctctcaatttggtccctgttgacgggacccaatcctgatgatcctttgggtccccgaattgcacacatgttcaagacagacagggaccaaagtcgagtcaactgcaagaagct

SEQ ID NO: 9579 - DNA, 262 bp, Glycine max
  Clone ID: jC-gmfl02220103e12d1
aacagagcaaaccaatcattctttaaatattcgacaatactggcaatacaagggtaaaattttaaactttttaattgggcttacatttcactgttttaaaagtagcgtttgcattctgcaatacagaccaccgaagaaatttttccccattcatcttcaactgggggggccttaatcgaagaccacaaattttcatacaaggctgtttggcctaaacactgaaagtaaaaaccgctcttttctttatgtcaattagcccatg

SEQ ID NO: 9580 - DNA, 497 bp, Glycine max
  unsure (1)..(497): unsure at all n locations
  Clone ID: jC-gmfl02220103f01a1
ccattatactagtaagcatggtgttagtgcaatcaggaggctgacgaaaactgaggataatagaattgaccaggctagcggtgctgacattgtgaacagaccagatgaattgcaggagtctgatgttggtactgggtgctggtgcatcagcggttacgacaattgcagatgagtactctgcatatattgctgatcgctaagaacccaatgcttgtactgttctacttacgtgtgctagtacggatctattaaatgaagttgacagagacctacacgatgccatgtctgatgcaaggaacattgtaaaacatcctaaacttgttcatggaggcggtgctacagaggtgacggagtcngttgacttgcctcaaagtagtcgatatagtgagggcatagagaactaggcttatgaagctgatgccgtagattttgaagccatagcgcgaactttggctcacaactgtcgagtacatgtcatccggactatgactgctcta

SEQ ID NO: 9581 - DNA, 399 bp, Glycine max
  Clone ID: jC-gmfl02220103f01d1
agggcgacctttagtgattgtgctttagaatgttgatgaatttctgtttgtgtgcaggggtgggtgttgctctttttcttctggcggaggtggggcccatggctgaggctgtgacatgcaccccaacagagttgagttcgggtcttccagcaatcacttccggtgctaaaccttccaatgcttggtgcacgaagctgaagcagcaaaaaccatgcttatgtggctacctcaaaaacgctagcttgaagcaggatgttaactctcctaatgcccgaaaaaccggtgcttcttgtgggattccctttccaacttgttaattaattaagccttcttataattaaagtgtgggatatttatatatttattgataaaccggttaatttatacacacttttgatc

SEQ ID NO: 9582 - DNA, 521 bp, Glycine max
  unsure (1)..(521): unsure at all n locations
  Clone ID: jC-gmfl02220103f02a1
atggcttcttctacatcacatccatccttttggtccctcctgaacctgtctgcatccattcccatttcttcttccgtatgcatgttcccaccgtctaaaaaacctagcaaagcaacaaaacggcgtcatgcttggngaagtagcatgcaatggtaaccctagaaataggagggacattctgatcggccttggaggactctatggtgctacaacaagtctcacaagtaacaacactggttctgcatttggtgcttcattgtcgcctccagatccaactaactgcgttcaaccggacccagaaaaagaccctttttgcccaccaccccccttcaaagactacgagctccctccacacgatgacaagacattaccccttcgaattagaccagctgctcatttggtcactgatgattacatagccaagtacgaggaagccgtgaggcgcatgcaagaccttcacctgatgatcctcgcagtttcatgcaacaggccaatgtccaccgtgcctactgcgatggtcg

SEQ ID NO: 9583 - DNA, 309 bp, Glycine max
  Clone ID: jC-gmfl02220103f02d1
aacaaacatttattataacaatatcatagtatccctcaaagatgaaagggatctattaagttccaaggcaaataactaccacacactaattaagaaacaacaaatgacccatagagtgtccccggagaaacaaaccctagcagtagcacacacataatttagatttattcatcgtctacctcaggataaacacgctttattcttacgaccttaattgtaacaggcttgtctccatatatgggagccagtgtgacagaaataccatcatcgccttttgttactcccaagtctttcaactgatacgttaat

SEQ ID NO: 9584 - DNA, 197 bp, Glycine max
  Clone ID: jC-gmfl02220103f03a1
gatgcggctcggacgctagcgaacacattaattccagtggtcgcacgagctcactacgtcggctggcgacctggctcgaggtgctttgcaatttttcaaattttgaatgctgacggcacatgttctggggatagagtgggcacacaggcaggtgccaccactacatcatgatttaattctacagccggtgattacga

SEQ ID NO: 9585 - DNA, 332 bp, Glycine max
  Clone ID: jC-gmfl02220103f03d1
ggggaccgtagctccaggttctttttttggttctcccatcgcactgtcaatgcgagggcagatcgatccatggaggaaacccaaaaaattgggcggcacatggatgttctcagagtatatgctggcctatggcagagacctgcttgcaatgcatgctggaactgttgaaccgtgggcacgagccctaggtgtggataattagaccgcgactggaggatccctgtgggcagccctgtgtctactaaagcgacgaggatcatacggtaatggcttgccgttccgctatcgacttgccatacctaaaggccggagacggttggacgggaatccct

SEQ ID NO: 9586 - DNA, 565 bp, Glycine max
  unsure (1)..(565): unsure at all n locations
  Clone ID: jC-gmfl02220103f04a1
cagagagtagaaaagatggcgcggttgatcacagtggtgtggtgcgcggtggcggtgctactgtgcgccgcggcgggcgcgtcgtgggtggaggaggcggcgaacccgatacgaatggtggcggnggtggaggcggaggtggttcgggtgatagggcagtgccggcgcgcgctgaagtttgctaggttcatgagcaggttcgggaagagttaccgaagcgaggaagagatgagggagaggtacgagatattctcgcaaaacctcaggttcatccgctcccacaacaagaaccgcttgccctacactctctctgttaatcattttgctgattggacttgggaggagttcaaaagacacagactaggcgctgcccaaaattgctctgccactcttaacggcaaccacaagctcactgatgctgntcttcctcccacgaaagactggaggaaagaaggaatagtgagtgatgttaaagatcaaggcagctgcggatcatgctggacattcagcacaactggngctttagaagcagcctatgcacaagcatttngggaagagtatctct

SEQ ID NO: 9587 - DNA, 595 bp, Glycine max
  unsure (1)..(595): unsure at all n locations
  Clone ID: jC-gmfl02220103f04d1
aactatgaactatcaatatatgatcgttatttatgtctgtgatacacacaattcaggccatgatattcttacgtgatttacagcaacttctaacttatttaatacatcataccaacccaactaggagcaattttcattatacaatgacacttatctttaaactctgaagcatgacaaggtggtagtcaccagggaccatattcttatgcaatttatgccacaactggataagacgcacaagttgcaacaccacacatgttcttccccaattccattttgaagtagccattctcaccccaactttctccccatgaatttttttatgagccaatatgggacgccattttcaactccataccccacagcaaggacggcatggttcacatcctgngaagtgctaccgcaaatgtcactagtgtaaactccattctcgtagaaatggaacccattcaccacctgaaaggccacactaaccggccgaacaaatgcaactgcatgttttaattcattctcagcacccaaggtgatattgaccgagtcaatgacttgaaacgggcacattttcagctgagaatttgcatacaccatctttttc

SEQ ID NO: 9588 - DNA, 612 bp, Glycine max
  unsure (1)..(612): unsure at all n locations
  Clone ID: jC-gmfl02220103f05a1
gtacaatttggctaattgccaaggcatatgttgttgtcaatgactcctgctatcatcaactcatgagccactggttaaatactcatgctgtgattgaaccatttgtcatagcaacaaacaggcatcttaatgtgctccaccctatttataaacttttgttgcctcactatcgtgacaccatgaacatcaatggactcgcaagacaatcactcatcaatgcaggtggcattattgagcaatcatttctgcctgggccatttgctgtggagatgtcttcggcagtttacaaggggctgggttttcactgatcaagcccttcctgcggatcttatcaagagaggaatggcagtggaagatccatcctctccctatggccttcgccttgtgatagatgactacccttatgctgntgatggactagagatatggagtgctatccagacatgggttaaggactacgtctccttgtactatgccacggatgatgcagttaagaaagactcagaactccaagcttggtggaaggagctgttgagaagggcacggtgacttgaagacaaacatggggcctaagtgacactcttaagactgatcacattgctgcatatatat

SEQ ID NO: 9589 - DNA, 366 bp, Glycine max
  Clone ID: jC-gmfl02220103f05d1
acatacgggtatcaaatccaagttggggacatagagaaatttgatttgacattcatagatcagaatatcagacttacatacgggtgaacatgatacgggtgaacatgataggagcacaatactatacataaaaactgacacaacaccctattagatatgaaaaactagatagcatccaattacaaaacttaagcatacataagaaaattatgcacacataagtttgcacgtttatttgtcaatgagaggtacgttggaaggaaagaaaaccacacaccacacaccacacacttttattagatagagatgctgttgggaattcctctgaaagtaaggccttccccactggtaggaagaagcacagtg

SEQ ID NO: 9590 - DNA, 531 bp, Glycine max
  unsure (1)..(531): unsure at all n locations
  Clone ID: jC-gmfl02220103f06a1
ctttctctaatccaaatatctctccgttaatgctctcaccacaaacttcaatagactagccaaaagctaacaccaactataggccaaatcaccaataaatattatttcccgttcttttggcgtgttggccacccactgaacacatttgcactcacacatagaagcagagagaggccattggttggtttcagagatgggaagcatgcacatagaaaccccagaaacttttgctgatggtagcaaaaacttcgatgatgatggacgagctaaaagaactgggacttggattactgcaagtgctcatatcataacggctgtgattggttctggagtgctatctcttgcatgggcaattgcacagatgggttgggtagctggtcctgcagtgctctttgtcttctctttgataacatacttcacctncactcttctcgctgactggtaccgttcacctgaccctgtacatggcaagcgaaactacacatattctgaggttgtcaaagccaacctatgaggaagaaaatttcagct

SEQ ID NO: 9591 - DNA, 490 bp, Glycine max
  Clone ID: jC-gmfl02220103f06d1
attccatcctcttccatcaatctaaacataacctaacaaaaaagaaaaaaaaacagctaccaagaagaaaaccatgtaacatagcaaactaaacattttattatattactttagtataacaagttgtctcgatttcgagaattgaaaatataacaactatttcaaaacatagtaatacaaattttgtcgccctcaatagaaactcttggctcaagttggaatactaagtatgaaagttctattgttctgcttggaagggcttgtatttcttgatactaaccgaaaggccttggatggaacccacaagtgagataatagaaatgatcaagcaaacccaactcaatatcttgagccaagtccaggtgaaggaaaatctttgcatatttgacttcttaatgtacatctctatagggaagtaaaccgtcaatggccagaaagagagtgcaccaataagggccaaaaagtcattgaagaatgggagtaacatagc

SEQ ID NO: 9592 - DNA, 388 bp, Glycine max
  unsure (1)..(388): unsure at all n locations
  Clone ID: jC-gmfl02220103f07a1
ctcatgagcttccagaccaaagaccaaccatggtggatgtgattcaggagctgagtgtgtcatctgctcatatataatcatctactactttctattggtattaggagacgcttaaacatttcctttagctgggtttcatacatgttattatttccatgagcatatacttagctaaaaaaaactagccattgcccaataattgtggatctaaacggactcgtgtcctgtttttacgaacaactgggatagttgaaggatgttctttattcggcttattgtaaaataaagggcttcctgaggtaatgatctcagcacaactctcgtggtttattggtgttcagcttggaacactttctttctggtactgcaagaaacttagnttacaggg

SEQ ID NO: 9593 - DNA, 388 bp, Glycine max
  Clone ID: jC-gmfl02220103f07d1
cactgtaaactaagtttcttgcagtaccaagaagaaagtgtttcaagctgaacaacaataaaccacgagagttgtgctgagatcattacctcaggaagccctttattttacaataaaccgaataaagaacatccttcaactatcccagttgttcgtaaaaacaggacacgagtccgtttagatccacaattattgggcaatggctagttttttttagctaagtatatgctcatggaaataataacatgtatgaaacccagctaaaggaaatgtttaagcgtctcctaataccaatagaaagtagtagatgattatatatgagcagatgacacactcagctcctgaatcacatccaccatggttggtctttggtctggaagctcatgag

SEQ ID NO: 9594 - DNA, 489 bp, Glycine max
  Clone ID: jC-gmfl02220103f08a1
ggcagcatcaacacatgatcaagatgtcttcagtttctatccagatgaacgattttgcaatggatttgaagaagtgttgagtcagtatagggaaattgttcctaatattcgacttgcaggtcctacttcatttgcaccaattgttgaaatggccatgacaatagttgagcagagtggaggccagtaccatgttttggtgatagttgcagacggccaggtaacaagaagcattgacactgagcgtgggaggctaagtccacaggagcagaggactgtggatgccattgttgaggccagtaaatttcctctttcaatcatattggtctggtgttggggatggtccttgggacatgatgaaggagtttgatgacaatattccagctcgggcctttgataattttcagtttgtgaatttcacggaaattatgtcaaagaatattcctccttctcgaaaagaagcagcatttgcacttgcagcactgatggaaa

SEQ ID NO: 9595 - DNA, 355 bp, Glycine max
  Clone ID: jC-gmfl02220103f08d1
ccccccaacccccacccaaaaaaacccaaaaattttaagggggggggatttttttttttcccccttttttattaaaaaaaaaaaaacctgttctaactttttttcccccccgggaaaataaaatttaaaaaaaaccaaagatttttcccccccccccaaaatttttatttcccacggggggggccccccaaaaaaagctaaatttgggggttaagggggctttcaaaaaggggcccccagggaaaattttgccccaattaaaaaaaggtgggtggcccccccccaagggcccttttttttaaatgggcaaaacatttggggcaaaacttttttttatttgggaaacctggggcag

SEQ ID NO: 9596 - DNA, 548 bp, Glycine max
  Clone ID: jC-gmfl02220103f09a1
ttgttctacaatgaaaagcctctgccttgggccgtttcttgctgctagtgccccagttggtagaagagcctatggaggccacttaagcagaaagtgctttcaaaagcaacttcacttccactcacgttgtgttgctttctcttcattcatatgttctgcaactatatcagtgatgccagaattagaagagaagcaagtgtttgatggagagaaggctaatttgctagttaaagatctcagaaagagctttgattcaggcatgactaagagctatggatggagggtttcccagttggaagccatagctaagatgttagaagagaaagagaaggaaattactgaagctctatataaggaccttggaaaacctcgacttgaagcatttataaccgagatttcccaggctaaatcctcatgtagtgaagcacttaaagagctgaaagaatggatgaagcctgagaaggtgaatactttcatcacaacatatccatcatcagcagagattgtgccagaaccaccggggggttgtgtggtcatctcaacatgga

SEQ ID NO: 9597 - DNA, 443 bp, Glycine max
  Clone ID: jC-gmfl02220103f09d1
cgaggggaaaattgtaattatcttttgccacttcaaccaaagtgggaagccacgagtcactgcccttgcacattgttttagtacagtacttctaattcatgaacgttttttttttttaaagggaccttatcatccttaagaccaccccaaaagagaaagaataatttgaacaatattgccactaataagggccttcaataatttttccttctgaggtgtatacggagggtacctaatggtagaatctgcatcaaaacttctatagagaactgacttcctgtggctgaaactatcaaaagagaattttccatggtaacaacccattccactctcttcaactgctccaaaaggcaacccacgagttgcaacatggatgacggcgtcattgatgagcatcccttcagaagatatcttatccacataatccttcttcagctggtcat

SEQ ID NO: 9598 - DNA, 394 bp, Glycine max
  unsure (1)..(394): unsure at all n locations
  Clone ID: jC-gmfl02220103f10a1
gattggagagcgcggaatcaacctaagtgggggtcagaagcagcgcatacagcttgccagggctgtgtatcaagactctgatatatatcttcttgatgatgtttttagtgctgttgatgcacacactggcactgaaatattcaaggaatgcgtgaggggggctctgaaaggcaagaccgttattcttgttacacaccaagtagacttcctacataatgtggatcttatagtggtgatgagggacggaatgatagtccaatcggggaagtacgatgatctacttgcgtctggaatggatnttagtgctcttgttgcagcacatgacacctctatggaactagtggagcagggtgcagtcatgactggggaaaatttgaacaagccatttgaatca

SEQ ID NO: 9599 - DNA, 451 bp, Glycine max
  Clone ID: jC-gmfl02220103f10d1
caacgaaaagtccaaagtatattactgatgatgcataattcaatataaaggcaggggagcaactgtgtaattgtccactgggcactgggttatataaattaggacctaaaaaaggctatatttggtttgtatactaaagctacttaagccagaggtaattaaaaaaacctttcacaaggttggctcattcttcacttgtccaaacagaatttatgcgggatggtaattgcacctctttaaagaaaaaggcctttctcctttctcggggcactgggaagatcaatcaaaacttaaaaggcttagcctaagttgggttttctgttattgtctgaagggctgaaagagacacatgcatggaactttcttataggccactggaacggttggcatactcttgaactaacgccccaaagagagacggcctttggagcaaggtggctggtgaataaaa

SEQ ID NO: 9600 - DNA, 460 bp, Glycine max
  unsure (1)..(460): unsure at all n locations
  Clone ID: jC-gmfl02220103f11a1
tccatggcttcctccaccgctttcttcacacccctccatgatttcactcaagccagaacaaccccatcaccccctttgcctttcatcaaatcctcctttgcttcctccaagtcaaccttttttcaccctgccctttccctacaaacctcttccaactttcccaggctttttggaaagcctaagtttttctctgttcatgcaagggctgccacagaaaaaaccatttatgattttactgtcaaggatattgacagaaaggatgtttctcttagcaagtttaaggggaaggttctattgattgtcaatgttgcttcacgatgtggtttgacatcatcaaattactcggagctgtcacgcttgtatgaaaaatataagaatcaaggtttggagattntagctntcccctgcaatcaatttggtatgcaggaacctggatcanatgaagatattaaagcatttg

SEQ ID NO: 9601 - DNA, 480 bp, Glycine max
  Clone ID: jC-gmfl02220103f11d1
gaaagcatattacttagagaataataatataaatggccagagaattcttccacaaaaagaaaaaaagaaagagagaaacatatactatattcaatcattttggggtaatacagtataattttcttccctaaactgataatttctttagtaaagacaccaaagtaaattgcatagctatacttattgctcatcttcagttttaacttattgtgcacacatcactcggttcgtgctcttacatacagctctcgtttgtgttctgaattacactcaggcagcaagtaacttctggatatccttctcaatttgaaaaggagacgttgttggtgggtatctttcaataactttaccatttttgtcaaccaagaatttctcaaaattccactttataagatcacccaaaaagcctccagcactcgatttcagaaactggtacactggagttgtaaatggtccattgacatcaaccttatcaaaaat

SEQ ID NO: 9602 - DNA, 459 bp, Glycine max
  unsure (1)..(459): unsure at all n locations
  Clone ID: jC-gmfl02220103f12a1
catcttcctagctcgctccgtttttctctctctctcgccaaacgcttcttccactatgccttcccaatcggttctggttaccggaggagccggttatatcggtagccacaccgtccttcagcttctcctcagcggttaccatgtcttcgccgtcgacaacttcgacaattcttccgaaaccgccatcaacagagtcaaggaactcgccggagaattcgcaaataacctttccttttccaagctagacttgcgggacagagctgccctcgagaaaatattttcaaccaataagtttgatgctgtgatacattttgctgggctaaggcantgggtagaagcgtggataaaccactgctctactttgacaacaacttgatagggacaatcgttctatttgaagtcatggctgcccacggatgcaagagcttgtgttctcatcttcagcaactgtatatggct

SEQ ID NO: 9603 - DNA, 452 bp, Glycine max
  Clone ID: jC-gmfl02220103f12d1
ggaaaatcaaaagcatataaggctatgtaaaactttattatggataatgaggtaaggtaagattatcccggttagtcatactctataatggggggtttaaatttacaaaacaggatgcagtcatgttcatgaagaacatgaaagaatccccattcaatattctgtgagttggaacctaaagaatcgctaagtaaactaaaccactacttatttaccactttattataattcataataaactaggaaatgatttaacttccaccttaaaatagctaaagaaaaactttagggacctattgggcgacagggttcaaaatgaccccaaaagagaacatatttcctatatccgacattcatcgacatcaattggaggaatctgcagatgcaccatagccataagggtttttgctagcccaattccattgatcgcggcacatatcatcgatgcttta

SEQ ID NO: 9604 - DNA, 403 bp, Glycine max
  unsure (1)..(403): unsure at all n locations
  Clone ID: jC-gmfl02220103g01a1
ctgctctctctctccctctccctctccctccaaattttccttcattctcacgcgccgccgtggtttccgccggcggctactccctatccaccgcgcatccatcccgcttccctctcctcgcttttctcacaaaaccanaaaanattaaaaatttctccgaagactgtgtattatcgttatcgttcactgagttaggttttgctgttcttcctagggttttattgtgtccaataacaagaggagggggaagagaaacaaaacaaaaaaaaaaaagaataaaaggcaaaaattagggatttttttttgggaaaaaaaaaagagaaatttaagttatcgttgttgtagttggtgcttggttgagatggctcaagttcaagttccgcctcagaatgcgatgccaggt

SEQ ID NO: 9605 - DNA, 460 bp, Glycine max
  Clone ID: jC-gmfl02220103g01d1
caaccaaaaggtggtggtccataacataccaaaagtgtctaatctaacgaaacaaactcaacctgaaaactgtatcaaagccagtgcagaaaataacaatccatcatcactacgtaaactccaaaatataaaccttaagaaacaaggttgtcattaagagataacgaaacaaactcaacctgaaatctgtatcaaagccagtgcagaaaataacaatccatcatcactaagtaaactccaaaatataaaccttaagaaacaaggttgtcattaagagataaggaagccagctgatcagcagtaccgccagcctgctgctgagcaacattccttaggacgtccattgcctcagccacctttgctttcagggcttctggcgactcaagcaaatgcagaacttcagtctggtccatctcaagaagcatgcctgtcactttggcagcattatcaggctctaact

SEQ ID NO: 9606 - DNA, 574 bp, Glycine max
  unsure (1)..(574): unsure at all n locations
  Clone ID: jC-gmfl02220103g02a1
ttctgatttctgaaacttactccatacatgatcggcgacaacatccttctcagtactcactactcaggtcagatttcaattctcccttctatttgtctctcttcattaatatcctttgactttgttccatggcaaataaagcttccatcttcggcacaccctactcgattcctcagatgggtttatctctcttcaagctgtattgcagatatttcagaaacccctggaattcttaagcccaaggattcatctgaattcgaccaaaacctcaactttttgaaaaataagcttgccccagataacttaatccgggttctggaccgtacaagcgatttgaactcggcagtgaggatattcaaatgggcttcaaggcagaagagttttcaccacacttacaacacttatttcaggataatcttgaactgggtatggccgggaaagttttggccatgagggatttctgtgaattcatggctaaggataggtgcccgggtgctgaagaagctcttgtggcatggctcatacatttgggggcatcgtangattaaagaagctatggaggctagtgaatatg

SEQ ID NO: 9607 - DNA, 520 bp, Glycine max
  Clone ID: jC-gmfl02220103g02d1
caccatctgaaattctatcaattgcactaggaatcatagataactgagaatgattggctatgaatgacagttgaacaaatagtctgtccggatcaggtattagaccttcatggaccatcatattgaaaaataaaacacattcctttactttattttgtttactcatgctttgaaaaagtatacactatgcttccaaatcaagattgcttcctaccatcgacatttgtgagaggaatgctaacagatcttctgcccttcttgattttgacagctcatgcatgatagtcgtgtgtgtagcaatacagcatgacataccacagaaataagctaattgccatagacattttatcaacttgtagaaggacaaggaatgaagagagcatctcttcattgacatatagtgaaacacttcaatggcatcttcagaatgcttgatgttacagacatatagtgaaacacttcaatggcatcttcagaatgagcatctcttcacaaagccatctaatgagaatattccaag

SEQ ID NO: 9608 - DNA, 497 bp, Glycine max
  Clone ID: jC-gmfl02220103g03a1
tgcaaaaacaagttgtctctctacactccctcattttctctctctagctttttagagagagaaagatcatatcccagaagaagaagaagaagagtctgaaaacatggagaagaagagatttggtgtgttgatgtgcgcagaggattcagagtacgtgaagaaagtgtacggaggatattctggagttttcgtgagaatgctggcggaggagggagagacatgggacgtgtacaaggtggcgtgtggggattttcctgatgaagatgacttgggtctctatgatggctttgtgatcactgggagttgcagtgatgcacatggcaacgacacatgggtgaatgatctcctcaacttgctccgcaaactcgattccatgaacaagaaaatcctcggaatttgcttcggccaccagatacttgggcgtgcattgggagggaaggtgactcgttctcctactggatgggaccttggtgtcagaaccataacactgtcaccat

SEQ ID NO: 9609 - DNA, 393 bp, Glycine max
  Clone ID: jC-gmfl02220103g03d1
aaacgggggagaaaagggaaacattgaatcgggtggtataaacattggctcattgatctagttgtgctgacatagaaggccccataaacacttaatggctggcatcctacctaaggcatggagtgactatccgtgcgaagccgagcatgtatatgccatagcagattagagccaccacacctatagctgttatgattagatcgaccaccctgattgatgcgacgactcgataatattatgactgcgtagcacaactatgactcgtctttcgaaggccattcgtatgcgaccatcgaccctgcgaaaacgtgacacaatgcttatgccaagactgcgtatgtggctaccacaatgcagccctgtgccttgctcgataagcgagagcatacatga

SEQ ID NO: 9610 - DNA, 529 bp, Glycine max
  Clone ID: jC-gmfl02220103g04a1
gcaccatccaacccatcaaatatgcatgtgaaaggatctagttcagatgtttttcgtgttagtgtctcatgtgcacccagcacatccagtcatggatctgcacctgatgattatgatgctcttggggatgtatacatctggggggaggttatctgtgagaatgttgtgcaagttggtgctgagaaaagtgctagttattctagcccaaggacagatattctgctacccaggccattggagtccaatgtggttttagatgtgcttcaaatagcatgtggtgttaaacatgctgctctattcacaaggcaaggtgaactttttacatggcgcgaagaatctggaggacgccttggccatggtgttgctaagaatgtggatcaacctcgtctagttgaagcaatggcttctacaactgctgattcttgcgcctgtggggagttccatacctgcgctgactcaatggctgctgaactatatacatggggcgatggtactcataatgccgggcgttttggtcatggcactgatg

SEQ ID NO: 9611 - DNA, 392 bp, Glycine max
  Clone ID: jC-gmfl02220103g04d1
aggaagggttctaaaccggggattttttattcacttcaattcaacatatatgtaaagggcaccctcccagattaaatggcaaacatttaactttaaaggaagacattacaaaggggagggtacaaaaagattgggaagacaatgaaacccaaaaagggggcctgggtccttaataatgactgttgattttccacaaagcttactgtaacaaaaagtgtgttaacggaaaaatttcctccatttacttccctaagaatataaaacagggaaaccaacaccctttgccctatgtgccgtttgggcgtgctctaaacattttaccttttgtataccctatcacgggttgttgaccaccaagattttggttggagctctccaaaatttcaccggct

SEQ ID NO: 9612 - DNA, 504 bp, Glycine max
  Clone ID: jC-gmfl02220103g05a1
gaagaacattgagaagagtcttgttgaagcttttgagcccatcgggatcagcgactggaactctatcttctggatcgcacatcccggtggtcccgcgatcctcgatcaagtcgaggagaagctccggctcaagccggagaaactccagtccacccggcatgtgctgagtgagtacggaaacatgtcaagcgcgtgtgttttgttcattctggatgaaatgaggaagaagtctaaggaggaagggaagagtaccactggagaagggttagagtggggggtgctattcggattcgggccgggtctaaccgttgagaccgttgttcttcacagtgttcccttggagggataaatcatgctgatgcggtgactagtgattaagagtgatcaataaggaaccctcggaaataccagggaacgtttgctattattactagtttcacttgtggacttatcgtagcatactgttgtacaagaataatttaatatgaacaagatcgtgtgttt

SEQ ID NO: 9613 - DNA, 478 bp, Glycine max
  Clone ID: jC-gmfl02220103g05d1
caataacaaacacacgatcttgttcatattaaattattcttgtacaacattatgctacgataaatccacaagtgaaactagtaataataacaaactttccctggtatttccgagggttccttattgatcactcttaaatcactagtcaccgcatcagcatgatttatccctccaagggaacactgtgaagaacaacggtctcaacggttagacccggcccgaatccgaatagcaccccccactctaacccttctccagtggtactcttcccttcctccttagacttcttcctcatttcatccagaatgaacaaaacacacgcgcttgacatgtttccgtactcactcagcacatgccgggtggactggagtttctccggcttgagccggagcttctcctcgacttgatcgaggatcgcgggaccaccgggatgtgcgatccagaagatagagttccagtcgctgatcccgatgggctc

SEQ ID NO: 9614 - DNA, 337 bp, Glycine max
  unsure (1)..(337): unsure at all n locations
  Clone ID: jC-gmfl02220103g06a1
cacaaaacttgctatagcagtaagctataactcatttgaggctctgtgagaattgagaaatggctaaagatgttgaggttcaagagcaaggaggagagtactctgccaaagactaccatgacccttctncagcacctttgttcgacccagaggagctcacacagtggtccttctatagagccctcatcgctgagttcatagcaacccttctcttcctttatgtcactgtgctcaccattattggctacaaaaggcagactgatacaacggtaggtggcaccgactgtgatggggttggcattttgggcatcgcttgggctttggtggcatgatcttc

SEQ ID NO: 9615 - DNA, 542 bp, Glycine max
  Clone ID: jC-gmfl02220103g06d1
gaataaaaaacctgcaacataatatatataaatattactcaagtcaaggtacattacattcatagatgatgattaataaagctttaataaacaagagaagatgagtacttaattatgaagagtaaaatgagaaatgactaaggatgcacaagacagaaaaggaacactcaaggaatacatacatggaaattaaaaaaaagaaaaagaaaaagaaaagacacaaaagggatacaaaatacacccttggacacaagcatgcttatctacaatttgatgcatgcccccatggttttggccttctcttccaaacacccccaacaactgtagctgatgagaggaaaagacgaaaaagcctaaattagggaactgcatagacagatcactagcactcctcaacatagaaattattattcttcgggggaaacaccatgcatagcccttgttggcaaattaatcaaggtagctagcttaattgattaattaattaaagcgtgctcctgaggatccaaagagcctgatagctgctgctctaaggatgtatt

SEQ ID NO: 9616 - DNA, 491 bp, Glycine max
  unsure (1)..(491): unsure at all n locations
  Clone ID: jC-gmfl02220103g07a1
tgtaaatgcattgacaaggccttagagattttccattctactcttgagaagaatattgtatcttggacatctataatccttggtcttcgcatcaacaaccggtgttttgaagctttatttttcttcagggagatgattcgtagactgaagccaaactctgttactttagtttgtgtcctttctgcatgtgctagaataggagctttgacatgtggaaaagagatccatgcccatgcattgagaactggagtaagctttgatggttttatgcccaatgcaattttagatatgtatgtaaggtgtggaagaatggaatatgcttggaaacaatttttctcagttgatcatgaagttacctcatggaacattttgctaacaggatatgcagaacgtgggaaaggagcacactgctactgagcttttcagagaatggtagagtcaaacgttagtcctatggaagtacatttatctncatattatgtgcttgcagc

SEQ ID NO: 9617 - DNA, 487 bp, Glycine max
  Clone ID: jC-gmfl02220103g07d1
gaaattgcaataacactatagcactgtggaatttaccatgtaaatttccaccccatcaaaattctatttgtatcactttgttggattgtaggttacaatgaaatcttggaccacaggagcagacatgtcctgatttttttccccttttttggaagggaggtgggggtgaacatgttgaaaaaatatatatacttacgtaaaaaaactatatacctacctatgtctatgtacaacagacataacattatttttccccgctctctgtatagcatgctatatatagggttgattgatgattcaaaggcccgttgatcattgacgtgcaagatcttaaagttgcaacattttccgactctgacttttcaatgcgatgctacatatctcacagttttcctgctaatcaggctagctcctataagcttcatccgtgcaagagcagatgcctcccttgaaatggtgaaattgttcagcatcccttacagaaatc

SEQ ID NO: 9618 - DNA, 481 bp, Glycine max
  unsure (1)..(481): unsure at all n locations
  Clone ID: jC-gmfl02220103g08a1
aacacactctgtgaaaaagggggagtttcttattccttctagacgcttccattgatcggcgatttctgatacatggcggagcatcacgaacacgaggaagtgaagggtgagtccttgttggagaagatttctgggaagatccacgaccacgattcctcgtcttcgtcggattccgacaacgacaaaaccagcgccactgattccttcaagtctaatgttttcaggcttttcggcagagaaaagcccattcatcatgttcttggcggtggaaaaccggctgatgtttttctatggagaaacaagaagatatccgcatcgacactcggagttgcgaccgctatatgggttctgtttgaattgcttgagtaccacctcctgactttggtttgccacttcctgatccttgctctggcggnggtggtcttgtggtccaatgcatccactttcatcaacaagagtcacaaagatcccacagtgcaca

SEQ ID NO: 9619 - DNA, 464 bp, Glycine max
  Clone ID: jC-gmfl02220103g08d1
acgaaagcattcaaatgcagagtatgtattcatcatgtaaatacaacacaataacaagtcatccataagcagcatataggatttcttgagaggtacatataaagccagaagaaaaatatataagatacttttcttccacagtgtctctagtaaaaggaccctaaaaaaataaaatatgacatcatagggttcctgaaaccccactacaacatatttgtcagaatctagtgcccacttcaatctttctttttatctttcagaggtcctctgggtatcttgctcaataccttcgcatcaaacactgcatattgcttcttaatctcggcaattgctttctcaccaaaagagtcgacatgatcttcatatttctcataaagcacaggcacagtgtgaagcaaaacaaaagctatgtagaacaaggtcaagaagttggcccaacaacccagaatagagataacccataa

SEQ ID NO: 9620 - DNA, 502 bp, Glycine max
  unsure (1)..(502): unsure at all n locations
  Clone ID: jC-gmfl02220103g09a1
attcattcctctttctctctgatcgcaaactgcacctctacgctccactcttctcattttctcttcctttctcgcttctcagatccaactcctcagataacacaagaccaaacccgctttttctgcatttctagactagacgttctaccggagaagcgaccttagaaattcattatggtggcaacagctgctacttcatcatttttccctgttacttcaccctcgccggactctggtggagcaggcagcaaacttggtggtgggcctgcaaaccttggaggactaaaatccaaatctgcgtcttctggtggcttgaaggcaaaggcgcaagccccttcgaaaattaatggaaccacagttgttacatctaaagaaagcttcaagcatgatgatgatctaccttcgcctccccccagaacttttatcaaccagttgcctgattggagcatggctcttgctgctatcacaacaattntcttggccgctgaaaagcagtggatga

SEQ ID NO: 9621 - DNA, 541 bp, Glycine max
  unsure (1)..(541): unsure at all n locations
  Clone ID: jC-gmfl02220103g09d1
ggtcacaaggaaaattgcatctttaattgggccaagagaaaaagaataataatatacatgcctagctattttgaacaagcaattaaatattgaagacagcctagcagtagcgcaatcagagatgaaatgaaatatggagcagcagaaagagagaatacagcagttgctaattacaatgagaatgagatttactgctgcttttcccccttacccaccaaagtatcacaaattagaaggtgtatatatataaagacatgtagattgattggatagacacaagcaaaactctccccagggaccagaataagtctaaacatagcaaggagactgatgcaactccaatcgttaaccatttcaaaatcttaggtgctttctgctggaacctggttcacaacaccaaagttgttcacaggtttgggcctccactcagtcctgcccctcacaatctcagcaccattttccagtcgaagcaaatgcttgcactcaacatgcccgctgtgagctagattgcccatgtcggncccagatacagcagtcaggg

SEQ ID NO: 9622 - DNA, 475 bp, Glycine max
  Clone ID: jC-gmfl02220103g10a1
gttagccacatggggatggtagatcggcaagagcaacatattcagttcctccttaacattcttcatcccacccaaatccctaaaaattgtcacatccttccccttaacctcaacaccaccacagactgaacccttccgaagctgaaccagaagggcctcctccactcgacgccgccggagcactggccttctcccgttcctactgaacccagcaatgagacccagctgtgcctgagcctgtcccacaaaaacaattaccaaaaaactaggctagagaaaaaaaaaaagataacttctcaatctgtttttctaaactgtttttattttaaaaaatatattttctcttgagaaacaaatcttattgaatacacttatcttaaaattgatttttccctctttgttctcaagatgtcctcacccgaaacccttacattcatggagctcgccatacaacaggcaaaagtagctttggatg

SEQ ID NO: 9623 - DNA, 420 bp, Glycine max
  Clone ID: jC-gmfl02220103g10d1
caaatcatacattaataatcaatacatgaagttgatttttcgaattaaaaagccctgtatggcattcaataacagcttcaacctgcccaaaatgctacggtagcacagatcctcaggccatgactgataaccatatcagtaactggttttatacaaattaaacttcatgcctgacgtgctaaaggcctgtgtggctttggagcattgggatttccttgctcatagaatgttcgaaagagaagaacagcttttgatgccattatacatccagtacatttgaaacactttccgggtgaaacttcattattgagcgggggggtgttacttaaatgcaatgacagtttcgatccacagcctccaaatttatcatttgaacagccataaaatacttcctttatacctaaaattgataaagcagat

SEQ ID NO: 9624 - DNA, 386 bp, Glycine max
  Clone ID: jC-gmfl02220103g11a1
cgtgcctgcccctatacctcaccccacttactattattattgtacaacacaaccaggtccctgaatgctttttagagagagaaagagtaataataataaagtggaagaaaaagaattaggagagtgaaacaagaagaagaagaagaagaagaagaagaagaagaattgagaagatggtgtttgaggaaactgagctgaggctgggactgggactatgtctccctggaaatggaaccacggcaacaactgaagctgctgctgcggaattaggagtgaggaagagagggttctctgagactgaaactgatgaaacagccaccgttgatttgatgcttaacctctcacccaaggaagctgctgctgctgatggtgcagatccacgtgag

SEQ ID NO: 9625 - DNA, 504 bp, Glycine max
  unsure (1)..(504): unsure at all n locations
  Clone ID: jC-gmfl02220103g11d1
gcaacataatttagagtcattatcgtttgtgttcataatttatacttacgacatctcacaactttgtttgaaatatatattatataacaaaccataatgatacacagatttacttaactatattttttaacaccctgctctctccctctgtgtctgctgcagcttaaccttgcttcagttactaagtcaactaggcaccgctaatgatgatggagcagattttggactggtaactactagtctagctcctgttcttgcatttctccacggctcttggtgccagtccaatagcttcctttcctttcatgatacgtaaacgcttgcatgattcaacaaacatctcccatggcacatcaccgacaagcatccagtcgccatccctgtcttcataggtcgggacatagtcggagctgttcaaaagatccatcaactngctctcattcatgaaatccttgaagccttgtgattcacattttcaatggtgtaagagctaaacattttgcc

SEQ ID NO: 9626 - DNA, 469 bp, Glycine max
  Clone ID: jC-gmfl02220103g12a1
gggtttgcaaattatgatggcgacaagtgggctaaacacagaaagatcgtgagtccagcattcaatgtagagaaaatgaagctcttggtaccgatattttgccagagttgcgatgatttgatcagcaaatgggagagtttgttatcttcgtctaatgggtcttgtgagttagatgtgtggccttttgtccaaaacgtgtcaagcgacgttcttgctcgtgcaggctttggaagtagctatcaagaagggaaaaaaatattcgaacttcaaagggaaatgattcagcttacaatgacgctctttaagtttgctttcattccaggttacagggtttctgccaacgcataccaacaggaggatgaaagcaattgacaaagaaatacgagaatcacttatggtaatcatcaacccgaagattaaaagcatcaaagcaggggagcctactaacaaatgacttgtaggcatactc

SEQ ID NO: 9627 - DNA, 418 bp, Glycine max
  Clone ID: jC-gmfl02220103g12d1
gcaaaagccaaaaggtaaactctatcaatttaaaattcaaacatgataaagtttatataaggaggagtaattacaccagtaacttaggcaaaacaggtatatattgatcttggaaatagatttgaagtgaaggttcagatctatcgtctacataagaaactagcaggaataggaaaactaaaattgccaacacgcctcaaatgaagaagccttatttagactaaaaagtgcattctagagtttgcgtaaaatgagatgagccccacgctcaggctgaagagtgataattaaggagggggcatgagcataggagggggaaaaatggagggagaaacgtcttaggatcattgacacagatacttttgcttttaacaagccaaagttttgttctatgcagagtcgtggaccccatccaaat

SEQ ID NO: 9628 - DNA, 536 bp, Glycine max
  unsure (1)..(536): unsure at all n locations
  Clone ID: jC-gmfl02220103h01a1
ctcggactcaaacacacagcacgacgaaacctagcagcctcacgccctcatcgcagcagggacctagccgtcgccggagacgcactgagtctgagagcagcggtgactaaatcaggtttgtcaaagaggaaaaaggagagttacgattcaggtttgaagcactaaatcaatcaaaattgtagcaatgggtgagagcaagaaacgaaagagacacagaaacaaacgtggtggtaaggaggagcaaccggttcttccttctccttgtgctaagcgcacaaagctgaaggaaccctcttcctttcttcaaaagatgcgagcaaggttgtctggtgggcatttcaggatgattaatgaaaagctctacacttgcactggggaggaggcgctagattatttcaaggaagaaccttcgctatctgatgtgtatcatacaggatacaaaacacaaatgtcaaattggccagacagcncagttatgtaattattaagtgggctgaaaaacagagcctttcttttgtggttgccgattttggtgt

SEQ ID NO: 9629 - DNA, 405 bp, Glycine max
  Clone ID: jC-gmfl02220103h01d1
aagggaaggcaccctatctgatattcaataaacggtcgtagcaaatttgtaaaccaagcaaactccccatacgcacttaaaatcaaagaataataatggggccgagaaaccaattactacaataactttgatgatttactaaccatgctgatctaaaagaaaaaaaaaaagaaaaatgtttaactctcatccagatgacattgaatacaccaaaaaaggaaaaaattattataatctcatctacgcttggacaaacaaggtttaagcattggccattcaatttccttccgcttagaaatttgattctccttttttgtgaagaaaaacaaaataaacattttatttgagaaggcctgttttacagagctgaaacctatctcggaaatagcatttgagaacttttta

SEQ ID NO: 9630 - DNA, 579 bp, Glycine max
  Clone ID: jC-gmfl02220103h02a1
caaaaccatggccagaagagtctctcctaccgttgccggtctcctctactttctcttcctgctcaccctcacacgcgcccgcgatgttccgaaccccttgtccgaacccaaacctgactccgaacctggattccattcataccgaacctaataccgttccgcataccatcggcaccatggatcccgtaccgctgacgctcctccgattacgttcgatcaaccgacacttccagcccggccgagcgtagcctctgtcgcttcgtaccgtccaccgacgttgccgccacggccaccgacgcgagatcccctacagcaacgacgccatcctgctcggcgacacagcctgatcgcgccggtataattcgcactgtgttagggttcatgccgacgactagacgcggattccggcgacagttgagcgactcgattccgtccgtgaacaccgtcaccgtggcgagaatgaccaccagcagcagcactaccgacatcaccgactaaaggagagctggttcgcgaagaagattcgcaagctcatgaacctcttctgatgatgctgatgcaacgagtcacgatgatgat

SEQ ID NO: 9631 - DNA, 298 bp, Glycine max
  Clone ID: jC-gmfl02220103h02d1
ttttattttttacttgaatgcaaaacagatctatactaagctataagaaggcactacaagtgcctttagcagactaaccagacaattgaacaggatgaatggacttggacacctccgaattggagccgcgccttggaacaattgtgaaaggaaggcttgaaagtggacagctgtatactcctgcctattgaggccgtgttggtgccatggctcacggtgctgagcaggcatcaccggtcccacgaatttgactgtggtatggagctcatatgcagcagttgctgcaagatattgatgg

SEQ ID NO: 9632 - DNA, 541 bp, Glycine max
  unsure (1)..(541): unsure at all n locations
  Clone ID: jC-gmfl02220103h03a1
gttgaatggttcccgtagatgtcgccggcggtgaccagaaaagtggatctgattattaactcagaaaaatggaacatcagaagagcgggagcaagctaaccagaaaccactcctcgcttctccgatccttcgttcacaacctctcttccatcatcacccaacacgaacacgaacaacaactcctcctcgatgttcacgacgatgacgacaagaacaagaagcccaagaaaccccacgtccaggctcaggcccaagcccaccatgcccaggccctggcccacaggtcttccgcctattccgccctggcggtcttcttcctcggcgcgtgctcgctcctgttctacttcttctactggaggtgtcctcctcggagaatttcctgctggcgctgatcttcgtggccgtggcgctctacttcgtctccaaaaacaagggcctcatcccagatcgttctctctggcgaagcattcgtgggaggagaatgtgaaagcgctagggttttccaaggcngcggcggtggccaggcccgtgcagtggttca

SEQ ID NO: 9633 - DNA, 312 bp, Glycine max
  Clone ID: jC-gmfl02220103h03d1
ggagcaaattcatttttcattgatatacatgggttatatacaagttacaggggggggaaacaaacatactcttttttcaacctccaataagcttttgctcaccagggtgacatcttccaaggactcaaaattagtaaaaaaaaaaaaaaaattacaattacaattccaaacaaagctaacatctaattcttagacatcagggtcacaaaattttccatccatcctgttctgaacagctttcacagcagcaactctagcagcagtggcagccttgctcgcagcgattactgctttgttaacctggtcatctac

SEQ ID NO: 9634 - DNA, 531 bp, Glycine max
  Clone ID: jC-gmfl02220103h04a1
ataccctgtcctgtgccgtgacatctttaagccaattgcaatcaaacaaagtttcagtttttggtgttccatttttcttcctccatctttatcttaaacataacttgaactctccattccttaaattttagctacgagctagttccgacacagacaaagcaatggcaaagaccgagttagaggtgactgttgagagcaagaacaaagacctcaagcacctggggtttgtgaggattgctgctattcaaacatttgtgattgtgtcaaatctgtatgagtacgcaaagcagaattctgggcctttgagatccgtcgtaggaacggttgagaacactgtaaccaccattctcggtcctgtctgcaacaaattcaaggacgtccctgatgatgtccttgtttttgttgacaaaaggtggatgaagcttcccacagttcgatgagcacgctcctccttttgctaaacacattgcggatcaagccagggtgtgattcagaaagtgacttgtgaggcagggaaagtagcaagtgaag

SEQ ID NO: 9635 - DNA, 383 bp, Glycine max
  Clone ID: jC-gmfl02220103h04d1
cccccaaaaaaggcccccggccaatttttttttttttttgcccaaaaaaggggggggcccccctttttgggcttttttcccccccccttttttttccaaaaccccttttttttccagggttaaatccccccgtttgcccaagtttttccaaaaaaaaaagtttttttagcccccccccccccccccccccaattgtccccccccaaaaaaaaggggccccaaaaaccaattttttggaaaaagaaagccccattttaaccaaaaccaggtgtttttgtcctttttccccaaaggggggattttttccctttaaaggaacccccccccggctggaaggcccgggtttttttttcagggggaaaaaaggggggaccccccccaaa

SEQ ID NO: 9636 - DNA, 420 bp, Glycine max
  unsure (1)..(420): unsure at all n locations
  Clone ID: jC-gmfl02220103h05a1
ctgtgatgactcaatcgatgtcgcacaagcctttggactcgcgccacaccacagactcctgcttgttgcagctccgcacctggaaacccttcaagctccagcaagacgggccccaccccaaaccctactaccacaaacgcccctgcctctccgatcgcacaaccacctcgttttccctcgacatgtccaaactcaccctcgccgacgacgacaatcacaatcccaacaaccgcgccaccaattaccgcctcgtcgctcgcaagaggcgccgccgcggctcgcgatccgtgtccggccgcagcagcgaccggagcgggacgcgccggtgctgctccgtgggggccttcgncgcgtacggcacctgctccgaattcccggtggccatgggcaccgactccagcggagagctcttcggcacgg

SEQ ID NO: 9637 - DNA, 375 bp, Glycine max
  Clone ID: jC-gmfl02220103h05d1
ggggggcaatcaaaactcaaaaagattaagggccgggcagtacattttgattttttaaaccccagccccgcctgcgagattttgttttaagatattttttcaaccgtttcctatgaaatctgtttgactcaaattgaaaaggtctccccctccaaaacaaataaccaaagcctaatacttgtggggccggtcttgtacacatattttccttttcaaaaatcattttcggaagtcccccccttcacacttggatcaaaatataccgaagctgattcatccccatcatcatttttttcatacccgccaaaatactttggatattgatttggcaaatgggtcaggcagtccgtccaattttcaagggaagataaaatt

SEQ ID NO: 9638 - DNA, 542 bp, Glycine max
  Clone ID: jC-gmfl02220103h06a1
gcaataactcgttgtacattcctagtgtgtgggagagacatggctaagatgtgtgttttggtgttggttcttgctctggctgtggccacaagtgccagaaacgttcccaaccccaaggatgctggtcttaaagaccagaagaacttcatcagctatggtggagttggtggttattccgggattgggaacaatggactgccttttggaggagctggtgccggaataggtggtggttttggcggaggtggtggacttggtggtggcctcggcggtcctaccggtgggatcgcagggtttggcggtaccggtagcggtgtcggtggcggtattggtggtggcgttggaactggcgttggtggtggatgcggtgttcttcctttcccttgaaatgatgaacatgcatgcatgcatgcatatatgctccgtcacgtttctttggattacactagtctttatttttcgttcgggaaataattgtggtttgtgcttgtacgtgtcgttaatcgttcaagcttctgtctagtgtttctctcgcctgtgga

SEQ ID NO: 9639 - DNA, 420 bp, Glycine max
  Clone ID: jC-gmfl02220103h06d1
agcaaataaatgggactcatatattgagtacattacttccatgctaaatatgaaatattccatatgtaaaaaaaccacgtttatgagtgactatgggtgacacaaaaccttagcaaatgaaagacacagaatgacccattacaacttttttttactttccacaggggagagaaacacttgaacaaagcttgaacgattaacgacacgtacaagcacaaaccacaattttttcccgaacgaaaaataaagacttgtgtaatccaaagaaacgtgacggagcatatatgcatgcatgcatgcatgttcatcatttcaagggaaaggaagaacaccgctgtcaccaccaacgccagtttcaacgccaccaccaataccggcaccgacaccggtaccggtaccggcaaacccttcgatcccacc

SEQ ID NO: 9640 - DNA, 415 bp, Glycine max
  Clone ID: jC-gmfl02220103h07a1
catataaaaatagagggatctccttctcttatccagagaagcatatatagagaaagaaagaaggccctgccctatatagctgaaggcagtgtgcacaaactctgagactgcatattagagtttgagtcttcactctgaagcctaacttgggtttgtgtctctcatagcaagatgatggaaaacggtggcaaacagacatttgaagtctccaatgacacgcttcaacgagtaggttccaagagctttgatgatgatggccgtctcaaaagaactggaactatttggactgcaagtgcccacataataacagctgttattggttctggggtgctatctttggcttgggctattgctcaactaggttggattgctggtcctgtggtgatgattctattcttattgggacttattatac

SEQ ID NO: 9641 - DNA, 397 bp, Glycine max
  Clone ID: jC-gmfl02220103h07d1
ggaaaattggaaagcctttggttcatttcccccattttttattggaaattgggggtcccgagcaggttccaaagttggggaaccccccccccccacccaaaaaaaacaaagatcccgaagatcccggggttctaagcaataaacaagttagacccccttcctgttgatttaaatttgcaacaatttaccttttttttttttttttggggctaaagaaaaccctgcccgggggggccatgacccctaagtaattttcccattgaattaggagcggggaacaaaggggttggaaactttaaaaacatcaataaccccagcaatggaacccggtgcggctaattttgtaattacaaagcttgccacactaagcatttggtggcctatccattttatgccc

SEQ ID NO: 9642 - DNA, 454 bp, Glycine max
  Clone ID: jC-gmfl02220103h08a1
aaggaactgggtctggtaccaggaattcctgttgggacatcattaattgatgctcatgctggtggtgtgggggtaattgaaagtgtgccacaatcagaagctgcagatcatgacaaggaagcaatttgcaaccgtatggtgttagtttgtggaacttctacatgccatatggctgtatcgcggagcaaattgttcattcctggggtttggggtccattttggtcagcaatggtaccagaatattggctaacagaaggtggacagagtgctactggtgcattattggatcatataattgaagaccatgctgcttctgcatgccttgcaaatcaagctgcttcccaaaagatttcattgtttgagcttctgaacaagatgttggaaacaactgatggttgagctgaacctatcctttattgcagccttgactaaggtgtacatgttcttcctgact

SEQ ID NO: 9643 - DNA, 502 bp, Glycine max
  Clone ID: jC-gmfl02220103h08d1
cctacgaaggagggttccaagaagtccaaataaatccaaggaagtcatatggtacaacttagaacaatgatgctatccaagtatcaagctctctatatttttgtacaatatgtatgctagcagtagcagctgcctatttgattttgagaagtgtgcgcaaggcgttcaaggtagtaaaaaataagatgccagtgagcctgtacataaaatttctataagaattttaacaacagtattggtgattatttttccttgtatctctgaagtctgaactgttcaatgtctaacctaccacccaaattgaaaaccgatattcgtcaaactggtagtatttgggccataatttctttctccatcccaatatctttcatccttgaagcatgaatattcaatcttcgcaaggagcacctaattgcaattgacagtttgagtcaaaacattctgcaaagctatgacaaggcttgggccatggcggaacggtacgagagctgctgttcataaa

SEQ ID NO: 9644 - DNA, 419 bp, Glycine max
  Clone ID: jC-gmfl02220103h09a1
caaaacactcataacacaaagcacaaagcaaagctcatccttgagttaaaaaatggcagcagcttcttccatggctctctcatccccatccttggctggcaaggccgtgaagctgggcccatcagccccagaagtgggaagggtgagcatgaggaagaccgtcaccaagcaggtctcctcaggaagcccatggtacggcccagaccgagtcaagtacttgggcccattctctggcgagcccccgtcctacctaaccggtgagttcccaggcgactacggctgggacactgctgggctttccgcagacccagaaaccttcgccaagaaccgtgaactcgaagtgatccactccaggtgggccatgctcggagccctggctgcgtcttccggagttgctgtcccgcaccgggtggaagttc

SEQ ID NO: 9645 - DNA, 470 bp, Glycine max
  Clone ID: jC-gmfl02220103h09d1
ggaaaaagcaagtaacattaagttggattcggatacacaagataattcacattatctgaagtacttcaccaaacacaaatctaaaaactctcaaaagtcatttcgttctttgacgctcactttccggggacgaagttggtggcataggcccaggcgttgttgttgacagggtcagcaaggtgatcggcgaggttctccaatggaccctttccggtgacaatggcctgaacaaagaagccaaacatagagaacatggccaatcgtccgttcttgagttccttcaccttaagctcagcaaaagcctctgggtcatcagcaaggcccaatgggtcgaagctgccacctgggtagattgggtcagtgacctcaccgagggggccaccagcaatacggtaaccttcaacggcacccattaggataacttgtgtggcccaaatggcgaggatgctctgggcgtggatcaggcttgg

SEQ ID NO: 9646 - DNA, 427 bp, Glycine max
  Clone ID: jC-gmfl02220103h10a1
aaaccaaaacaaaaaaggcaaagccatacataaacacacacaaacatagtgagagtgagtgagtgtagtgtagtattgttttgtagctaagcaaaaatgagtttcaccttcaccaccatgaccttgaacttggtcctcttaatggccatggtggccaccaacatcctctccctctaccacctctcctccaccctccaatcccccaaatcccccaaaccacccccacctgtccccgaccaactcctccaccagctccacaccatacgcgccaccatcaaccacctcacgctcctccagaacactaacaacccaactaaaaaatccaccatcccctcagatctactcttatactcccacctctccccaatagcctcctcctgccacaaccaccccgaactccttcacatgtacatgacttacacacctt

SEQ ID NO: 9647 - DNA, 487 bp, Glycine max
  Clone ID: jC-gmfl02220103h10d1
gcgatctgaaacagctgctggatcgggagatccaaatcagtcttatacgaattgaacctcgaaatatcacgagaaggttggaagccgaggttagggttttgtttattcaagcaatcgaacgatttgcattggtaatgatcccaaattacagcgttgtcagggagggaggaagggaaggggcttctaaggtcttagttgaggagaaaaaaagtgttatcacccactgaatggctcggctgaagaagcaatggaaagaagatatgatccacaaggggacagggaagatctagagtataactctacttttctttttccaaataataaaagatctaaacagacagcactgcatagcccaacgtgtgtgccaacaatctaatctaatggttttgcattttcctttcctaaatccgcttacccttaattttttattttagagtccagaataatgacttgaaccacgtccctgaccttaagatgatgatttttg

SEQ ID NO: 9648 - DNA, 395 bp, Glycine max
  Clone ID: jC-gmfl02220103h11a1
ggccttcaatttcacccttcacacgtggtggtggtgttgttcttcttctcttcccctttctttttcttcttctgagcttgtttaagctctttctatttgattccattaacatatattatcacaatgtgtggcattcttgctgctcttggttgttctgatgactctcgagccaaaagggtccgcgtgcttgagctctctcgcagattgaagcaccgtggccctgactggagtgggctccatcaacatggtgactgctttttagcacatcaacggttagccatagttgatcctgcttctggggatcaacctctctttaacgaggacaaatccgtcattgtcacggtgaatggagagatttacaaccatgaagagctcaggaaacagctgcctaatca

SEQ ID NO: 9649 - DNA, 433 bp, Glycine max
  Clone ID: jC-gmfl02220103h11d1
ccatcatgaactgataatagaaacacttttattaagacttcaaatcacagcattcaagataatacaatacgctacacttttagaaagccttatatctatatctatacactacaaagctttgccaagataaaagtacactgcaggcaaatttttcatacacgtttagcatagttcattctcccccaattattctttgtcacagctttatattatccctggattgcaacaccaagaggagcagcatccataggtataatcttctcaatttctacacccttgttgtggttctggttttcataggctgaaatgtgcactccaagtgctgctctaccagaaggatcaaggttgttagaccaagcagcatcccactcaacagctttggctgtgctacatgcaacacttgctcctccaggaacggtgagcctagctgagt

SEQ ID NO: 9650 - DNA, 453 bp, Glycine max
  unsure (1)..(453): unsure at all n locations
  Clone ID: jC-gmfl02220103h12a1
gttttagcgcagcttcttctagatttaaggaagatgggtaaggaaaaggttcacatcagtattgtggtcattggccatgtcgactctgggaaatccactaccactggtcacctgatttacaagcttggaggcattgacaagcgtgttattgagaggtttgagaaggaagctgctgagatgaacaagaggtctttcaagtatgcctgggtgctggacaaacttaaggctgagcgtgaaagaggaatcaccattgatattgctttgtggaagtttgaaacaacaaagtattattgcacagttattgatgcgcctggacatanggatttcattaagaatatgattactgggacactccagctgactgtgctgttcttattattgattcgacactggtggttatgagctggtatttcaaggatggacagactcgtgacatgctctgcttcattcacc

SEQ ID NO: 9651 - DNA, 402 bp, Glycine max
  Clone ID: jC-gmfl02220103h12d1
ggaacactacaaatagaaaggtgacatttaataaaccaaagcaacacaacgcagcaaagtcctgaaactcgctgcgcttaacaaaaatgtaatcaggggttccgacaaacacaacacattaaaacacagataaataaaagcaattttgccaccgtcgatcaagaacccagttctgggaacaacagttgcgagatgatgggggagacttcaaactttgtccgaaaaacaagcttcctagaaaagaagacacatgagtccagaaaagaaaccaacatttattgtaaccaacatcccctgatgaaccagcccgcacgattcacttctttttctgggcagccttggtgaccttggctccggtaggatccttcttctcaacgttcttgatgactcccacagcaacag

SEQ ID NO: 9652 - DNA, 316 bp, Glycine max
  Clone ID: jC-gmfl02220104a02a1
caagttttcccctccgcggaacaaaatggggatgggaactagcacctttgttactagatggatcaactttctcaccatgcttttggccattgttgtgataatatttggagtgtggatgagcactcatcatgatggctgccgaaagtctctcactgtgcctgtaataggcctcggagcagttattttcttaatatctgtagttggctttttgggtgccctgaaaaacaactccatactattatggatttatctgatcacgttgttctttgtcttggtgggaatcctggtcttcacagtattggtgttcatcgtgact

SEQ ID NO: 9653 - DNA, 318 bp, Glycine max
  Clone ID: jC-gmfl02220104a02d1
gcgcgcgctcggcggcggccgccctgtgttgttcgttctctttggacttgttggttgttttttgcatggtctgttgtgggggcagggggcgcgttgtcacctggccgcgttccgagaggagacgcagcccaagagccaggaggacacacgggagaccggccggccaccggggcggggcccccaccgacgcccgggcgggggcagacgcccccccacaccccccgggcggcgcacacgcacccgaccgcggggagcccagaccggggggggggccagaccccggggggggggcgccggggggcgggcggggggcagggg

SEQ ID NO: 9654 - DNA, 358 bp, Glycine max
  Clone ID: jC-gmfl02220104a04a1
tcgaggtggggtaggtactctttggaaatgtctgctgttatttacaaggactgggttttcactgatcaagcattgcctaatgatcttgtcaagagaggagttgcggttaaggatccatctgctccccatggagttcggcttttgattgaggactatccttatgcttctgatgggctagagatatgggatgccatcaagtcctgggtgcatgaatatgtctcattctactacaagtcagatgcagcaattcaacaagatcccgagctccaagcttggtggaaagaacttgtccagtgggtcatggtggatttgaaagataagccatggtggcaaaagatgcaaactcgggaaaagttga

SEQ ID NO: 9655 - DNA, 497 bp, Glycine max
  Clone ID: jC-gmfl02220104a04d1
aaggacaacccttgctgtaatggaaatcgtttacataagatgatgatttattctagtttgcactttgccatgccagctatcattgttgaaacatgcgcgagaacacttaacagcaatttatacaaacagaatttcttcattaacacttaacagcaaacacgagaacattcaatcaccccaaatacataacttaaccatacataggtagatgaaggaatcatattccttctattcacttttattgaaaaccagggaaagtactgcaacaaccatagagcccctagatggagatactgttgggaattcctctgaaagtcaatccctcctcactagaaggatagagcaaagtgtaaggcattttagccggcccactgcggtttctcaacgtctcgtccttgttcttctgtataagcttttgttcaatctcttgaagcttctttccaaacctcttgaaggcctctagtggaccagcatcagaagtccaatagtcaccacca

SEQ ID NO: 9656 - DNA, 497 bp, Glycine max
  Clone ID: jC-gmfl02220104a05a1
ttaattgcaatttagaacaggaatcccacgccacttgcaattccatctcggtgtttgattctctgcttcgtcctttcattcctcttccgaatcgttaatcgttcgatcgatccatctcccgcttccaatgacaacccctaccgacaacaataacaaccctgcacaggaaaaccctaacaaaaccctagaccccaccgaaccagatccaatccctgccaccgaggacgacgccgccgccgacactaaggactccgacgccaaaaattccccgccgcccgattctggaaacgacgctccgctctccgatattcagaagaaaatgcgccgcgccgagcgattcggcatttccgtccagttgtccgagaaagagaagcgcaattcccgagccgaaagattcggcactggttccgcttcgagggatcagagccatcgaaatcggaggagctgaaaaggaaggctagggcagaaagggttggaatgcctagtcctactacaac

SEQ ID NO: 9657 - DNA, 316 bp, Glycine max
  Clone ID: jC-gmfl02220104a05d1
gacggcggccgccctgcatgagcatatttgtcattgcttttgttgatgattttttttttccatgttaggggtattggttgttgttttagtgttaaagttggtgcacggcaacaacagaccaacgaaccagaaagagacacataccagagcacaagagaggcaaaaacccgagaaggacaacaaccagacaaacgcaaccggcagaaggaaaaaaaacacaacgaaaacagaaagagccgaagaaaaggaagaggaggcggggaagaccaaaaaggagaaaggaaaggccccacaagcgcacaagcgaaagagggag

SEQ ID NO: 9658 - DNA, 525 bp, Glycine max
  unsure (1)..(525): unsure at all n locations
  Clone ID: jC-gmfl02220104a06a1
gcaattgaagttgaagtcttgcccttctctcttcaactccaaacacaagacatcatcatccatggctgcctccgtctccactgtcggagctgtcaacagagctcttttgaacctgaatgggtctggacctggggtttcagctcccagttcatccttctttgggagcagcttgaagaaggttattggctcaagggtccccaacacaaagatttcctctggaagcttcaagattgttgctgtagaagagaagaaagagattgaagagacccagcagaccgacaaggacagatggaagggtcttgcctatgatatctcagacgaccaacaggacatcacangaggaagggttttggntgactcccttttccaagctccacaggatgctggaactcactatgctgtcatgagctcctaccagtaccttagcactggacttcgncagtacttggggacacacatggatggattttacattgctccagcttttatgggacaaacttgtgttcacattacccagaacttcat

SEQ ID NO: 9659 - DNA, 507 bp, Glycine max
  Clone ID: jC-gmfl02220104a06d1
aagtggacactttaactcaaaattatagaggaagacagtccaatatgaaaaatatagtaaaatcatctcaaacttggcatcttctctttgcacctaagacattgagaattctaagaatgttacacgcaagtcccatcacaacttctagcacttggatcagcacaaccttcaggaacagaaatatttacttgccaagtttgctttgcctccaattcaagattggaagaaagttcccctgttaatagcatcctcgttagcatttccaagtgcagcctcgttcaagtacttgtcagccaattggactctcttgacattctcttgttcttggacaagcatgttaccatacgtcaagagcttctccagagtcatcttgggctgctcaaaggttggaggtccatcttttgagttcacaagcttcttcccaatgccgtcaacaccaacaccagaaatccacttcctcacttcgtcatcatatactctggccctcagtgcaccaaagaaatcaat

SEQ ID NO: 9660 - DNA, 468 bp, Glycine max
  unsure (1)..(468): unsure at all n locations
  Clone ID: jC-gmfl02220104a07a1
cctgcagagacgcgctggagaagaagatagggctgcaactcgaagaagccacgctcgacgaccttctcgtgccgagttactcgtacctgaacgaaacgctttacgacgtcgattgcgtggagaggattttgagtcactttttggaaggtatggaagcaagaaacgccacgaagacggaggatgcggcggcgacgaggtcgccggcgctgatgctcgtcggaaagctcatcgacggatacctctccgagatagcttcagacgcgaatctngaagccgagaagttctacaatttcgccatctcacttcccgacgaggccagactcttcgacgacggtctctaccgcgccgtcgatgtgtatctcaagggcacatcgtgggttttggaagaggagagagagaagatttgcggattgttggactgtcagaagctgacgctggangcgtgcacgcacgcggcgcanaacgaga

SEQ ID NO: 9661 - DNA, 462 bp, Glycine max
  Clone ID: jC-gmfl02220104a07d1
gagaaagtaaagttattatagtattaatcaattaaaactaaatttatggaaaattaaagaaaaaaatgaacaattacaagtggggcccatatgaaatttactccaacaatgattctcacgtgagggggaggaagttgagcatggtaactaatcatgatggggatgatgctgctggtgatggcgtcctttgcgggtatcaacggtcgttgactcgtgcgaatcacaaacctgagtcttaaacttgcaaccgaatttccggtccagcgacgccctccaaccgccgccggaggcggcaaacttgtcaaacttggaaatgactctcttcatagaggaacactcgcgttccagttgatgcacgcgcgtcctcatgctatccatgtccaagcgcagcacctgattatccctcaccgacacgcgccacgtgccgttccgttcctgcacgtgctctaaccctaatccttc

SEQ ID NO: 9662 - DNA, 493 bp, Glycine max
  Clone ID: jC-gmfl02220104a08a1
cgaacacagtaccccatagaaaccgaagaaagtgccattcttgttccaccgccaaaagattcatcctttatcctctaatgcgagacccatttgaataaatccccaaatatagaaaaaggggttttacatttttccatgatcaataaatagcggttgttgttgttgttgttgttgttgttgttgttgttggatatgctgaggttgtggaaatggtaccagaattgcttggcggttcaccctgttaagacacaggtcatcagctctggcttgatttggggtgctggtgacatagctgctcaggcagttacccactacactgccaagaaacgtgtcacttttgatgcggatgacactaaagaattcaagatcaactggagacgggtgtctacgaccagcttgtttgggttaggatttgttggccctgttggccacttctggtacgaaggtttggatcggggttatagactgaaactcatgcttaaaccgaattcct

SEQ ID NO: 9663 - DNA, 225 bp, Glycine max
  Clone ID: jC-gmfl02220104a08d1
caaaaagcagacggccgcgcttaaagtttcccacgggaaaagggggcccccccgcattaaaaaggaaaaccttccgacaatcccggaaaaactacttccatttcctggaaaacccccactggcaaagtctgggggggtatcccccgcgaaaaaaaaacggggggggccatccaaagggaagtcccacccccggggacccccccaaaaaaaggggcctttttcaaa

SEQ ID NO: 9664 - DNA, 502 bp, Glycine max
  unsure (1)..(502): unsure at all n locations
  Clone ID: jC-gmfl02220104a09a1
ttccatatggctattaccaaatgggatgaaactgtgtcaagagaaatggagctcatggtcaaggagaaaggcatcaactcttttaagtttttcatggcatacaaaggagctcttatgatcaatgatgagcttcttctggaaggatttaaaaagtgcaagtctcttggtgccttagctatggtccatgcagaaaatggagatgctgtgtacgaaggtcaggaaaaaatgatagaacttggaataactggtcctgagggacatgctctttcacggcctgcagtgttggaaggagaggcaactgcccgtgctattcgtttagctgattttgtgaacactccttatatgtggttcatgtaatgagcattgatgcaatggaagaaattgctaaggcccggaaatcaggacanagggtaattggagagcccgttgcctctgggttagcccttgatgaatcttggctttggcatcctgactntgagactgctgcnagtatgtcatgagt

SEQ ID NO: 9665 - DNA, 336 bp, Glycine max
  Clone ID: jC-gmfl02220104a09d1
agagccatcaaaatgatttattttgcaatagtcttcagccatgacaggaaccaagaacgaaggtttttaaataagaaaaagaaaatttatgatgctatatatggcttattttttttttttgagaaaatgctttgtatgggagtaacttcgaatggccctccttggtttttaaaccaatgacatgctattaaagcaggggtctatgactcaaaatatgggtgtagattacaagtgcaatgtgaacctgaacagagagttccattatctgaaagtgctacatactggaaggtgcagctttttattaaagctacgggggcttttttaacagatttagac

SEQ ID NO: 9666 - DNA, 544 bp, Glycine max
  Clone ID: jC-gmfl02220104a11a1
gaaaaaatgggttcttcttcttctatgtggacggtgtgtgtgattttggcatcactggcctctgcagcactctgtgccaacccacgcaggccagtggatgtacaatttggccgaaactacgtgcccacatgggcctttgatcacatcaaatatttcaatggtggttctgacattcagcttcatcttgacaagtacactggtactggcttccagtccaaagggtcttacttgtttggtcacttcagcatgtacataaagatggttcctggagattctgctggcacagtcactgctttctatttatcttcccaaaacgcggagcatgatgagatagactttgagttcttggggaacagaacaggacaaccttacattctgcaaacaatgtgttcaccggaggcagggtgatagagagcaaagaatctatctctggtttgatcccacgaaagaataccacagatactccattctctggaacttgtatcagattgtgttctttgtggacgaagtgccaatcaggtgttcaagaacagcaggacttgga

SEQ ID NO: 9667 - DNA, 434 bp, Glycine max
  Clone ID: jC-gmfl02220104a11d1
gatgaataattattttggtcatattaaataattaataattcaaggagaaactgacatgataggatataattatataaaattgtacataggaagtggaaatgtgaatgtgtggcagggtgataaaaatgaaaagagaagcaacaataataaagtgaatgagaaatttaaatatcacggactaaaatatctattcactcgaaatttaaatgtcacggtctcttttgcactcaggaggagagatatgaggatagcgtttagtgtcagtgcagtagttgtagatggtgtatttctggcgcacccatctgagcctacgccactgggcggcgtcaaggtcacggaactcaggctggtcccaccacctcttggcctgcgtgtcgcaaaacttggcgttcaccgaagcctagcacccgtcgatgtgaaaccccttgtacgct

SEQ ID NO: 9668 - DNA, 522 bp, Glycine max
  unsure (1)..(522): unsure at all n locations
  Clone ID: jC-gmfl02220104a12a1
ataagcatgggtttgtggaacacaacgaatgcagtgtcttgccgctttcacaagtttggtgatgaccaaaagaatctggtcttccaaggtgatgccacgtcttcttccaggggcatagaactcacaaagttagacggtggaggaaaaccagtgggtggcagtgtggggagagtgttatactcttctccagtgcacctttgggaaagctctacagtggtcgcaagctttgaaaccgacttcaccttttccatctcatcagactctactactccaggtgatggccttgccttcttcattgcaccatttgacactaaaatccctccaaactctggtgggagcaaccttggactcttcccatcaacaatgttgttgctgtcgagtttgacacctaccctaatcgtgataagggggatccagattatagacacattggtatcgatgtcaactctattgtctccaggcaactgtangtgggagtggcanaatggcanaatagccactgtacatatcagctataactct

SEQ ID NO: 9669 - DNA, 554 bp, Glycine max
  Clone ID: jC-gmfl02220104a12d1
actcttaataacataatattcatattcattacttataaaagtgaaataacagacacgtacgtacataattaagcagtagtggactaggtagtacgtactctagtctccttatttgtccttaattattggcacacaacacaacacaacatagcatagctagatgagatttattaagatggaaagtgaatgaccagaatcatccgatactgttgttgaaggctaaagaccatgagtgaatggtatttgcttgtttctgctgtccagttgaagcagataatccaaccctaacccattcaggaagcactttgttgagctcaatatcatgggagagtgtcacagtttgagtgccaggatagaaagcagcaacagtgagtctcttagaggcagagttatagctgatatgtacagtggctattttgccattttgccactcccacctagcagttgccttggagacaatagagttgacatcgataccaatgtgtctataatctggatcccccttatcacgaatagggtaggtgtcaaactcgacagcaacaacattgtctgat

SEQ ID NO: 9670 - DNA, 472 bp, Glycine max
  Clone ID: jC-gmfl02220104b01d1
tggttgccgggaatttgccgtggtacatgtgtaggagtgccgcctgcttgggggggggggggggggggggggggggggggggggggggggggggggccaaaaccaaccacatgggtagagagggagggagcgcagaggcagagacaaaagcaagaccaaacccggcgatagtacgcattatttaccaaatagcacaaagcaatgacactgaaggaaggaattttgtcgtgtaagtgtagcagccaataaggggccactggtcatcgccgcctatgcggcaggagtctacaagaaaaagtgtggaatgccacgaaccccctcctggacctagagttggcattaggttccaaataactgcccgtgtgcccacccgcgatgtagtttgaacccattgcggcccagataacatatggatcgataaggctgcgtttaccgaatcaggtgtgcttagggttcattggaacggttatag

SEQ ID NO: 9671 - DNA, 550 bp, Glycine max
  Clone ID: jC-gmfl02220104b02d1
tagctgccggcaatttgccgtggtacacgtgtgcagtgccgccgtgcttgggggggggggggggcaaaaaaaaagagtatgcaacgcatacagaaggttctaaagtactaaccaacgctagcatatagaccggtaagttacagtgaagaacggagaggggaataacacagaacaccgggatttagaaataaaggcacgactggaccagacattgcccattggcgagacataagatgaaggcgagtgaatgggcaatgatgcctacttacagcaaaagcaccaatactactactacatacaaggcatgaacacgagtatggcacagcaacttgtgtaggggcaggggcacgcactggaccagacattgcccattggcgactcataagatgaaggcgagtgaatgggtaatgatgcctacttacagcaaaagcacgtaggggcaggggcacgcagtgggctatagcggttgctagggagttggtaacgtagcgccacgttcatctggattaattggagtaaatatagcacaattaaaggctaaaaggggggg

SEQ ID NO: 9672 - DNA, 407 bp, Glycine max
  Clone ID: jC-gmfl02220104b03d1
catgaaatattctttcaaagtcattgaattcagctcaatgaactcaattgctttttcttatccttgtagtcaaccactacatataattgaggaaatgagattgtcttaaaagtggatcaagatatataaaaagatacaattgtttcagaacatattacattacttgggataaagaatggtcagaagcttatggcgacaaaatgaagcatgatgacatcttcaataggaagcagcaagatatgactatttcgtgtcaacagcatgtcagcatttcctaacactttcaggagctcccgagtattacattgaatgtttcttttactttccgaaccaaagcttccctgtcgggtttgaaaactatgttcttgtatacaaaccacccagtgtatgcaatgccctcgagccca

SEQ ID NO: 9673 - DNA, 530 bp, Glycine max
  Clone ID: jC-gmfl02220104b04d1
tttgttttttttttttttttttttttttttttttttttttttttttttttttttttttttttgtttttttttttttttttttttttttttttttttttttttttttttttttttttttttttttttttttttttaaaaaaaaaacccccccattcttggtttttggggccgcccccccccaacggggagaactaccccaaaaacccacgcggggggagggggagattaacaacacgggtcttgggtctccaaacacaatcccgtgcccctttgcaggaaaaaaacatttcccctttggagccccccgggggttcttcaattagggaccaaaagggggggggccccgggggggaacccgaccggccccccctttttggttttttttccccccccgggggggggaaccacaaaaaaggacgggggggggcttttgggccttttcctgcaacaaaacttttttgggccccccccaaaaaaaaaaacgcggccccctcccccacgaaaaaaaggctttttgggggggggccccc

SEQ ID NO: 9674 - DNA, 450 bp, Glycine max
  Clone ID: jC-gmfl02220104b05a1
tagcgtcgatctgtcgctacgaatgtgccagagtcctgtcacctcacccgctcatgagcattgctcatggtcagtgttcctaagttctcctcaccggtcgttacgaaaatcctcttcgagactcccagtgctcatctgccctccacgcctaagccaccctcacaatctcactaataaccgcagtcaaggcagcaatcacagacttactagtgttcaggataccttgttccgcaacaactacgatgctaatggcctctccacctgcaactggtgcagtttcagcggtcaccacaggacccatagcaataaacatctctggtttcagaatatggctaatcttcgttgtcttggtaaccaactgtgtcaagttctgagccaatgttgtacaggtccaactcaccctactaactgggatggcccgttggcaatcccatcaaaggagcaagaaag

SEQ ID NO: 9675 - DNA, 435 bp, Glycine max
  Clone ID: jC-gmfl02220104b05d1
aaacaaaacatctcttcattaaaatctgaggatgattagaatatagtacatgttacaattatacatttttccacgtcaggcttgcccatttgattcgatttcttcttgcccactttcacaagtttttgcattgcatctctgaatatcacacaaacaaacaaataacttatggagtaggaaggtgatcttccaccctttcctccaaacagatgcttctttcaacacttttaaaagaacaaaaagacaaaatgaaaacaaggtataacaagacatcttaggaatcatcggggttagtaatcaaaggtggttcggtatcctcgttctgagcttgagtttcagtttgtgttggaacttcctgctgttgctcaactagcctgctcatacgctctagcaattgtccagcctttcttttgcctctgtctgttccattttgag

SEQ ID NO: 9676 - DNA, 551 bp, Glycine max
  unsure (1)..(551): unsure at all n locations
  Clone ID: jC-gmfl02220104b06a1
atcacgtcgatctatcgctacgaatgtgccagatgccgtgcactgagtgtgccgtaaaacacagcaaggatctttcgtgcagggttcctccaccagcctggtgttcctcatgcgctatcctcctgcacatgtttctcaaaaacttaaattgtgagtcaagcggagtcctctgccatagtattccaactattcgcgtctanatcggccattaagagagaagccaacctaaacgtagtaaaaaattacaatgtcactccgctcgtcactactgttcaaacgagtcttcaggttactatctatgtcacagaagacaagccagccacagaacaaaacggaagggggttgccacgaatgagctgcgctaaggacagtggcgcgttaaaattaaccccgccagctgctccacaaggggggtctccgtggttgttggtacttaacaataccgagattgatccgctgtggtgcaatgcggatgcgaaccaatgaagcaaacataacctaggcacgtaggggcatatttagccagcaagcccgagcgtatgaagtgcctg

SEQ ID NO: 9677 - DNA, 478 bp, Glycine max
  Clone ID: jC-gmfl02220104b06d1
gatgattgtaattttctcttaaattataaacgattatgcagaatttgttccttatcttaggaaaaccaagttaacagtcaaatcacttgcttcacattaattgcacctacatgctacacacaattgtttttccatgatatctagtaatctagttctcctgcgcatggtagacttgagaatcttccttcattcctggatcaatttcaggagacgatttggatgcagtaatgcaacttttaatccaggaatcatcaaaattgttagccttgagaatcttggacaactcatcaacaccatccacatccgtctcttcttcatagtacttgagaaaagccccaacaacttgtggtgaaggacgccatttatcacccttgacttctgaaagcgctgcctccaagtgcctcacagcagcatccaactcatgtttcttcaagaaaaacttcatgaactcttcccgaaccctaaagaaaggcccttt

SEQ ID NO: 9678 - DNA, 146 bp, Glycine max
  Clone ID: jC-gmfl02220104b07d1
tttgtttttttttttttcatcaagattgattgatttaaatttatccgaatgggttatagggaataacaaaaatgcattcacatattcctcatacgaatttaggaagacaagctcgtgcatgaatacctaaattgacaaacatatcg

SEQ ID NO: 9679 - DNA, 591 bp, Glycine max
  unsure (1)..(591): unsure at all n locations
  Clone ID: jC-gmfl02220104b08a1
atagcgtcgatctgtcgctagcgaatgtgccagagtgccgtgcatgacccaatgaacacagcggcgaaactgagaaaaaacacatgaccaactaaatgtgttaagatgtaatgtgggctgcgtagcggctgccaaagcggcagcaataagaggccacactagaggtagcactaccgcaggcagatgccaaggaggttgaggtgacgaaaaaggcgcaacaaaaacgtgcagggcttgcgcacccactccagagggtgttgatgacagcttatataaatagtttggccgccgctagtgccaaacgggttatacgaggagaagctagaggagcagggccgcacgctgccacgctacgggctgtaacccagtaacgccgttaagtaaagaagttgacggtataattgacgaccatgacgaagcgattaaatacacactaacttgcattgaaatagcaactacggctgtacttactacacgtttacatgcgtttgcaagtgactaggaggtaaaacctgcctaagctaggacaacgattgaaacaacgtttgcagcggcngcagctgtaaaagttggtaccactagcccagcaag

SEQ ID NO: 9680 - DNA, 433 bp, Glycine max
  Clone ID: jC-gmfl02220104b08d1
caccaactatcggttaatattaattgtgggaagcagaaaagaaacaagtccacaataaagccaaacattacagcgaggtcccaaaattcgagaaaccatcacaggccacaaatgcaaaccaattcaattcatttaattcaaagctgcgaagaagtcctatgcataacaaaagcaggaaacaaccccaactgtctactactctctgtcttcatcactgcaggaggtaagtagatgaagaagcattcattcaacaatgccgcatcatcatcatcatcatcatgtgtaaatgctcacaatttcggttggaagagcaattagaacaatggccaaagccatcacaatcgcataggtaacggtactactgggttgaaccatgcttccatacgatgcgttttggctcttgggggtcgtagtttgtgagtttgaggttgca

SEQ ID NO: 9681 - DNA, 520 bp, Glycine max
  Clone ID: jC-gmfl02220104b09a1
tcacgtcgcatctgtcgctaggaatgtgccagagtgccgtgcacaaaaaaaaccaaatttggtggactggactggtggtggtgttcagtaatacgtcttgttgtgttgttggaggggctcgtcttgtcttccaaacatgtaaaatacacacacacacacacacacacaacccgttcgagaaaggacccgggtgggtattgaatacacttagtcaattgacttgtggggggtggttgtgggtctacactcactcatgtctcaaaagaacagttgctgttgcagtgaccgtctaaaagtctacaagtaggtcaggggctcaggtacagttgcagggggatgattggcttgcgcaccaatcagcgggccggtcaatttggggccctacgtcgtcgtcactttgggtcctgtgtaagtccggggtccatacattaaggtcacgactaagaagttggggcttttgaacttagggccgacgatactgttagggccggtctaaattcgtccggttagagggccaccg

SEQ ID NO: 9682 - DNA, 418 bp, Glycine max
  Clone ID: jC-gmfl02220104b09d1
gactgaactcttaatcaacttattgaaataaaaaaaatcatatcaaacatcataattcaaaaaaataaaagttgaaataaccataacagctatgcgaatcaaaatttaagtacgtaaaaaaatgatactaggaaacccatatttgaacatccccaaccgtaagatctatcaaatatccccaaagcaagataagaaccacatcaacaacattggcccaagctatatccacacaatacagtgacaatttacaggaaaaaaacaaatacattttaaagcagaacattggttctgaaactatcaaatttactgtggtcttccactgtatcaaaaccagacggaccaaccttagttgtcatcatttatccaactgttttcatcttctactagcttggagatgctgaaatggctgaccctgatc

SEQ ID NO: 9683 - DNA, 386 bp, Glycine max
  Clone ID: jC-gmfl02220104b10a1
tcacgtcgatctatcgctatctgtcgctacgaatgtgccaagtaccgtacctggtgtggcaatgacgtgtgctctgatatttgttcggtgtatgggtgtttggtggtaagcttatgtggtggttgggtgtgggtttatgcacacacatgctaaatgaagggtgacgaggttcatttcacatcttcgtttcccgtctcatttccctactaggctttacaacaactcttctcatcttgtccttcaccaccaccaagttctgaaccctcttgttattattaagcttcgcaagcacccccaccccataccacagccccaatatcccgtaacatcacgcacacgcccaaaccgcaatcacaacttacggtatcaaactggctccactagac

SEQ ID NO: 9684 - DNA, 322 bp, Glycine max
  Clone ID: jC-gmfl02220104b10d1
aacaaaatcacatgggcttaatttattcaacacagcttcacagacaaacaacaatgttgatactattacacaatatgtaagcctttatgtattcaggacaagcagcattcttttacaagaataataactatcattttaaaggttatgaatgaagagtatcagcatactaaactacatattgggtaaatgaattcattttccaacacactaacaaatggagttgcttgagtactaactagtgatcctgtggaaacaaaccacaggtccatgcctcttgtagaaaacaaggaatgaggtgtctataggactaaacaacaacacc

SEQ ID NO: 9685 - DNA, 468 bp, Glycine max
  Clone ID: jC-gmfl02220104b11a1
acactaggagcagctgtcgatctatcgctaggaatgtgccagagtcctgtcacgcttcactgaggctggttgatttaaaccagagtaaaccgacaggtaggagtgatcggaacctgccgcgtgagcatcacgatagcattcggtttaacacggtaaacaataggtgtagcgatgcgcagcctttgctgaacattagtagtattccgtctatcaatggtcgtgagccgcgtaacattagctaaatgcatatgggtcttaatatgctacaacccggtaggcttaagctaagcataggttacaatgtgcttgcgctgcagccatattaagttcggctaggtagcagttagccacatagcgctctgtgtcggccgagcttatagtgtcccggattaacatattggctgtcgctacattaatacctaaggtgattctagtgctcgtagagatcctgtacgacatggtagtggt

SEQ ID NO: 9686 - DNA, 448 bp, Glycine max
  Clone ID: jC-gmfl02220104b11d1
gttaatcaaagcaattttaaaaattttcattaaaaatatttccggtagacctccaaagataaatacaaagaataacaaattgtctacggactatgaccctcatcatcacactctctaacagtactcaattgatgatgcatggatatgtgtttgtgtaatttcaattaagccttcatgaagctaagtgcgtgaggaacacggagagctttcaaccagtcgcttccaccgttggctccagcctgtaggaactgggcaggggtgaattgggtagcttcttcgcggctaataagaccacggtaacccttccacttgatccttccgttaacgttggcaccaggtccatcgttgttgtattcagcatagtacaaggtgtcttcgaagtgttcaccggcccatgggcaccatccttcggggtgaaggaagtcacccacggtggattccatcacaa

SEQ ID NO: 9687 - DNA, 582 bp, Glycine max
  unsure (1)..(582): unsure at all n locations
  Clone ID: jC-gmfl02220104b12a1
catacagagactagctgtcgatctatcgctaggaactgtgccaggtgcctgtgcactgaatgacctgaccgtagcggggtaaacatttgcagaccgagcagtttcagtcagggctgcgccccacccaacaccataaccgcctaccgctaggtgtagatagggtagggccaccccctacatagccagcttggccccacttagggctagagtgctacagaaaactaagagccatgtagtgctggaccaaggggcactgccacggccgcgtattggggttacacagtcaggccaagcttagccggcgcccacgcaaccccaaacgcagccgttcagagaactccaaccactgggtacggaagtaagaccattatagaaggtacgcgtgcctagcaggcgaggggaactacggaggccgacgtggggtgccggtactggtgcgtaaacggtcggcgggagggcctaagcaagagtgacaagtggcaggcgcaggngcgggggtggtgaaggtgagcgacgcagcngaatggannaaaaaaaaaagaaccctccatcttcatgacgcactgtcgtcatttcccagga

SEQ ID NO: 9688 - DNA, 436 bp, Glycine max
  unsure (1)..(436): unsure at all n locations
  Clone ID: jC-gmfl02220104b12d1
aagttaaaatcacttaatagaattagaagaaaaaaaaaatcaaaatcaagattctagatattcattgccaaataaacaacgaactttgacagaagctgaaccagaaaagactaacaataactgcttaaaataaaatcatgccagacactgaattatgtggtcctattgattaactgaaagctccttccgcttatatcggaccatcactttccccttcactcccacaaccatggcattccaatcgatctctggaaaaggtgacaccaactccagctcaaaattcctaagcagatgagtccatattgcttttatctgcagatatgcaaatggctccccaaggcatccatgtctgccccctccaaatgaaatgtatgagaatgcacctgccaccttgtnctcttccctccccacagcaaatcgatcgggatcataccta

SEQ ID NO: 9689 - DNA, 494 bp, Glycine max
  Clone ID: jC-gmfl02220104c01d1
taagctgccggtgaatttaccgtcctacatgtgtagcagtgccgccttgcttggggggggggggggggggggggggggggggggggggggggggggggggggggggggggggggcccggcaaaaaaaaagccggcatccggggaatagccgcaattaaggccctagaaggctcggggcagaaccagctttggcaggccaataaccgctgcttgataggtgtatggtagctttcgatggaagtataccggaccggataatggaagggacacccctaccccccaaaaggaatttaggatcggccccaaataaaagcgaacataataagtaaaaaatcggggaggcgttattggataaaaagccggattaaaaaggcatgattggctcaaagagggaaatctagtgtcctgggggagaccgctgccccgggtggcccagtaccccgaaatttagagcccccctccgacccatagtaaaaagcaggttactggccagg

SEQ ID NO: 9690 - DNA, 495 bp, Glycine max
  Clone ID: jC-gmfl02220104c02d1
tacttgccaagaatttgccgtgctacatgtgtagcagtgccgccgtcattgggggggggggggggcctctagatagcatatgaagttagtcgtagaaggtattaaaactaggcaaacaaaagtagataacaagagctaataaagacaaagagcaatcctctgatgtatgaacgagaatcatatggaaacaagtagaataaaaagtagcaaaggggcaaagaacaggacagacctacgacgagtggctcttctagaggaccggacggcgtcaatccatgcacagtggtataggaactacagcatcataccggagacgtactgcgctaattagtactacacccatagcgtgtaactgggcctggtcacgagagcgtcctacaaggactactgagtacgcttgttatgaagcaaggcttggcaagggggactactaagacagcgatagataccaaaacctgggtaggtcagcttaaaccataagctagcaaaagaggt

SEQ ID NO: 9691 - DNA, 338 bp, Glycine max
  Clone ID: jC-gmfl02220104c03d1
ggtcttgaattatttatttaaagaaattcctttttggcatttaaaaattacaacacttgatgacacgaagttctactcaccaaaacaaatgataaaacgttttattgaccaaaaaaccccaaagctcttggttgataatgtgaaacaagactctacaaaatacaattattgaatatcctagaatctcatggcgctagcgcaaccgtagagctatgtgccaaaaaatagtgaggaaaaccttggggctataaactcatgaagttatcaatcatgtgtaggcagggcagttatctgaagtcgcgcaagcgaccctacatgtgagcttgatcaaagttaat

SEQ ID NO: 9692 - DNA, 278 bp, Glycine max
  Clone ID: jC-gmfl02220104c04d1
ggcaaaagtttttttccttaataacatatacacagggtattaaacaattaatttacacactttgatgagaagttcgcaagaatcaaaacagaacccagtatcatgaacattggcatgattcatgatcactaacaaacgcacgtagcctgaaaactataagaattctgcacatacacgacacaaattgccacccccaaaaaaattaaaaagaagaagaaagaaaccgtgatgaacctcgcataattaatatgctcataatttaattcaattcaaatttc

SEQ ID NO: 9693 - DNA, 258 bp, Glycine max
  Clone ID: jC-gmfl02220104c05d1
cctagaaaggggaaaattattgagttaccagttcacaagtaaatgacctgtatgaaaaataccattttagtatttggaaaaccaacattacatggcttttggggacaatgccaattacaactccaggccccctaacatgacaagcctctgactttgtgattaagtttcaggcgaaacattttggtacagtttctacatcaagggcttcttcctatgtattaaacccaaaagggaaatggaatattcaccaatgagaat

SEQ ID NO: 9694 - DNA, 536 bp, Glycine max
  Clone ID: jC-gmfl02220104c06a1
ctagctatcgatcatgtcgcgtagcgcaatcgtgccagagtagccgtgcaccgggacaacgcaaccgtgaacctcgttgaaacttgtagggccagcagaaccggaggcgagtagccaagccatgcctaagtgtagtggggctgaccctggtgaacaggtgtaacccgcaacggcaacccattaaaggtgatgggttgcgtcggcctatgcaactaaaccccgatggcacaaggctacaaaaactactaggtgggagggccaaatactgggataagcgccaaatgtatacctgatattagacgggtacataggtgttcgtgaaactgttgctgggtggccagcaggagctggggtgcagggtgccaggctgccagtgtgagcaagggccgccgccaaggaatgcctggtgagcccttaggcaaggctaccaaatttaccagcttggcgggtggcagaccataccaacgccagagggtaagaagatagcacaacaggtggttcggtgttgttcccgaaaccaacattagcagccgcta

SEQ ID NO: 9695 - DNA, 146 bp, Glycine max
  Clone ID: jC-gmfl02220104c06d1
ggagaagataattatttcaaccattgcctacataatacatatacaattatatatccatgattccatcattctgtatcacatttaaagaaaaattatggcttgttgagcacaggcaaacgaaaaggatatgcatcaatcccccaact

SEQ ID NO: 9696 - DNA, 526 bp, Glycine max
  Clone ID: jC-gmfl02220104c07a1
gcagcgtcgatctatcgctagcgaatgtaccagagtaccgtgcacctgcagtttgtgagtggcggtggtacgtgttgttgaggagttcttattcgacttcttcttcaatccagtcatcagcaacatcattggtgcagttcgtaacgccgcttccagctccaccattattattgctgtaatctccactattatggtgttcttggtaacataaacggtcctaacattgatcttatctaccaccactatcattattctggttcgagtggtaacaataatggctgttctcttaacgtatattacaaaggccagtttgttcttcgttatcctcgtattaccggtgttcagtgtatgttcgtccacgggtcttcttacggttgtccttgcaacttctgttcgtggtttgtgcatctgtacaactgtatcagttgattcattaatcattgcttgattcagggtcaggcctctcaatagccccttcggatgccacgaaaaaagtaccggtcgcttcagtcgcggccgttgggat

SEQ ID NO: 9697 - DNA, 410 bp, Glycine max
  unsure (1)..(410): unsure at all n locations
  Clone ID: jC-gmfl02220104c07d1
gggagaactcaaattaatttcattcaggttacttgcaataactataacagggggtaatgatttggggctagactagctagcatagagaattacagaataaaagcctaaacatgtgcttagcagtttcctccttcataacattacattgngcaaattatttcnacactaccaaaacttnnnccccttccacacanaaggcatccatccttatatttaattgttagaaacatgtatagcagcgacaggtgagaccatcgagtccaccccacatacattgcgacctctgcagatcttgtaatatccctcttctccccagctctccccccatgaattctttatgatccagtaaggcttttccttaaaacgaattggagcataagcaccagaaccataccccaccaaaagaaccc

SEQ ID NO: 9698 - DNA, 558 bp, Glycine max
  Clone ID: jC-gmfl02220104c08a1
tcacgtcgatctatcgctaggaatgtgccagagtaccgtgcacgagtgaaacaacatcgaaattgggccccaatgtgcgaggcaggatatcttaggcaagtgtgaaggtcaaggtgagtctacatttggggtcgggcgttgtgtaaacgggtcggtggggcctttccaaggcagagaggtacgctaaaaggggtgggggcttgcagaagagagcgaaatacgagagctatagatagctttgaggggccgcgggcggggaccgcgcttaagccaccctaaaagtggccaggtgtccaagtacctctagcggcgccaaaagggagtgctaacccgggtgacggctgtttggcctcataacagagttgaggttcaggtgttgtgccagcagcaccgccggccgagcaccaacaaggtgcggatgaaacacgaggcgcaggtgggggttatgcagactatgcaaccctaggcgagaaaggtggtgacaggagagttgcaaggattgcaaaaataaagccaaaacaagaatcaccatagccacgtggtactgaagtggtacaa

SEQ ID NO: 9699 - DNA, 500 bp, Glycine max
  Clone ID: jC-gmfl02220104c08d1
aaagcaattgataataatttagtattttcttgttcattatatcataaataatagcgtattaccaatccacatatttcaatcctctaaggatttccagcaatccaactaatcagctagagagctacatactcattagagctaaaatgctaactatcaccaaatcttacccaaagagaacaaccattgtcatcaaataaccataacttcacaagccacttaatttcaacattttaagctataaaaactaaaacatgactcaaacaattttgcttttttctttttattgttctttgagtcagtgcttctcagagccagaatctctcttctcccaaaacttgaactgcacagatctttgttccagcatcttctccacttcctccatagaaacccctttggtctcaggcacaaaaacaatgacaaagaagattgccacaatggccacaattccaaacagcatgaatgtccatgctgtccctatagcttctgtgagggacaagaag

SEQ ID NO: 9700 - DNA, 535 bp, Glycine max
  Clone ID: jC-gmfl02220104c09a1
tcgcgtcgcatctgtcgctaggaatgtgccagagtgccgtgcactatggcgccctgtgggcaccatgtgaatggcgcgcttaggtatcttaactcgcgcatgaggagctttaaccagaggtactgcctaacaaccaggtcgccgcactcgctggcacggccgctcggtgcgcgggcgcaacagccaggcggccgcctgctccagccgcggggcggatgaacggggtgggggcggcaacttgagaccggaggacccaaaaagaccgcgggatggccgacgtagaggaaggcgtaggcctaaagatgcttgaacatatgcgcaaccgtgccggcggacaaagggcctagcgagggcagggggggccagttgggagggtgtcggggagggtgccggcgctacttatgggcccaaggcgaggccataatgggtgcggcttagtgaagtgacggcaactgactggagtcgcgtaaaaaaaataagaaagaaaaaaagaaaccctcgttcttcatgacgcactgtcgtcatttcccaagga

SEQ ID NO: 9701 - DNA, 314 bp, Glycine max
  Clone ID: jC-gmfl02220104c09d1
tgcagttcgcgaccgatcccagggtagaccaggttacacgagctcggtcgtcggcggccgccctttttttttttttttttttttttttttgacacgataagctagcttcaactagattagatggcaacagaaagttgaccaatacaattcccaaagtggctgcacaaccagaaataaaacgagaaataaaggatccaaaaaaatgaaatacatgccaaatttctaacaaccagaccttcacagtgtattatgcaagttttgccaatgaccattaatatgtgtacccagtaaacacctatttttccctaataacc

SEQ ID NO: 9702 - DNA, 594 bp, Glycine max
  Clone ID: jC-gmfl02220104c10a1
gatcgaactagagcagtcgagatcgtcgtaatcgtagtcggtgtcagagagatagtcagtgagaccaactcgcgtgatgctgaggcagtgaaaccaattgtgagagaagcgcgcaaactaatggacaattaggctttagagattatcagtacaaatgttgaggcatagaagatgcctcctgaaccgtgtccgcgctacattactgcgagtgttgtccacgaaaccgatttcagcagtgtgggaggatgacgacgtaagccgtagctaagctaagcatcgttaagtccagcttagattgcaaaataaagttcatttagggggaacaaaagcccgtaacttgaaccttgggaatttcaggcgccgtctccagtatactagcaagctgacacggggttctcatttaattattctagccgccactaaacagccataggccaccagctgcagaccgccgacaacaaaacagacaccaagccttgagggagagacaacgaaccaggggcacaacgccagttaacttaactatttcagttaggtcctgctagttatacgtagcgcccacgctttccaggggagtttcggtgggcaacccaa

SEQ ID NO: 9703 - DNA, 479 bp, Glycine max
  Clone ID: jC-gmfl02220104c11a1
acactaggagcagtgtcgatcgtataggtagcgaatgtagccaggtgcctgtacacctgactggatgagtgagcctgagctgaaccagataggttcgcccacacgagcgcaagctttgtgccggcagccgcgataaggtaaaccacagccggagataatggcgcaactaacgccatggccctcggctaacagaaagaagccaactgcggcctagcagctgtaaaagccatagctaggggtgctggcgggccagaagccaccccgtaaagcttacgcgtttatacccgggacaccgcagccgcgaaaaaaggcgtaacagagacagcaagctaaacacaacaacctggcgtacgctttgcatgcgactgctaacaagatggccccaactgagcatgctacggcgaccccacagtggtgcgagagcagccattatcagattgctagaacgaaaatgcctacgtaccaaacagtgatgccct

SEQ ID NO: 9704 - DNA, 354 bp, Glycine max
  unsure (1)..(354): unsure at all n locations
  Clone ID: jC-gmfl02220104c11d1
ggggggcccaaaccgggggggtaaacccccccaaaaggcccccccctgggggggaaaaaaaaatcctgccaaaaaccaacaatcacccccacccgcctcctatacaccacactcccctcttacgaccacatttccacccacctaaatctccaacataaacccaccaccacccccgggggggggagccctcaccactctacgacacccctcnncccccccttttatccccatgcccccagccaaaaaggggccaaaaaaaaaacccccccccccgcccgccggaaaaaacaaggggggggccccctttggcccccacgccctttggacaaggacaaaaaggggaaccccgggggg

SEQ ID NO: 9705 - DNA, 425 bp, Glycine max
  Clone ID: jC-gmfl02220104c12a1
acactgagagcagcgtcgatctatcgctaggaatgtgccagagtcctgtcacctcctcgcggtcaaggtgcatctggggatctcacaaacccccattatttgtgaacttgaacgaggttgtaagcattcagactcgataacgattcgcacccaaaccgcaaaacaatttgagggacccacgctaagacacaattgcacagttcagctcaataagtacgtcaaccactggacacttgggatggcagagggacgaaactctatgtatgtgaatcctcgattggggctagcagcccgtactcacaaaagcccaatactcctggaacttaggaacgcgacctcttgggtacaccgccaagtggtgacggtggctgagggcatttcaaattcagtcagtgacttagcactaccggcaacacactgtgaat

SEQ ID NO: 9706 - DNA, 612 bp, Glycine max
  Clone ID: jC-gmfl02220104d01d1
ttagctgccggtcaatttgccgtggtacactgttagcagtgccgccttgcttggggggggggggggggggcaatgcaagattttgataaaaaccagagaagagagcactaagaaaaacaagatagcttggttaccagctaaaactggggaccgaataacatttgaggggtgaacctgctgtggaatacaccatctgataaatgacaagaaactgatacaaagcggaatggaccaattagagtgcctttaaggaggagatggcgtatttgtgaaatatacgaatagcagccaatgagctgcaaatgccaagtatggcgactgagcacaataacaatgatagcctgactggggtgacgaaccggtggagtaaaatttaatcaaagaataagcaaagaaacacgcagtgagcgactttctagtaaaaagctagaagtgggcagggtgaaaatagcaaattctgtaagatggggaactacggggtggcgggcctgtaaacatagatggcagtacgcaggttggcagccaaacaacatgtaccaatgtcggtggtacgggccagctagctagtgcaggcagctgttcgccactaaggagtattggcctggctgtggt

SEQ ID NO: 9707 - DNA, 422 bp, Glycine max
  Clone ID: jC-gmfl02220104d02d1
ttagttggctcatgtatttaccgttgtacatgtgtagcactgccaccttcttggtagggggattggggccccagatgtgcgaggcaggatatctgtaggcagtaatgaaggtcaatgttagcctaaatttgaatgtcatgcgttgtgtaaacgggtctttggttcccattccaagggcaaaaaaaaaggctgatattaatgaggtcttacagaagatagcgcaatacttgagctatagatagctttgagatcctcaagctgaaccacgcttaagccaccctattaggtgacaagttgtccaagtacctctagcggcgccaaacggcaatgctaacccatagtgacggctgcttgtcctcataacatagttgaggttcagggtgttcgtgcgcagcaagcatccgcacttccatagcaatcaa

SEQ ID NO: 9708 - DNA, 147 bp, Glycine max
  Clone ID: jC-gmfl02220104d03d1
aggctctcaactttcaccaactatcggttaatattaattgtgggaagcagaaaagaaacaagtccacaataaagccaaacattacagcgaggtcccaaaattcgagaaaccatcacaggccacaaatgcaaaccaattcaattcatt

SEQ ID NO: 9709 - DNA, 404 bp, Glycine max
  Clone ID: jC-gmfl02220104d04d1
gataagaacaaaaacagtagtttcaagaaatcaggaaaacaaaaataccataatcagttataacatttgcaactgaaacttacaaacctcaggtcatggcacataatctgagaacataattacaagtaatttataaactgaagcagatgtggcttcacttattctctcccatctccacactaccaagactaaatgagaaatcaccaattcctcacagcttaaataataccaactccaaatttagacagaaatgaaaagaaaagctaaaagagatcctgttgtcaagagatcagtcactaaaatcaaagcttccactgcgagagctgctgccgttacgactatgtaaagagaggcccctcatgtggccagacaaattagaaccatccttgttttccagaaaaacc

SEQ ID NO: 9710 - DNA, 558 bp, Glycine max
  Clone ID: jC-gmfl02220104d05a1
gcgctacgtcgatctgtggctacgaatgtgcccaggtgcctgtgcaccaaaaaactgaaacaaaagttgcgggtttcagaaaaattttcgttcgatagccgtgccgtatctccagtcccggcaggcacagctatattctcactaccactaatcctcctcctcctcctcgctgcctcgtctccatcacggtttcgtccgcatccacatccgcaatcccgtctataacggtcgcagaaacccagatgtctgcctcaaccccagtccacgtccaaaatatagtctcactcacatcggtatccgaccacccgattacgccctcagagatggtgatttgcatcctaacaatttacaccataatgttcttgatcgtgttcgtggtagtctctgtcttgttcacctattcatcgttctctttgcgggcactgtatctgctgtcattacactcccaagcccaactataaccgctagacttatggtcagtctgtctgtcacactccttttgatatgtgcaaagattctcctacaagcgccccgagaacacagggggtaaatccctgt

SEQ ID NO: 9711 - DNA, 432 bp, Glycine max
  Clone ID: jC-gmfl02220104d05d1
ccaaaaaaaaaacagtttttataagacataatttttttacaaggggggcagtatctcacccttcgttctttacattggtggcatttctaaccttttgccagtccgcacaatgggttaattttacccctgcaggagcttttaatctaccatttaggcctaacaaacaaaggatggggtcccttaccttgtcaggttttttgccctggactcctataattgttgttaacaccatcagaaaggggaacccataagctttgacttttttcaacaccattttcccaggttgggggtctaacactcctatcatgggtggccccaccatcaaaaaattgggcccacacacttggacactttccttctccactaaattcctcctagcatcctgccacagtttttagcagttctgattgcagcaagggacaattttcctta

SEQ ID NO: 9712 - DNA, 558 bp, Glycine max
  Clone ID: jC-gmfl02220104d06a1
cagcatcgatctgtcgctacgaatgtaccaggtgccgtgcacatgagtttgattatgggcgactcttccacttgttgattgatttcaaatcttacacttaatgtctttcgcaatataaaatgctatcttaatttggaatccgatccgcgcggtaactggtaggatactattggtcgtcgtagtggtttgtggtacaataatgttggtcggtgctgctctagggttggtgtcgacaagtagtagtaacttaacaagcccgttagagttcctttacctttactttaaccaccttaactgtgccccgcctaccggtcaccaccctcgaattcatcggcgacacaccggtattcacgtcagtgttggtcataactactgtgataaataacatagtagcccaactacactatatctgataagctgtctgtattaccgggcgaattcgcacgcatacacatgttaggtgttaaccgggccatcaaagacacacctctaggcacaagccacacggtaaggccacactgcatacccaccagcggtatagcaataggcagcttctct

SEQ ID NO: 9713 - DNA, 480 bp, Glycine max
  Clone ID: jC-gmfl02220104d06d1
gggtgctaaagatgagtttatttcattaaaagctacacaaaattcattcgacatgctaaaattacagtcgaacaggaggtaatgtaaaatgcaaaaaactcataacttacggcatggcacatttgattctgaaagtacataaccctgactaatttgcatataacaactaatgctctcgcacgcttcaaatactcaaaggtatcatcttggttgattccagaattacgtgttccagcaactttggcaaggcagtgagctattattccatgttttaggaattggcttccctagcacgatgagaatttcatgacagtagggtaatcttcacttcatttcaagttttttcaaccaataatcaagttggctggcaacacatgctgacccggtggagccataagagacaaatttcttaatcgcattttctactccaagaaattcatacacatcctcctcaaagactggatttatacttctcagctc

SEQ ID NO: 9714 - DNA, 541 bp, Glycine max
  Clone ID: jC-gmfl02220104d07a1
gtcacgtcgatctgtcgctagcgaatgtgccagagtgccgtgcactagcagcagcaaacgccaacaaaaacaggaccacacgcaaataacaacaacaacaacaacaacaacaacaacaacaaggcacaacagccgcgggcaccaaatgcactgcacctgcccatgcccatgagcgtgtttgccaaagccagttatgctaataatgcaactgctgctgctccaaggaccacgcaccaacacacccggtgtgcacatgcaaatgcagcaaatacttattcggcagggcagctggaattgtgtatttaccaactgctgctgctgcagccgctacagttatcgcacaacttaaacatggtcttcaagcacaacatttggtgctggtttcagtttcttaacttgttgcttaacctctaacgccgcccagccgtatttcgcaacgtgggttccaacaatagcggtctactttaaaacactactcctccacagcaaactcaagacactactttgaagctaactgggcgtaaacggactagccagccac

SEQ ID NO: 9715 - DNA, 501 bp, Glycine max
  unsure (1)..(501): unsure at all n locations
  Clone ID: jC-gmfl02220104d07d1
aaataaacttattattatgcaagcacacaagtaaagaaataagaaagtcttgcaacataatttagagtcattatcgtttgtgttcataatttatacttacgacatctcacaactttgtttgaaatatatattatataacaaaccataatgatacacanatttacttaactatattttttaacannntnntnnnnnnntnnnnnnntnnnaaaaattaaaaattaaaaaaataataatttaaatantntcctctcatgatgatggagcagattttggactggtaactactagtctagctcctgttcttgcatttctccacggctcttggtgccagtccaatagcttcctttcctttcatgatacgtaaacgcttgcatgattcaacaaacatctcccatggcacatcaccgacaagcatccagtcgccatccctgtcttcataggtcgggacatagtcggagctgttcaaaagatccatcaacttgctctcattcatgaaat

SEQ ID NO: 9716 - DNA, 532 bp, Glycine max
  Clone ID: jC-gmfl02220104d08a1
aactagctgattgtcgctaggaatgtgccagagtgccgtacaccggcaggaagcaggtgagggttgggggtgacagcttactgattggagcgggccccacgaacaaaggtactgacaaaaatgcataccttagcgaagagctgagcagggcagggcgcatgaaggggcagggggggttggtgggcggcgggttggggaaaaaccgactgcatacctgacgaaaaccaacgacaaagaaatgcgtgtgcagtaaaaggagcggcgggcccaacgaacaaaggtacagccaagaatgcatccctgggcgcagagctgagcagggcagtgggcatggagggcaggggggttggtgggcggcgggttgggaaaaatagcgtatgaccgcaggtgccgcgcaaccccactgggctaatgtcgcgactgcccgtggtgcagtgggatacgcgcaataagtcgaccttagagtagccgaggaatgggcggaggctatagcatccaggtattggctcgcagtggcgggtagataagggta

SEQ ID NO: 9717 - DNA, 336 bp, Glycine max
  Clone ID: jC-gmfl02220104d08d1
ggacatgaaagaagcatttaaagaaatccttttggcaatcaaaaattacaacactacatgacaagaagttctactcaccaaaacaaatgataaaacgttctattcaccaaaaaaataaaaagttcttggttgattttcttaaacaagaatatacaaaatacaattattgcatctcctagaatatcatggcgctagcgcagccgtagagctatgtgccaaaatatagttagcaaaaccttgggtctataaacttatgaagttatcaatcatgtgtaggcagggcagttatctgaagtagtgcagttttccctacatatcaacttgatcaaagttaat

SEQ ID NO: 9718 - DNA, 576 bp, Glycine max
  unsure (1)..(576): unsure at all n locations
  Clone ID: jC-gmfl02220104d09a1
atcacgtcgatctatcgctaggaatgtgccagatgccgtacacctgaggccggtatgcccgccggcgagataacaatagacggggtaaatttcatacccaactgggccgatccaaacgaaaacaaatagataagcaaagatgtcccactaatgcaaacgcggaccaaagctgcacagctgcggcatatcaaagacgtagagtggctgctggttgaggcaacagcgtagtagctggtaggggcgtcttagaactggtgcattagatgggagtttaacgaagcgaagagcggtgcaaaaaaggcgagtgggggagagagtggcagttatggggaacataagtgtagggttgtaaggagagcgacgccggcatgataaccagaacaaaaactaaggcacggtaggcactgcaaggtaagcatgggcaaacaagagggtagcaaaaaaaaaaaaaaaaaaaccctccttcttcatgacgcactgtcgtcatttcccaaggaaggttccattccgattgctanctcgattactgggtttgagacgcacgtcgaggacactagcatcgaagtagccgtagac

SEQ ID NO: 9719 - DNA, 369 bp, Glycine max
  Clone ID: jC-gmfl02220104d09d1
atgggggaaaaaaaccctgcgactttattttataaaactggagatccactaaacttacttttaggtcccgggctttgaaaccgcataaaggtaaattccataatcaatacctaacaacccaaggggaaaatactaaagactgggtagctaaaaactcagttggatgccccccaggcctgatgggcctagcaaattttttttttatgatacaaaccagcggacgatccagggtcattggtctcattcacaggcgggtttgggaccaaagccgctccagccaatgatccagggccatcggtctcattcacagggtgggtggggctcaaagctgcccaagcatatggcaaaagcttggaaggccaaaagggg

SEQ ID NO: 9720 - DNA, 451 bp, Glycine max
  Clone ID: jC-gmfl02220104d10a1
atagtagagagtagcgtcgatctatcgctaggaatgtaccaggtacctgtcacagggagccagtatatcggttgcttaatttggctatatactgattgtatagaaatgagtcaactgggccggatggggtgtgcgagaacacggaaaattatacgggggtaatcgggggaaatttttagtaacggcaaaatgtaacgtgaccaggggccggagaatacgcaggtaaagggtaaattagctgcgcaaggtggggattttgctacgcgaggtaacgggttaatggctggtaggtggggttaaccgacggccaggcacgcatggctgggtagttgcctgccgacagccgctagcgcagaaagggcacccataaagcggcggataaccgggaagcccccgcgatcacatgccactgccccttagacgtagcggggctaaggccaggccgctgggc

SEQ ID NO: 9721 - DNA, 304 bp, Glycine max
  Clone ID: jC-gmfl02220104d10d1
agatcatcatcacacctttaggctaacagcagaaacataattagcaaagtgaaaatatgtatatgcacacacatatgtacatgctaatgaaataagggctttcttcccaggatcttatatttccctttggaaacacattgatcttattcctaattactacaatgacaagtatgaccacatcctactaatatataccctaacaccacatacacatgtgaccatcatcatcttggaagcatctctggcacaatatctgggccactaaagggaggtgaatttggttcatggcggttttcgggtcttt

SEQ ID NO: 9722 - DNA, 554 bp, Glycine max
  Clone ID: jC-gmfl02220104d11a1
cagcgtcgatctgtcgcgatctatcggtaggaatgtaccaggtacctgtcacctccggcggtcaggtgcagtctggggatctcacaaacccccattatttgtgaacttgaacgaggttgtaagcattcagactcgataacgattcgcacccaaaccgcaaaacaatttgagggacccacgctaagacacaattgcacagttcagctcaataagtacgtcaaccactggacacttgggatggcagagggacgaaactctatgtatgtgaatcctcgattggggctagcagcccgtagtcacaaaagcccaatactcctggaacttaggaccgcgacctcttgggtacaccgccaagtggtgacggtggttgagggcatttcaaattcagtcagtgacttagcactaccggcaacacactgtgaataccttggccaacattcatgtatcgagcgcctaaaagatccgcagcatggcgcctgaacccggcaaaccttaattgacagtccagagactggcgggggatctcaaagtgagggtacgacactcgagcagcg

SEQ ID NO: 9723 - DNA, 514 bp, Glycine max
  unsure (1)..(514): unsure at all n locations
  Clone ID: jC-gmfl02220104d12a1
atactaggactagtgtcgatctatcgctaggaatgtaccagagtcctgtcactgtaataggataggtagttattctgggcggtaatgtaaagttgtaagtctgtctcagggtggtggtgccaaggtgtaaccagtgtcagaaagcctaattatgcttgcgggtagtaggcggactacaaagcataggttgagagagcaactgcaacggccacgactgctgaaaacccaccaggtgctgtactgctagtaagggagttggtagctgctgtgtcagaggcggtaccattggctagccatgatgactctgagcgatggcaaagtacgacataccgggaagcaatggcgccgcgtacgcgagcggatactgccgtagatttcagggagcggctgatagcatggttcgaagcagcagccgagtaacactggtggttaacaacgctagcactgggatagaaacatgtgntggaagttttgcgatggattggctgtttccagtatcgtagtataggggcag

SEQ ID NO: 9724 - DNA, 440 bp, Glycine max
  unsure (1)..(440): unsure at all n locations
  Clone ID: jC-gmfl02220104d12d1
aaatagctcgtcaacaatcgccttcattagcaaaaacaggcaccacctgctaatgactgaggtacattatagacagcagcaaatctactcttgccgccaaatcatggaaataaagaaaaagaaatacagcttttcaaatgtaatcaagaacgaacaaggttaanagtngngnnnnatttttttttttatttttnnnnnnttntttatatttnntatatataaaaaatttaatttaaatttattttatttatttanaaatttttttttattttatcctggagccaggtaagtacaggggattaaggagagtctttatgtaaagctcatgcacctcttggaagaagctcttgataccatcatcattacgggagtcatgtagcaacataaatcgggtatgaccagctgtaacatacactgacaccacaagttcattaaacctg

SEQ ID NO: 9725 - DNA, 540 bp, Glycine max
  Clone ID: jC-gmfl02220104e01d1
tcagctggcactggatttgccgtgctacatgtgtagcagtgccgccttgcttggggggggggggggggggggggggggggggggggggggggggggagccccaaatgtgcaagttgggtagctatgagcataaacgggagaataggaaattagctaggagcttctagcaggacaggaaaaatgaaaaaaaaaccaacaggaggttaaattaaagcatgataccttacctccgggaaagacaccaataccaggcaaaagctttgtgatcgtgagcccgaaggtaaccatatcctgaaccctgctgccacggcagcgtggctttggttaacgcggaaattagccattgttgttaatggtgacgctgcttagcggatggcaaatcgttaagagcagtggttttggctgcttagtagagtggtcggtttatagccccaaggggacagggttaaactagcgagtgggatagctacccctaaacttactggtgctgcagccactatctaagcggcgattgccagttgtgccgcagctggtgaaggt

SEQ ID NO: 9726 - DNA, 480 bp, Glycine max
  Clone ID: jC-gmfl02220104e02d1
atagcgtcgatctatagttagccgttgtacactgttagcagtgccgccttgcttgggggggggggggggggggggggggggggggggggggggccagagcaactgtggatgtgagggaggatatatatataaaatgtggtaagcaaccaaagagacttgtggcccacagggtaggtaaaatatagtagtgactatggtatatccagctaaatagccttgtcacttcaaggttcactggatcgatttcgctagctcatcgtagacctgtggtgagacgcgtattgaaaggtaaggtatgccttcgtcggggataatcgtctcatgcccaaaatttgcctcgggtttaatggaagtcttggctaccatagtttttgggtcttactggctcgaagactgaagacctttctattcggtctttggtttaatacggctgtacttgcaagccttaagcccatttctttgcgagtcctctaggaaatc

SEQ ID NO: 9727 - DNA, 371 bp, Glycine max
  Clone ID: jC-gmfl02220104e04d1
gagttgaggaacttcaaaaatcatcaaaggcagttctagccaaataaaattaaccttaaagcaggtcaccaatccctccatcttggtcaacgtggagtgtacaatatcaacatttacatatttacaagacaaataatgacgcgatgaacatttacaatgagtgtgacttagcagctgtacaaactatgtcttcaatgccaatgtccaaaaggagaaaggaatgaaaggcgacggtgaaccattcaattaatcatcaaacttcgaatacaaatcagcaagtgcacgatagagaatggcagcggcaggtggcctaggcaacgagccaaaaagtatatctgttgcagttatagactggctgccatagaaacggg

SEQ ID NO: 9728 - DNA, 510 bp, Glycine max
  Clone ID: jC-gmfl02220104e05a1
tagtaggggtctgtcgctacgaatcgttcagagtcgtgtgcacccaaaagtctgtcgagtgcaaaaaagcagacttggcggagctaggctatgcggccccttcggcaaatgtcggggcagccagtgaaatacccgcggagtcgcttgtgcgtagatagcgcttcacaggagagccatggcggccaagtgcacggccaacgcatagacggggtaggcgtaaaacgcaaactggtaaactgtagaacggcagatggctacgttcagtgttgcgcatgacagtctacagaagcccctggcgaccacgagttgattggacaccaactgacacccacatcagagtcaccttgggagtgcaacctaagctgcagagcaagggatgtgcataaatgcatgcctagagagcaaccgagccatgacagcttttgctctgtagatatgcgtagccgctactagagtggcctgctgctgcagtgagagaagtgtcagtccagtacatgctgagctcaagta

SEQ ID NO: 9729 - DNA, 475 bp, Glycine max
  Clone ID: jC-gmfl02220104e05d1
aaaaaacaaatatatcaggctatttacttttttattaacgtcatcaaacacgatgtaccctacattagaactgttctaatgtcaaactaccattgaaaatgctgtccaaagtagccccttgagaaacggtgcgatggccacaagccttgactttaactctcagggctcaggtgggaatgaagctggtttatcccttatattaacaggactagagcgggttatcaattttacactcttaacggccgatatagctccaacgaaaacaatgcttatgtacgaaatccttattcgcctgccattcggattaactgtttcagcagctgccccatccgcttaatgttgaccatatatgctaccgccactgctctttatgcttaatgtccggcctgagctatcatccgctgatgcaggggtccccagcaattgccacagcattgccgggcaggtctctttcaaagcacaaaagcttccgact

SEQ ID NO: 9730 - DNA, 617 bp, Glycine max
  Clone ID: jC-gmfl02220104e06a1
atcacatacgactgtcgctagcgaatgttccagagtaccgtacaccgccccgtgtgtgacgcagtaaaccattgtagtaaggccaaacaatggcaattgctttgagatttagtaaaatttgggcataaagatccccgggccgttcccgtacttatgcgatgtttcccgaaaccatttcgaagttgggagatgccacgtaggcataactaaactaagcaccgttaaggcgagcttagattgcaaagtaaagttcatttagggggaacaaaagcccgtaacttgaaccttgggaatttcaggcgccgtctccagtatactagcaagctgacgcggggttctcatttagttattctagccgccactaaacagccataggccaccagcgacaggcctccgacaacaaaacagacaccaagccatgagggagagaccaacgaaccaggggcacaacgccagttaacttaactatttcagttaggtcctgctagatatccgtagcgcccacgctttccaggaggagcttcgggtgggcaaacccaaaaatcccggacatagagctcgacggcccaagacgaagaggtactagccgtgtaacagacttggcattggagaccagc

SEQ ID NO: 9731 - DNA, 395 bp, Glycine max
  unsure (1)..(395): unsure at all n locations
  Clone ID: jC-gmfl02220104e06d1
ggcaatgtagtagcttatcgtgctaggggagtacaacaccatggacagaaggctaaaagttagacctctttttgtagaaaacaagagaataagaggttttattggttctacttgattcatttatttgnactaatttctagctgactattttttagtttcgacgtgcagatttcatgctccatgcttttaggtattccacggtgatatgctcagtaccgttattgaacacaaacaaatgagcttttttctttattgctagggtaggataaaccctagacaagatgtttgttcttccttcggctccaaaactctccactactgagtgatcaatcaaactcttgagagagagctttttatttttggctaaatccacattcacaaagcctgcaaatgat

SEQ ID NO: 9732 - DNA, 568 bp, Glycine max
  Clone ID: jC-gmfl02220104e07a1
atcacatcgatctgtcgctacgaatgtgccagagtcccgtacactgcccacgtgtgtcggcttaagattgctagaagttgcgtcgagaatgttcgaggccggaagagggtgttgatagaggtatagataaaacggttggggccgagacctttagttggggttggtattacggcacaatatcgcagcaaactcccaacagcatcagcgaggtagcaagagtgaataggtcaactctgcagtagatagatggggcagaattagatgtcgtagcaaatgcacgagatgagttaaatgcaagtgacactgttttaaataaaatgttaaatagctgtgaacgccgaacacgaggtccacaaggctggattgctaagggctagcggagattttcggctatgagttcaggtttatagggctgttaataggttgggagaaagcgctgaattagagcttttggctagtcggtccctagcgatgtaggtggccatggtgttaaaccctaggtggcatacgatatagaagcagcagctgcatcggcagctggcagacatatataactgaggaaaaaggt

SEQ ID NO: 9733 - DNA, 145 bp, Glycine max
  Clone ID: jC-gmfl02220104e07d1
cagaaaaggtgaaaatatcattaatagatgaaactggtagtgaagacttgccaaagtttaattacataccatgtaatataatatatcaaagtactattgtaaatatttctttggctcggatttcggatgatcagggttgctgttc

SEQ ID NO: 9734 - DNA, 547 bp, Glycine max
  Clone ID: jC-gmfl02220104e08a1
aatagcgtcgatctgtcgctagcgaatgtgccagagtgctgtgcaccgcacaacgcacgacacatcagcaggggctggggcgcacacacaggtcaaaaaagcaaccgggccacagccggcagcacgggcgccgggcgccccggacgcggccgcttgcgcgtaagaagcccgtcaggtcgccgccacaacaatacttgcacacgcatagtcttccacaaaagaacacccatatatcatacgcttaggcctaatggtccaagattgtaagatccgccgactagcctacccaatcgttgggatttgaaccagaataaaaaaccggctaaacacgggcagcatgggcccagggttggtaaagtagtttttccgctgtggtttattaggcggtgatgtcagtctccaacggctggtgggctgggcaaccgtgccaagctttacaagctgccgctggtgctgcggtggcggcttcagcagcggcaacagtttggaaggatgagccatattttggcacaacagcctgtggtgcatacgatcggcacaataggat

SEQ ID NO: 9735 - DNA, 317 bp, Glycine max
  Clone ID: jC-gmfl02220104e08d1
acatataacatacagattcatataacaaccgggtgggatattctccggttcacattcagtaattagggctacaagaggaaaccattcacttaatcaaacaaagggatgaaccaatcctcattttttatttcccctcctgccattgacctcaaaacgttaaaaggggggctgaagcgttgtatacgggggttcgaccaaaccccccaaatgaaccgagttctggtactgccaaagccggggataggtgctaccttccaaaagacacaaaccgagaggaaccggaagccgttgtccccaggtcacaaaactctcaaatt

SEQ ID NO: 9736 - DNA, 603 bp, Glycine max
  Clone ID: jC-gmfl02220104e09a1
tgcctgccaaaatactagccaatgtaccaagtaccgtacaggtggtgcaatttgcagccttcatcaacttaaacttaaacctaatctacttggtgttgttccccatgagttgcttcttagttattatggtgttcagcttagtctttgcctgtttgttaattagcgttgtgaggttaattcagttcttctagatcttgtttgtaaaaatgatctacagctaggactccagcttaaaaacatacggcaatgtaactttcatgccgttaacccggatacttcgtgtccgcttctctagtggccttgggtttaagatcagcagctgaggggcctggataaaaccccgtgtcaaagtcatttgtataatcacttttggaacgtgccgggcctacagctctacaaccttggccttctccttgttaccttgtcttttgtccttgtgaattttggtccgcagctgggtgtgcccttgcacagcgccctttcgtgcattctacattttattatgaccctggattgctaatacttgcagggtcgcaacagcagctagcagagttacacacagttgaagaattgtaatggctaatggcaccattacacaagtag

SEQ ID NO: 9737 - DNA, 458 bp, Glycine max
  Clone ID: jC-gmfl02220104e09d1
aacattatatatatagagagcactctgcaaaagttacaggtagcaaataatgtacacacctctctcacaaaatgcaacaagcggcaattcatgagtactgctgtgctgtccagtgcacatcctacttttaatatatatatttactttgttttatttaattattaattaactaatacacattaaaaagaagattgattttaagtttgaggtagagtaggtgatgaggaggatcagaaggaagaagccttggcgagtgacttgatggtaacatcgggacccagaacaactggtttaaaatcgaacgtaaacgtgtcgtaacgcaggaagaattccaccaagtagagcctgcacatgagcaccaccagattcttggcgggacactgtttatcatccggtgtgggctcctccgtctggggtcccgtggaccacaagacgtgtctcaagagcttttccccgtc

SEQ ID NO: 9738 - DNA, 565 bp, Glycine max
  Clone ID: jC-gmfl02220104e10a1
atagtaggagtagtgtcgatcgtatcgctaggaatgtaccaagtgcctgtcatgcgcaggtactgttcgcaaccgctgtgacaaaagccggctgctaatgctactacggcttaaacggctgctgctgctgctgctgctagtaatgttggaggtggtagatagcgttatgcgcctgcggatattaagcctgtaagtgtagtctagcaaaaacctgttggtaaagtgcccccagcagttgggaaaaagcgtacggagctactcgtactaaatgaagccgctatgtacgcggctgccgccgtgggtaaagcgtaaaaggggcacgaaagtgaaccgggtgtcccaaagccatcctttgcaaacgacccggcgctacgtggtgcgataaggattgcggcctaagccgccaactaggcataaagtaacgagcactacgctttaaagtgtacctgtactaaagccaacctgacgtgtaactgggctggtgaaatactacattagcctagtgccgctgcgcgatttggtgtaaacagaccaacagccaaccctcgcggacaggagttgcgtg

SEQ ID NO: 9739 - DNA, 424 bp, Glycine max
  Clone ID: jC-gmfl02220104e10d1
gctgattaatctttcaagcattcataaaaaaatcgcagtttatcagatgcaatgtatgcagcaagaataccacagcaagaggcccacattaatgaaagcacactgaattgtaacagctgggagaaataaactactacagaaactggagatggagatagcaccggcaacttaaaatcacattttgcccagggcacaagattactccgtcaatgcttcaaaaaacattctcccacaaacccgataaataatcttgtatgttttcatccgcatcctggtgagacaggataatctaacacgcccttccatcttcctatctttgagaagggtacacagcaccagttgccctggtctgctgtttagaagcaaagcttgagactagccttccatttgctgagcctgagatttgggcactgctcatacttga

SEQ ID NO: 9740 - DNA, 516 bp, Glycine max
  Clone ID: jC-gmfl02220104e11a1
ttagtaggagtagctgtcgatcgtatcgctaggaatgtgccaggtacctgtcacttcggcgtgccgaagttggagttcgagtccgttctaatctaaggcacgcacacgcacctttggagggagtgtgtgttcttaaaggtgccggcccaggccggtggtggttatggttaatcttagcttgtgggggccaaggggttacagatttgtagggagccatagaagtatgcattgtcttagcggtaggatgttctgagccaggctccggagtcgtcctcgtcgtcgccctgccctcgccaactttaaagcccttgggtattttaaacatctgtggtgtaacgggtctgtgttgtctttgtttaagttttaaaatcatattctggggattgatgttcgtattacggatggtctctcgcacaaacatgtcacgcccacgttgcgccgcatgcaacatcagggctgctagtgcgccaacggccggcaacaaaaacatccagcctccctagccaggtacagcag

SEQ ID NO: 9741 - DNA, 501 bp, Glycine max
  Clone ID: jC-gmfl02220104e11d1
aaaaatgaatattaactataacgattaaaggaccaataattaaatcgtaattcaacaaccacctaccctgcaaactgcaaagtgttgactgtgattattcatcaactgccggtcttctcattttatctacagagacttggcaaatacaataaacattcatgcaacgaaattttgagagctaccatatcttgttcactgtatttctcagaatcaaacggtagaaaaagaagagggcagagagagctaacagtaaaaaaaacatgaactaaaagaaaaacctgaatattgatgttattcctgcagcatgacaatctttttttaatgacataaagatacaatgtagctatttccagttaaaagccgcctcatagatcaaacaaatggagaaagaataataccattcttcttgaaccatggctgccaactagatccagaataaacatttgccccaaagcaagaagtgacatctcaatttctaattctactgccagagggaattgg

SEQ ID NO: 9742 - DNA, 425 bp, Glycine max
  Clone ID: jC-gmfl02220104e12a1
tacaggactagttcgactatcgctgcaatgtccggtccgtcacagttccaaccaaaacacctgaaaaacgttagttgaactatgctacccacgccaaaaggtactacgcattccataaggctgtaagagcttaaccaaagggccaatagacaacacgcttctcgcttagaagggtgctgccagcgcgcgtgtggctatgtaacggatgcgagagactattaatacaagcagaacgaaaaacaacgcaagaagaaaaagcaaaaagaagggtgcaaaacacaaacgcaaccacaggggactgggtgagaagaggcactggcgtagagaacagggtactgcgaggtggagaggaaggctgggtgtaattagtgctggtgcatacagacactgggtgagagctaaagaaagtgagacgggtagaggtg

SEQ ID NO: 9743 - DNA, 484 bp, Glycine max
  Clone ID: jC-gmfl02220104e12d1
ctagaacatgattttattcaactgaaccataatatgtaccacattagttcattacaaagatgaaaaaataatactcaaatttggaaggccgagtaaattgacattaattaaaaaacagaatatgaaactatagatttatttgcttatagaaagctctatctgtcacaacctaatttgtttccatctcttttatctttaattatatctcaatatttttcagacgtggtctatatccatgactcccttgctcgtgttgaggttcggtgttacctgacttactttctcacctataattattcacatacttaatacttatcattctgttggtgctatatacagtaacttgagtgcaagagacacacatccagcagaaattatggcacgcggcactcttctatgttccaaatttccttggcatattgagcaattgtccggtcactgctgaattttccactccctgcagtgcttaggatggacattttta

SEQ ID NO: 9744 - DNA, 493 bp, Glycine max
  Clone ID: jC-gmfl02220104f01d1
agacaccttggctttttttgtgcacctgtagatgtgtaggagtgccgccgtgcttgggggggggggggggggggggggcacgacaaccaacgtcgtggaggtgcgagtggggattagaccgactagatataatacaagacaagcaacgtgaggaggtgcgagtggggattaacggcggcagtagcgggattaaaccaacacggtttgggcttagaagtgtgatttgacagcgaggacaactagaacaaaagacacacacgttaaaaaagaacactgtagcaacaaatacgtggcagcagaacaagttagcttacgaagcaccggttacagtaaaaaatctagtaaaaaagtgtgggcgcttgccgaaagtaactggcacgaacagcgttagattagaatacaacaatgtttgggcgtcttgttgggccagaccttagaaagtgggttatatggcgctacagagggtagtgttgcaaaaattgtgagtacaatt

SEQ ID NO: 9745 - DNA, 588 bp, Glycine max
  Clone ID: jC-gmfl02220104f02d1
actagcgtcgctcgtgtatttaccgtcgtgcatgtgtagcagtgccgcctgcattggggggggggggggggggaaacgtataaactgcgtaggagtaggaaagattggaggagcggtagtatggtgcgtagaataggagtaaacgggtacaggtgttcgaaggtagagttttgagtagtgctttatattataaatggttgtgtgattagggaaaaaccagctatattgtacggagtaaccactagtatgcagcagccagtaagttaaaggagggagtaataaagcaacaggtgctaacagtaagcctatcactaacactgctactgggcggtgtctatgtgtgggcggtagtactaccagtatgcgtacttataaggtttctgttacttgccacagccctaatttaggtgtgctcggacggtggagttggcgaccacgataggcacgtagaatcactagggcgacccaaaatgagccgttgtacactaaccctgagcgttagagtcttaggcaagcagagattgctaaagtttttatgagaccctttatggtggctcatggttaatgtagtaagtaatgctagcctgg

SEQ ID NO: 9746 - DNA, 498 bp, Glycine max
  Clone ID: jC-gmfl02220104f03d1
caaagtgaagattttatcttaaaatgttatgtacattagagtatcataaagaaagctaggccaataaattcaagttgttaaagcagacgtggataaatcaaagactgaaaccaacacaactagtaatcaacatttggagttcattttgtcgttctggatggggttgtccgactccaaaaatttgccccagatggggtgtttctgccaaaccatactcatttcctcaagtgggatgccctttgtctcaggcaataacttcgcgatgaataaggtcatgatcaccacaaagcacccaaagaagatgaacaaaccaaactttatgtgacagagcattgatgtgaaaaattgagctatgaagaaagtgctgatcatgttgacaccaactgtgatactctgagcagcaggtctaatcttcaggggaaagatttcacttggtatcaaccagcctagaggaccccatgaccaagcaaaacctgaaacatacacacagatgatccc

SEQ ID NO: 9747 - DNA, 361 bp, Glycine max
  Clone ID: jC-gmfl02220104f04d1
agacgattcaatataaattaataacatttattccagtcaagccaaatttacaaagtaaacaataccatttgaatatacatagataatggcatttattacactcagatcaaatttacaatatatgtatagataaagtggtgatgattaaccaaattcataagaccggtctcaagtaccttgtaacccaactccatgccatgctccattctggaaacgataagattttagattattcctcttacgcttttgttccccttgacctagctgaactacactctccatgcagatgcagttatcttttgttttgtatatatgcatatacgtcttctagagcttttctctttttcgcttttatacaaca

SEQ ID NO: 9748 - DNA, 606 bp, Glycine max
  Clone ID: jC-gmfl02220104f05a1
aatacttgatctatcgctaccatgtgccagatactgtgcatgacagtgcacgcgatgatgaagcctccccaactaagttaaacttacaaacttccaccgcggtcccaaccctaaccgtattttgatgtacagtctgggtagtcgtcattcagattgtgctcataataatggtgtggttatgtcagttattggtacaaatcaacttgtggtttgtagtgtttaggtatttaggtagcacctattaaacatgggcggcataggcccccacagctgccagcacgagagtgctggcaaccactacaaacgcagcggccagtaccaatccctgcggcgacaataacacaacaattcccggtacagctgcggctaacctagctagaagcgaagcatgctggataagctgacgccaaagtgtttgctattactattgctgcggaaagtgctacggcgactacggttgaaattaatagggccggataaagtgtaattacctaagttgatggtgcgctaaaagaaagtaaagctattcgtaggcttgtaagtgactaaggtagatctgcaccgccaaatggtgtaatattaatatgcaacgagtgcatacaaaca

SEQ ID NO: 9749 - DNA, 317 bp, Glycine max
  Clone ID: jC-gmfl02220104f05d1
tttgtcgttctttttttttttttttttttttttttatttatctttttatttttcattaaataatttttttttatattatgcatttgtatgtttttgaatttccactatatgaggcccacattaatgaaagcacactgaatcgtaacagctgggagacataaaacaacaacagacacagcagaaggagagagcgccggccctttcatgcccaataaacccacggcacaagaaaactccgtcaatgatacaaaaaaaaggggggggaaaccccaaaaaaaaatttgcaaggggccacccccaacccggggagacagggt

SEQ ID NO: 9750 - DNA, 575 bp, Glycine max
  Clone ID: jC-gmfl02220104f06a1
actacgtcgatctgtcgctaggaatgtgccagagtaccgtgcaccacacatggtaacgcacccgcacacgctgtaaagtgacacacactatgacgatgtgaaaacgtgaggagaggtggtaaaagagcattagctagtctcacgtggccctggggcgtggtcctcggagccctaatagtagtgctgggccacgcggttggctgttaggcttaattggggattaaagtgataacaacaaagttatgcaaccgggttacgtatggttggagcggcggctatgcggtacgctaagctgggccagggatgagctgggtcgcaaaacccaaatgctttgttggtgtaggattaggaatatagggccaagccggcgccacgtaagggattgggtgagtggttgaagggagcttttaaccaacttaacctggataattagcaactggtggtgtggatgcaacgcgggccaggtccgcttagctggtgagtaatgtgcgattgcgtaaacccactagactcgtggctgagtagaccagccagggcttggcagggtaatagtacgcgtgggctgctattgtgtg

SEQ ID NO: 9751 - DNA, 522 bp, Glycine max
  unsure (1)..(522): unsure at all n locations
  Clone ID: jC-gmfl02220104f06d1
actaaaataattaattttcattactcgaacattaattacgtatacaagggaaaagtgaattaaaatgagtttgactgggggatacactgagaaaagagaatatactacgttacacgtagtagtacaatatgagagtgatatgggccaaattagagaggctaattnttgcgcccaacagatacagcttcctgatcagagcaatttaatatttacctttttcttttttattacgtatcacttataccaaagactacgtactattcttgcattgtagatatgagcgatattagatgtgacctcactcagtaaagtaattgaacgtttaattaggttattttctttttttaacttttcttgtcattgatcccttgtttctccacattcatataatctcaatgacgaaatcatatcagactttgccaacagcaccaccgtgattcggttccattgttcctatcttcacaacgtcaatgatgtgcccattcaattcttgagccttcactgggctctctagtgccactg

SEQ ID NO: 9752 - DNA, 538 bp, Glycine max
  Clone ID: jC-gmfl02220104f07a1
atcacgtcgatctatggctaggaatgtaccagagtgccgtgcatttgtgtggaatgtgtgatggttttgagtataatgttggtatggtttgaaggttttatatataggtggcgggtgtgcagcatttataatatagttcgggtacgtaataatagaatgaaggaaccggtaggttatgtgtaaatctggaagctttttgtggctagtgatctaggtggaaggggactgggcatggctgggctggactggacggaagggttcacgcacacaaaccccgaatcctgatcggtttttctaggcaaaggccggatggcatgactcggagacgaagtagtgcggggcgtaaattgggtatatgcatgtaatatgtgatttggaggggcgtggggtgcagggtttgactaggctaacggagctcgcgaacagaacacgacgaaccttaaccttacgcaaacgtactacgcgttgtggctaattggaatagaacaagcaagtgctacataaatatggcaaacgctgtcaaagtcagtcagtacac

SEQ ID NO: 9753 - DNA, 516 bp, Glycine max
  unsure (1)..(516): unsure at all n locations
  Clone ID: jC-gmfl02220104f07d1
ttttttttttttttttttttttttttttttttttttttttttttttttttttttttttttttttttttttttttttttttttttttttttttttttttttttttttttttttttttttttttttttaaaaaaaagggggggggggaaacatttggaaccccccctaaaaaaggaggggttctcccccacccccggggaaaggccccctccccccccccaatnaaagtgtgttggggggggnnnnccccccccaaaaatttccccaaaaaaaaaaaagggggcccaaaaatggggttttttaaaaaaaaaaaaacccccgggggggggaacccctttccccccaaaaaaaaaaaaaaaaaaaacccccccccccaaaaattttaaaaccccccacggggggggggcccccccgggggggcgaaaaaagccctcccccccttttgggaaaaaaaaaagagcccccccccacagggggaaaaaaattttctcccacacaaaaagggtctcccccaattt

SEQ ID NO: 9754 - DNA, 471 bp, Glycine max
  Clone ID: jC-gmfl02220104f08d1
aatcaagttgataatcaattgttaaaggtctttgcagtatacaaagtgaagatttcatcttaaaatgttatgtacattagagtatcataaagaaagctaggccaataaattcaagttgttaaagcagacgtggataaatcaaagactgaaaccaacacaactagtaatcaacatttggagttcattttgtcgttttggatggggttgtccgactccaaaaatttgccccagatggggtgtttctgccaaaccatactcatttcctcaagtgggatgccctttgtctcaggcaataacttgtagatgaataaggtcatgatcaccacaaagcacccaaagaagatgaacaaaccaaacttcatgtgacagagcattgatgtgaagaattgagctatgaagaaagtgctgatcatgttgacaccaactgtgatactctgagcagcaggtctaatctcaggggaaagatttcac

SEQ ID NO: 9755 - DNA, 512 bp, Glycine max
  Clone ID: jC-gmfl02220104f09a1
agacagcgtcgatctatcgctagccaatgtaccagagtaccgtacacagacaaggcaaggccgggctaggcgccttgcgcagccgggtgtcaaggggcccattgtctgcgaagcgggcctgggaggcgccatggcgggtggggtgctggtttataaggaagaggaattcagacggccgcaaacggcacacatgaaaaaaaaaaaaaaaaaaaaaaaaaaccctccttcttcatgacgcactgtcgtcatttcccaaggaaggttccattccgattgctacctcgattactgggtttgagacgcacgtcgaggacactggcctcgaagtagccgtagactgcgggttgcgcgcaaaggcggagttctgtataaggttatataatagatcacttccaactagaaacgcgaaacttgccccgcttgaagcacgcactgaatgtataggaaggctcggctctgtatgcattctgggttacgtcccaaattgcgtcgcttactgctaggaagcaagt

SEQ ID NO: 9756 - DNA, 392 bp, Glycine max
  Clone ID: jC-gmfl02220104f09d1
tttgtttttttttttttttttttttttttttttttttttttttttttttttttttttttttggttagctaaggaagtgtgtcgccccaaataaaacgcctccaataaacgttaggattcccgtggggtccccaaaatttagaaaacgggacacgcgcggaaagcaaacccttttagtttttttttgtgccggatttcttgctaaccctcccgtaacggcttcccagcctttctcctgtttgggcacctggacacacccgagtgccccgcttactttgaggttaagctggggctaacaccctttgggggcccttgatgggcccttggccccttcggggtttctggggaagaacgacaactattggggcccccaagggaacccttttccacctt

SEQ ID NO: 9757 - DNA, 491 bp, Glycine max
  Clone ID: jC-gmfl02220104f10a1
acactaggagctagctgtcgatctatcgctacgaatgtaccaagtgccgtgcactgatgcagctcgccgggctaaccataagtctaaatgtatgtacatgtcatcatcatcatcatcattataagcctacgcattgaaaagttttgttcaacaaatttcaggttcgagttatttttacgttgattctctctcctcgtaaacaccagggtgttcactgtattaaagttggggtttcttactgtgcccctcgtcttgttggttgtcttttcttctttcagttttgagtgcaaaagtttcgtcttcagtttaagtttaggtttattcatcaacaacaacaacatcgaaggctaccgagttcaaatcagggtctccacaggacgcgtaacggtaacaatcccagtggtaaaagtgttccgaagaacatccgagttcaaggtattaacagtctggttacgggttggtactggcccagttcacaccatatcagtgtc

SEQ ID NO: 9758 - DNA, 439 bp, Glycine max
  Clone ID: jC-gmfl02220104f10d1
acggtgcaataaataaccatacatagcacaatgcccagtggagactggttttatttacagaaacacattcttcagaatgtcaatcgtagagtacagactatatgcagatattcacaaaatataagagaatcataataataaaaaaacttacctctaggacatattccaaggcattatcatattacatcaatatcatcaacattaagccaatcattggaatccttggtcacagaattacgagcacttgaatgctgggagccaacatgtttgccttcaacagagtttatatccttatcagagttaggcgaacttctacctaactgaacccaatctcgagagtcttttgttgaagaatcagagcctgatctagtttttttataactttcatgtacatcaccatcatcctcctcaagatcactggatgacacatcctcgtcat

SEQ ID NO: 9759 - DNA, 570 bp, Glycine max
  unsure (1)..(570): unsure at all n locations
  Clone ID: jC-gmfl02220104f11a1
ataataggactagcgtcgatctatcgctacgaatgtaccagagtcctgtcacgctcggttcacgggctttatctaaatcgagtcacttacttgtgtaactgacccggtggtattctctgttaattggtggtgtgtgtttggtcgttttgttaaggccaagcgcaggcgcatggtatagctgccgactgcataggggcaaaggcgaatgcgccgcccactaagaggagagaggggctcatagtagccacagatacatggcgcctaccttcaggcatgttggctgacacaaacgctgggcgagcaagaggtgtgtcgtgcaggatggtaaccactgtgagtcaggcaaaatcgagtatcaacggaggcagcaacagtgataagtaacggcagtatcgccacttagccagcatccncaaggcgtcgccgttggtaatgctaggtgcgtggtgcgataaacgggggatgagcaactgtattcgtaactaaagctagccctgcggaaaatattgtcaggtgctggatagaacactccngcccagggtgtgagtgcacaagccgctgcagttaaac

SEQ ID NO: 9760 - DNA, 486 bp, Glycine max
  unsure (1)..(486): unsure at all n locations
  Clone ID: jC-gmfl02220104f11d1
aaaccatcaatgtaaaacatgatagttcaggaatgatctttagtctaaaacttgcgattacaaagcatgaaattcaatgcaccaggaataagttttagtatacattatctataaatgttaatgatagcattcaccaatctaaacatctggcaacaaaagggctantcccaatatttntntccattaaatccattccanttttcttccatctctttcatctaacanttcntnttctcccnnnnnnaannnnnnnnnnaaaaacctatttacctccactatcctttctaggaattctttccatgttggcatctcctttattatcccctaaatcaccatacatgtctttaagttgagctagattactcgaagcagaagttctcttactctcctctctctgaggactagaacgtgattcatactgagcagtgccagcttgcaggcttcgacttctacttcgactcctgctcctacgatagtgcttactac

SEQ ID NO: 9761 - DNA, 425 bp, Glycine max
  Clone ID: jC-gmfl02220104f12a1
atactaggactagctgtcgatgtatcgctaggaatgtagccaagtgcctgtacacccagggcgggcagagttgatcagggcaagcatccgctgcgtccggtttgggcgggggtagccgggtactgggaacagacattcgaaaacttggtgtgactagcacggggggagggtataacggcggaaaccacaataggacgtggatgcgaagtagatgagtttggccaaggggcttcgattaaaaaaaaaaagaaaagaaaaaaaaaaaaaaaaaaaaaaaaaaaaaaaaaaaaaaaaaaaaaaaaaaaaaaccctccttcttgatgacgcactgtcgtcatttcccaaggaaggttccattccgattgcaagctcgattactgggtttgagacgcacgtcgaggacactggcctcgaagtagccgtag

SEQ ID NO: 9762 - DNA, 180 bp, Glycine max
  Clone ID: jC-gmfl02220104f12d1
ggggccgggaaaattccaaggggttgtttgattaccggaagactaatggtctcctttaacaacctgggaaaaaaaaaacccatgctagagaagggttttacgggctattttaaagctgaaaccctgaaaaacaaagggaaccccccgcccccccattaaaaagggggtgggatgcaaatc

SEQ ID NO: 9763 - DNA, 387 bp, Glycine max
  Clone ID: jC-gmfl02220104g01d1
tagttggcaggaacttagccgtcgtacatgtgagcagtgccgcctgcttgggggggggggggggggggggggggaccaaaaaaaaagtcggtgtagggatgatgcaagaggcagactgcaggtagtaggcggaacgcatgcccgaaaaacaagatcctagatgaatatagagagaacaaagaataagagccatggtgatcattagttgtgatggaggtgcatatcccggatgtaatgaactgcagagtggcaaggcccatgaagccagcgcacttagtagagagtggccgcattgcatgggctgctagagtggagactaggcagcacggtatggaggccgtggtataaagttgaggggatgttacatgcactgcggaagcaagcccg

SEQ ID NO: 9764 - DNA, 578 bp, Glycine max
  Clone ID: jC-gmfl02220104g02d1
gaatgacgtggagaggggtttgccgtcctggatgtgtggagtgccgccgtgcttgggggggggggggggggggggggggggggggggggggggttatggggtaggaatcaactaaatgtatgttgataactaataaaggcccataacaaggatacgcggggtcaaatatagaaaagagttgcggatattaaaactattgaaatattcagggataatatgaaaggaaagagccaaaagaaaaaacgaagtgaactgggtggaccacagggccgacttggccagccacagggaccggttggccaactttgtgtacgtggtggacctaataaaatacccggcagcgggccaactatcttattagcgctaaggcgtatgttactaactaagggttttaatgtggtagtcggttgaatgcttaaaactatcgcgtgcccaagaagttgcggtggtggcggcgtatcgctcctaggtttacttaatgtaactattgtcctactgaccgaggtcacaatgctacttaaggagatcccactattgcgattcatatctgcactcgattggttgggtggtaaagaatc

SEQ ID NO: 9765 - DNA, 504 bp, Glycine max
  Clone ID: jC-gmfl02220104g03d1
catcaatcaaattgtatatatttggtgttttgttaagcattttctagccaaaatccaaccaaatgaagaaatttgaggaacaatttgcaatgatctaattgaattcaaataaattttggtaataaaagccaaagttgtgaaagtacaaaatcaaatatcacagccattgcactaatcaagtttcatactcatacaccaattttttttggaatgattgttactcttccatagcatctccttcaatcacttccaccttctccttcaacggtgtaatctttgttaagaggacctctgtctttttggggaaatcaaagccttttggattgacataggtacgaggatttggtagaaggtggttcctgagatattccttatgtcccttggttatcacacaaacatcaacattacttccacttcctaggtcattaaatataccagcacatatcgcctcaacaactagcttaatgccttcatccctactcaaactttccttgtacttagact

SEQ ID NO: 9766 - DNA, 284 bp, Glycine max
  Clone ID: jC-gmfl02220104g04d1
aacaactggttgggattttttggggggcacattctggattttgtgcccccagaggaaacccttcccttgggggaaaaaaagggtgaaccaaaaaaaatcccccatttccccccctgccattgacccaaaaacgtttaaaggggggaaaaaaaaatggctacgggggttttaccaagcccccctaatgaaccgaattttgggcctgccaaaaccggtgaagggcgcccccttccaaaggacacaaacagaggggccccgggggccgtgggcaaaaaaccacaaaa

SEQ ID NO: 9767 - DNA, 535 bp, Glycine max
  unsure (1)..(535): unsure at all n locations
  Clone ID: jC-gmfl02220104g05a1
atagcgtcgatctgtcgctagcnaatcgtgccagagtgcctgtgcactggttgaaacaaaaaaaaaaaaacaaaaaccaaccacagaccaaacccggaaggcaagttaaaaaaaacaacacaaaaataaaagccctacccgggccatggcacagactagcggctgggcttgcagcatagtagccggtccctcaccatttggatagggatgatatagccaatcgcattgatcctattaggcttttaggcccgcgtttttaatacccgagttgtagtaagccgtacgggtttccttttcaaagtaatgttattactaataataatcgccgtagtaagcgtggtaataattgtcagcacttgtgtggcggtatagcctagcgcgcgttaatacaccaacaatgtggcctaacagcctatacgcccgctttacgctttgagtcttttagctattaatgatattgattctgggtaccggaacccagtaaaggccaatggatggtgatgatttcattattcctggctaatctctaggcccg

SEQ ID NO: 9768 - DNA, 440 bp, Glycine max
  Clone ID: jC-gmfl02220104g05d1
agggggaactgggcaaaaaaaaaaaaagggagggggggcccccttagccccccccccgaaaaaaggaaaaagcccccggcctttataaatacccccccccctcaaatttatgagggaacaattttgggcccccccccggggggcccctttttatacccccaaaaaaaaactccttcactggggggggggggggggttaaggcattccctggcaaatccccaaaccaccgggggccttggggggggggcccccccccccagggcccccttggggaaaaaaaccccccccccccattgggggcccccggaacaatttttttccatctccccccccaaagtccacctccccccggggtaaaaaaaccaccaaaatggggccccccaatttgggaacccccggggggggggcctcccacccacaaaaaaaggggggggcccccc

SEQ ID NO: 9769 - DNA, 535 bp, Glycine max
  unsure (1)..(535): unsure at all n locations
  Clone ID: jC-gmfl02220104g06a1
atagcatcgatctatcgctaggaatgtgccagataccgtacatgcagtgctgccgtaagtacagacgagcaatacacactgtaatacctggccagaagagtgggtcagtaggcaccacgccatcgtagccatattctggcaatggcgccacgcagaagaattactaaactatgcccgtaaagatgcctctgcgattatacccttggcaccacggctggcgtgtgtaaggcacctcattgatgctgcacaacgtagtgcagaagaggagactacagctaccgttgtagaagaaacggcaccgtacttaaagctagacggtgccaccggtaacctggcaaaggttacggcaaatgaagctaaggtaccaaccgccgaagcgctggttgatagtaaggcagaatatgcctaataagctgcagactacattgcgaccaaagccgatgtgctaactccagcgagtaaatatgtatgtgtanctacggcacaggtacgggcacaagaagcagctactgcgctcccagcggcaactgcgcaa

SEQ ID NO: 9770 - DNA, 327 bp, Glycine max
  Clone ID: jC-gmfl02220104g06d1
actgaaaaaccgccgaaggcatttcccattgaaaatatatctgtccaacatattaacatgatatactggtaaatcttggcaaccccagtaaaagctttcaaatagcttctaacctaaaaatgtaatacagtttgtttcctccccaacccccccaaaaaaaaaagaaaaaaaaacttgtcaaccaaatccgaatccttcatttgcttcatgaatggcaagcaggaacctttcttccaaatgttgtttagatggatactctggcaaatctaattgattgaaacaggtatgagcagaaggcaagtgatcagaactcccatatgccttatg

SEQ ID NO: 9771 - DNA, 553 bp, Glycine max
  unsure (1)..(553): unsure at all n locations
  Clone ID: jC-gmfl02220104g07a1
atcacgtcgatctgtcgctaggaatgtgccagagtaccgtacatgcanccagtcgtaatcggacgctgggagggaccgcataaaatgatgtatacacaaacatatgtccacattggctaacatggtagtaagcctgcgtaaacgggagaggcgcgatgatgttagcgagccctagcggcacaaatgactacaacaaagaaacaaacccctggttgtgcgccaaccgcggcaccttaaaggagcctaccgattgcacatctgctaccagcaccgctgtccgaacagcacgctattatttaacagtcagcgattacgtaggattttcaagcaatgagttcacctgcagcctgggcgaggtcctggtttaataccgggccaagcagcctgctgtacgggaaactggggtgacagctgatgccacctggagccacactataatactggctaactaacttgctgcctagtggtgatactatgccggtataacctcctccataacacatgatactctgtatgctgagtatgtaatgcctgtagtagcccagcagaggta

SEQ ID NO: 9772 - DNA, 484 bp, Glycine max
  Clone ID: jC-gmfl02220104g07d1
aacacgaaaggacaacacacacaaactttcctcattcaacaaattgcaacatccactgcaacatgtaacactcttacaaagcatttccttcacgaagattagaaaagaaaaaaaaaaatacttgcaagctcagaaaaacaaaactcaatatatttcaagactaaaaaatcggtaatgattttcaagcaatattgtggtatggtttaataataatagtataatctatatatatgaaggcaaacattatgcagcttgcttgagcttctttgtgatgccggcaatgtacttgccttggtggaatgcttgctgtaactcgagctcacttggctgtcttgagccgtcaccggcataagttccggcaccatatggacttccacctttcactttctccatctcgaacatgccagcaccaaacgtgtaaccgattggaatgaatatcatcccatgatgaaccagttgagtgatagcagtgagcgctgtagtc

SEQ ID NO: 9773 - DNA, 588 bp, Glycine max
  Clone ID: jC-gmfl02220104g08a1
atcacatcgatctgtcgctagcgaatgtgccagagtcccgtacacgataagcgtgtggggtggttgacggaaatgctgaaataaccggatgtgaagtgaagtttgaaatgagaggttgggggtaatggtggtggtggggtacatctaagtaatctaagccaggccctggggcgctagaaaattgcgcagaacgccctggcgatcaataggccggaggtgccgtagttcggaaaactgctgggctggaggaaggagcatttcatgccattagtgtcaggaggagtgattaggctgcactaacaacccagcacacttaagtttaggcaaggcacgtatgggcgccatggtagtaaataaaagaaatgttacatacactgtggtaggaggcccgttaagtacgatggcagtatcgtaaggtagcacaatgccgggacgctaaccgcgagaaatatagtaaacttgctgccgcaaccgctgaggcggagataaatactactggagagtggccagctgagcgatcaagcggttaggccgttactagtgaacctgagcctactgctgcagtacggaatggcctaaggatcctca

SEQ ID NO: 9774 - DNA, 348 bp, Glycine max
  Clone ID: jC-gmfl02220104g08d1
agagagatatcttagaccttatctcctttatttatattatagccgatctaagatatgctcgcttgtgacaggaagagatggcaagttaaacaggaataagtgaataacattccatctcccatgcaattagtcgacccctttggaccgtttggcccacacaagctctccacagaaaatttaacaaagatcgaaagcagatctatcaactcatctatttcaaaacgtatatcatacataatggcaggacctgtaatgattctaccaccaagatacttagcggctaccatgtaaacaaaaatcggagtgaaaacagaaaaactatccctttgtagagtgcatgctacagat

SEQ ID NO: 9775 - DNA, 625 bp, Glycine max
  unsure (1)..(625): unsure at all n locations
  Clone ID: jC-gmfl02220104g09a1
aagtagcgtcgatctgtcgctaggaatgtaccagagtaccgtgcagtgcatcttctccgaacatgttaggtgtgataaatgtaaagtattaacaagacggcaaaagcccctgcgtgggtatcaactgcggtacttcctgtgggctcaacaaccacagctcgaggtggagccgcccgtgtcatcttcttccgaacattattaggtgtgataaatgtaactgaccacacagtcgtataattaggtttattaggcccgggaagcggcaaatgcgccaagataacaatagtactggtatgcgtgcccagcggccgccttaccataacagttcgttgtgcgccacatatgatggttaaaagatttaagcctggagtgggcgccggcagactaagcattcccagtcgcgccggcaactgacccagcactgctataccagcggcaagcaacagcacggcacacagctgcgctggtgacgggggctaaataactaacagtggttaaagctgagcaagctgctgcaaagaatgcagaactggccgtggtaggtgtggtcgtactcgtatgccgagagttacactatagcgcttatagtgccgcaaacctgngagcaaccctggcatgcctgtgt

SEQ ID NO: 9776 - DNA, 491 bp, Glycine max
  Clone ID: jC-gmfl02220104g09d1
gaaaagttccaagatccaatcatatattagcaattcaatgttaaggtttaggcacctatatacatttctgtttgttacatcaaaagaattctacaaacaatgtcacttctctacaaacctaagatacacagcttacaattttacacactcctatgtacaaatgtgtgtatttattattattattattattattattacgcatgtacgtagcaaatatatcacaggttatcagtcaaatgtttataccaaggtccatgaacactaactgaaatagtggctgccacaatcaaaacaccagcagtttccactaccttatcagtcagaataccagccccaactttcatgagagccatttctgctaatttcctcccacggatcccactttcaccaagcacaacgccgcgcaaagctgaatagacagcattaaacaccctctcgaaaacaacatccccagcttgtaagctctttcctagcatactagcagcaactac

SEQ ID NO: 9777 - DNA, 565 bp, Glycine max
  unsure (1)..(565): unsure at all n locations
  Clone ID: jC-gmfl02220104g10a1
acactaggactagctgtcgatctatcgctaggaatgtggccaagtacctgtgcaccggttgggattcaccacgtgttgtaactgagtatcaacgtactccagcctgtaggtgtgggaaacattaataaaccgatacgccatccgggtgtatagaggagcgggctgataccatctacattgaagatgtacaatggaacttgccacgtgcggccgcgcaaatgactgaaacagccactgagacaccggcagcaagatgtgtaaatagtacgggtggtaagggccctacggccacagcggataaataccagaaagtgtattttacggctgggcagccacccaccactaggacgaaaaatctgcgggtaccagaatttaataaaattgcaggagacactgcggttggtgctgcgaggggtgtaattattaaggccataacggccgtggatgcaccaatanctgcgataataagagccacagaggcatagtggtatgctaaaggggagcttctgcaaactgatgtgtgtgccctggttacatcccgggggagcaanagacgacgtgcgct

SEQ ID NO: 9778 - DNA, 522 bp, Glycine max
  unsure (1)..(522): unsure at all n locations
  Clone ID: jC-gmfl02220104g10d1
gtacatgcatgggaaaataagttaaattacaaatggcaaaaattggcacgaatttcactcgaccttccaggctcccaactgtcataattacattgcaagaccagagaagtatgacacacgaccttaatgagatattccatgtattgctctgaaaactcagtagctgaagatcgttctgaatttcttcccttgaggcaccggctggtttcttcaagtataacaattgaagcagagtcatattgttaaacccctgctgcagcttttgcttgagagcccgacttaccctcagacgattcactctttcgtatcttcctagtaggtgtcctcatggtaacaaattcctcagctgcacttgggtgaatgcctacagtggcatcaaagtcagccttggtcaagcgagctttaagagcaactgcaaacccctgcacaatttcaggagcatcttctccacacatnatgcaacctagaacttcatttgttttgcacagactactaatttcataaaaacccggtctggaagcc

SEQ ID NO: 9779 - DNA, 451 bp, Glycine max
  Clone ID: jC-gmfl02220104g11a1
gtcacgtcgatctgtctcgatctatcgctaggaactgtgcaggtgcctgtcacgggcaaccaaatgggtaacacgacctggtagctgtaagtgtcaatgcaatgcttgtaacttccaagaagagggccagtataattcggtaacccagagctgtaaccagtataaagcccagcctgctagagctacagacatccgccagggcacagactagtagagggtagcccacaggtagacccaagcatacagtaagtaggcgccagccggggataggcaaaaccacaaaacgtatggccctgccagccggactagccgtgctgtgagcaataattgacgtaaggcagctaaaagcagctaaccgtgcgagcggtgcgcgtagacgagcagagtcagcctgccagagctagtgaagccgtgtctctagtagtgcatgcccaagcgacactgctatgag

SEQ ID NO: 9780 - DNA, 388 bp, Glycine max
  Clone ID: jC-gmfl02220104g11d1
caattgctaacatagtgcagcactacattcccagtcagatgatgcgcgaggaaattagatgcatttcttacaatcgatatcatactatgacaaagaacatacagaccttacaacattttgcatcaattgactaggttgttaatagagcagaccatgctaaccaaccagcccaagtgacttttttccttttcaatgtaaaaccaaccacactgattgatctgtcattccctatgaatctcccttgaattatgttgctttctcaaaaccaccagctatctgcatatgcagccatcccatttgtgatccttgagcatatcccttggccggttgtgatccaaatattattccggcttgaggcagttagttcgagattgagcatgaagcctac

SEQ ID NO: 9781 - DNA, 552 bp, Glycine max
  Clone ID: jC-gmfl02220104g12a1
acactaggactagcgtcgatctatcgctaggaatgtaccaggtacctgtcactgtcattgcaagtccgtcaccgggaaggatagaagaagaagaataagccgggtgaggtctgaaaatgtactcgtataggtatttctataataaacgataatatacgctacccctgtaaggagccacaaactaaggtaaacatacacacggtgctggcaatagtggtaatttagggtggtaacggtaaagggggttgtgtaaatttagtaagtgatccagtgtgtactggtaggagcggggctgcccaaggtggtctagccgtaaataccgccagtacagcagcatcgccgcaggcgactgctagagtcgatgcttagtgctaaactacactcgccccctgggaaccagatttggttacagcattggtggcttatacggtgcaacctgcgaagacacaaaataaagcgccatttgctgcaacggccacagaggcgtcgccctatacgatgcctattgccagtacagacaccaaggcacgctacaagcctgcatggggagct

SEQ ID NO: 9782 - DNA, 389 bp, Glycine max
  Clone ID: jC-gmfl02220104h01d1
atacctgccaataatttaccctcctacatgtgtagcactaccaccttcttgggggggggggggcggggagggggcgggtggggaggtgggagagggaagcagggggggagactggcgggcatggggggaagcctgcggagacgggaggggcgcgatgatgctagctggccctatcttttcaaaatgacaaaaaaaattaccaccccctgcaagaacaccaacccccacaaaaaaaatcccccaaaaataaccccatctccaaccacaacctaccatgcaccatcactctatcaaattcctttcagcgattacccccccttttcaagcaatcagaaaaacttcaccccgcactatatacatgccttcctccccatattcaagcaaccccc

SEQ ID NO: 9783 - DNA, 564 bp, Glycine max
  Clone ID: jC-gmfl02220104h02d1
caccaactatcggttaatattaattgtgggaagcagaaaagaaacaagtccacaataaagccaaacattacagcgaggtcccaaaattcgagaaaccatcacaggccacaaatgcaaaccaattcaattcatttaaattcaaagctgcgaagaagtcctatgcataacaaaagcaggaaacaaccccaactgtctactactctctgtcttcatcactgcaggaggtaagtagatgaagaagcattcattcaacaatgccgcatcatcatcatcatcatcatgtgtaaatgctcacaatttcggttggaagagcaattagaacaatggccaaagccatcacaatcgcataggtaacggtactactgggttgaaccatgcttccatacgatgcgttttggctctggggggtcgtagtttgtgagtttgaggttgcaggtgcagaaggagttgtcttcgaagaatttgatgtgaagatagcagcatcaggggaacttggagatagacccaaaagcttaggacagttggtgatgctggcgtttttgacgttcaaacagaagggagctg

SEQ ID NO: 9784 - DNA, 445 bp, Glycine max
  Clone ID: jC-gmfl02220104h03d1
gtaatctaccccatttattgaagatgattattatttcttcaaacaaattcaagtaaagaaaggcaaaagaaggaaatatcaataaaattaaaaagaaaaaaaaagaactacaaaatcttataaaccatgtgtccaatcaaagatgtttgcccagggaagattaatgcctgtagaatgctgtattcattttctgtatgcttcatttccaagataataacttctgtaatttccttatgtatctctgttgaatattcacaaaaaaaactgtttcgagccaccgactctgaatatgcagaaccatgaacaatgaccacccattcatttatactaacacaagctttaaattaatgtcacagattatactgtgaacactattacaatatgtagatatctgaatgaagtgttgtcaagtcctctaaggtgtgggatcgaaaataccaacata

SEQ ID NO: 9785 - DNA, 531 bp, Glycine max
  Clone ID: jC-gmfl02220104h04a1
caaaagatggcaaagcgtgacaagggccgatcacgaagtgaaccgagggaaactgtggaaggcaccgaagccgaggctggtcagatggcaacgcgcgtgaatatgggtggactagcgacgagcgctgtagcgaacgagtcggccagtcgcgcattagccagttagtcacatggttaatgccaggccaacgttggcagagggcgccgagggacctacggttgcactgtggtgccagcaaggctcgctgcggcagggtggggcagccggtggaccgtatggatacctagggcctgaggtggcctcagattatcgtggagctcgccgtggggcagcctaaggatgtcgtagccgagtaattcaaagcagatgcgcttaagcagcacagctgtagagcaacacatacggcagaggtgcaggcagctgctaggagatctgcacatgcaggatggcaccccacgtatgcagaatagaagcggaacgcactgtctttttaggcctatgccgcaagcgcttggcgggtggaagcagcac

SEQ ID NO: 9786 - DNA, 189 bp, Glycine max
  Clone ID: jC-gmfl02220104h04d1
gttcagctacaaggcagaatttgaattcatacttcgacaaactgttgcgaagacattgtcaacagagactaaaatgatacagatgattaatacaatacatactaataggccttgaacagttcaatgcctgatcccagcataacttaagtcctctgtccagcccttggttgtcctgttcattttctccct

SEQ ID NO: 9787 - DNA, 564 bp, Glycine max
  unsure (1)..(564): unsure at all n locations
  Clone ID: jC-gmfl02220104h05a1
gtcacgtcgatctatcgctaggaatgtgccagagtgccgtgcatgtttgtggcatggtgaacccatgggcttataacacacggtaagctcgggtgcgcctgagcgtgtcggctgcgtattatttggggctgtacaacatgtggtaagtgtgggacctgcgcctagacccttaaaattaggttgcccttatttgtgtttgtgggtgggccatatgctaactggggggtttcctaaaagggtattggtatgcatcgcggcgtacaagtttagtaaaacgagccattgaggcggaactgcgccggaccgttgatgtactgcggccgcgttcggatccagttactatgaaggtaacacagctggagaaaccttaaccagaacggcttggggattccaaaacgcgggtagtggcttgggccccaagtaacttgtgggcttttggttgggcaaaaccgctaaaacacaacccaatgaggcctaaagcaaggatagcanacaggcggcaacacgcatcacgcaggttgagcaccggctacatggtagaatacagaanagacaaaatagtac

SEQ ID NO: 9788 - DNA, 509 bp, Glycine max
  Clone ID: jC-gmfl02220104h05d1
aagatacactaactatccaacccaagtacattttattttgactatatcaggatacaaaaacaaacttcctgcaagaagtgaaaaagttgataacaacagaaaaaagaaagaggtccacatccagagaaggggaaggaaaacccaaggctgcataggcaaacaatatacccaaagtgcttaaaacacccaccaaaagatgtgtcaaggcctgaagccaacactagggcaatgtttaaaaactgggaggaaaaataacttgagctaagaaactcaggttacatccatcctcccaatgactacaatgagccagaggagagcttcccccattcatcttggaaggagtgtagtgaaaattaaaaagaaaggtgctgatatttttcggtgccgttgacttgagttaaaccaacaattttatttgcatagtatacttgtgattcttttctttcactggtcccttttcacaaataatatctgtgagttaggatgatgctgatgaagattattcttca

SEQ ID NO: 9789 - DNA, 581 bp, Glycine max
  unsure (1)..(581): unsure at all n locations
  Clone ID: jC-gmfl02220104h06a1
gtagcgtcgatctgtcgctaggaatgtgccagagtgccgtacaccgcgatgaacgcgctggagcagcgagtgacctgttggggggggggcgttggggcacgctagcagaggtgtgggcaacaagcaaaatgacgcactcaggagagcgccgacagggcaaggggctaaccagtgaggaaggaggcagaaggggatggcgaagagcagggcgggccagcacaccacacaaaagccacaccacagcaaagagccagaagaagctaggggtggggcggtacgcgaaaaacgggtataaacgtaattaagtaaaaagagcagggggaaaagaaggaggcgaaaacgtaataaatgagcgggctaagaacagcagaagcgaaaaaggtgggataggcggcagctagagacgagggagggaaggtaaagagcatagggggggacgatataggcggggtaagctttttagctgcatgccggggatgtgtaggngggcggccctgcccaatacagaaggctaccccagttacacaagcgcatacacataggccagcagaatcgggagacngggcccagccgaagggccc

SEQ ID NO: 9790 - DNA, 535 bp, Glycine max
  Clone ID: jC-gmfl02220104h06d1
aaaagcagaaaatttacatcttcattactgccataaaagcatatggcggagattcatgtttttccatggacttgttatcatttccttatccatgaacttgttatatatagaatagaaatttatctattgttgttgtttggtcgcagcaatatggctaaaatttcagagaagtgaggacgttttgaaggggtgttgttccagcactttgtcataatgtgttttagagtttgttggcagtcttttgggatttcaggtcgaaggccacatgcagcaatgccaactgctgcttgtacaggtgaaaatgaagaataagctgcttcaccagttaccatctcccaaattaccatcccaaaactataaacgttactcatccatgtctctgtcacattctctggatcccctgcaattatctgttcccagcccaacaaaaaatgagagtaaaaccagtcagcatgggggcattgaaaacaatgtgtactaaaaaaatgtcatatttgaattaaataaatactatatgcatcaacaatgtaaaaga

SEQ ID NO: 9791 - DNA, 625 bp, Glycine max
  unsure (1)..(625): unsure at all n locations
  Clone ID: jC-gmfl02220104h07a1
atcacgtcgatctgtcgctaggaatgtgccagagtgccgtgcatgtggttttgtggttttgcgcaagtatcgggacggtctgataccggggaaaaaagcctgcagctgcaccataggtaattgtggcggcggcagaagccaatgccaagccgtaacctcccggggctaccgcagcatctgttgaaccttcgcggttttacgaggaggccctcattatcttagattccgcgaagccggcccagcccgtacaaccagctggatcgcccgcagcaactgtaagtaaaaaccccgagatgtattggcaacgagttgagacactagcctagacgtactaatgcccagcagagccacaacagggcctagtatataggggataagcactggtcgcggcttttgcaacaatatttgcgatggtggattcacctattttgtaagtttaaccttaatacacacaacagcatttagaggagcgggcacatgngtaagcgcttgcttagcgagcggctaaggtaactgcgtggcgtgtgcgagcttacgccaacaatgtaccgaggcgctgggcagtgccgcagcccgcacttattacggttagagagcaaccgagctgtggttgtagctaaggtgt

SEQ ID NO: 9792 - DNA, 444 bp, Glycine max
  unsure (1)..(444): unsure at all n locations
  Clone ID: jC-gmfl02220104h07d1
aatgcaaacataaaaaccaattaagcatataataaatataaacagaaactgactcaaaaatccctctgggagaaaagatactagactatcgttctcctaactcgaggcacctaattcttggccacaacaagaaaatcgaataaaaggaaaaaaatcaaaccaatcagaacctacaaagntccaataccatncnncaatnncataaaaaaacctttcttccaaggggacctaacggagaaacttataacatactcaacttacaaatccattcattaaactagatatatctattaaaaacccaaagcttcaaatatcaaataagtcaaccaaacttgactgaaatatggcacaggactgggtgcatgaagaacttgatcaccatccagctcttgacccaacttagaagcacttccgatgaacgatagctggcccagattcatcata

SEQ ID NO: 9793 - DNA, 571 bp, Glycine max
  unsure (1)..(571): unsure at all n locations
  Clone ID: jC-gmfl02220104h08a1
atcacgtcgatctatcgctacgaatgtaccagagtaccgtacaccaagccggcctggcgccgacaacaaaggccctcgcgcccacggcggcaagtcccaactaaaaaaaagcacaagttagtatagactagcttgttaacataaggaggttgagtgcagtcgacatcacactatcaaccaacttctcctccgccatttccgtcaattccacaaccggtggcaacggcttactgtctatccttgtatgtgtaaaggtcgttgtattatttattagtatgcccagtagctgccgccaaatcatacagaactactgccgcttaccaagtaaacgtgagccgccggttaggcaaaatcgtaacccggctatgcataaacggcaaaatccgcagaaccgtgtgtggccactgcaaagtatgagaggcctttggtatatgttggcttatatataaccgtagagaacggatgagcggatgcctaaacaccagcactaattcctgcgggggatgccacagataggcgggaggctgacggcgcccaaaggngggccaccaatgctacaatacagcgagta

SEQ ID NO: 9794 - DNA, 371 bp, Glycine max
  Clone ID: jC-gmfl02220104h08d1
agaaaggagaaaataattgattacaagttcacaagtaaatgacatgtatgaaatagaccatcttagtatttggaaaaccaacataaaatgcatataggcgacaatgccaatcacaacccatgcccctaacttgacaagcctctgactctgtcatttaagtttcaggcaaaacatattgttacagtatctacataaaggccttattcatatgaataaaacagaaaaggaaaatgaaatatcaacaaatgagaatgctagtttcattagcctctccaattgactttctgcttccttatctctcctaatgcttcaacaggtgacttgcagcccaccctctgctggatctcaggtagatcaaccctcataaaggg

SEQ ID NO: 9795 - DNA, 424 bp, Glycine max
  Clone ID: jC-gmfl02220104h09a1
agtgagactagtgtcgatctatcgctaggaatgtaccaggtacctgtcacacggtaaaaatacgcgatgaaaaacaaaaacaaaaaaaagagcaacggtctgagaagtataagaggcggtgtgggagggtggtggcatgggccggggctataatacccccagtggcatagagtaacagggccaccaaaattaaagatagagagaccttacctgggtggaacgcttgccatgtaactagcgctagtattaatgctgcgtaaaaggcgcaggttactgcctatagattaaagcccgctacggcagcgtaaaccgttggctaacctgttgaggcaccggtaacggcagccaataaggtaactattgctaaatttaatgcattggaacctcctgtagtaagcccgggcgccgtaagagcggaatgtgg

SEQ ID NO: 9796 - DNA, 466 bp, Glycine max
  Clone ID: jC-gmfl02220104h09d1
attgaagaaacattatatatatgataattattttaccatagtcacgttgaagtatttattcacaggagaatacaattactagacacctccttttttaatggggatggcttgcttctctacataggaaaaatagtaaaagaaaattgataaggaaaaaggccattattgttgctcattctaggctgcacaagtaggagcttttcctgttattgtgggcttgacattagcacatttagctgttgctgcacttccgttgaatgtcagatcaatatcagccatctctacagcctcacatggtacaccactactacaaacaagaaccaccccttctttagttcctgaagtgcccttaatgttcttgaaggaaaccttgcttatcttgattcttgacggattctgtttggagcattggttccaaggacaatactcttggtctatgatgatagggttcataacattattcatg

SEQ ID NO: 9797 - DNA, 505 bp, Glycine max
  Clone ID: jC-gmfl02220104h10a1
acactgagagcagctgtcgatctatcgctaggaatgtgccaggtgcctgtcacggggttttggtgtgtgtgtgtgtgtgtgtggttaattggggtgtgcgggtggtgaaaacgtgtactgtactagaatagaatttggtggtagtggtggtggagcgcaggcatggcgcgttattatccgcatttagggtgcgagtggtgccgcaaaactgaaggccggtatgtgaagaccgcgatacgctgaaacccgaaatgggcaaattgactggttgacggcaagtagtacaactggagaacgtcaagttagagtgagtgccatcgggacatgtgtgggcagggtttgcccaaagcagcagcagctggcaacagagcccaggagcgcttcagggctagagcagggtgctgttttggcgacaacccagaggattcgttcctaaatgcacttacaccgcagacggcaccagcagtagacccagcagcaaagtcagcgacagcactgtcacaac

SEQ ID NO: 9798 - DNA, 439 bp, Glycine max
  unsure (1)..(439): unsure at all n locations
  Clone ID: jC-gmfl02220104h10d1
ggacaaaaccattcatctatccaacaattttattttaccctctaaataaaatttagaagagaaattcaaatcttatttatatcacagtctaacataagaaaaatatttaagtaacaagatggctacactgatatagaaacacacaatcacaaagctacatataatggnaacatgcaagnnnnnattatatattgttatgtatataacacatactagacctgccaagcttaaaatatttagttctactaggcctacaggattacatgtgaagaaaattgcagtgaaaccttttttggccaaaggaacttcacatgatcaggggtgccaacccttttggaaggaaaataaagagtccatgatagatgataatgatgatgaggtttccagctttaagctgtcattttcactgataccaaatagagatatctgcctgtttctg

SEQ ID NO: 9799 - DNA, 529 bp, Glycine max
  Clone ID: jC-gmfl02220104h11a1
atcacagagagcagcgtcgatctatcgctaggaatgtgccaggtgcctgtcaccgcaaacggagctaggttagccagcggactacaaaaccagcaggcccggttgtcaatgcggctgttaggtagagccaggaattaacaagagccaaatcacacagttatggtaaggcagattaagaagtaattggtgccgccacgccaactgacgggccaccggccgctaactatggtaacgaagcagttacactatagatagtaaaagttacacacgatgcaagtgacgtaacaactaatgaccatagtagtacaggtgtgacaatggttaggaacggttgtgaaggtacgaatatgacaaactacttcgcacggccaacaatacaagatattaggcggacacaagcataaattgtaaaaaattactcagaggaaacaagggaccatagtaggcagatacaagcataaatgatggcaaatgaagcaataaaagagacacaagaaggtgcacgtttaagtataatatacgcgccgca

SEQ ID NO: 9800 - DNA, 437 bp, Glycine max
  Clone ID: jC-gmfl02220104h11d1
cctcaaatataagagtgagcatgaatgatgaatctatagaactcaatattaaatgaattttctaacgtaccctgtggcaatggcaaaattacaagaagattatctagttccatttcaatttttgatcctatgagcacccagaaaatataaaactcatttattgcaacaataaggataccccacattctgctgttctatggatagtacttgtctttcacatatcaacagatcataaactacacagatacattctgtcatttacctggtttatatttcttatggtcctcgcatcttctcaacaatgtgcctgctcttttcttcaatgtgacgccttttctcttccaatttctcgctcatcttctttcccagatcaagcatccttttccttctccccattttctttggcagtccatcctcatgttcacagaatgattttg

SEQ ID NO: 9801 - DNA, 539 bp, Glycine max
  Clone ID: jC-gmfl02220104h12a1
acactaggagcagctgtcgatctatcgctaggaatgtgccagagtccgtcactgaaccgcaaaaaccacacagcctactgctaatagtgacgctgcgcggaaatcccgggccagtgtatggtggcgcgccaccaaacaccacttagctttggtggctgctgactaggccacccaaacggccgctggtgcggacgttgaaaacacggaggcgcctacggctgctgctattaaacaacgtagccagttttctgcgaaaaccgccgcccacgggtagacatttacaagcctggcagcctgtctgattaccgcatgagccggggcatttatgagcatgaccaaaccatttcctaggttgcaaagccgagacacaactgcaatgtaggtagccaacgccctaagcctgctacggcgacctagtggtaggccctaactagccacgccacggttagccgggcacctgccactacagttgaagctaaggctgttgggtgtagggcctgtgtgtggaacgatttacggctgttgaagccccgcccggc

SEQ ID NO: 9802 - DNA, 348 bp, Glycine max
  Clone ID: jC-gmfl02220104h12d1
agatgcaagtatttatacgagttgtcgatattataaatgtataatgcagatacaaggggaatgcatccaagattagagcataaaatttgaaacttctcaagggagaaatctggctgtacaggacaatgattcaagttgtctccctagtgtacattattttgcttacaagccaagagcaccaaggggtgtcttgccctggccagcctcaaagtagaaaatcagcatagccaacatagcaatcctagcatgcttaatctcagccaatttcagtctctctagcttgtcggcatccggaatgtaaacgccatccttgatagctccagcaaatcccaaagggtcaaagaattt

SEQ ID NO: 9803 - DNA, 436 bp, Glycine max
  Clone ID: jC-gmfl02220106a01a1
ctcgagccgcttcgcttccggcctcatcgttaacctcattcaggcaatatgctacgtggttgtgcggccggtgtcgaagaatctgtaccggcggatgaacagggtggtggcggagctgctctggctggagctcgtgtggattattgattggtgggccggtgttaaggttcaagtattcacagatcctgaaacctttcgttcaatgggtaaagagcatgctcttgttatctccaatcacagaagtgacattgattggcttgttggatgggttttagctcaacgttcaggttgccttggcagcactcttgctgtgatgaagaaatcatcgaagtttctaccggtcattggttggtcaatgtggattgatgaatatcttttactggagagaagttgggccgaggatgaacgcgcattaaagtcaggcctacagcaactg

SEQ ID NO: 9804 - DNA, 431 bp, Glycine max
  Clone ID: jC-gmfl02220106a01d1
aaccacataatcaaacctgctgaagaatatatagagtagtatacatccacgatggagctcaacaaaatacaatgcataaatagttaacagtttctgatatgccttctttcttggaaaacttttgaataatgataagcctattgaaagaatagggtacatttaaatatggaagaaactattgagaaaattgataatctaatatcaaaagaagtgtatgccagctttgttaaacagagaaagcaggtataggaattcctgcaatgtgagcttggatgaccttttctttttaaaatctccctttttcagaacacccaaaaccttgtccttgaattcagattgcacctcatctgcttgcccatcctcaacttccatttgatcataatctgctgcatcatcattcatgtccataccttgatcatcaccaaaactag

SEQ ID NO: 9805 - DNA, 538 bp, Glycine max
  unsure (1)..(538): unsure at all n locations
  Clone ID: jC-gmfl02220106a02a1
gaaacatcatttgtgagagctcatgcttctttttggacaagatattcaatcttcttctatataggatgcttctttagacaattttataggtctgtgggcaaggctgactacttggctttgcgcaatggatttatcacggtccacctggctcctggaagtaaatttaacttccaaaagtatatcaaaagatccttggaggatgacttcaaggtagttgttggagtcagtcctgtcctctgggcatcatttgttgtttttctgctactaaatgttaatggatggcatgctatgttttgggcatccttaattcctgttgtgataattttggctgttggaacaaaacttcaagccacactggcaaacatggctattgaaatcacagaacgacacgcagttgtccaagggattcctcttgttcaaggctcagacagatatttttggtttggtcggcctcagttagttcttcaccttatccattttgctttgttccagaatgcgttccaaataacatanttcttggtgatatggtattcttttg

SEQ ID NO: 9806 - DNA, 431 bp, Glycine max
  Clone ID: jC-gmfl02220106a02d1
accaacttgttcaacaactaattttgtattttgaaagaaattacaattcaaattcatcttcaagcttcaaggcctctgcggcagcctcttcctcttcgtcatcgatgacaaaatacggattgtgagcctctggcttgaacttgtagccagtaaagaaatagaaagcaagggtggccaactcagcagcaaccacactggtccaagaataacgataggaggtaatagtctccaaggcataaacgacaaccctggtgaagtaaatgtaacagataacgacgacatagtagtgcctgaagagagtaagcttcatcaaattaacagcggccttgccgtcggtcctagcggcctcacggaggttcttgatggaccagacaatggggaaaagcacagcgcagcaacagacgacgtcaacaaggaggaagacctgtttc

SEQ ID NO: 9807 - DNA, 524 bp, Glycine max
  Clone ID: jC-gmfl02220106a03a1
gtttgttgtgagctataagctagtttatcgtgaggagaatatgaagttgtttgttttctttgttgctgcagtagttttggtagcatggccatgccatggcgcaggctaccaaaggttccctctccgaaagaaaaactggctatggtgagcgttcttcggaggtaaaatgcgcaagttttaggcttgctgtggaagcacacaacatccgagcctttaaaaccattcctgaagagtgcgttgaaccaacaaaggactacattaatggcgaacaatttagatcagactctaaaacagttaaccaacaagctttcttttatgctagtgaacgcgaagtccatcacaacgacatatttatattcggcatagataacaccgtactctctaatatcccatactatgaaaaacatggatatggggtggaggaatttaatgaaaccttatatgatgaatgggttaacaagggcgacgcaccggcattgccagagactcttaaaattacaacaagctgttgtctcttggcttca

SEQ ID NO: 9808 - DNA, 518 bp, Glycine max
  Clone ID: jC-gmfl02220106a03d1
ggaacaagggcagaagatttattaaagccgcgtaagagacaacaagtaggtacgtggagtgtcttaggtgacttacccacataacataaagtgacattaacaaacatagctaatgctcctatttgaatagtgcatatcagcataccttattacatatagataggagcaaactctagctagattgttgagagaggtgaaggtactactcaatgtagtacatgggattaggaagcttaaaggtcctgctttcgcctctgtggtctccaagcagatcgctccattggtctccaatgattccaacaattctgtatccctgcctcaacagattctctctcattgctgatttgtatgaaagtgcatttggagtgataagatgtggatccttgagaattaactgctcccatgtgtggaagccagccttctttaggtttgcttttgttacggccattttgtcaagatatcttcctgacaagaatacaatcttgaagccaagagacaacagcttgttgtaattttta

SEQ ID NO: 9809 - DNA, 450 bp, Glycine max
  Clone ID: jC-gmfl02220106a04a1
tggcgttgttctcttctgccgcaaccgttcttcctcggaacctggcattcaccaaactctccctctctcactctcacactcttctaccgcgcttcctttctttcccaactcccaagtcatcaaaccctcggcaaccgcgtcgcagtctctctccaaatcccacgcgctcaatccgccgcgtccgcttctccctccgcctccttccacggcctctggtacgtcggcggggaccatatcgacaccgaccagatcattcccggccgagtacctaaccctcgtcctttccaagcccgacaagtacaagaggctcggttcctacgccctcatcggcctccccgccacctacgccacgcgtttcatcgaacccggcgagatcaaaaccaagtacgccatcgtcatcggcggtgccaacttcggttgcggctcctcccgcgagcacgcccccgtcgc

SEQ ID NO: 9810 - DNA, 536 bp, Glycine max
  unsure (1)..(536): unsure at all n locations
  Clone ID: jC-gmfl02220106a05a1
tctcacccaacacctgtatttttctcttcctccattgattttgttcataaaaatctgattttttttttatctggggtttgaatattttttacttgatctgttggaacatagagggggtgattttgtaaaatcccggattctctgaggagaaaatattagtgggttttggttggatcgagggaaagactcgaactttgcagattgcaaaacgagggtctttgggggggagaaaatgtggatcttgtaaaaggtgttgttgatttgatcgagaaagaaaaagagaaacatttttttcagcttcaggtgattcaactttttcctctggcattggagaaggtttagaagaagcttaaaagatacataatacgcattggtaaccagtcatcaaagcggaatatgaaggtttcttgtgacggtgcataggttgataaagttctggtggatctgagtggattggttgtcattntcaaatattttcagtaaaggaaccatcgttgaagtggaaggggttnttcattacttgaagtttgatttca

SEQ ID NO: 9811 - DNA, 536 bp, Glycine max
  Clone ID: jC-gmfl02220106a07a1
agattgtgcatctaattccaaattcacccataaaaatacttccttttgctcaccagccatatattatgatggagggagatgagaatattcaagcatcatcaaagggaaaatatgttgaaagcttcaactgctcggaggcaccaaggaagaaaagcaagaagatagaaaacaagaggaggtttagtgatgaacagataagatcactagaatgcatatttgagtcagagtcaaagcttgagccaaggaagaagatgcaactggctagagatcttggcctgcagcctcgccaagtggctatatggttccaaaacagaagggcaaggtggaaatcaaaacgaatagagcaagagtaccgaaaactcaaagatgaatatgacaatttagcatcaaggtttgagtccctaaagaaagagaaggactctttgcaattagagaaactaagtgatttgttggaggcatgtcaagatgatggaagggaagacaaggctggcaaagaaaacagcatagaagatggtggctcatgcagtggatacagc

SEQ ID NO: 9812 - DNA, 494 bp, Glycine max
  unsure (1)..(494): unsure at all n locations
  Clone ID: jC-gmfl02220106a08a1
agttaattgagttgggtcttgaggattgtgtggatgaaattgatgctcagcaagtctttggctatgctctgtataaggatggcaaaaataccaaactctcttatcccttggaaaattttggctctgatattttctgggagaagctttcataatggccgtttcatacagagaatgcgagaaaaggcttcatctcttccaaatgtaaaattagaacaaggaactgtcgcatctctacttgaggaaaaaggaaccatcactggggtgcactacaaaaccaaaagtggtgaagagttcacagcaaaggctcccctcaccatagtatgtgatgggttgtttttccaacttgagacgttctctttgcaatcctaaggtttgaagtaccctctcattttgttggtctggtcttggagaattgtaatcttccatatgcaaatcatggacacgtcatttanggtgatccttcccccttttgttttatcccatcagtagcactg

SEQ ID NO: 9813 - DNA, 501 bp, Glycine max
  Clone ID: jC-gmfl02220106a09a1
ctccgaattagttatcttgagaaacattattcccattgctatatattatggctagcatgaaggttacatgggtggttgtgatcatgtgcatggccgtggtgggtgcaccgatgatggcgctagccatgacatgcaatgatgtgacggtgaacatggcacagtgcctatcctacctgatgcaaggaggaacaccttcaacactttgctgcagcggagtcaagaacattcttggctctgctgtcaccaccgttgacaaacaaactgtgtgcaactgtctcaaggcggatgctgctaggtacaacatcaatgaccagtatgctcaagcactccctggtttctgcaaggtcaatgtcccttacaagatcagccgctccacttactgtgcaagcatcaagttctgaacaagccatggacagatttgctcatttctgcagcgggatactgaggcagcagtgaagcacttactatcagaataagagaaatcgagtgtgactgtagggc

SEQ ID NO: 9814 - DNA, 454 bp, Glycine max
  Clone ID: jC-gmfl02220106a09d1
ggtatgcaattttcaaaattgcatatggagttattatatcaaatacgtgattgttacatgcaacaatcaacttagatacatctagtgatcactcacacccaacaacaaagactatgaagtgtctgaagaaatagaaactaatacaataaatggctcgcatatgtgaagccctacagtcacactcgatttctcttattctgatagtaagtgcttcactgctgcctcagtatcccgctgcagaaatgagcaaatctgtccatggcttgttcagaacctgatgcttgcacagttagtggagcggctgatcttgtaagggacattgaccttgcagaaaccagggagtgcctgagcatactggtcattgatgttgtacctagcagcatccgccttgagacagttgcacacagtttgtttgtcaacggtggtgacagcagagccatgattgttcttgact

SEQ ID NO: 9815 - DNA, 552 bp, Glycine max
  Clone ID: jC-gmfl02220106a10a1
agtaaattgggaatggtggtggttgtgccaggtgtctgtctgaggagaaaatagaataaaaagctatgaaattttggcacaaggtctgattgtagaattgaagaagatgactggggggggtatctctatgcaatcgacgccgggaagctcaagatacttggatttgtatccagagcggaagatgtcctttttcaaaaatccttacattctcggactggctgctgtcgccggcatcggtggtctcctcttcggctacgacactggtgtgatatcaggggctcttttatacattaaggatgattttgaggaggtttgaaacagcaatcttctccaggaaacaattgtcagcatggctattgccggggcaatcgtgggagcagcattgcgtggttggattaatgatgcctatggtcgaaagaaagccaccctctttgccgatgttatctttaccgccggagcataatcatggcttctgctccagatccttatgttctcattttgagacaccctctggttggttgggtgtgggcataacttctgtcactgctcccg

SEQ ID NO: 9816 - DNA, 508 bp, Glycine max
  Clone ID: jC-gmfl02220106a10d1
gcgaaccaaatcaaacagtatgatatataaagtcataataaaatgcttatgtgaaatgtacccacacgatacatctatttaggccaacaagctcacactttattaattaggaactacttccctgctcaagaaggttttgtgtgttggggttcttgccccaagctctctccctccatattacttccacttcatcaaaggtcaatcctttggtctctggaacataaacaagcacatattcaaatgctaccacagctatgacaccaataatcagaaaagttgaaccaatccctataccctccgcaattgaaagaaaggtctctgagacaatcaaatttgagacccaacacacagtagctgacatgcccccacagataccttgatattcttccggatatatctctgaactcagagtccatggcacaagccccattcctggcgagaaaaaaccaatatacaaggcttagcctacaactgcaagccatccatacaactcatttgacgtggatga

SEQ ID NO: 9817 - DNA, 507 bp, Glycine max
  Clone ID: jC-gmfl02220106a11a1
gattgttctggtttgtcgttctttctctcgcaatcttcactacattcaccgagcatttgcattcacattgaatatggctgagactacacaatctaatgctgagttgttggagtggcctaagaaagataagcgccgcttcctgcatgttgtgtatcgtgttggtgatcttgatcgcaccattaagttttatactgaatgttttgggatgaagcttttgaggaaaagagatattccagaggagaaatatgccaatgcttttcttggatttggccctgaacaatcccattttgttgtggaattaacatacaattatggggtgacctcatatgatattggaactggatttggacattttgctatcgcaactccagatgtttacaaattggttgaagacatccgggctaagggtggaaatgtcaccagggagcctggtccagttaagggtgggaaatctgttattgccttcgtgaaggatcctgatggttatgcttttgagctcattcaaag

SEQ ID NO: 9818 - DNA, 348 bp, Glycine max
  Clone ID: jC-gmfl02220106a11d1
agctcactcggctcgaggcacccttgtgtcccgtgccactttattggtgggtcatggcgacccttttgatcccactagggaaatcccgctggtttcctatgcagacggcttatatttctaaccacacccgatcaaccttgccagtaaccgtattgcacactgctacttccccgataaaggctagtacggatgagctagtagttcaacacgtttccgtctctagatggtacaggcatcactgggccctacagactggccaaagctcctagattgtcgaccgctgcaattttcgatccatgcagtccttagaaaactggggacgttgctgtaacgccaaaaactggccct

SEQ ID NO: 9819 - DNA, 455 bp, Glycine max
  Clone ID: jC-gmfl02220106a12a1
cgccgttttctccgcgctatgtgctttgtaattcgacgacgttaagatcgtggttaccgaaacaggttggccttctaagggagatagtaatgaggtgggtgcgagtgttgacaacgctgctgcgtacaacgggaatctcgtccgtaagatcttgaccgctggtgggacccctctcaggcccaaagcggatctcatcgtttttctgttcgcgctttttaatgagaaccagaagcccgggcctacttccgagagaaactttgggcttttctaccctgacgagaggagggtttacaatgttccgttaacgacggaggaactcaaggactaccacgatcgtccggcgccggtgagcggcggcggacagctgaagggaacgccggcgccggcgccggttgtgagcggcggagtcttcaagagtaccactggataccgtggtgcgttgcaaacccggatgc

SEQ ID NO: 9820 - DNA, 373 bp, Glycine max
  Clone ID: jC-gmfl02220106a12d1
ccggaaaaaaaagggccttctcttaaactatgggcttcaaatttgtcgaaaccggaaaaacaaccttgaccccctctggaaccattaagtgaaaggcccctgcgtggggtgaaaaacaaaaacaaaactgtggtacaaatctactcttggcccaacccttaaattaattttggttcccctttcccagttccccccaactggaagaaaggccaacattttttaactaacataatgcattaccccaaaatatttcaaaacctttcttccccccaggagggaatgcctcctccctccccaggtccacacccccaaacacctgttatcatccctttcccaaaggcaattgcgcccatcccctttccttattggggat

SEQ ID NO: 9821 - DNA, 472 bp, Glycine max
  Clone ID: jC-gmfl02220106b01a1
caggatgttgcagtcaggaaatgatgctctccctgatgacgaatcgtatgacttagtcattggaatgctcttttccatgggccagattgacactgcatttaaatatatagatttaattttgaaatctggtaatgtgttgtcaatgaaggtttttatgaactgtgtggggagttgtgtcaataagggaaggcttgatacattggtgacaataattgaaaggtgcagggcatcagatcaaaacaaagctctttgccccaactgggacttgtgcaattttattgttgaaatcgcaactcgagaggataatagcaaattaagtttttatggcctggagtttatggctaaatggattgtaaagggtgaacgtcaaagaccccctatatatctttctgtagatgaaggtttagtactgtcagctcttttgactgctggtagaacctataattctgatctgctagtggcatcatggggc

SEQ ID NO: 9822 - DNA, 481 bp, Glycine max
  unsure (1)..(481): unsure at all n locations
  Clone ID: jC-gmfl02220106b01d1
attataaaattgtattctttattttactgtatacgtgcttttcggatgaattcaaacatgatagatgacacataagtttgacttgacatatacattattgatgaacataaaaataaacagacactttgaatattgtgactaacttactagcatataaattcataaaaataaccaattttgctgagatcgacaagtaacttcttcttttcacatacgtgtctgaaaaatattactacttctctttgcctgaagagtgttgttttttcagttgttcaaataaacttccatcgtaaacacctcggattgtttctttctgcagtaatccactcttatctttagcaagtttgtaaagaattttccattcaaccacactaccaatccttcctgagaaatctttaggctctctatttgcctttatcatctncgttaactcatcatatgtcaaaagcatttggatgtgtatgtgcatgcttgttaaaaa

SEQ ID NO: 9823 - DNA, 388 bp, Glycine max
  Clone ID: jC-gmfl02220106b02a1
gtcatcggagtcatcgacaccggaatctggccggagcgacagagcttcaacgaccgcggcctcggccccgttccctccaaatggaagggcaagtgcgtcgccggagaaaattttccggcaagttcgtgcaaccggaaactcatcggcgcgaggtggttctcaggcggatacgaagccacccacgggaagatgaacgagaccactgagttccgctcgccaagagactccgacggccacggcacgcacactgcgtcgatcgccgccgggaggtacgtctctcaggcgtccacgttggggtacgcgaagggcgtcgccgccggcatggcgccgaaggcgcggctcgcggtgtataaagtctgctggagcgacggctgctacgactccgaca

SEQ ID NO: 9824 - DNA, 386 bp, Glycine max
  Clone ID: jC-gmfl02220106b02d1
aataaaaaaaggacaacaacggattacaccttcaaacttggtcacttaaacaaaaatttaaaaatgaaaaagaaagaaaaaattccaaatctttgggtttttgttggcttttatactaggcggggcaacctacaggggggccacccacttacgttacgagtcacgagccgtattgatcaaaacgacatgatcgattcgaggctctttataacggttttatttgagtcaccacaatggggcttcgaaccacgtgctttccattcgttcacgttagggacccgaacaccgccccggacggacccattttcagctttcgggtgtcccccgccaccgtcaccacatagtttcgcttttttaccgccttcaaaacacgagcctcgacgggt

SEQ ID NO: 9825 - DNA, 528 bp, Glycine max
  Clone ID: jC-gmfl02220106b04a1
cattcttccctccaaaccaaacacccgcattctttcctcccaagaaagcgggttcagcctttctccattcgtcaaccgcatttcttcaacttcaagttttgtgtctcattggatgattgatccaagggagaaaggtgcatggcatgggagggaggggaagagagttcttcgtggtgtttatgaattgaaaaaaaaattagaggatatcaccgatcttttctcaccgtgttcttcatttgttaaaatcatcggtcaatttcgttttattttcaaaattgtttcggtttgaatgcatgcatcttaatttatggatttggaatcttctggcgattcggtgaaatgttgcaagcactgtgaatgcgggtgtagtgattgctccatggcagctcaatcttcagggaattggctccggtctgtgaaaaggaagcacaagcagttggaacagggcggccaattctctgcgccagggccggattgcgatcccgtggcgcatgtcgagaatgggaatgaatgtgatgcattacctga

SEQ ID NO: 9826 - DNA, 475 bp, Glycine max
  unsure (1)..(475): unsure at all n locations
  Clone ID: jC-gmfl02220106b05a1
caaaggttgctgtaggagataagattgcagtagtgctaagtgctaacacctgcagtgaacaatggcctctgcatcagcatctctgctcaagtcttcacttgttcttgacaagtctgagtgggtgaagggacanacccttcgccaaccttctgcatcagttgtgagatgcaaccccaccaccccatcaggcctcaccatcagagctggttcctatgctgatgagctcgttaagaccgcgaaaacagtggcttcaccagggaggggtattttggccatggatgagtccaatgctacctgtgggaagcgtttggcttcaattgggctagagaacactgaagctaaccgccaggcataccgtaccctcctcgtgacagttccaggccttggtcagtacatctctggtgccattctctttgaggaaacactctaccaatccacaactgatggcaggaagattgttgacgtgctgcttgag

SEQ ID NO: 9827 - DNA, 120 bp, Glycine max
  Clone ID: jC-gmfl02220106b06a1
cggcccaccacaacgcataccactaagatccttatgctaaagaatttgcaatcatgcttagcgagaaacttgctcaagtcgcagctcgcatccttcctgctccacggctcatacatcact

SEQ ID NO: 9828 - DNA, 378 bp, Glycine max
  Clone ID: jC-gmfl02220106b08a1
tggattcgcaaggaaaacgtcactgttttcatggtctccctgtgatagtgaagctgacggtacacaaccggtaggcgatggtgacggtggggtcctacagcgtcgtgcttgtcatcactgcgcttaagggaccctgatacgataggaagaacaccaacaacatcaagcacagcgggaacaatcttcctacacaacggcgatgagatcgccagggttatgagtcctcgctccatgggcaaggatcttagcggggccattaacgagattcttgggacttgcgtttcggttgacagctccgaatacagtaccggccgccatggtctgtggcaggacattaccgatggcgaggtcgagggtcactctcgaatgaagttgctg

SEQ ID NO: 9829 - DNA, 486 bp, Glycine max
  Clone ID: jC-gmfl02220106b09a1
gcaaatttgactacacattgagacctgatgcatttgaagcatctgtgttggctattaatgagaagtttcagctttatttgacgaaagaacatgttaaaaatcgtcttagaacatggaagaaacagtatgccattctgaaggaacttatgacccagagtggctttgaatgggatgagaagcgaaaaatggtaattgcaaatgattctgtatggactgaatatattaagaaaaatcctgatgctcgaattcttaaaggacgagttatcagaaactacaatgaattgtgcataattctaggtcattgtgatccagcagatagttccattaatggtgcttgtgcttatatgggtatgactacagacgatggtgttatggaggttcatgagacaaaagaaaaagaaaaagttaagaatgctgtgacatggacagatgagatggatcattgcttgacagagttgctagtcaatcaagtaatgttgggaaaca

SEQ ID NO: 9830 - DNA, 479 bp, Glycine max
  Clone ID: jC-gmfl02220106b09d1
gttaaattcatttcaaatctctcatttagagcagtttgagcagctatatatgcggaggtcttgaaaaatttctcaagcctgtttcccaacattacttgattgacttgcaactctgtcaagcaatgatccatctcatctgtccatgtcacaacattcttaactttttctttttcttttgtctcttgaacctccattacaccatcgtctgtagtcatacccatatttgcacaagcaccattaatggaactatctgctggatcacaatgacctagaattatgcacaattcattgtagtttctgataactcgtcctttaagaattcgagcatcaggatttttcttaatatattcagtccatacagaatcatttgcaattaccatttttcgcttctcatcccattcaaagccactctgggtcataagttccttcagaaaggcatactgtttcttccatgttctaagacgatttttaacatgttc

SEQ ID NO: 9831 - DNA, 534 bp, Glycine max
  Clone ID: jC-gmfl02220106b10a1
ctcgagccgcttgaatcattatcattcgggtaatggacacatcactagtgtttactgtgaggaggagtgaggcagagctgatagctccggcgaagcccacccctcgtgaagtgaagctactctcagacatagatgaccaagatgggttacgtttccaaattccggtgatacagttctatcgccacgacccatcaatggcagggaaagaccctgtcgatgtgataagaaaggctgtggccaaaacgcttgtgttttactatccttttgcaggtaggcttaaggaaggacttggtcggaaactgatggtggattgtactggggaaggtgttttgttcattgaagctgatgcagatgtcactcttaagcaatttggtgatgctcttcaacctcctttcccgtgctgggaggaactcctttatgatgtacctggttctcaaggagtgcttaacactccccttctgcttattcatgtaacgcggctcaagtgcggaggtttcatattagctgtccggctgaaccacacgatgagcgacg

SEQ ID NO: 9832 - DNA, 367 bp, Glycine max
  Clone ID: jC-gmfl02220106b10d1
aaatgtgaattcttagctttcaaagccaataaaattgtcacaattcatgacatttattgactgatcaaggaggagtaggtcataataattttgattcttctcttgctgccactggcttggtgattacatatacgtactcgatgacatcaaatgctcaattattgattccctcattggcacgtaataaagtcgaaaagtactggttcttcttggaagaaacaatgtaccttgtgtttggagcaatggctctaggctggacgatgtggtggttaagcacacagtccaactccttctgatacctctccatggctccagttggctcacataccggtgttacctacccttcctctcctttagcattcttaaa

SEQ ID NO: 9833 - DNA, 474 bp, Glycine max
  Clone ID: jC-gmfl02220106b11d1
attacaaataatttgttttaacattttcttgttaatagtactagtagttagtacaacacaggaaaaaaaaaagcttcatgcaaacttactttgaacacctgctgttctactcatctgggatggatgatgccatcaaagttgtatcccaattcacattatcttttaatgcttgtgggttgaagcaatgaaaatcactctccaatctccaccactttgtttatgtggttgcatcgaatcaaatgacatcgattatttttgcatctgtacaaatggtctctgagaaactcctatgtccgctaacatatgtttttctttattagatggtgggtttataaggatcagtgaatcgaatatcttccactctactttttggtttgattacatggagtccagtccgcacaacaagcgggtttgttgggttccatttgatatctacatcaacaaaaacccctacatgattccaaccattttttt

SEQ ID NO: 9834 - DNA, 410 bp, Glycine max
  Clone ID: jC-gmfl02220106b12a1
cttgagaaatggcacaagaaacctttctattcacatctgaatctgtaaacgagggtcaccccgacatgctgtgcgaccagatctctgatgcagtacttgatgcgtgccttgaacaggaccctgacagcttggttgcctgtgagacatgcaccaagaccaacatggtcatggtcttcggagagatcacaaccaaggccaacgtagactatgaaaagattgtccgcgacacatgccgcgaaattggattcatctctgatgatgttggtcttgatgctgacaaatgcaaggtgttggtcaacattgagcaacagagcccggatatctgccatggtgtgcacggccacttcaccaagcgcccaatggatgttggtgctggtgaccagggtcacatgtttgggtatgccaccgat

SEQ ID NO: 9835 - DNA, 263 bp, Glycine max
  Clone ID: jC-gmfl02220106b12d1
cttctacccccttttcaagttggattggtcctagacggttacatcggatgttctgacagtccaacgtcccttggggacaagccaacaccaggctggcacccgcgctttagtggcagtggtaagggacatagaaaagagccggcggaggctgaggaagaacagcaaccccttctcttaaagctcgaacagggccttgctctcgaaggggtcagtcacttctctagtgctgacctcaaggatcctgttgccggggaagaggttga

SEQ ID NO: 9836 - DNA, 472 bp, Glycine max
  unsure (1)..(472): unsure at all n locations
  Clone ID: jC-gmfl02220106c01a1
gttcattggacataggtgtggtggtggtgaaatggaggagggaaagagcaagtctacattggcgaagaatccgagccgcagccggaatccgagccggcgtgtggccttggacgtgccctcccctcgccacatgggctccaccctcagtggcatccattcctccatcgaccaccttgacaagggacgttaccacccatgttgctttgcatgttgtgcatggtcatgccttattgtgttcatcttaatcatagccattctctttcttggtattacctacttggcttttctcaagtcagggatgccaaaaattaacgtgagagccttcaacataacaaagtttcaagttgatgatgggtcacaaaagatgaattcggttataggcttaggattaatattctctaacaagaatgataagcttaagcttttgtatgggcctcttgatgtngatgtcactagtgaggatgtgctattg

SEQ ID NO: 9837 - DNA, 498 bp, Glycine max
  Clone ID: jC-gmfl02220106c01d1
cggcactcgttcgtatcaccgctacgacgttacatgcacgcgtgcctagcctactaatccgggtccgggccacaccaaatcattgacacctgtgccattcaattccccttctttattgctttcgagttttatcactaattttattatctgaaaaaatggctctcacagttgcgtttttccttgcacttgttctaatttgccaatattcctctccttgatacaacagctgctggacgcagcattggcgaaaactccaactcataggaaaagaaagagcctgagttcttgatcacgcatgaaggtggggtgtatattccagggattggacctgttggatttccacataaatttcatctcacacctcaaaatccattacctgctggctatggaaatggaggagcaggaaccgcaacaggatcaagatcaccaccaggtagcagttatgttcctggtggtgatgacacttttgtcccaaaccctggttatgaggttcccatt

SEQ ID NO: 9838 - DNA, 480 bp, Glycine max
  Clone ID: jC-gmfl02220106c02a1
cctgagaaggaggatccctgtgctagctcgatcaaagatcaaagatggaggagcggactcgcagcattctgattttgatgaccttgctttccatctccattgctggcggcaatgcaggtggcttgcagcatcataagggtaggcatggtaagcatggtcgtcatatgtctgctcgtaatgtgacttacgacggtaagtcactgttcattaacggaaggcgcgagatccttttttccggctccgtccattacacacgaagcaccccagatatgtggcctgacattcttgacaaagcaaggcgcggaggcttgaacgtcattcaaacttacgttttctggaacgctcacgagccagagcccggcaagttcaacttccaaggcaattatgatcttgtcaagttcattaggctcgttcaagccaaaggcatgtttgtcactctcagggttggtcccttcatccaagccgagtggaaccacggag

SEQ ID NO: 9839 - DNA, 531 bp, Glycine max
  Clone ID: jC-gmfl02220106c02d1
caatccaatgtgccacacgccacgtgcttttttatccatcagacaactttataatataatattcttccaacgtgataacaagaaccccactgttcagattaccataacatctactttaacctaatgaatgcttctcgatgacttgaccttggataatccgcaacttggtaatataattaccctaatacgtgaactttgagagcagcaagcaattttttcgttatacatgatatgaaaaatactagtagaactatattaaacaagatcgaaaatgtaaaaagaaaatgaatggcatacgaacctaatttgatacataaaaaatttcatatgagaaaaaaagccagtttgggcataattaagcataatcaggcatggtttccttcaaaaatgtaattggacgagaatcttcaggggcaagttcgtcgaaggcaacataattttgctccttgtcgtacacatgacacactgtcatgattgtcttcatcaatctccaattccaactagcctcattcagatactgtccccagtttt

SEQ ID NO: 9840 - DNA, 543 bp, Glycine max
  unsure (1)..(543): unsure at all n locations
  Clone ID: jC-gmfl02220106c03a1
aagaacaagtagttgagaactaagaaggagaagcaaatggcttcctcaatgatctcttccccagctgttaccactgtcaaccgtgccggtgccggcatggttgctccattcactggcctcaagttcatggttggcttccccaccagaaagaccaacaatgacattacctccattgctagcaacggtggaagagtgcaatgcatgcaggtgtggccaccagttggcaagaagaagtttgagactctttcctacctgccagaccttgatgatgcacaattggcaaaggaagtagaataccttcttaggaagggatggattccttgcttggaattcgagttggagcacggtttcgtgtaccgtgagcacaacaggtcaccaggatactacgatggacgctactggaccatgtggaagctgcctatgtttggttgcactgatgcttctangtgtttgaggagcttcagaggctaagactgcataccccaacggcttcattcgtatcatcggattcgacaacgttcgcccagtgcagtgcatcagctt

SEQ ID NO: 9841 - DNA, 271 bp, Glycine max
  Clone ID: jC-gmfl02220106c03d1
agctctcatccattaattttcattgaagtccgaaaacagaaaccaaaaatacaggatgatgaaatcttaaaaagcaaaaacaaatgggaatgtagtttaagtgcaaacaaacaaagtggggtggcggttacaaatgctttgcaaatttttcacacttaaaagcctgggggcttgtaggccataaaactgaagcactgcacttggcagaacgttgacaaatccgatgatacggatgaaaccgatggggtgtgcaatcttagcctgttgaagc

SEQ ID NO: 9842 - DNA, 487 bp, Glycine max
  Clone ID: jC-gmfl02220106c04a1
ctcgagccgaatcggctcgaggttactgccagtaactggaggtcaataatcaggctttgcacttgagattatgtgcaaaaggtgtttgtcatgagtcatgactcatgactactttcttttcttacaggttgaggtggatgtaatgaactcaatttaactaaaggtattattgccagaaagatgaacctggatttgttgatgaggatttgtttcttttcatttgatctaatgtggctggatcatactgtataataagtagcaatttttttgctacaataaatgactttttttttttccttggcaggaatctatggcatctaagtggaggatggtgtacaaccctgccatctgtggcctacctgtcctcatggtcttggtgggggaagtaatggtaatggcatctgaatggacttctagagtaacgattttatttatactattttcatattatttttaatgtcaacccagaaaagttgtctagcctcat

SEQ ID NO: 9843 - DNA, 525 bp, Glycine max
  unsure (1)..(525): unsure at all n locations
  Clone ID: jC-gmfl02220106c05a1
gtttacgtgaagtcacagaaatcaaaagcctacttcaagaggtatcaagtcaagttcaagagaagaagagagggaaaaaccgattaccgtgccaggattcggttgattaatcaggacaagaacaaatataacaccccgaaatatcgctttgttgttcgtttcagcaacaaagacattgttgcacaaataatatctgctagcattgctggcgatattgttcttgctgcagcatatgcacatgagctgccacgatatggtcttgaagtagggcttacaaattatgctgcagcttattgtactggtctcctgttggcccgaagagtcctcaaaacacttgaaatggatgaggagtacgaaggaaatgttgaggctactggagaggactattcagtggaacctgctgagagcaggaggccattccgtgctctcttgatgttggtcttattaggactacaactggcaaccgtgtctttggtgcccttaagggagctctggatggnggtttggatattcctcataatgaca

SEQ ID NO: 9844 - DNA, 529 bp, Glycine max
  unsure (1)..(529): unsure at all n locations
  Clone ID: jC-gmfl02220106c06a1
gaatttggcaaaaagtagccatcgccccaacgatcccatttcccttgacttctctacgtgaagatccttgtgtcacatagagctagttaaaatgtcagagggaaatgcagggaaaggaaagagaatcgccatcattggcgtctcaaccttattgttggtggctatggttgtggcggtcacaattggggtcaatctcaatgagaatggttccaacaatgatatagaggacaacaagaaaaatcatgttgcttcttccataaaagccgtccaaaccctttgtcatcccacaaattatgagaaagaatgcgaggaaagccttatagctggggctggaaataccacagatccaaaagaactcgtcaaaattttcttcaacatcaccattacaaaaattggtgataaactcaaagaaactaatattttgcatgagattgaggaggaacccagagccaagatggcacttgacacttgcangcaactcatggatctttctattggggaaattacaaggtcacttgatggaataatg

SEQ ID NO: 9845 - DNA, 459 bp, Glycine max
  Clone ID: jC-gmfl02220106c07a1
cggctgagtgacgtagacagctctgacgctgcatgcggcacgcccgcagctgggagttcggctggaggggagaagttgtcttcggccgcagtcgtggttgctaggaaccagccaaccaccaaacgggggctctatgactctcacactctgctaccgagctacctgtctttcccaactcccaagtcattaaagcctcggaaccggggcaggaagagctgtccaaatgccacgcgctcaaggcgccgcagtgcgcttctccctccgccggcttccacggcctctgctacgtcgtcggcgacaatatcgacaccgaccagatcattcccgccgagtagcgcaccctcgtgccttccaagcccgacgagtacgagaagctcggctcctacgccctcagaggcctccccgccacctacgccacgcgtttcatcgaacccggcgagatcaaaaccaagtgcgcca

SEQ ID NO: 9846 - DNA, 213 bp, Glycine max
  Clone ID: jC-gmfl02220106c08a1
tgggcagatcaattgtacaccagcttgacgatttatgcagcacggccgtcggctgggaataatgctggtgctgcttttcaagtcatcatccttcgctctaaccatggtgctctatctctttcacgcagccagccactcactgactaacacttaaacagagtcgcagtcatggttgtttggactttttacaacataagaaggtccgctttaagg

SEQ ID NO: 9847 - DNA, 557 bp, Glycine max
  unsure (1)..(557): unsure at all n locations
  Clone ID: jC-gmfl02220106c09a1
nggccttatacctncagcatgcgtatcccgatgttaattgatatcgtgcgagagcagctcacttggctggagccgcccttagtttgttaaccaacacttttctttttctgtctctcggaatccaaataggggttacgattcgcctggctggcctaaaaaagaaaggggcccggacatcgcctttttttaatttcccaaccctccgagttttcactttccctaagccgcattgaataattataacatctgggcttccaaatatgaatttcccaaagaaagcgtaagctaagagagtaaaaagttgtgtttccttgttaacaccaagcaattgcgacggggatagttctccccatgcagccaaagcaaatcccaccgttgtgtacttttaccgcgactcggctcccagcgccaccgatgcgggctttgaccgtattaacaactcgctgactgagtgggttctacctgaacccagtcctgctcattcacgcgcgccacttgccatacacctggaaccggtacagacggtcccttccttgagacgccaccgagttcaccac

SEQ ID NO: 9848 - DNA, 388 bp, Glycine max
  Clone ID: jC-gmfl02220106c09d1
caagacaagcacaacaagctttctgttattctcttatttgctagcatcaggagtagtagcaattaaccttgaaaataaagcttcatctaattttatcttccataggtagaaaagcgatcaagagaatacacatgtcaccaggtgggaatgtaccatcatcaccaacaccaaggaaaaaacattcattcttcttccagaatgccaatcccctctgagaggcacatgttccttcaaacaggaaatggatctggtgattctggacttgtgctttcaactgatgctaagcctatattaaaatggacaccatatcttcatgccatgtttatagaagcagtcaaccagttagggggagctgacaaggcaactccaaaaacagttatgaaactca

SEQ ID NO: 9849 - DNA, 423 bp, Glycine max
  Clone ID: jC-gmfl02220106c10d1
tgatggttcagctatgttgaccttttttgctctttctgaaacagctgagcttgcaaagaagtgggtgcccttttgcaaaaagcacaatattgatccatgtgccccagtgttttattctgcccagaagattgattacttaatggacaagattcagccctcgtttgtaaatgagcgacgggcaatgaagagagaatatgaagaattcaaagtacggatcaatgcccttgtagccaaagctcagaagatgccagaggaaggttggacaatgcaggatggaactccttggcctggaaataatcctagggatcatccgggaatgattcaagtgtttttaggtcatagaggggggctggatacagatggaaatgagctgcctagacttgtttatgtttctcgtgagaagcgaccaggcttccaacatca

SEQ ID NO: 9850 - DNA, 436 bp, Glycine max
  Clone ID: jC-gmfl02220106c11a1
aggacatgtcatgtagttaaaataggtttgcttttcctcatgtgggtcatttttaggcatgatccaattgattacaagagctgctttcactgagatccccggcatggctgttgcaatttatcattccaaaaacagtcgaatagacgatgagaatctgggtctggaaagaaccaacgatgtgaccacagatccgttctatggattgaggaccgcgactatgtccccaactaagtttgatggaactgctcttgctccaagagataaatgaggctttctagttcaacggaatattacgtgtgtaaaggtgtaggcaccatattcttatgatcgcataggtgggtttattcatctgccgagccgtccgagcatcattgcagatggggttcttggccaaaaattgagggatgtgtgtgctcccaaaaatgttgaggattgg

SEQ ID NO: 9851 - DNA, 350 bp, Glycine max
  Clone ID: jC-gmfl02220106c11d1
aaacactcttcttcatcggacccgctttgggtcttgtgatacatgcgcattgtaaaggagctgggtgggtctttaaataccacacactcctgcacaaggaccccgaccgctttctgtgcccgaatttatgagagccctacaggtccctattgggtgcccgcactgacatcatccacgatcctggccgagggactcctatcaattaagtggactgttgactgccgttgcagcccaagatgcaaaactagctttggatcgccggccaaggtctgtacaccctccattgcctgtactagcagcctgaaggccaccctggaaggatgcaatgggttgcctgtcctatccatggg

SEQ ID NO: 9852 - DNA, 472 bp, Glycine max
  Clone ID: jC-gmfl02220106c12a1
atgagatcgagttagacattgaggctgttgacacagaaacactttgggaacttgatcggttggtgaccaattataagaagatggttagcaagatcaagagagcaggcattgatgggcaacatctacaacgactatgtgcaggctaacataggcaatgaggaattgcctgctagggagaaggttgaaagggctgctgttgaagcgaagaagccaaagtatgttgaagcaggggatgtggatgttgacattggcgacgagattccaacgagtatgtttccccctgtggagattgagaaagataaagatgctgctggaggccatgcaagtagtagttcttgtagctctggtagttcaagcagtgattcctcatcgtctaatgattcggattcagggagttcctagggagtgattctgtagcagacaacgggcaatcatatcaagcaggggtttgtgacctatgatcaaacatgat

SEQ ID NO: 9853 - DNA, 482 bp, Glycine max
  Clone ID: jC-gmfl02220106c12d1
gaaggaaaaagtttcatctatatactggtgttaatgtgtacatggtacaactcaaaaaacacttattccctgcattctattcccaaatctttaacgagtctatcctaggatttcatcacatttcactctcctttctggccgccaaatcagcttgatgattaatttggtttccgaaatcatttgtacaaatatatcacacctccattcctcgtgcatggttcccagcgccacattgcaaacaggttcttccaaccccaacccacaactcaaccaccaacatttacaatccctggtccatgtattcaagcaacgccctcaaaggatgcccatgatgctaacattttttttatccgcctaccaacatgatcatgtttgatcattagtcacaaaccccctgactgttatgattgcccgttgtctgcttcataatcactccctgaggaacttcccgaatccgtatcacttgacgatgaggaatcact

SEQ ID NO: 9854 - DNA, 414 bp, Glycine max
  Clone ID: jC-gmfl02220106d01a1
catgtctccgccaccatggtgttggtctgccccgggttgcaaaaggggcaggttagggttgagcactacgcctctaaaagaaccaagttcatcatggctcatgattcccgaatcgcgtgttttgcactcacgcacgatggcaggttgcttgcaaccgccagctccaagggcacactcattaggctcttcaataccctcgacggttcactgctccaagaggtacggaggggtgcagacagagcagagatatacagccttgctttttctcctactgcacagtggctggctgtctcaagtgacaaggggaccgttcatgtcttcaacctcaaggttgattccggactgttggggcatgatagatcgcacagtacttctgaggcaaatcttgctagccccaccgcgatgtcgtctctt

SEQ ID NO: 9855 - DNA, 439 bp, Glycine max
  Clone ID: jC-gmfl02220106d01d1
caaggaactaatcatgtcataatttacatccatacaatggattaaaacaaaaagattcacatgaatttccaaatgaagaagactccagatacataaataacaactaatacaagccagcacatacaaaaacaagagcctaagcccttgtcttgaaagggatggctcggatgactatctggtgatacacagcagcaagggcagctccaatgaaaggtccaacccagaaaatccattggtcatcccatgcatggtctctgttgtagatgatggcagctccgagactcctagctgggttaatgccagttcctgtgatgggaatggtagccaagtggaccaagaacacagcaaatccgatgggaagtggagccaaaataggaacgtgtgagtctctagcgtttctcttggcatcagtggcagagaaaacggtgtagacaagaac

SEQ ID NO: 9856 - DNA, 524 bp, Glycine max
  Clone ID: jC-gmfl02220106d02a1
tgtggctcctcccttccagatagggattcaaggcagttgggtcgacccaattccgagaatggtggagggcaggacgccaagaatctaagggtcaagcttgttctcttaggtgattctggtgttggcaaaagctgtattgttctacgatttgttcgtggtcagtttgatccaacatctaaggtaactgttggagcttcttttttgtcacaaacaatagctctgcaagactctacaacagtcaagtttgaaatatgggatactgctggtcaagagaggtacgctgcgttagcaccactctattaccgtggtgcagcagttgcagttattgtttatgatataacaagcccagaatctttcagcaaagcacagtactgggttaaggagctacaaaaacatggaagccctgatatagtgatggcactggtcggtaataaagctgatcttctcgagaagcgggaagttgctgtccaggatggcactgactatgcagagaagaatgatatgtttttcatagagacatctgc

SEQ ID NO: 9857 - DNA, 483 bp, Glycine max
  Clone ID: jC-gmfl02220106d02d1
agttcaatattgccattcagtttaggtacgtaacaggagcagcgaagcataaaagcaatgcatccaaattaaaaccacatcggtactggtacacatctgaacatcaaacacaacagaaaacagaccacaagaacaagaatctgaagtagattctagtagtcttcatcctcttcctggccctcaccagactcagcacccacttcttcataatccttctcaagggctgcaaggtcctcacgggcttcagaaaattcaccttcttccataccctcacccacgtaccagtggacaaaagcacgcttggcatacatgagatcaaacttgtgatcaatgcggccaaacacttcagccacactggtggagtttgaaatcatgcaaactgccctctgcaccttggcaaggtcgccttcaggaacaacggtaggtggctggtagttaataccacacttgaaaccagtagggcaccaatccacaaactgaatg

SEQ ID NO: 9858 - DNA, 478 bp, Glycine max
  Clone ID: jC-gmfl02220106d03a1
cccaattcctaattgtttaaacctaattctcatttcttcatcgttcgattcttctcctcctaaagatgcagatcttcgtgaaaactttgaccggtaagaccatcacccttgaggtggagtcctccgacacccatcgataacgtgaaagctaagattcaagacaaggaagggatcccacctgaccagcagagacttatctttgcgggtaaacagcttgaggatggtcgaacccttgccgactacaacatccaaaaggaatccactctccacctcgtgcttcgcctcaggggtggcatgcaaatctttgtcaagactttgactggcaagaccatcaccctcgaggtcgaatcctcggacaccattgataatgtcaaggccaagatccaggacaaggagggtatccctccagatcagcagaggttgatatttgctggtaaacaacttgaggatggaagaacccttgctgattacaatattc

SEQ ID NO: 9859 - DNA, 492 bp, Glycine max
  Clone ID: jC-gmfl02220106d03d1
gtgaaacgatattgatatttaaaataaaaacataaacaacatactttcgctgaaacgagttcaatacatcattttaaaacataataaacagcagcacttaaaccagagatgcaaagcacaagttcaagggagacactgaacaaacagataagacatatgagaacacttcataaaagggattccccttagcaaccaccacgaaggcgaaggacaagatgcaaagtggattccttctgaatattgtaatctgccaaggtacgaccatcttccaattgcttcccagcaaaaatgagcctctgctgatctggagggataccttccttgtcctgaatcttagctttcacattgtcaatagtatcagagctttccacctccaaggtaatggtcttccctgtcagagtcttcacaaatatctgcatacctccacgaagcctcaacaccaaatgcagagtggactccttctggatattataatcagcaagagtacgacca

SEQ ID NO: 9860 - DNA, 538 bp, Glycine max
  Clone ID: jC-gmfl02220106d04a1
tatttatctatagatatctttagaaaaaaaaaaagaaaataaacaaataagacgtatcattttatgtatagtagtggggaattatgggacaaaaaataaatccgcttggtttcagacttggtacaactcaaaagtcatgattctatttggtttgctcaaccaacaaattattccgagaatatacaagaagataaaaaaatacgagattgtatcaaaaattatatacaaaaaaatataagaatatcctctggtgttgagggaattggacagataaagattcaaaaaagaattgatcttattcaagttataatatatatgggatttccaaagtttttaatagaggggtaagtctcaaaaaatcgaagaattacagacgaatatgcaaaaaaaactgaattgtgtgaatcgaaaactaaacattgctattgtaaaagttgcaaatgcttataaacaccctaatattattgcagaatttatagctggacaattaaagatagagtttcgtttcgtaagcaatgaaaaagctattgattaactg

SEQ ID NO: 9861 - DNA, 533 bp, Glycine max
  unsure (1)..(533): unsure at all n locations
  Clone ID: jC-gmfl02220106d05a1
ctgaatattcagcctgtgatatggggtacctcaattcagttttgtcctcttcaagccaggttcatgctgcagaagattcacctgtcagtggagggggcctcagtcagaatggaaaattcagctatgggtatgctagctcccctggcaagagatcttcaatggaagatttttatgagacaaaaattgatggtgttgatggtgaaattgttggcctttttggagtttttgatggccatggtggtgctcgtgctgctgagtatgtcaagcaaaacctatttagcaatttgatcagtcatccaaaattcatttctgacaccaaatctgcaatagctgatgcatataaccataccgactctgaatttctgaaatctgaaaataatcaaaacagagatgctggatcaactgcttccactgccattcttgttggcgacccgttgcttgttgcaaatgttgnggactccagagctgttatatgcaggggtggaaatgccattgcttgttctcgggatcacaagccagatcaaactgatgag

SEQ ID NO: 9862 - DNA, 505 bp, Glycine max
  Clone ID: jC-gmfl02220106d06a1
atgatatcaccttagtatcttttcaatcagtctccaaaggctaccacggggagtgtgggaaacgaggaggttatatggaggtgactgggttttctgcagaagtgagggaacaaatatataaagtggcatctgtcaacctttgctctaatatctctggtcaaattcttgctagcttagtcatgagtcctcctaaggttggagatgagtcctatgagtcattcaatgctgagaaggagaatattttggagtcccttgctaggcgtgccaagacactagaagatgcattcaacaaattagagggtgtaacatgcaacaaagcagaaggggcaatgtatctgttcccccaaattcgcctgtcccaaaaggctatcaaagctgcaggagatgcaaatacagcacctgataatttctattgcaaacgcttgcttaacgcgaaggagtagttgttggtcctggttctggttttggacaggttcctggcacatggcattttaggtgcaccata

SEQ ID NO: 9863 - DNA, 511 bp, Glycine max
  Clone ID: jC-gmfl02220106d07a1
cattcttccctccaaaccaaacacttgtattctttcctcccaagaaagcgggttcagcctttctccattcgtcaaccgcggttgcttcaacttcaagttttgtgtctcattggatgattgatccaagggagaaaggcccatggcatgggagggaggggaagagagttcttcgcggtgtttatgaattgaaaaaaaaattagaggatttcaccgatcttttctcaccgtgttcttcatttgttaaaatcatcgggcaatttcgttttattttcaaaattgtttcggtttgaatgcatgcatcttaatttatggatttggaatcttctggcgattcggtgaaatgttgcaagcactgtgaatgcgggtgtagagaatgctccatggcagctcaatcttcatggaattggctccggtctgtgaaaaggaagcacaggcagctggaacaaggcgggcaattctctgggcccggcccgattgcgatcccggtgcgcatgtcgagattggaatgaat

SEQ ID NO: 9864 - DNA, 372 bp, Glycine max
  Clone ID: jC-gmfl02220106d08a1
ccttcgtcagctaggaatgctgctggggcgttgatctctatagacgtttccataaatactcggaacctggcatggaccaggcatcactgtatgactatcacagtcgaataccgggcttacttactaatccagctgccaagctcactagagccttccaaaccgtgttggagtcattatgcaaactcaaccagcacaatatgccgagaacactcatgacgacgcctacatacaagatctctgctacgactttgttcacaatagcgacacagtccacatcgttgccgacgaatacctacccctcagacacttacaagcacagctgagtaccagaagctcggcttctacgccctgataggactggccgccacctac

SEQ ID NO: 9865 - DNA, 445 bp, Glycine max
  Clone ID: jC-gmfl02220106d09d1
ctccgactcagttatctagagaaacttttttctcatagccatatattatggctagcatgaagggtacatgggtggttgtgatcatgtgcatggccgtggtgggtgcaccgatgatggcgctagccatgacatgcaacgatgtgacggtgaacatggcactgtgcctatcctacctgatgcagggaggaacacctttaacactttgctgcagcggagtcaagatcattcttggctctgctgtcaccaccgttgtcaaacatactgtgtgcaactgtctcaaggcggatgctgctaggtacatcattaatgaccagtctgctcaagcgctccctggtttctgcaaggtcaatgtcccttactagattagccgctccactaactgtgcatgcatcatgttctgaacaagccatggacagatttgctcatttctgcagcgagatactga

SEQ ID NO: 9866 - DNA, 480 bp, Glycine max
  Clone ID: jC-gmfl02220106d10a1
ggccaggacatgattcgtcccttgtggtggctctacttccagaacacccagggtcttatttttgttgtagacagcaatgatagggacagagttgttgaggccagagatgagttgcataggatgttgaatgaggatgaactgagagatgcagtattgcttgtgtttgccaacaaacaagatcttcctaatgcaatgaatgctgctgagattaccgacaagttgggtctacactctctcagacagcgccactggttcattcagagcacctgtgcaacctctggggagggcctttacgaaagtctggactggctttccaacaacattgccaataaagcttaatgcctttgggagtcttgcggattggtaattctggatgcaagggtgaacattatctagcttttatttcttggtcctcttccaagacaactcgaatttgtgctcatgtaatgcggtttaagacatctcgaatttgtgctcatg

SEQ ID NO: 9867 - DNA, 604 bp, Glycine max
  Clone ID: jC-gmfl02220106d10d1
agaaagatccgattctactaacagatccgatcgtatttgctcgcgtgcgtaagctgctcactcgtctggagacgcccttgggaatggtggaggttgttccttttttctgtctgaggagaaaattgaataaaaagctatgaaattttggcacatggtctgattgttgaattgaagaagatgactggggggggtattactatgcaatcgacgccgggatagctaagatacttggatttgtatccagagcggaagatgtcctttttcaaaaatccttacattctcggactggctgctgtcgccggcatcggtggtctcctcttcggctacgacactggtgtgatatcaggggcttttttatacattatggatgattttgaggaggttagaaacagctatcttctccaggaaacaatagtcagcatggctattgccggggcaatcgtgggagcagcattgggtggttggatttaatgatgcctatggtcgaaagatagccaccctctttgccgatgttatctttaccgccggagcattatcatggcttctgctccagatccttatgttctcattttgggacgccttctggttgggttgggtgtgggca

SEQ ID NO: 9868 - DNA, 524 bp, Glycine max
  unsure (1)..(524): unsure at all n locations
  Clone ID: jC-gmfl02220106d11a1
ttttcatggctgcatttcctatgttctacaaaacgccttacatggaccaaaatctgccaacccaaaatgtaatgaggcagaatgagaagaggttcatgtatgagtgtgataatatgaagaggttcatctcttcaactcctggtcaaatttgcaggagtagccaaccatggaacaaagtcaacaatgtcctcacaaaatcaaacacaaatgagaggaatgttcctaggagcatacttcatggcagatgctctttgcataagaatgtcacaaaactttgtggttcagacagtcacctaagcctcattaatgaatgttattcaaagacagaaaacctttccagagtttggtgttcagcaagttctatctcaactgagaagcaactaaagtcattagattcttattttggaaaactccaagataatgcaaatttgcgtacatttgattcatcaccaaagtgatacagttgcatcacatanatcgtcaagctagatcaaaaactggactggaatctcttgaggagtatc

SEQ ID NO: 9869 - DNA, 387 bp, Glycine max
  Clone ID: jC-gmfl02220106d11d1
acgcccttgggattggtggttggtttttttcccattccggtcttttgcaataaaacggtctaaacctttgcacatttgaatctctctactgtggcgtgtgctaaaatggtggataataactttctatcttaagcatctatcaccgatgagaacaagaacctaagcttgaatcctcagcgcttgtgccctactctatttattgggccagggaccgaccgtacacaattatacttttggaaccctataatatttatatactaaatgaaacagtagcacctaatctctgttacttgtgggtttaatgcatcgatgactgtttccccccttttttacaagacacgtctttgtagggcagtagcgacggccctacctccgaagcataattgc

SEQ ID NO: 9870 - DNA, 535 bp, Glycine max
  Clone ID: jC-gmfl02220106d12a1
gagaagcccaaagagaacaagacttcctctgctgaacctcctccagctaatgatccagcttatccacctgcaaaggcacaagtggtgggttggccaccagttaggtcatttagaaagaacatagttcaaaggaacagcaatgaagaagaggcagagaagagcacgatgaatgctttcgtgaaagtgagcatggatggtgcaccgtatctacgaaaggtggacattaagttgtacaagagctaccaggagctgtcagatgcgctggctatgatgttcagttccttcacgattgaaaagtgtgggtcccaagggatgaaagattttatgaatgagaccaatggctctgactatgttcccacatatgttgacatggacggtgactggatgctcgtcggtgatgtgccctgagagatgttcgttgaatcatgaatgcgtcttcgcataatgaaaggctccgaggctatcggtcttgcgccaagagccgtggtatagtgcaagaacagaagctgaagatgtgatttcatctgcgtcacaa

SEQ ID NO: 9871 - DNA, 348 bp, Glycine max
  Clone ID: jC-gmfl02220106d12d1
cgccgctttctccgcgctaagtgcttttaaattcgaccacgttcagatcgtggttaccgaatcaggggggccgtcttagggagattgtcatgtggtgcttgcaaacagtaaacaacagctgatgcgcacatcgggtatctcgtccggtagatctcgaccgttggtggatcccctctcatgcccatagcggacctcttagtttatctgttcacacttttcaatgagaaccaatagcccaagccttcttccgagagtaaactcgagcttgcctaccctgacgagaggaggggtgacactgatgcaatcacgtctgtagatctcgtggtctacctctatcacgcggctcgg

SEQ ID NO: 9872 - DNA, 377 bp, Glycine max
  unsure (1)..(377): unsure at all n locations
  Clone ID: jC-gmfl02220106e01a1
ccgctccgagttgtatgttttgcagagctagaagaaatcaacgatgcctcgctatgatgataaatatggtaatacccgcctctatgttggacgcttgtcttcgaggactcgttcccgtgacctggagcgtgtcttcagcagatatggaagagttcgaggcgtagatatgaagaatgatttcgcctttgttgaatttagtgatcctcgagatgctgatgatgctagatacaacctggatggtcgtgatgttgaaggaagtcgtattattgtggaatttgccaaggggggtcctcgtggttcccgggaccgggaatatatgggtcggggtccacctcctggatctgggcgatgctntaactgtggcattgatggtcatt

SEQ ID NO: 9873 - DNA, 359 bp, Glycine max
  Clone ID: jC-gmfl02220106e01d1
aaaaaaaacacacttgtaaatccattatttagaacatatagttcactgtattagcataaactttatgtactcaataatggatgtacaagtgaacttttttagaccgacatacagtagttgctatgatcatgcatgcatgaccagaacacactgaaattctcacagcacttgcaagggggaataatccaagtattaatttgtgccgcacctggacacatattgtcatatatataacagacagtggtactaacctccaaatacaaagtaataattatagttaaagcacgaacaatccaatcgcttgtctaagaaggcgaatgaagaaaactatattgggtgtgatgagctgcgggcaatta

SEQ ID NO: 9874 - DNA, 157 bp, Glycine max
  Clone ID: jC-gmfl02220106e02a1
ggggacaatttactggtttctcggtgaacgatcatagaagctttttttaccgttatcttgcttttgtacaaatcgtttagctttatctcaaaagatcatacaagatctgtgctttcccactttattttaatttacagattttttttttcttttattt

SEQ ID NO: 9875 - DNA, 422 bp, Glycine max
  Clone ID: jC-gmfl02220106e02d1
gaatcctacatattctttctgtaattagattgaatcaggtcagatacaagattgttaaacctagttcacgagccgactcaatcagatatatacaaattcaacccaatcaaaccttttgttttttcccttgaatcagggagttgcttcggtaatatataccttgatcaccactactttgtattatcatttcttattattctgctagccgtggcaaaggttcccagactgaaatactttgacaacatccagcatataaaggctaggcatataaatgtgtccatgaactgaaatagataccctaacgaaaggtagctactgccctatttctcattattattctatttcattcccaagatgatagttggtcattttcattcaccaactccatccccaaaaggaataaaaataataaataaaataaa

SEQ ID NO: 9876 - DNA, 552 bp, Glycine max
  unsure (1)..(552): unsure at all n locations
  Clone ID: jC-gmfl02220106e03a1
ctcaagtccaacctacccctttttcttctcccaccaacttcaccgtcttcttcctcgatcatgtctcacttcaagggcaagtaccatgatgagcttattgccaatgctgcttacattggcactcctggaaaggggtattcttgctgctgatgagtcaacagggacaattggcaagcgtttggccagcatcagtgtagagaatgttgaatccaacaggcgtgctcttagggagctgcttttcaccgctcccggtgctcttaaatatctcagtggtgtcatcctctttgaggaaactctctaccagagcacagctgcaggcaagccctttgtggaagtcttgaaggaggctggtgtgcttcctggcatcaaggttgacaagggcacagttgagcttgctggcactaatggagaaaccaccactcaaggtctagatggccttggtcagcgttgcgccaagtactatgaagcccgggcacgttttgccaagtggcgtgctgtgctgaagattggtnccaacgagccatctgagctggctatccatgagaatgccta

SEQ ID NO: 9877 - DNA, 532 bp, Glycine max
  Clone ID: jC-gmfl02220106e04a1
aaaaaatctcttccaaattccacacttttccatttcccaaacccaccctccaatccatggcttccctgaacctccttccccaccctccacttttctcttctttccttcacagaccacactgcaacacccaatcttcttctcacaccaaaaccttctcaacgaaggccttctcttgtggtcaaatctactgtgggtgtggctgacccttctccatcttcttcttcctacgctggggatacctctgattccatctcttctttgaagctcaatctgctgagtgctgtttctgggctaaatagaggccttgctgcaagcgaagacgatcttcgaaaggcagatgatgctgctaaggaacttgaagctgctggaggacttgtggatctctcgcttggtcttgacaatttgcaaggaagatggaaactcatttatagcagcgcattttcgtctcgaacccttggtggaagccgtcctggtcctcccataggaagactccttcctattactcttggacaggtttttcaacgaattgaca

SEQ ID NO: 9878 - DNA, 543 bp, Glycine max
  Clone ID: jC-gmfl02220106e05a1
ctcgttagtcgtttgtaacgcctttgtttgcgttttttgcacagaagaattaacacgtatatagcaagcatggcagtcacactctacgaccttagctctgcctctgggttgaagaagcttgatgagtaccttctcccacgcagctacatcaccgggtaccaagctacaaaggatgatcttactgtttatgcagctttgccaactgctccatcagatgaatatggaaatgtttccaggtggtacaagcacattgatgctttgttgagaatctctggtgtttctggcgagggatctggtgttattgttgagggatccctggttgcggagcctgttgcaactcccccagctgctgacactaaggctgctgttgctgaggatgacgatgatgatgatgttgatttgtttggtgaagagactgaagaagagaagaaggcagctgaggaacgggcagctgcagtgaaggcatctgcaaaaaagaaagagtctgggaaatcatctgttctgttggatgtaaaaccatgggatgatgaaactgacatgaag

SEQ ID NO: 9879 - DNA, 392 bp, Glycine max
  Clone ID: jC-gmfl02220106e06a1
cttcgatccaacgatgatgaatctggcgaagagagtaactcttacgaaggagatgggtatgacatctcaaaagtggatgatctacaggtcaagatggatctttacagatgacttgttgcatatggttgttctacgtttttggatcatctcaatctctgcagagctgcttgagtttgtaagcagtggctggactgcttgtgctcatgaacactcttggaagagtttgaattctgaagaccggaacatattctgtagagcaacttgaggacattagttcgctgtatcctaatatgacagctttctcgatgtatggaccctgctctctaatcagcttgttatgaatgccatattgttaatatagaaattatttcgcctttaacattgggaaaaac

SEQ ID NO: 9880 - DNA, 451 bp, Glycine max
  Clone ID: jC-gmfl02220106e07a1
catatacacaaaagagcactgaccaaaccattttattttatttttgaatcaagggtgagggccttccatggcttccgcttgtgcttcctctgcaattacagctgttgccatctctacgccgagttccgggcaggaggaatggatcaggaggttgttttcttagtggaaggaaattgagggtgaaaaaggagagagcagcaattggaggacgatcgatgggcactacagtgtgcgcagttgctgagcctgacagacctctatggttcccaggcagcacccctcctccatggcttgatggcactctacctggagacttcggctttgaccctcttggtcttggatctgacccggagagtctgagatggaatgttcaggcagagctagtgcactgcagatgggcaatgtttgggtgctgctggcattttcattccagaattcctaaacaaagatt

SEQ ID NO: 9881 - DNA, 391 bp, Glycine max
  Clone ID: jC-gmfl02220106e08a1
aataattacagaattaaatggcatattattaaaaactgttttcgttacgcttcagaaatacaacgagctgatagaggagacaagaaaagaaagagaaagagtttgcagagttgaattccgaaaggaagaatggcgaagcacgaggagcttcctatcccgattaacaataacctagaacccgtctatggcggaggttccgcactcgaagaagctcagcttcgtttcgataatttgaagtccaaattcgtcgaaatcttcggtcatcatcctcaaatcttcgctcgctcacctggaagagtgaacttgattggggagcacattgattatgaaggttattcggtgctgcctatggcaattcggcaagacacgatcgtggcgattcggaaaaatg

SEQ ID NO: 9882 - DNA, 605 bp, Glycine max
  Clone ID: jC-gmfl02220106e09a1
tcttcaatccattcttctctctctctcctatttgagtatctttcttcctttcggtcagagtcaacaataacataacaacccttccctactttctcgagtattgaattgaaaactctccccacaactcaaattgaaaaggaagacaaaaaaaaaaccccattgctttgttttccattattggtgccaaagtttcaaactttctctgcttcctctgctcctccagggtaagaactgctttccctttcgagtttacagtgatttgattcttgccccttttgtggtttgatccaaatcaaaggacgtttctctactggtgctttgattctaagttttggtggggggaaatgatgggaaatttgggcctgggtctggaatttttcatcatttctatcgaaaaattgtaccttgttgtgcatattttgttaaaaagtttcgattttgagcttgtttggtcatctgggtaggtgtctgtgtcatctcacacccaggcagctgttattgtacaaatcccatggctgtcttgtgaaaaattgtagaaattagggcctatgtcatagcctcaagcttttctttgtattttacattcccttaatcaacattgaaaa

SEQ ID NO: 9883 - DNA, 395 bp, Glycine max
  Clone ID: jC-gmfl02220106e09d1
gcgatagacgggaaaaaagtcaaggcctaggaagtgattactgtgtatataacgtaaaaacatccatttgagctttttatatgttggtgaacacgattatgcagacatttctataccaatttctatgacagaaattaactgaaatgaaaaaatggaaccggtgatctaatcagggtgctggtgcatgatttctgaaacagcatccagaaacgtggcttctcttgtggccggaggatcagaatccacagctgactttacatttccctcaatcacagactccctgttcaaagattccctgcacataagacttccaatggcaaaggggagtatgcccctgtccactcctttgtttaaaagacggttgagatttgaaaagtgcgggcgctttctactgg

SEQ ID NO: 9884 - DNA, 521 bp, Glycine max
  Clone ID: jC-gmfl02220106e10a1
agggtaccctacgtggttctctgcttctgatcgcaggctacttgctaagatgaaccaaggaggtgctcccccacccaatgcagtggttgccctagatggttgtggtcaatttaaatccgttaagcaagctattgactcctaccctaagaatttcaaaggcagattcattatttatgttaaagctgggatttataacgagtatatcactatccctaagaagtcagagaatattttgatttatggagatggccctacaaaatccattattactggtaacaaaaactttatagatggcgtcaagacaatgcatactgccacctttgccaatactgcacctggattcattgccaagtcaattgcattcgagaacacagcgggtgcaaagaagcaccaagcagtggcattcagaaaccaaagagacatgtcggccatgttcgactgtgccatgcacggtttcctagacacattgtacaccctagcctaccgtcaattctaccgcaactgcgaaatctcgggcacca

SEQ ID NO: 9885 - DNA, 309 bp, Glycine max
  Clone ID: jC-gmfl02220106e10d1
ttgttttcttttttttttttttcaaaaaacaacgcataagggccacatattttagcggggcaggtttctcatgtgtgtacaaaatatgatatgattccaccctagcttggaggtagaatcacaccaagtgtgctgagaacaaagctaattaattgattctgcgtgtctataactacggacacatgaatttgcacataaaaaagaaacttgtgcccatatttaaccctacagcggtaccatgcttgttgatggataatccatggcttggtgaaaccaatggtgtatggatcgccggctgcctgtaaccaa

SEQ ID NO: 9886 - DNA, 428 bp, Glycine max
  unsure (1)..(428): unsure at all n locations
  Clone ID: jC-gmfl02220106e11a1
ctctcctccaccatctcctaccaacatgccttacatctatgcgtcacctccccctccttaccactattagctagcatagctctatggatatgaagaatatgtgcaacgaataaaagaaagcgatagaaaaggaagaagaagcgcttcgcgatgcacgaaagagaagaattggaagcaaagtttcggcgttttgtcttttataaaaaaaatgttaaatcattataattttctatgatagggattggtttcttggcttttttcttttgtttatgaatatcggggtattttaacagttgtaaagcactgcgccctcgctgcatgatcatgtagttttcaaccagctgcgttagcggggttgtaaaactaataacatatataatcaaataaattatattatttatcanaaaaaaaaaggaaaatatttactg

SEQ ID NO: 9887 - DNA, 405 bp, Glycine max
  Clone ID: jC-gmfl02220106e11d1
ggataaataatataattgatttaattttttatggtattaggtttacaacccccgcaaacgcagctgggtgaaaacttcatgatcatgccgcgagggcgccgggctttacaactgtttaaatacaccgattttcttttacatatgaaaatagacatgatacccttccctttcatagaaaattataatgatttaacattttttttataaaagacaaaacgccgaaactttgcttccaatttttctttttcgggcatcgggaagggcttcttcttccttttttatcggtttcttttattcgtgggacatattcttcatatccattgagctttgctagcttattgtggtaaggaggaggggggggacccttttttgttaggcttgttggttggagatggtggaggaaag

SEQ ID NO: 9888 - DNA, 525 bp, Glycine max
  unsure (1)..(525): unsure at all n locations
  Clone ID: jC-gmfl02220106e12a1
ttcagaatcagaatgttgcgaagatggagcaaagcagttactccaatctccaaatttggatcgcagcagagtcatttgaatttcgtgaaggacgtcacgcgccaaagctacgccggggttgctcccgcgccaacatcgatagaggataaacctcaaccccccgtggttaaacttgacaaaatgttttggtctaagccctgttcgctggccctgccccgggactcacccctcaaagctgaagaacctgattatcagggcatcaagcgtttcatgctcaagctcatgctgttttatagtaagcagagcaagtcaattcgaggcgctaatgttgtgtaccgaagaattgtttctcaaattgataaacctcccatttatgaatgtgtttaacttggagaaaacattcaaaacaacattctctctacttgtacttatatgtgggtatgtntgcgtcgcttgtagcaagatggaaatgaaggtgttgtatttggccagtacctttatgagatttacaatcatgatgtggag

SEQ ID NO: 9889 - DNA, 477 bp, Glycine max
  unsure (1)..(477): unsure at all n locations
  Clone ID: jC-gmfl02220106e12d1
tgcgtgaccgagccagatcncanttccatgctatttgttcgcgtgcgtaagctgctcacttgtctggagccggacatatggcacaagaaacctttctattctcatctgaatctgtaaacgagggtcaccccgacatgctgtgcgaccagatctctgatgcagtacttgatgcgtgccttgaacaggaccctgacagcttggttgcctgtgagacatgcaccaagaccaacatggtcttggtcttcggagagatcacaacctaagccaacgcagtctatgattagagcgcccgcgacacatgccgcgaaattggattcatgtgtgatgatgttggccttgatgctgacaaatgcatagtgttggtcaacattgagctacagagcccggatatcgtccatggtgtgcacggtcacttctccaaacgcccagaggaggttggtgctagtgaccatggtcacatgtttgggtatgccaccg

SEQ ID NO: 9890 - DNA, 266 bp, Glycine max
  Clone ID: jC-gmfl02220106f01a1
gttaaaatcctggcgtgacgcgaattgcgtaccccgcacccctacgtcaactgggtctataaggctggggatcaaatacctgccacccgggggatccgctatatatatacctgccgccaccaaaggggagggcccactggtgttgcctctacacaggtttcatgacccgctggactcatggagccatcagactgtctctctcaggtaaactgggtaccgctgccaatgctccccatcttcgtggctacggagacaccgaagcacca

SEQ ID NO: 9891 - DNA, 489 bp, Glycine max
  Clone ID: jC-gmfl02220106f01d1
gcatgacaagactaagtttatttagcaagtaccaaaccatacagtattattatcagttaattaatacaaacaagcataggaaggttgatggtatggaggttttctgcagttgatgaatcctgcccataaaaaagatctcgataccttaaatatcaaaacaaaagcgcaattataacaccctttcacttcagctgcgactttatatctggttgaattcgtttttggacaagatcagaacttgttgataaaatcgtatatgtaattatcgatttcctctgctgcttcttgattattgaagtgagccactcctttctgcacaatcacttgttctaaatttggcacatcttgcttgaaccctccgccgtggatatactccttcaagttcagcgagttgtataccatgtccaactcacctgttatgtattttacgggcaccttgatttgcccttctgtccatggtgccgtcaacttccaatttaagttgaaatt

SEQ ID NO: 9892 - DNA, 474 bp, Glycine max
  unsure (1)..(474): unsure at all n locations
  Clone ID: jC-gmfl02220106f02a1
agccagccgttagggaaatcaagcacagctcaatcattgaatcttagcataaacacatacagaagaaggaaaagtggcaccctgggaggagctgatattgaaggagggtttggaagaaaaagaattttgttttgagatatatatacatatatgtgcaagtgcataggaaattaacacaaaaagatgacatggtgcaatgactctgatgaggatagggttattgaatcaacgacgccaacaataactattactcctaacactgatggcataaagctcaccgaagaaattagaaccataacatgcccctcgtgcggccataacattgaattcaaagatcagggtggaatccatgacttgccggggttaccagctggagtgaagtttgacccaaatgaccaagaaatattagaacatttggaggcaaaagtggcgtatgatgcatgcaagcttcatccncttattgacgagttcata

SEQ ID NO: 9893 - DNA, 444 bp, Glycine max
  Clone ID: jC-gmfl02220106f02d1
gcttcgaaacaatctattctgtaattatttatcgattgaatatacattgaaaaatgttgcatgcaaaaaaaccagattgcttcatgtcaacatgaccacctcatgaaaatttatcatactaagctcaattcatctttagtatttgatatttttaagtcgtctttaaactcagcgtcgagcttcttccgcaatgccactaattcttcccctgcatcgcagatataggccgaagcttgtctgccagacaaggttgcaccttccatgctgtctatgtagtcctgctttgtgtaagagccagcaagaaagaaattcctcactggtgtcttttgatcaggtctatatgggatctttaccaggaccctcacggtacagagattggccaattttaacaacagaagacctagtcacttccaaaccttgagatgatgggaacagtgccaaaac

SEQ ID NO: 9894 - DNA, 420 bp, Glycine max
  Clone ID: jC-gmfl02220106f03a1
gtaagctgcatgagagacatagttgctgtttctaagtatgcttactagctcccctgttggctcactggtccgtttcattgtaatatttgctttatggtacagaaccatggctttggccaagttgccaccaaacgcttcatcagttccagcagttttagcgtttggagattccatcgtggacccaggcaacaacaacaacataaaaacattgatcaagtgcaacttcccaccttatggaaaggattttcagggaggaaacccaacgggtcgattttgcaatggaaaaattccttctgacttaatagttgaacaattgggtattaaggagtatttgcctgcatatttggatccgaatctcaatctagtgatcttgttaccggcgtctgctttgcctccggtgcttcagatacgatcctttga

SEQ ID NO: 9895 - DNA, 504 bp, Glycine max
  Clone ID: jC-gmfl02220106f04a1
gacctggttacagaagacacggtaggaaaacatggtggcccagttgggaattcaagatggttctgtgatttaacaagtgccctcttgaaatactacccgagtgagatacttcgatttaactccctctgttgatggctgaaactcaattgaagtgattcactggactactttatcatcttggtctgaggttgaagctatttaatttctgaatttccgtgagtttcttaatccctgagtatggccgggagccaagatcagttagagatcaagtttcggttgagtgatggtacggatattggccccaaaagttattctgctgctactagtattgtaacactaaaagaaagtgttcttgctcaatggccaaaagataaggagtatggaccaagaactgtaaaagatttgaagttaattagtgctggaaaagtattggagaacaacaaaacagtgggagactgtcagagtccattgtgtgatctacctggtggagttacaacaatgcat

SEQ ID NO: 9896 - DNA, 389 bp, Glycine max
  Clone ID: jC-gmfl02220106f07a1
gggtgccatggttccaatccgcgtccacactgtgctcatctccacacagcatgatgagactgtcacaaatgatgagattgcagctgatcttaaagaacacgtgattaagcctgtgattcctgagaaggtcccttgatgagaagaccattttccatttgaacccttctggcaggtttgtcattggagggccgcatggcgatgctggtctcaccggccgcaagatcatcatcgacacctatggaggatggggtgcacatgggtggtggtgccttctctgggaaggatcctaccaaggttgatagggagtggtgcctacattgtgaggcaagctgcaaagagcattgttgcaaatggacttgctaggagggaaattgtgcaagtttcctatg

SEQ ID NO: 9897 - DNA, 369 bp, Glycine max
  Clone ID: jC-gmfl02220106f08a1
gaaaccaattacaaattacactctttgcctcgcaccttcaacttaaccttttctactcataatcttaacaacttgctagaagaagataaagaaagagaaaaagtgtgtgtgtgtgagagagagcaatggctgggctcgtgggcacgccgttctctgattgttctggctatcatttccttcggatgtttatttgcaatttccattgctaaggaggaagccacaaaattggggacggtcatcgggattgatcttggaacgacctattcatggtgttggtgtttacaagaacggccatgttgaaatcatagccaatgatcaagggtaaccgtatcaccccatcgtgggttgctttcaccgacagtgagagac

SEQ ID NO: 9898 - DNA, 548 bp, Glycine max
  Clone ID: jC-gmfl02220106f09a1
gcaccaatgtgtcccgtgccacttcaaggagggacatggcgacccagatgagcccacagggtagctcacgctcctctcctaatctgaggccttctttctctgcctccaccccatcaaccttgcctgtcacagaattgcggactgctggttcctctaaagtggatattagggatgtgcaagtagatgaacacgttaccgtgacaagatggtccaagaaacatagggccctattcactggcagaggctcagaaaaagtcgaaagctggaaaaaaagaactatgcactcaatcgtcaacttgggacgtttctgaaacgtcaaagcctgcctcaaagacaagaagtgaggaagccaaaatctctgcatgggagaacttgcaaaaggcaaaagcagaagcagcaatacggaaactagagatgaaactggaaaaaaggcgagcatcctctatggataagatcatgaacaagcttagattggcccagaaaaaagctcaagaaatgagaagttcagttccacacaaccaatccgatcgggttgtatgacttcacac

SEQ ID NO: 9899 - DNA, 517 bp, Glycine max
  Clone ID: jC-gmfl02220106f09d1
atgctcatcttgtcggcgggcgccctttttttttttttttttttttttattgtgggtgcttttctcgttcaactataaggtagattacatttgaagtttttgaacagcacacaatcatgttgggaggagagaaaaatattcaaaagatcttatttctaaaatttggcctacttacaaatattgctacccattgaatccaaactcccgaacatggggcttagattttatgatatctgagactttcaaagaaggtgccttggattgcaaaacgcatcaactccaattttgtctactgttgtgcccctttcaatcttttacatgtgggccatttgaatcctttggatacccaccatcactcaaacatgaaagaatgctttaaagacatggcttgtgaaacaaccactcaaagaacgcatccggctggttcttagaaatgatgaagccctgcgtgaagttcttacaacccgatcgggttggttgtgtggaactgtacttctcatttcctgagctttttttt

SEQ ID NO: 9900 - DNA, 534 bp, Glycine max
  Clone ID: jC-gmfl02220106f10a1
catcgcccaacaccaaacacccactctcatcggtaaacgcaccctcgccgaattccaaacccacaaccacagccttaaccttattaacaacaacgataacctactcctttcaaaccatcaacttcgttctgtgaagcccagaactttccagcacacagaattatccacctttccgtcacgtcgttacggcctaccccttctccaccaccttcgccctaacgctgttaacgcacaacaacaacccgttacgaattcgatcctcgccaatacaaattatttgtctccggttcacagcagactaaccgcaacccacgaaccggagaagaacctaatagccctccgtctccaggagttggaaaagcagcttctagaagacaatgaagacgacgccgtttcggtcattaccaccaccacttctgaatggtcacacacaatacaaaacctaatcactccgcagaaacccgcgtcttcgtctcccacttcctctacgacgtcgtctaacaccttcgtagaatccagcagttacaaacagtc

SEQ ID NO: 9901 - DNA, 473 bp, Glycine max
  Clone ID: jC-gmfl02220106f10d1
ctcggaatccaaagactttttactttttgcctgtttggcaaaaaaaaaaaggggcgcgggatattgtttaattttaattttccaaccctatgatttttcactttctctaggtaacattaaaattttttaacaatgggtttccaaatttgaaatttccaaagaattttaaattaaagagagtaaaaagttgagttaacttgttaacaccaagcatatgcgacggggagagttcttcccatccagccaaagcaattcccaccgtttttttcttttaccgggacttggttcccagcgccaccgtgtcgcgctttgatcgaatcaacgactcgctgactcaggggttttaacctgaacccagccatgcttttacgcgcgcgccatttcccaaacacctggcaccgttccacgcggtcccttcctttgcacgccaccgagttcaccaccttccgactcagtccctcctcgatcctgac

SEQ ID NO: 9902 - DNA, 561 bp, Glycine max
  Clone ID: jC-gmfl02220106f11a1
gtgacatccacactcaactcaaaaaccaattccaataatggcgaccttatctatgtcatcttgatcgtaatccccgtcatcaaactctttctttattctacgattcacaatcaaaacccaacaacttcaactctccaatctctatcctcaattcaacccttttggtggcaacttctatttatgctacaaaaaatgctgcgattgcacttcaccaccgcactctctcactttgcttccaaggcctcaccttttcctctcacacccgtttccgttaccgtttccagagctattgtttgcaacaaccccaccaggttcagatcgcaaatgggttctttctccacttgctcttcctcttcctccaaactcttgttccgccagctttttgagaaggaatcttccacctacacttaccttctcgctgatgcctcgcacccagaaaaacctgcacttctgattgacccatctgataggacagtagacagggacttgtcgatcattgagcaactggggctgctgctagtgtatgccatgaacacacatgtgcatgcggatcatgtcact

SEQ ID NO: 9903 - DNA, 431 bp, Glycine max
  Clone ID: jC-gmfl02220106f11d1
ctgcttcggctatgtttgactgctaaaatcgacaggaagaaaaactatgattgtcaccggctatttctgaaaatttggctttgaagtttaggattaggaagtgctatcataaacattctgattcaacagaaacacaggcttttctctgggacctaattgttattatatcgggcctcaacacagataccattttatttatctacaacttccattttcctcttcattccatagggctattacaatttttcccccttttggttgcatgggctttgcgtcaaataacatctgtgtgggactctcacataaggcttatgtagccccaccttgctttggacaggactggatcccgctaaccatatttgctgggacaggtatgacaatcattttaggatacgacaggtttagatttcccatgaggttcttggaagttt

SEQ ID NO: 9904 - DNA, 544 bp, Glycine max
  Clone ID: jC-gmfl02220106f12a1
aagatctgcttctgggctttttaggatacaaaatgggtgagaaagactcagagaagctcatttgggaacagatgagaaccccgacagctgccactcccattgctgcaccccaacagcaccgcacattaccaaggcttcttgtccttctcatcctcttcgtctccgtcacctacgtcgtctacacgctcaagctcgtctccacctcacgcgcctgcaacaacgacgcccctttctccaccgacaacttctccaaaaccatcctctccgtcaatgccaccgccgcagttctccgccgaggctccctcgagacgaatcccgaggaccggacggacctccgccacgtggtgttcggaatcgcggcgtcagcgaagctttgggagcagaggaggagctacatcaagttctggtacagggcgagggacatgcgccagcgttgtgtggctcgacagggaggtgaaatcggaggagagcagcgacgcactccgccggtgagaatctccggcgacacggcgatgttcaagtacacgaacaggcaggggcaccg

SEQ ID NO: 9905 - DNA, 338 bp, Glycine max
  Clone ID: jC-gmfl02220106f12d1
tcttttttttcattttttgtttttttttttttttcactttgggtacttttttggttgggtgtccttttttttttccacgccttgaaagatcctctcgcacgccccgatattcaaaatttaccccttccccgtgcgagcccgctttaactttgaggtaaaacacaaaatctttttggccaggagcccttccccaatctcgacccttttttaggaagccccggggaaatttaacaatattttcccagggggggctcccccaacaaataagatatcccccttttaaaatcacccaaaagaacaccccccccccaggggattctttccggattttttttttt

SEQ ID NO: 9906 - DNA, 462 bp, Glycine max
  Clone ID: jC-gmfl02220106g01d1
ctcgaatattcatgcctgtgatattgggtacctcacattcagcttgttctcttcaagggaggttcatgctgcagaagattcacctgccagtggagggggccttagtcagaatggaaaattcagcctatgggatgctagctcccctggcaagagaacttcaatggaagatttttatgagacaaaaattgatggtgttgatggtgaaattgttggcctttttggagtttttgatggccatggtggtgctcgtgcctgctgagtatgtcaagcaaaacctatttagcaatttgatcagtcatccaaaattcattttctgacaccaaatctgcaatagctgatgcatataaccatacccactctgaatttttgaaatctgaaaataatcaaaacagaaatgctggatcaactgcttccactgccatttttggtggggacccgttgcttgttgcaaatgttggggac

SEQ ID NO: 9907 - DNA, 453 bp, Glycine max
  unsure (1)..(453): unsure at all n locations
  Clone ID: jC-gmfl02220106g02a1
ctgtgacttgtaggtgatggaatgggaagcattgctgtaccgagtagtgagcgtgccaggacagattggactgcttctatggagcagttttttatagagcttttgctggatcagttgggtaggggaaataaagtggataatggattcaataaaaatgcgtggacagatatgctagccatctttaatgctaagtttggatgtcaacatggtagaagggttttaaagaatcggttcaagaaacggttgaaacattactgtgatataacaaatcttataaaacaaggctttttgtgggatgaacaacaactaatgcttttggctgatgatgatgtctggaatgcttatgtcaaggcacatctgcacgcaggaacatatagatcanaaactttgncaactatcgtgatttagaattaatattcagaaacatggctgaaaatgagatcagtaatttgc

SEQ ID NO: 9908 - DNA, 224 bp, Glycine max
  Clone ID: jC-gmfl02220106g02d1
accctcggcctttctgtatttggggtcgaagttgcaatggtacaatcaacatttaagtttcctgatgtcctgctgagacatcttcaacccaaaatcgtaaagaaaccatccgtatccatttcccttgtccagcccggattctggtttgagttgtcaacactcttaatattaaacaaacttctaattgtttcaaccatatcctattttatagtaaaatcatttgt

SEQ ID NO: 9909 - DNA, 570 bp, Glycine max
  unsure (1)..(570): unsure at all n locations
  Clone ID: jC-gmfl02220106g03a1
cattgcgaaggaaaccgcgaaggactggaagggcctccgcgtgacggtgaagctgacagtacagaaccggcaggcgaaggtgacggtggtgccctccgccgccgcgcttgtcatcaaggcgctgaaagagcctgagagggacaggaagaagacgaagaacatcaagcacagcgggaacatctccctagacgacgtcgttgagatcgccagggtcatgagtcctcgctccatggccaaggatctcagtggaaccattaaggagattctcgggacttgcgtttcggttgggtgcaccgttgatgggaaggaccccaaggatctgcagcaggagatttctgatggagatgttgaggttcctcttgaatgaagttgctgaaatttcagtggttttttgttggttcgtttatgttgtttttttgggcaattttggtttttttttctttttttaaggaatttgagtcatagaatgtatgatagttagactttggtaatgatatcacattgtggttttgagtatnttgaatggagtggatttgattgttgcaaaacattgtcaatttaaggtgatcg

SEQ ID NO: 9910 - DNA, 505 bp, Glycine max
  unsure (1)..(505): unsure at all n locations
  Clone ID: jC-gmfl02220106g04a1
ctctctttcacgaactcacgctctgtttcagatctgaagccacataaccctaaccatcaaacggctaggtgtcgctgggacttcaatggcagtgactgaagctcagaatcctcttcttggagaaaacacatgtggttccttgttaaaaaagcttcaggaaatatgggatgaggttggtgagagcgacgagcaacgagacaagatgcttcttcagttagagcaggagtgcttggatgtgtacaagagaaaggttgagcaggctgccaagtcaagggcgcagctacttcaagctctgtctgatgctaagcttgagctttccactcttctatcagcacttggagaaaagagctttgctggaattcctgagaatacttctggaactatcaaagaacagcttgcagctatagcaccagtacttgaacagttatggcaacaaaaggaagaaagaattaaggagttctcggatgtacagtcacagatccaacanatatgtggagagatagct

SEQ ID NO: 9911 - DNA, 458 bp, Glycine max
  Clone ID: jC-gmfl02220106g05a1
ctgccactctctgagtaggactacactgccatggctgcctcagtctccactgttggagctgtcaacggagctccactgagcttgaacagctctggagctggagcttcagttcccagttcagccttctttggcaccagcttgaagaaggttattgcctcaagggtccctaacgtcaagatttcttctggaagtttcaaaatcgttgccgcggaaaaagagattgatgagaaacaacagacagacaaggacagatggaaaggtcttgcctatgatgtttcagacgaccagcaagacatcacaagagggaagggtttggttgattccctcttccaagctccacaggatactggaactcactatgcaatcatgagctcttatgagtaccttagcactggacttaaacaggtcaacttggataacaacatggacggtttttacattgctcctgctattatgga

SEQ ID NO: 9912 - DNA, 122 bp, Glycine max
  Clone ID: jC-gmfl02220106g06a1
agcatgaaagcatggttcgtatattggcactgcattagatgccagctatattggggtgttataagaaacaacaaatcccagtgcccgttgctatcgaaatggcctttgggcaacccttttcc

SEQ ID NO: 9913 - DNA, 556 bp, Glycine max
  unsure (1)..(556): unsure at all n locations
  Clone ID: jC-gmfl02220106g07a1
cggctcgagtgaaaccgtattttcccattttaattttactatttaatactgtaattcccttgggcactatataggctgtaggtaacaatcagaagtatagatattatgttgtatgttaaaacttttggttactcatgtagaagatgaccacttaagctctttctctcattgcataacttaattcccacacatcaatttaaagacacttgactgtgtatttttgaaatgattgataaaaagataatgtgtgccacaaatatttgaagactctagattcatgtcaattttctgactttcttactgtgatacgtccaagttcctcatatgcctcaccttgaggattttcttaataatttaagtttgtgatttaaatattgattgtggtttctactttacaaacaagagtttggcatgtgctctaactagatctttacggcttatttctttcttgggtcaccatataaacaattgtgntctggtgcactttgaaatgaatgcttgatgaaatggaatttcaaggggacactgcactacatattagttcattggtgaaatc

SEQ ID NO: 9914 - DNA, 540 bp, Glycine max
  Clone ID: jC-gmfl02220106g08a1
ctctgctgctcaaaagaatttgatatgggaggatacttaggctgaatctgatatccctgaagcatctgatctgaggacaaaaaagaaaatacttcagactgtaggggagcggtggagacaatttaaagtctattttgacgtcgaaatgagcacttgcaactgacaaggaaagtgtcgatgacattgtatgcgaaaagtacgacattagcaaggagaagtgggcccaactttgtcagacccgcagagacccttcgtgggaggatgtgcgaaaaaagacacaggccatccagaaacaaaacattgtccctcacatgttgtctcgtgtgggttatgaatatctagaaaacaagttgataaatgagaagaaacaaaaaaaagtggaggaaactgctctatccagaagcactgacactgtgattaatcctccatctcccatcagacgacacatgaagtgaaagatggtccgcaccaagaaaactggacaaatgacatctaaggcagctaggaaattgctgacaagatgattttttgagaagcaag

SEQ ID NO: 9915 - DNA, 535 bp, Glycine max
  Clone ID: jC-gmfl02220106g09a1
gtttccccctacggcgaccactggcgcaacctccgccgcatcatggcgctcgaggttctctccacccaccggataaactccttcttggaaaatcggagggacgagatcatgaggctcgtgcaaaagcttgctcgggactcgcgcaatggcttcaccaaagtagaacttaaatccaggttttcggagatgacatttaacactataatgaggatggtgtcagggaagaggtactatggtgaagactgtgatgtgagtgatgtacaggaagcaaggcaatttagagagatcattaaagagttggtgacgttaggaggggctaataaccctggggacttcttggctttgcttaagtggtttgattttgatggtttggagaagagacttaagaggattagtaagagaaccgatgcgtttttacaaggactcattgatcagcatcgtaatggaaagcatcgtgccaatactatgatagatcatcttcttgctcaacagcaatcacaacctgtatatttcaccgatcaaatcatcaaaggac

SEQ ID NO: 9916 - DNA, 475 bp, Glycine max
  Clone ID: jC-gmfl02220106g09d1
ataaagcactactataaattttattttacatatataagttcttcaaaaacattataagatgtttatgcttttaacagcactagaagttataaatatccttaactgtcagtgattggcacacttggcacatagcttctaagggatatttttttgacacagtaagtccctttccttcagtcatatcaatttcttttttagtagtccttttccactcaaaacattggattaataaggccagagttatgctcagtgtgcgttgagccatgtttgctccagggcaagccctcctccctatcccaaatggaagtaacttgtttgcttcactttcattctctaacctctcaggcttaaagtgtgttgggtcactccacaacttgggatctctatgaatggcccaagcattctccaacaatattgtgttctgtgggatattatattctcctatggcgcaatcttctgaagacaatatggggtc

SEQ ID NO: 9917 - DNA, 514 bp, Glycine max
  Clone ID: jC-gmfl02220106g10a1
cgtttctcttcttcttctcacttcattttataaactcactctgcagttagcgacaaaaccccaacccgattcggatccgattaggttctctcggatcctctccaccgcctccttcgattcccaaatccactccctcctcctgtcttcgctcgagatccgagctaagcacgggattcggatttccgtttccatcgctctctcttcaccagttttgcgcttaaatggcatcaagcgaggggtttctgaccgatggacagagagagattctgaaaatagcgagtcagaatgtggagaatttgtcttcctcgccgaaatctccatcctccttgcttgctgaacatcatcatcacgtgagggctccttcagggggtggtaaggcacagactgctgggcatgctgccaggaatgtgcgccggtcgcactccggaaagtatgggagggcgaagaatgacggtgctggtggtaaaggcacttgagggaaattgcttgatacagatggtgaatcccgtataga

SEQ ID NO: 9918 - DNA, 385 bp, Glycine max
  Clone ID: jC-gmfl02220106g10d1
acaccatattcctcttattccttttggcgcaacaccattcttaaaagcgggcaacgaaattttagaccaaatttacacaacgactgagattcataggaatttctggcggtgacataatttggaaagaaaagaaaaaacagattcaaaggatcatgagaaggccaaccatcccacagatttatccacattcaggggaagcttaagtgccacaaccttttttagagaaacaatgaaaattttgtcctcctcataaagctggtgcagcccgggccagttagacatctggggcagtgggatcaaatgatggggggagcccgccctctttcaaggcatgctccaaatagaaactgaatttctcgttagcgtttggaatgtccagagcgag

SEQ ID NO: 9919 - DNA, 362 bp, Glycine max
  Clone ID: jC-gmfl02220106g11a1
accacataatgcgcgatgtgcgtagagtggactggctttcctcataccaactcctcatcttcactgacatagagagcggaatatccgtccttataacattcggcttacagatcatccacacccatactgaagacatcatacggcacttcacaaccgcctagtaaggactattgtgaccttcctgtggctagctgctaaaatatgcttaacccatatctgaagacgtgatcgatgtgagactcctggctgggtcaatgctcaccctcttgaaggcgtcgctgtccaggttcctgctaaccaggtcgaacctggtccacttggccctgttgcttgtgggtgccccctacacgaaccaccgtcca

SEQ ID NO: 9920 - DNA, 336 bp, Glycine max
  Clone ID: jC-gmfl02220106g11d1
atcacgaggatctttttctctgattacatattgttttcctgcactccggtccaagtgggctgggaacattttgtggggttgacacgtgcacatccctgtctgctattaagatcctcaccacgatgttgtgtccacacctaattattactgccggaccattaatcttcacgtgatctgggaacgttaatagcagcttagtcctgggccaccggtcttttgatagggacgtggctacatcgcctcagactttactgtttctggaggcccctttaggcttgttcatgaccgaaaggaattcgttcttgagcctggaatgcaacttgttttatggtgggt

SEQ ID NO: 9921 - DNA, 498 bp, Glycine max
  Clone ID: jC-gmfl02220106g12a1
ccatatccccccctagctacagagcttccaaaggggaggaataataataagcctatattctaaggccggaaaaataaaaaaggaataacaaaaatgtctggaaaggtaattatctcggctgtttctctcatcctggtggttggagtggccataggtgtggtggtggccgtcaacaagaaaggcgaggatcccacacttcaatctcaacaaaaatcagtaggggttatctgccaaaacactgatgaccagaagctctgccacgaaaccctaagctccgtgaagggcatggacaccgctgatccaaaagcttacatcgccaagtcggtgaaagccaccatggacagcgtgaccagggccttcaacatgagtgataggctcattaccgagtacggaggcttcgattacggaaccaagatggcccttgatgattgcaaggacctcttgcaatccgctatcgagagcctccaactcagcattgacatggttcacaacaacaac

SEQ ID NO: 9922 - DNA, 511 bp, Glycine max
  Clone ID: jC-gmfl02220106g12d1
agaaagctcgagtccgctgacatacccgtccggtattgatcgccggctcgacgtgctcatcttgtcggcgggcgacctccattgagatcatgacttcaatcagagcaaccttaaaaatcttcagttaaaacatttccggctgacctggaacgattaatgcattgaacaccaaattggctacggactatgaccctcatcatcacgctctgtaacagtactcaagcgatgatgcacggatatgtggctgtgttattggtatgcatccttgatgaaccttattgcctgagggtcaccataagcttgtacccaagctatcacaccgttggctacacgctggctgaactgggcaggggcgtatcggggagctgcgtgggggccaatgagtgcacggtttcccgtacacttgctccggccgtgaacgtgggcccccattccatgactagggcagtcaccgtatgccaaggggtgttgtgcgcggtgaccggcccatggactccacccttcggggtga

SEQ ID NO: 9923 - DNA, 451 bp, Glycine max
  Clone ID: jC-gmfl02220106h02a1
ctaattctcatttcttcatcgttcgattcttctcctcctaaagatgcagatcttcgtgaaaactttgaccggtaagaccatcacccttgaggtggagtcctccgacaccatcgataacgtgaaagctaaaattcaagacaaggaagggatcccacctgaccagcagagacttatctttgcgggtaaacagcttgaggatggtcgaacccttgccgactacaacatccaaaaggaatccactctccacctcgtgcttcgcctcaggggtggcatgcaaatctttgtcaagactttgactggcaagaccatcaccctcgaggtcgaatcctcggacaccattgataatgtcaaggccaagatccaggacagggagggtatccctccagatcagcaaagttgatatttgctgggtaacaacttgaggatggaaagacccttgctgattacaata

SEQ ID NO: 9924 - DNA, 482 bp, Glycine max
  Clone ID: jC-gmfl02220106h02d1
aaaataaaaacataaacaacatactttcgctgaaacgagttcaatacatcattttaaaacataataaacagcagcacttaaaccagagatgcaaagcacaagttcaagggagacactgaacaaacagataagacatatgagaacacttcataaaagggattccccttagcaaccaccacgaaggcgaaggacaagatgcaaagtggattccttctgaatattgtaatctgccaaggtacgaccatcttccaattgcttcccagcaaaaatgagcctctgctgatctggagggataccttccttgtcctgaatcttagctttcacattgtcaatagtatcagagctttccacctccaaggtaatggtcttccctgtcagagtcttcacaaatatctgcatacctccacgaagcctcaacaccaaatgcagagtggactccttctggatattataatcagcaagagtacgaccatcttccagct

SEQ ID NO: 9925 - DNA, 461 bp, Glycine max
  Clone ID: jC-gmfl02220106h03a1
agacatcaaatgtatttattttgcagtaacggaagagagtggaactgtatccccgtcatcggataaacacaatagctgtagatagagaagagtgccattattgattcgcagaagaagataagcgatggttggggttaatcggaagaaaggcctctttgttgggaggatcaggaagaagaagaagatggttgagcttcgcagcagcagcagcagcaacaaccactaccaatggtggggccatggaggagttgctttcacagctccaatctcatgtccagaaggctcttgctggtggaggacccgaggcagtgaagaggaacacgagtaggaacaagtttctgccccgtgaaagaatcgatcgcctccttgatcccggttcttccttcctcgagcttttacagcttgcaggacattacttgtatgaagaacctttgccttctggagggggtgttactgggata

SEQ ID NO: 9926 - DNA, 584 bp, Glycine max
  Clone ID: jC-gmfl02220106h04a1
gacacaccaaatcaaagacacctgagccattcaattcccctcctttattgctttcaagtttcaacactaattttattatctgaaaaaatggctttcaaagtttcgtttttccttgcacttgttctagtttccaatatcctcctccttgatacaacagctgctggacgcagcattggcgaaaactccaactcagaggaaaagaaagagcctgagttcttgttcaagcatgaaggtggggtgtatattccagggattggacctgttggatttccacataaatttcatctcacacctcaaaatccattacctggtggcaatggaaatggaggagcaggaaccgcaacaggatcacggatcaccaccaggtagcagttatgttcctggtggtgatgacacttttgtcccaaaccctggttatgaggttcccattccggcagtggggaagtgttccagcaccagctgcccatgagttaactcatgcatgataatgtgatgcatggtagttaataggtgggtatgcttagtttgtctttttcttctgtttctagccataatataacttatcataataagtatgctcatgt

SEQ ID NO: 9927 - DNA, 464 bp, Glycine max
  Clone ID: jC-gmfl02220106h05a1
acgtaagctagctttggcatctttttcccctttttcctccaagcctataactatattcaacccaatctgcactggaccaagtgtaaaaagacattttcctgatcttctgctgtgccaagaaagcagtaatctccatgagcttctattgaattgatactttgatcaagatggatgggaaaaactctcttcaaataactagaagtggtattggtgcttatgatgatgatggacatgccaaaaggactgggaatttgcagagtgctgtagctcatatcattactgctgttattggttctggtgttctttctcttgcatggagcacttcccaattaggatggattggagggccattttccttgctttgttgtgcaattgtcacctatatttcttcattcctcctgtctgattgctacagaactcctgatcctgtcactgggaaaagaaactactcttacatggatgct

SEQ ID NO: 9928 - DNA, 441 bp, Glycine max
  Clone ID: jC-gmfl02220106h07a1
ccgaggtgctttatttactgcactggtggtcatatatgctctcacatctggcattgctggctacactgctacttccttctatattcaacttgaagggactaattgggttaggaacttattgctgacaggatgcctcttttgtggccccctattccttatgttctgtttccttaacaccgttgccattgcttatagtgcaactgctgccctgccatttggcacaattgtggtgatagtcctaatatggacattggtaacttcaccattgcttgtgttgggtggtattgcaggtaagaatagcaaaactgagttccaagcacctgtccgcactacaaaatatacccgagagattccacctctgccttggacaggagtaccattccccagatggcaatggcaggatttcttccttttagtgccatctacatagagctgtactac

SEQ ID NO: 9929 - DNA, 532 bp, Glycine max
  unsure (1)..(532): unsure at all n locations
  Clone ID: jC-gmfl02220106h08a1
gatccccttctccttctctctctctttttcgcctcattccattttcatctatcaatggctccagtagcagcagcatcttcagattcaatcaagccaagagatgtttgcatcgttggtgttgcacgtacacccaatgggtggatttcttggtactctgtcatctctatctgccaccaagctaggctctatagctattgaagctgctcttaaaagggccaatgttgatccatcccttgtggaagaagtattttttgggaatgttcttagtgctaatttggggcaagctcctgcaagacaagctgctcttggagcaggaatatccaattcagttatctgcactaccgttaacanagtttgtgcatcaggaatgaaagctgcaatgcttgctgcacagagtattcaattaggcacaaatgatgtttgttgtggctgggtggtatggaaagcatgtctaatgtccccaagtacctggctgaagcaagaaaggatcacgccttggacatgattcactttgtgatgggatgttgaaaga

SEQ ID NO: 9930 - DNA, 572 bp, Glycine max
  Clone ID: jC-gmfl02220106h09a1
tgatggttcagctatgttgacctttgaagcactatctgaaacagctgagtttgcgaagaagtgggtgcccttttgcaaaaagcacaatattgaaccatgagccccagagttttattttgcccagaagattgattacttaaaggacaagattcagccctcgtttgttaaagagcgacgggcaatgaagagagaatatgaagaattcaaagtacggatcaatgcccttgtagccaaagctcagaagatgccagaggaaggttggacaatgcaggatggaactccttggcctggaaataatcctagggatcatccgggaatgattcaagtgtttttaggtcatagtggggggctggatacagatggaaatgagctgcctagacttgtttatgtttctcgtgagaagcgaccaggcttccaacatcacaagaaggctggagctatgaatgctttgattcgagtttctgctgtcttgaccaatggtgcatatcttctgaatgtggattgtgatcactatttcaataatagcaaagccctcaagaagccatgtgtttcatgatggatcctgttcttgg

SEQ ID NO: 9931 - DNA, 476 bp, Glycine max
  Clone ID: jC-gmfl02220106h09d1
gcatgaacaaatttattttctggggggaaaaaatttaacattcacctctacattacttctgactattcttgttaggaacatgtagataaataatagaaacagagagggtacattcccatctatttaaggggttgaatcctccaaacaacttcaataggctgaaaattcttggtatattcacgacatcaaccttgtgtatctccaagcataagggaattacagcactaaatgaatcatacatgagaactaacagttgatgccacattgaccattggttaatttgttggagtctgaggtgaagggatcaatcctcacccacagcaaggagactattgaagcaagaagaacggtccatacaataacattggttggggtacgactttgcctgcccaagagacccttcaagaatgggtatagatgggcaatgacccagattgcataaaacatctcgccaaatagtggaccccaacactggc

SEQ ID NO: 9932 - DNA, 552 bp, Glycine max
  Clone ID: jC-gmfl02220106h10a1
aaacactcttcttcatcgtcgtcgctttgggacgtgtgatccgtgcgcagcgtaagggagcaggctcggtcttcaagtcccacacgcaccaccgcaagggccctgcccgcttccggagcctggatttcggagagcgcaacggctacctgaagggtgtcgtcactgacgtcatccacgatcctggccgtggcgcgcctctcgctaaagtcgccttccgccacccgttccgctacaagaagcagaacgagctcttcatcgccgccgagggtctctacaccggccagttcatctactgcggcaagaaagccaccctcgttgtcggcaatgtgttgcctcttcgatccattcctgaaggagctgtcatctgcaacgtcgagcaccatgtcggcgaccgcggcgtcttcgctagggcgtctggagactacgccattgttatcagtcacatccctgataatgacacctctaggattaagctcccatctggttcaaagtagattgttccaagtgactgtagggccatgattggtcaaagtgcatgtggagggagaactg

SEQ ID NO: 9933 - DNA, 415 bp, Glycine max
  Clone ID: jC-gmfl02220106h10d1
aaaatagcaataatctgcagcattgaacatgcaaccaaacaaatattgaagaccgtctattgaaaactccatatgttgggaagaaattggctctgaagaaggtgcccaaatagtctaacaaacaaactatcagataaaagaaaaacaatactgaaaaacttgcaatcaaatatattatccctaacatcgttctctttaagccttatcagccttggcagcagttgcagcagcttgtcctctaagacgaccagtcctcctagcagcaatgagaccaacctcttgtgcaggaggagcatcacgcctgacagtacttgcgtgaccaatatgctggtgattacctcctccgtggggatgctcaacagggttcattgcaactccacgaaccttgggccagcaattcctcttcactctgaac

SEQ ID NO: 9934 - DNA, 547 bp, Glycine max
  Clone ID: jC-gmfl02220106h11a1
agcattttcatttccttcccaaattctcccgctcgtgaatgagagtttcggctcagagattgatttttgagctacgatttcacaccgcattgccaaacatgggtgcttcagagtctactctctcaagcggaaagacgcctgatgacaaaatctccaccataaccgagcggtcggaagcctctgaccctatcttggagcgccttaaatatctcaaaattacaccgtccatattgacctcacccccaacagaggggactttaactgatattttagtgaggaagccttcgtcgtcctcagtttcagtcaatccgaaggttatactggagctcttctcaatataccatgattggcaggagaaaaaggcccaagagatttgcattagacaggaggaaatagaaaacaaaattgaagttgcagatgctctagcgatcaaacttcttcagcgatataatcattcaacttctacaatgaagactgcctcacaacatctattcggaggtaattatcaagcacagttcatgcaatatttggtataccgggattctca

SEQ ID NO: 9935 - DNA, 335 bp, Glycine max
  Clone ID: jC-gmfl02220106h11d1
ccccttcagctaacaatcccaggggggctccctttctttaaccaactttaccaaagaaaaaagtccttctcattctggtcaaacccggcaaaaacaaggggcacacgctcaagctcattttctcctcacgcgcctgcctcttcttctcccgtttctccaccgacttcttctccaaaaacatcctttaaaaaaatgccaccgccgttgtaataaaaccccgccccactaaaaaacaaatgccgaggatccggacagacctccacccccggtgttaagactctctttttttgcgccgcttttggagcaccagacccacttcttcctgctctggtaca

SEQ ID NO: 9936 - DNA, 557 bp, Glycine max
  unsure (1)..(557): unsure at all n locations
  Clone ID: jC-gmfl02220106h12a1
tgttgttgtgccttcatattcgttcttctctcagcagcaacagcgaaccctagacctgaacggctgaacctcgccgtctacggcggcggagctgtttgtccgacgtccttaggagacaagccgtcgtcgggttggaacttgcgctgtggtcgaagtgttcatagattaagaagagtgatggatgaggcagaggaggagcagcaacgtcgtcgtttaaagcttgaagaggcccttgaaatccaatccctcagacgcatcattagtgcttacctcaactatcctgatgccgcagaagaagatgttagaagatatgagatggtcttataggaagcttccaccttcccataaagctttgttatcccactattctcgaaagtttcaaagattacgcctggtgtatctcaatgaatacacatttcatattcggcatgcttcatgcatttgaacctccacttgacatgagccangacgtagatttttgtgaaagatccacatcctgaatcgacccaaaaagatcatttagtttctgaagggattagagccggttcatgtgagtc

SEQ ID NO: 9937 - DNA, 459 bp, Glycine max
  Clone ID: jC-gmfl02220106h12d1
gctcacttggctggagccgaccttctgattgttgcgagaaatggtgcaaatgtactactccattctacgagctgggtccgcaaaaaaacaagttgcatctggagacggtgctcccactcggctggtacgcctgggttgctcaccgagcgctacccgctcagatggaaaacccttccccccgtggtgcaccgggtggatgcgtttcgggctttgccacgggacgtggccctgccccgggtctcaccgctctgagctggcgaacctgactatgatggcttgtagcgtctcctgccgtggtgatgcggttatttagccgagcagtcattcgtggcgcgatgttgagtccgtgactggtttctcatattgatgatacctccattgacgaacggcctaactcagagacaacatccaaaactgcatgctgtctacttgtactgatatgtgggtatggctgcgtag

SEQ ID NO: 9938 - DNA, 591 bp, Glycine max
  Clone ID: jC-gmfl02220108a01a1
caacaatctttgcttcagccgccacctggtttatcaatgccttcatcgatgcagcacccaatgcagtatcccaattttacccctcctttacctactgtatcttctaatttgcctgaattaccatcatctttgctgcctgtgagtgctggtacccctagtataccatctgcttccttgcctccatctaatttgcctccagcaccttctgctttacctcctgctccatcagctttgcctcctgcaccgtctgctctatctcctgcatcttctgctttatctcccgtaccttctgcaacacttgcttctgaaaatttgccagtatcagtaacaaataaggcacccaatgtttcaacttcagcagctatgttagctgctaacttgccatcactgaccatttctggtccagatataaatgctatagtgccacccatctccagcaaaccgcatgcaatttcagcctggaccaagtatagtttcttcagctcagccttcacaagcacctcataaggatgttgaagtggttcaggtatcgtcaacatcatctcctgagccatctgtgccagtttctgctgaaactcaaccaccaatact

SEQ ID NO: 9939 - DNA, 417 bp, Glycine max
  Clone ID: jC-gmfl02220108a01d1
aggttaaacaagtgcctggtgatctatgctgatgtaaaaaggggtacaaacatgttttcaccaaaccaagtgactttggtaaaggagcaacacgagggttccgtagcttgataatagtggactacttattctgcgaagccaaacatatcacaggctacacaccactgaagcattatatctaacatagttacgatgctattaggggaggctacctaggctcttgttctccaccatgtccatgactaagcattaactgccacctacatagtgccactgggcatgccacgtccactccctcgtgcattatagccgtaccctcctactatttcataataaccatcttgggtacgtacaccacggtcagggccacggacctcacgagcaccacggggcctcccaagaggaccatacgtgtca

SEQ ID NO: 9940 - DNA, 569 bp, Glycine max
  Clone ID: jC-gmfl02220108a02a1
cagaaacagaaaccgtagacaacccgaatcccttattaagcaggggtttcgcggcgcgagacggtgacactggcagagtggaatttccgccgccattcgaagctacagcgatggccataaccgccaccatttccgttcccttcacatcccccagtcgccgcactctcgcctccgtcaatagcctctctccgcgttctacccgatccactttgcccacaccgcaacgcactttcaaataccctaattcgcgcctcgtcgtgtcttccatgagcaccgaaacagccgtcaaaacttcatccgcctccttcctcaaccgcaaggagtccggcttcctccatttcgccaagtaccacggcctcggaaacgacttcgttttgattgacaacagagactcctccgagcccaagatcagtgctgagaaagcggtgcaactgtgtgatcggaacttcggcgttggagctgacggagttatctttgtcttgcctggcatcagtggcaccgattataccatgaggatttttaactctgatggtagtgagcctgagatgtgtggcaatggagtgcgatgc

SEQ ID NO: 9941 - DNA, 431 bp, Glycine max
  Clone ID: jC-gmfl02220108a02d1
tttctttttttttttttttttttttttttttttttttaaaacaagcataaaggccacctttcatacaaatattattcagcaattcctaattccatattgggtttaacaatgggggccacctattaaaggggggaagatccgtaataaactacatcggctgaccctggcagtataaacatgattatcttcctccctccattcaatctgaagaggtcctccagagagatcaaccgtgcaattcctctccagcacgaccctcaagaactggtgcaacaacagctggacaagctccaattccacaagctagggttggtcctgctccccgctcccagacacccattttcaagggagaattaaaccacacttgttccaactctgtgttaattcctgcagggaacaccccatgatggtcaaactgtgggccaattttt

SEQ ID NO: 9942 - DNA, 584 bp, Glycine max
  unsure (1)..(584): unsure at all n locations
  Clone ID: jC-gmfl02220108a03a1
ggaagtgtgaagaacagttctgtttctgccaaagttagtgatggggccagcagtcttgcaaagacaagtgggagtgccaagatcagcaaccgagctgattttgttgagagtggtaagagcagtatttgcagaggaagcacaagcagtgatgtgagtgatgagagtacttgtagtagctttagtagcaccataaacaaacctcacaaggcaaatgacttgagatgggaagctatccaagcagttcgaagtagagatggggtgttgggtttaggtcactttagattactgaagaggctgggttgtggggatattggcagtgtttacctctccgagttgagtggaactaaatgttactttgcaatgaaggtaatggacaaagggtctctagcaagtcgtaaaaagctacttcgtgctcagacagaacgagaaattctgcagtctcttgatcacccttttctcccaactttgtacacccattttgagacagaanaattctcatgcttggttatggaattctgnccaggtggtgaccttcatactcttaggcagaagcaaccagggaagcattttnctgagcaggcagt

SEQ ID NO: 9943 - DNA, 419 bp, Glycine max
  Clone ID: jC-gmfl02220108a03d1
tttcttttttttttttttttttttttttttttttttggttgtcgccagacaaaatggaaacggttaatttgccaaccaaaacaaacatacaattgctcattgtatcatatctgggcctgaaacattgaaaaacaggtccttcccctctttaacagaaaccatttgcaatgaatatattgaatccaccctttctttttttttttttagaagaaagcagaccccagatatttttcaaaacctttttgattaaccattgaaatatggttaggagccttttcaccaccactttatgaagctggcgagggtatattttaaaactctacagccttggggatctcgggggggggggcacatctgatcaatggcctatttacaccttcaaaaaaagggaggagcttgatctcaggaacgcctttttt

SEQ ID NO: 9944 - DNA, 587 bp, Glycine max
  Clone ID: jC-gmfl02220108a04a1
gtacattattatcgaaattagtggtttaagttcattcaccccaaaaagaaaatatttcttgctaacaatatttttataaggtttactggttagcaacccagtgtgtgattcctcagttcaacaactctcagcaacatgcacaatcctcccccgccaggcggtccaggccctcaccaccaccccggcccaccggctccgccaccacatgctcatccatctcctccgcctcctgggcctccacaccaccaccacggcccacccggcccaccgcatgcttatccaactcctccgcctcctgggcctccacaccaccatcccggcccacccgaaccaggctttcatcaacaccatggcccacccgggccaccgtatgctcatccaactcctccgcctcctgggccaccgggacctccccctccagggcctccacaccaccaacaccaccgttgctgatgtaatgcatatggagcttatgaataacgatcctacatatatatgatgtaatgttgaatgctttttaatttctgaacactttatatagcaagggcaaaatttggttgtgtcactaaataaaagctttgtagttc

SEQ ID NO: 9945 - DNA, 473 bp, Glycine max
  Clone ID: jC-gmfl02220108a04d1
acatagaaatgacctccctttatttcttattctaataagatacacaccagaaaaagcacaaggggcaccagacggtgatacacggtaaatataggtagtactatagtagtggaactacgaactacaaagcttttatttagtgacacaaccaaattttgcccttgctatataaagtgttcagaaattaaaaagcattcaacattacatcatatatatgtaggatcgttattcataagctccatatgcattacatcagcaacggtggtgttggtggtgtggaggccctggagggggaggtcccggtggcccacgaggcggaggagttggatgagcatacggtggcccgggtgggccatggtgttgatgaaagcctggttcgggtgggccgggatggtggtgtggaggcccaataggcggaagagttggataagcatgcggtgggccgggtgggccctggtggtggtgtggaggcc

SEQ ID NO: 9946 - DNA, 382 bp, Glycine max
  Clone ID: jC-gmfl02220108a05a1
caaatgccctaccatatcttatcatttggttggcaccaaaaagattcaacaggaacttgcaaagcctggtgttcttgagaggtttgtagaaaacaaagaccacattgccaaattgcgtgcatgctttgcaggattgtggagtttggaagactcggatattgctaaaaaagcaattgaaaatccagagttatttgtgatgaagcctcaaagagaaggaggaggaaacaatatttatggtgatgagttgagggaaacccttcttaaattacaggaagcaggttctgaagaagatgcagcatacatccttatgcagaggatatttccagccacttctccagcaattttggtgcgtgatggtaattgggataagggtcatgtcatt

SEQ ID NO: 9947 - DNA, 476 bp, Glycine max
  unsure (1)..(476): unsure at all n locations
  Clone ID: jC-gmfl02220108a06a1
aaacttctctctcacactcactttctctctctataactctttctcacccgctagggtttccttttcatcgcatcttgagtttgcaacctcgtcttgtgatttccatggagggtgctgggatggaagagaataatattattaatgatgatgataataataacaagtctgaggcgcatttgacttctgccgctgcttttgtggagggtggaattcaggacgcttgtgatgatgcttgcagtatatgccttgaagctttctgtgatagtgatccttccacggtgacgagctgcaagcatgagtttcatcttcagtgcattctcgaatggtgtcaaagaagctcccagtgccccatgtgttggcagcctatcagtctcaaagatccaacaagccaagaattacttgaggcagtggaaagagagcgaaactntangttcaatccatctaaaaatgccacaatatttcatcatccaacactg

SEQ ID NO: 9948 - DNA, 265 bp, Glycine max
  Clone ID: jC-gmfl02220108a07a1
gcataatccattctatttttttagaaagaggaatagctcgagcagacggaatgggactagattctggattgatactatcgcaaagtgtgaaggaatacaacgaacacctttattctggccaagatgatcctacagcagctccaaaggcaccggattaagggacgaagaaagggtgcctgaacaggacgggaggacctgcaaactcttaatgtaactacggacgagttacgcatagcacatggggaagatgggtacatgagattag

SEQ ID NO: 9949 - DNA, 515 bp, Glycine max
  Clone ID: jC-gmfl02220108a09a1
ccaaaagcctcctcctccttctcttgttcaaccttcccacaaacactgcatgcgtctttgaccacaactgcttcttcaatttccaatctttttggacaccctctattgctcttcctcccttggtgtaggttgtgtaaaagggtatctctatttatagagtttccattgtctctggaggcaattttcgaccttaggtgtgttttggagagtttttttttttttttgtgttgtttagttgttgaggttggttggtttgtgagagagagaatggtgggtgctctatctgttgtgggatcatcagtaatggactctcacactggcccttgtttgtgtgtggatgctctcccaacaacaactagtgtcaatctcaagagtggtggagatgttgttttgtgcaagaatttgatgggaaggaagcataatttggtgaagcatggtggtggtgtgtggaactacaatgaagttgagcagttcatttgttgatcctggaagagagtggaggctctttgttagca

SEQ ID NO: 9950 - DNA, 577 bp, Glycine max
  unsure (1)..(577): unsure at all n locations
  Clone ID: jC-gmfl02220108a10a1
gtactctccgtccttccttcttcgatccagatctctctccttctccctcaaatggcttcccttctgcaatgttccatgcccctcgtctctctttccaatcgagctctggtacccggtaccaggatctccaacccaagttcagtttccctttcaattaagggaagaagtttcccatccgttacattgcagcccagagggcgtcggtttcagcttagatgtgcggcaaaaccagagacagtgaagaaggtgtgtgacatagtcaagaagcaattggcactgccagatgaatcagctgttactggagagtctaaatttgctgcgcttggagctgattctcttgacacggttgagattgtgatgggacttgaggaggaatttggtattaccgtggaagaagaaagtgcccagagtatcaccaccgttcaagacgctgctgatatgatcgataagcttcttgaaaccaaagcttaaactagtaaaaaggacaagcatgtcccatttagagttttttgctatgtcgacggaaggggtttttaatctttatctttggtattacaactngattgtctaagtaact

SEQ ID NO: 9951 - DNA, 540 bp, Glycine max
  unsure (1)..(540): unsure at all n locations
  Clone ID: jC-gmfl02220108a12a1
gtaccaaagtcacgcttgctccctctcttaaccgcttccatctttgctctctctctctctctctatggacacacatccttggtcttgaacaggtttttgggtgaaggagtagtgttggtggctttgtatatcttttagtggataaggatacaacagcatgcggtggtggcttagtctctcagttgatgtataccgcaaagtgatttccttgaatctgtattgcaaagttattctgtaactcttaagtcccttttgatcaaaaacctttttcaatcatctcactcatctattccttgccttgaatcaatgggatccaatttttttgttgttgttccttgttatgtccgtcagattagctgaaaacccccacccctatcttgtttcaaacctcttattttcaatcagcctcttttaacattttagttgtcattagtttctagccattttctctttggtggtgtttgtagacaagtcaaattagtatcttagtnttgtgtattgttcaatttggtaaaccggttttcactactggattgggag

SEQ ID NO: 9952 - DNA, 559 bp, Glycine max
  unsure (1)..(559): unsure at all n locations
  Clone ID: jC-gmfl02220108b01a1
gcacaatcaagagacaacaaatttccatccttgagatcttataattctggcagtttagttgattttttctcagaaccagtccaagcttcagaaccacttcagaataaagcatttggcattcccagaccacctggtcctacaagatctgttagcatggacctctccaaggcaccactggaatcagcttcatctgttgatctttttcagttaccagcagcaccatctcaagctccaacattggatttgtttcaatcatctctttcatcggcagatccatctttcaacgagaatcaacttagtcaaacatcccatcttgcatctattgattttttttccgatttttctccgcagccttctactgtaacctcagatgggaaggcactggaattatctgtccctaaaaatgaaggatgggcaacttttgatatgcctcagagaacctcctctactgcacaagtggaaattccaaccactgtaccctcaaatgctaaatctttagaagaaaatttgatccattntctacctcaaatgcaaacatgcaatggccatcttttgatat

SEQ ID NO: 9953 - DNA, 525 bp, Glycine max
  unsure (1)..(525): unsure at all n locations
  Clone ID: jC-gmfl02220108b01d1
aaaaattactcgagcttctatcagaacctaataaaaactataattaaaccggaaaaaaaaaaaccgtaatccgcatttatacatgaattggacgtgcgtgccaatcagaggctctcatataattacaattatattataattatgaacaaagtgaaaaataccctcaatagtctctcagtaaagttcaataccagccagatcactaattaaacatcaagaaaactatcactcaattacagtattgcaaatgcatgatctggcccgaatatatatgggggactaaaaattgcaaggtggtcctcaagtggaagcgaagtgatgaactacattttgctcttaacaaaacattacaattacttccacgctcaactgcactggctgccaataaatttctatgaaaaggaatagtacattctacagcacaatcctatgcaaaaggatttncccggatcgaatcaactgattccggtttctggatgttctgtatttgcgtacttggtgattgcatagccatgaatgacaaac

SEQ ID NO: 9954 - DNA, 508 bp, Glycine max
  unsure (1)..(508): unsure at all n locations
  Clone ID: jC-gmfl02220108b03a1
ttcagggttaagcggtgagatttgcgaatctgagaaatggcggattcttctcgggaggagaacgtttacatggcgaaattggcggagcaggccgagcgttacgaggagatggttgagttcatggagaaggttgcaaagactgtggaggttgaggagttgacggtggaggagaggaatctcctctctgtggcttacaagaacgtgattggtgcgaggagggcttcgtggaggatcatatcctccattgagcagaaggaggagagcaggggcaatgaggaccacgtggccattataaaggagtacaggggcaaaattgaggctgaactcagcaagatctgtgatgggattttgaacctccttgagtccaacctcattccttccgctgcatctcccgagagcaaagtcttttaccttaaaatgaagggtgattaccacaggtaccttgctgagttcaagaccggngcagagaggaaagaggctgcagagagtactttgcttgcttacaaat

SEQ ID NO: 9955 - DNA, 417 bp, Glycine max
  Clone ID: jC-gmfl02220108b03d1
accagcgacaataaaaaatttataaatcactaaaccacatttttttcatccataaaacacattagacaatcccctggaacaattgtaaatcccaagcgcaacgcgcccttgaaatcataaaattcattaataccataatcccactatgggaggccacattggatccatattatggggaatacatatccaatcaactaccacattggaactggcatcggctattcgcctgggtggtgcttaaatgtttccttgatctcatttccaacatcggccgggatgtctggtgtccccaaagccaaattgtcccgggaaagttgcctgaacaatggactatctttggatgacccttcccccaatggggcaagctcggaaattgcctcatcaaaagcccgcttgggaagattacaagcacgatct

SEQ ID NO: 9956 - DNA, 443 bp, Glycine max
  unsure (1)..(443): unsure at all n locations
  Clone ID: jC-gmfl02220108b05a1
cgtcaaacttgagttcaaacactctcatcttcttattcttctgctttcactctctgactcaatcgttctaatccacaaaaaatgaccttaaattacaacattgccctcgccttctctgcggtgctcacgctgctcctctttcccctactgaccgtaggggagctcgtggaggagcagccactagtcctcaagtaccacaacggccagctcctgaagggccgcatcaccgtcaatctcatctggtacggcaccttcaccccgatccaacggtccataatcgtggactcataaatcttcgttaagcagcgcgccaaacgcgctctatcccctcgaccgccacngtggtggaaaaccacggagaagtacaaggtgggaggagggatcccctgcgcttcgtcgtagggatgcacgttcctacacccggcttacacgctagggaaaaa

SEQ ID NO: 9957 - DNA, 332 bp, Glycine max
  Clone ID: jC-gmfl02220108b06a1
cttcatttcctggttttggtttttctatggtcctgcctttccacacaatccactatagtttcttctataccttccttgtggatctgtcactatgacttcctcactcgtgaagatccaaggcgaacaggtcctcaccaacgattttcaggacctttcaatcaaagatctgagtgagaaagggactgaggcagagattcacaaggtggggtcttatggaagccatgggggaatctgtgctatctgcttggataagatagtgctgcaggaaactgctcttgtaaaggttgcgagcatgcttactgtgtaacatgcatccttcattgggctacata

SEQ ID NO: 9958 - DNA, 402 bp, Glycine max
  Clone ID: jC-gmfl02220108b07a1
ggcagaaagcaagctcatcctagagttttaaaaatggcagcagcctcctccatggctctctcttccccatccttggctggcaaggccgtgaagctgggcccatcagcccccgaagtcgggagggtcagcatgaggaagaccgtcaccaagcaggcctcctccggaagcccatggtacggcccagaccgcgtcaagtacttgggcccattctctggcgagcccccgtcctacctcactggcgagttcccaggtgactacggctgggacactgctgggctttcggccgacccagaaaccttcgccagaaaccgtgagctcgaagtgatccactccaggtgggccatgctcggggccttgggctgcgtcttccccgaactgttgtcccgcaacggggtcaagttt

SEQ ID NO: 9959 - DNA, 541 bp, Glycine max
  Clone ID: jC-gmfl02220108b08a1
cttgccctttccttcgggcaaagtggtgtttccatgttgtttctgagtttacttcctcaatatcccaggatatgtgtgtgttcttatgaaggttgcagtgctaaggagtctatagattttatgctgcagcttcattagataccaattttggtgaatttttcttgataacttgttcttggatttttgttttgtggtgttgatgaagatggctatgggtggcctaatttccggtgctggtgttattattgttagtttctttctgctgattctctgtggcatggtttgtgggactgagagtgatttattctgcttgaaaagtgtaaagagtgcacttgaggacccctacaattatttgcaatcttggaatttcaataacaataccgaagggtatatatgcaagtttattggggtctgagtgttggcaccctgatgagaacaaggtcttgaatctcaaactttccaacatgggactcagggcccgtttccttccggcattagaattgcacaagcatgacaggattagatttttcgcttacagact

SEQ ID NO: 9960 - DNA, 572 bp, Glycine max
  Clone ID: jC-gmfl02220108b09a1
ggcgtagttaactaaacccctaaataccccatctcagtgccgcaagcgctgctcactcccatttcagagcgatcaaaatggcagcaaagaaagcatggagaatcattccgagacccctcctaaaaaccatcctcaacaaccacgtgcagcaccaccgcgtccctcaactcctccttcttcacggccccagaggcgttggcaaaaccaccctcattaaccaacgtttactcccagaatggaacaaaggccctcacatcaccggttatgtcgactttgccgaatccatcaaagcccatcacggcccgtgggcctcgtggtccacctgccctttgccggtcctctccgaatgccgcaaaacccttgagcaatgcctggagtccatggccgagaggggcgtccgtgcaggcaccatcacctcccaacaaatattcgctaccctcaacaaatggcacggcctgaccaccgccctccgccttgtgctgcagggcaagtcccgtgttccggaccgggccttcccgtggtgttatgggaccgcgctgtgttcgccatgtctgttcaatgcactgcttctg

SEQ ID NO: 9961 - DNA, 563 bp, Glycine max
  unsure (1)..(563): unsure at all n locations
  Clone ID: jC-gmfl02220108b10a1
atatccttttgccaaaccccacaaggaagttcctatcatatttggagagtggtggaatgcagatcctgaggcaatcataacacaagcccttcaaaccggtggaggaccaaatgtatctgatgcctacacaattaatggacttccagggccattgtataactgctctcacaaagatacattcaagttgaaggtgaagccagggaagatttaccttctacgtttgatcaatgcggcactcaacgacgagctatttttcagcattgcaaatcacaccctcacagttgttgaaacagatgcagtttatgtaaaaccttttgcaaccaacaccatccttataaccccaggccaaaccactaatggttattctcaaaaccaattctcactaccccaatgccacattcctcatgactgcgagaccatatgctactggccttggcacttttgacaacacaactgtggctgccatattggaatacaaaaccccatcaaatactcaccattcagctgcttcactgannaaccttccactcctcaaacctattctncctgcactcaatgacact

SEQ ID NO: 9962 - DNA, 496 bp, Glycine max
  Clone ID: jC-gmfl02220108b11a1
ctttggcaaaaaagttataccgtaatcccaatttgggaacaactagcagtaaccgtgacgactctgatcagaagaagcctatttctaaaattcagaaagagcggcaaaatggtgctggcttgagtaataaaaaaagataggccatctccattgccagctaaaagacccctagataatagtgattccttgcatgcctctgttaagaagccaaaggtctcagatccagttgcatctatcaaaactaagccagtctcggtgaaacatgagctgaaggtagaggatgatgatgatgatattcctatttcccagagaataaagaaatcagccatgtcaggtgataaatcatctgccacaaagaagttgctgacaaaggttactaaagttaataagtctggttcaaaaccttttaagaaacagataaagaagacagttaaaaaatcggcagtggttcagaatattccaaatctacaaagcttcttcctagctctggtgatgg

SEQ ID NO: 9963 - DNA, 431 bp, Glycine max
  Clone ID: jC-gmfl02220108b12a1
cctaaccatctccgcagcgcaagctgctcattgcaaccctccaaactatcaactgggatcgtaaccgctctctcgccctcgccagatttgattggatcggcttcctgcattcttggactcgggaaattaggaccagaaacagttccccaaatcttgctttttgtctggctcttgtttctaagtcgttaatgtcagcgcagcgaactaatctctggcaagttgattgtggcaggggagaggagggttcaaaactgggcagcatataaacttggattacccattttggcggttgtccctttgtcattggaaccatggagatagtggatctgagtgtctaaggtaagtccgaggtatgagtgcagcctatgctgtatctgctttgtaacataagattgacggaccatggaagccaatggaatcgctcatgatag

SEQ ID NO: 9964 - DNA, 406 bp, Glycine max
  Clone ID: jC-gmfl02220108c01a1
gcaatcgctgtgttgaagggtttgatcaccattgcaggtggctgaataactgtgttgggaaaaggaactacacaaccttctttcttctcatgattttcgtcttgttaatgcttttgattgaaggagggactgcaattgctatatttatcaggtgctttgttgataggaggggaatagaaaaagagcttcagaggaagctttatgtagattttccaagaagagttcttgccaccatatgtgtatttcttctcttattgacagcgtatagttcaacagcattgggacagctgttcttctttcatgtgggtctcatacgaaagggaatgaagacctatgactatattctagccctgagaaaagaaaacgaagcaatggatttggaatcattggatgattctgatttctc

SEQ ID NO: 9965 - DNA, 354 bp, Glycine max
  Clone ID: jC-gmfl02220108c01d1
ggggaaaagaaccgggccgggtttgcccttatttgaaaatcccccgaccccatggccccccccctcccggttcactgggtagttggaccctaaattcccggtctaaaaattaaaccaaaacccctgttccctagggatttacccccccctgttttaattcccggggatccatgttttttggaaaacgcccctttcacccacttttttttttggggggggaatgccaccttctaaaaaaccaccttggttatcttggggagggggcgctatgatttttgcgggcccccgcaccctacacccgccttggaatatgtgtgttcagccccctgggcccccccttttatttcaaggcca

SEQ ID NO: 9966 - DNA, 602 bp, Glycine max
  unsure (1)..(602): unsure at all n locations
  Clone ID: jC-gmfl02220108c02a1
taaaaagagaggaaaaaaaaaagcctacaccaccctcttcttccctattcccttctacttctggcgccatttgcagcttcaaaactccatctttatttttcttctctccttccattattagaaacaccctcatggaatcagcagcaacagcattgaacaacatcatcaacaacaacaacactgttcctgcagtgtcgccaccaccaccaccaccaccatcctcagagcctcagccaatgaacatgaatgtcaacatgaacatgaacgtggtcaacaccacagaaggaacaacaccaacaccaaccccaacaacaatggttcccccaacaacaatggttgttcctgcagtgccagctccaacaacgacaacattagcagtagcaacaacaacaccagggagtttggatttgtttgggaagaagaagagagggaggcctagaaagtatgatgcagatgggaacctgagagtgagtgcaagaccaacaccaacaccaccatcgggttttactttgtccacaccttctgagtactcttcttccaaaagagagcgcggcanacactacaacacaactntngccaacaacagctaccaacaacaactc

SEQ ID NO: 9967 - DNA, 457 bp, Glycine max
  Clone ID: jC-gmfl02220108c02d1
gggaatctcttccacctctaaagaaaagaaagaaaaacttataaatgttcaacagaaactgtaataagaaaaaataatgaggccttaataataataataatcctttctaatttctgacaactgtacatcatgtcatataacccagtagttgtcatgacagatttccggtgttagtttcattcattactaccatgtcagcctctgcatcacccttgttctattcatctggcaaagatatgttgatgtctggagaagtcctctggtctgaatattcctcagaaccattccaagtagcagcagcatcaggagtagcatctaggttctgtttgtcacttgaaacactgatagattctctctggttttggtctggaatctgatagataggtataggtatcagaaagttctcaccatcagcagcatttgcttgtgagataggtattgctgctgtcactatttc

SEQ ID NO: 9968 - DNA, 461 bp, Glycine max
  Clone ID: jC-gmfl02220108c03d1
ggctcccacatacccctccgttaatgtgttggattctaggctttttagattccgcttgtgggtggtcccaattccaaggtagtgtgttatcatcgtcatccctttataggacagacaaagctgattcacttaaggagcctaaggacgctctgcaactactgtttgcgcgctgcgatggccggcggcagggattggaaatccccctccgtctttgccgctttcaccttttacagatctgactgcaaacgctgcctggtcagattcaccacgcagggctgggacgatgttgacaccaccttctgcatggcccgatgatatcccttttctctttgtatatcagacatcaggtgacgatgtgtcttccgaaattcatatcgacagacctgaataggcaccctgacgataatgaagatctttcctggggaccatatccatttaggacaattttggctttcctgaaa

SEQ ID NO: 9969 - DNA, 576 bp, Glycine max
  Clone ID: jC-gmfl02220108c04a1
cttctctgattctctccatatattatctcaaacccctctcacagaatgggaagtgctggaggaactgactatggtgcatacacttatgagaatcttgagagagagccttactggccatcagagaagcttaagatttccatcactggtgctgggggttttatcgcgtcacacatagctcggcgcctcaagacagaggggcattacattattgcttctgattggaagaaaaatgagcacatgactgaggacatgttctgtgatgaattccatcttgttgatctcagggtcatgaataactgcctcaaggttacagagggggttgatcatgttttcaatcttgccgcagacatgggtgggatgggttttattcagtctaaccactctgtcattatgtacaacaacacaatgattagcttcaacatgattgaggctgccaggattaacggcattaagaggtttttttatgcctctagtgcttgtatctaccctgaattcaaacagttggaaactaatgttagcttgaaggagtctgatgcatggccagctgagccacaagatgcatatgggctagagaag

SEQ ID NO: 9970 - DNA, 432 bp, Glycine max
  unsure (1)..(432): unsure at all n locations
  Clone ID: jC-gmfl02220108c05a1
gaaagggcgaaaatggtcaaactgagcacgaaaaccacatgagtttcctaaaccagtcacacgacaattcactcaccccttcatttgaacacaacttaacataaaaaaatatccaagacaagagtgtgttgtttgaatttgaacggaaattcaattctctcctctcccatttcatgtctcacaaacaaaaaccgatgcaaaatctcaaaaccccagagagagatgtctgacgcgttctgcagcgactgcaagagacagaccgaggtggtgttcgaccactcggcgggggacacgagtgtgttccgagtgcggactcgtcttggagtctcactccattgatgaaacctncgagtggcgaaccttcgcgaatgagttcggcgacaacgaccctgtccgtgtacggtgggctcaccaacccgctactaaccgacg

SEQ ID NO: 9971 - DNA, 490 bp, Glycine max
  unsure (1)..(490): unsure at all n locations
  Clone ID: jC-gmfl02220108c06a1
caaacacaaacctactttgaagcccaaagtgcaacgtactttgcaaaaaccctaaaccctctctttctctctccgcgactctgtactcatcaatggcgacgcaatcgttagacgaagaaacaactaagaaagtcatacgacaggtcgagttttatttcggcgacagcaaccttctcaccgatggtttcatgaggaagagtatcactgaaagcgaagatggcatgattagtttggcgctgatttgctcgtttaatcgaatgcgaaaacaccttaatttgggtgatgttaagcccgatgaagtggcccaagaaaccgtgaatactgttgctcaaactttgagaaattcggcttcactcaaggtctccgaagatgggaaaaaagttggcaggaaaactgaacttccaagctagaagatgttgagcaggtggagataagaacactngctgtatcaccatttgatatgatctgaagctngaagatgtggagaaat

SEQ ID NO: 9972 - DNA, 558 bp, Glycine max
  Clone ID: jC-gmfl02220108c07a1
cttcttcttctagtgcttctaatccaaaccaccaccataaacaaattcatattgaaactgtgtactctttgtttgttttcttgtttgtttgttactctaccaatctttagaagaattcagcctttgaattttggtgtccttttttatcaatcaaggccaaactcaaaatcccaacttttgtaaatcaagcataatggaatctgaaaatggagtcgctatggaggacgagaaacacgtcattggggaaacaaccaaggagaatataaacaaagaagctgaaaacagttgtaattctgaaattcagaccaagaatgaggtatctgaagctgttgtaaaagttgaaggtcccaaatctgcagcaagtaaaatctcaaaacttgccaaggaacatggtggcaagggtggtgttgcttcaaagaacaacaaatctgccaccaaagacaaacccaatttgaagtctacaacttcatctcagacacacaggccaaacctttccagagcctttcttgccagccaaacagctggaggagatggcatgaagaacagcactaatggaac

SEQ ID NO: 9973 - DNA, 575 bp, Glycine max
  Clone ID: jC-gmfl02220108c08a1
ggaaatagcgtaatttacgtgtgctcctttattcagttcctcttctcacactggtcaagatagtctatcttgatcatgggtttcaattctgtctatagaaacttgcaggagatatttccgcaggttgatccccagctactgagggctgtagctattgaacacccaaaggatgctgatctagcagctggaatagttcttgcggaagtcatcccgttcatgtccaaaaaactacctgctgcaattcctccacagcacaatgaccatggagccccactagatgttgaagttgaaagtgaggaagaaggcaataggttgaggcactgtcagcgtgttgatgacgtaaatgtggggccttcctctactttgtcaaatggctgtaattcaaaagatgatactgaaaaatttcttggaatggatgatattaaggagctagatatttttcagaatgctgaagataacttcattggggaaaccttgaacgagaatgctcaggagattgtcaatggctctattcaagaggaagataatgaaaatcttgagagacaacctgtggattttgattgtgaaaatttgat

SEQ ID NO: 9974 - DNA, 488 bp, Glycine max
  Clone ID: jC-gmfl02220108c09a1
attgcattctgctatttaattccactacgtacacgcacattctcctcaaagacaacaatggcaccaacagccaagactctgacttacctggcccaggagaaaaccctagaatcgagcttcgctcgggacgaggaggagcgtcccaaggttgcctacaacgaattcagcgacgagatcccagtgatttctcttgccggaatcgacgaggtggatggacgcagaagagagatttgtgagaagatcgtggaggcttgcgagaattggggtatattccaggttgttgatcacggtgtggatcaacaactcgtggccgagatgacccgtctcgccaaagagttctttgctttgccaccggacgagaagcttcgttttgatatgtccggcgccaaaagggtggattcattgtctccagccatctccaaggggaatcggcgcaggactggagagaaatagtgacatacttttcgtacccaaaaagagagagggac

SEQ ID NO: 9975 - DNA, 412 bp, Glycine max
  Clone ID: jC-gmfl02220108c10a1
gaacagtgttgagtggaatcctaaatacaatttacttgcatatgctggtgatgacaaaaacaagcatcaggctgatgaaggtgtttttcgcatttttggttttaaaaatgcttagtatatatggtaggggcactgtttttactggtttgagaatgcaaacaaatgggaagactgagagagcctaatggaggttgatttgtaatctgaataaatttgattattatgtgtagaacaaggggcagcattcacggacatgaatagtaagtaaaagggatattttttttttttccattctttttagtaattgtatggataaatgatatcgttcaacagcacattgccctatacaagttgtgacacaagttgtgaccaaattgttatgtatttagacataatagttcttttacttttt

SEQ ID NO: 9976 - DNA, 553 bp, Glycine max
  unsure (1)..(553): unsure at all n locations
  Clone ID: jC-gmfl02220108c11a1
ggcacagctatgccaccaaatccaaccaacacagggtcgtcaaaacccctggtgggaagctcgtttatcagaccaccaagaagagggccagcgggcccaagtgccccgtcactggcaagaggattcaggggattccacacttgaggcctgcagagtacaagagatcaaggttacccagaaaccgtaggactgtcaaccgtgcatatggcggagttttgtctggaagtgctgtcagggagaggattatccgagctttcttagttgaagagcaaaagattgtgaagaaggtcttgaagatccagaaggcaaaggaaaagcaagcctcaaaggcttgaatttgaacaacacaatgagacatctttttggaggacttttaggtttgagtggttatagttaatcacaaattttatagagttgtcatgttaattgtcttttattatnttgcctgtttgaactctttctaagcaagtgttatctttgtcgacatgtcattatatacagntttgtttctcattntctttgatgggtattgggtatctgttctatatattct

SEQ ID NO: 9977 - DNA, 458 bp, Glycine max
  unsure (1)..(458): unsure at all n locations
  Clone ID: jC-gmfl02220108c12a1
cttttccttctcctaaccctctttcctattaagaggagaaggaataacaaaaacaatatacacaatggctttcgctttcactttcaccaaaaccctaattctcttcgtctccctctcctccctgctnctacaaacccacgcggaccgcggcccccgcaccgtccaggcccgcctctacagcctctgcaagcccaccaccaatgttgggctgtgctacaggaccatcctgccggaggtgctgggcctgccccgcttcaactattacaaggccctcgaggtggagatgctcgtgacccagaaacaggtggagaaaacctcgaagttgatcagcgtgctcctggcgaggcccggaaactcgaaggatctcggcgactcactccagatttgtaaggagcagtacggcaacatcatggactcgatggcggaggccaaaagtcaagtggctcacgcaacgtcat

SEQ ID NO: 9978 - DNA, 528 bp, Glycine max
  Clone ID: jC-gmfl02220108d01a1
ccactttctgccaccgtcaggattcaccttttcttatatcagttggtggaaactataaattgtggctggagttggataggaacggagcagaacagaactatagtatctcatctctcttgatagtagaagtggtgctgactttcttgtgatcagtgatgctggtgaaatctctctcacttcattctcatgccttctcaagttgcagtttttctgcaagtgaaattggaacaaacccaagttgggttcccttaaagtccttaaatagcctctgctgttcctccaagcctagaaatttatgcagatttttgtgtctgagcactcaaaatggtggcttcagagaaaactctggtgaagttggacttggagatgcagtgataattgtggatcatggctcgcgtcgcaaagagtcaaatctcatgcttaatgaatttgtggagatgtttaagcataaaactgggtatgagattgtggaacctgctcatatggaattagcagaaccatcaataagagatgcttttcaatcttgcg

SEQ ID NO: 9979 - DNA, 480 bp, Glycine max
  Clone ID: jC-gmfl02220108d01d1
gggtatgcgaaacctcaacattaatgttaaatactgatacaacttggagtaagaaacataaacgaagctcctcaagaagtcacgtcgaaccaaacatgaagcaaagctcaagtgcgtcgtaataacaacttcagaacagttgcaacccaatttacagattctcttgacttccagcctgatttaatagcatccaaaacaatctagtttcacaaattaatagagcctgcatttaccagtcccagaacaaactgaacactcatctgcatgtacagccacatgctgtaagcaatgtttgattctatcattcacaacatccacaagtagttcatgtaatccaaggggtgcggttacaatgtgtgacacatctggatgttcctttgctgcctctgcacttaaggaaggaatatcctgagtccaatgccttccaggagagaggaacaaagggactgacaataatgcgatgagcacccttgttcaacg

SEQ ID NO: 9980 - DNA, 537 bp, Glycine max
  unsure (1)..(537): unsure at all n locations
  Clone ID: jC-gmfl02220108d02a1
cttgtattgacatcaattttcattgccgtgaaaccttgctttttctctctcggatagaagcaggttccaagcaattgaaaatgggcaatcggaagacagaagaggaaaggattgaaagagtaattcggagtcttttaaaacttcccgaaaatagaagatgcatcaactgcaatcttttgtctatcttgtaaggaagattgcaagaagttcacaagggaaaatcacgtacaacataaagagtaacatgcaaagagaagaatatactagaaaagttaaagggaccacaatatgtgtgtacaactttctcgacttttgtctgcacaaattgcagtggaatacaccgagagtttacacatagagtaaaatctgtgtcaatggctaaattttctccagaagaagtcactgctcttcagcaggtggcaatgagagggcaaagcagatttatttaaagaatggaatcctctgcgccattctcaccccgaatccggtaatatacacanacttcgagatttcattaggcacgtatatgtggaaaga

SEQ ID NO: 9981 - DNA, 486 bp, Glycine max
  Clone ID: jC-gmfl02220108d02d1
gacaaagaatgtaacacatttgtactttcaagcctgagaaggaaataacaagggaaatctctgaataagataaaagttgatgagaaaacaaactatccagaagaatttgatagtggtaactagatgatttgagcttgaggaggttcacatacttgtagagatgaagctttctcccttaatatttctcccgaaggacgtgcaacaggaagttgtgatttgtctacattcttctgatcatcaattgaaatttgttttaactttgattctatgtttgatagcctgcgatttctatgttctttgtctcggaacctgtcatcaacaacttcaatttttataggacttttggtcaggccggcattcctagaatacttttgcgtatatctaggacttctgctttcatcatataaaaatctgagattcttgtcatcactactagcaccagggcatgaatgaggacttatgatttcaaaacgaaaagaactcttt

SEQ ID NO: 9982 - DNA, 481 bp, Glycine max
  Clone ID: jC-gmfl02220108d03a1
gcttgaaccattgttgacacctacttctgatgccacaatatcatcattcccttcttcaaattatttatccttgcctctcatgagtgtgctcaacattgccagagagtgtggactgcaatcaactacaacctcctctaacgaagttgatgtttgtgctgtttgcctggagaggcaatgttcagtggctgcagaaggatgtgggcatgagctttgtgtaagatgtgcactctatctttgctcaacaagcaatgtttcttcggagacgtgtgggcctcctggctctatcccttgtcccctttgtagacatggaattatctcttttgtcaaattaccaggttcccaagcaaaagaaaataaattacacgtgtccctcagcctgtgtaccacatgcatgctacatccatgtgacctagatcgaccgactgtttctcatacccctgagattcgaagaaccgtgtagcttctgttccatcggagatgc

SEQ ID NO: 9983 - DNA, 530 bp, Glycine max
  Clone ID: jC-gmfl02220108d03d1
agttgaacaagtactttagcataacatttagtgttgatgggagaaacaccctcgagatcacaaaaaggacaattacaaatgtagcaacaagccgttacagcattcaaagttcttgtaaacctataaaataaatgataaacaacatatattacacagaacttcctatctgaaacaagccaaaacagatagctatttttctttttcctctccttttgaaataacacctggtttttctatgataaaaaagaaatccaattgcaatcaattgcaataacaagcagctcatactaattttactaatgctctctaaatatcataactgagaactaaaaaggtggtgggatgctgatatgcaagattatctatcacctcacatatacatccattggactttcaccatatgaggctggttaataagataaactatagactccttttttgatctaagattgtatgaagtatccacaaaataagaatggccatgtaccaacctcttaggtcaagcatttatttctgaattgcattgatgc

SEQ ID NO: 9984 - DNA, 568 bp, Glycine max
  Clone ID: jC-gmfl02220108d04a1
tgcattttctacattgcaacaccgcgatatgaacgatgcaaaatagtttcagatacgtcgcgttgattgattgatatgaagtggttgactttctggaactgcatatctatcctcgtgttgtcttttgctttcttcttcttctattgtcacacatacacatctactccttccctcatggctgagcaatcttccaagtccatttacgatttcacagtcaaggacatcagtggaaatgatgtgagtctgaataattacagcgggaaggttctactgattgtgaatgtcgcctcacaatgtggtttgacacagacaaattacaaagaattgaatgtattgtacgagaagtacaagaatcaaggatttgaaatcttggcatttccatgcaaccagtttgctggacaggaaccaggaaacaatgaagaaattcaggaagttgtttgcacaaggttcaaggctgaatttcctatctttgataaggttgaagtcaatgggaagaatgcagcgccactttataagtttttaaaggagcagaaagggggaaatattggtgatggtatcaagtggaact

SEQ ID NO: 9985 - DNA, 513 bp, Glycine max
  Clone ID: jC-gmfl02220108d05a1
ctctcgctgagcaaatgcagataaacagcagcaacagctgcgcagtgttagttcaagagaccttggtgccaacagtcctgcctcacttgttggctcccctgcaaacccttggtcaaagtggggttctcctattgggaaagctgattggtcagtaaatggagactcccttggtcgtcagatgcgaagatcatcctcgtttgagcgcaagaacaatggggaagagcctgatctctcttgggtccaatctctggtgaaggagtccccacctgagatgatcaaagagaagtttgcatctcctatgcctactgcatctgctgatggaccgaattcaaattcccaaattgaatccattgaccattctgttttaggagcctggcttgagcaaatgcagctggatcagcttgtagtctagtcaaaattgaccctttactatcttgttgagataggtatttaatttcgtaaggtacatattcttttggtgaaattttttgggaagacaacagggaagaagtg

SEQ ID NO: 9986 - DNA, 566 bp, Glycine max
  unsure (1)..(566): unsure at all n locations
  Clone ID: jC-gmfl02220108d07a1
ctcagacaagaaaaatgttaataacatattttctaatacactcttttaaatatgtttattagtgacggaatttagtgatgtattgccttttcgtcactaattctaaagttacaaaaactttagtgatgaatntttcaaaagttacatatgaaatatttcgtcactaaaatttattgaaaattaaatctggaaaattcatggttattttttttatgtgattttatagtttttaataaatttaaactaatcataaaaaatgtgttaaaatgagtgtaataaagaatatgttattgacacttgtggtatgtatactctactcgatccgatccagtgtatttttataggtaccaatttcttcttccactgttgttattgtacgtgtaccttgtgtacgaattggtcgttagatgtttctattttacgttttgctatagaaatgtgaagcagacaaagagtctcagatatagcaaaattacaagatgcaagatggagactaaatgtaattgagctacgatggcaataaaatntcttgtttcaatttggataacaatgagatgagagtgtga

SEQ ID NO: 9987 - DNA, 569 bp, Glycine max
  Clone ID: jC-gmfl02220108d08a1
attaattgcaagaatggcacttcgttgcttggtgatgtccctttctgttctcttcactcttggtcttgcgagagaaagccatgcctgagacgaagattattggcatgctgtgtggccagacactggattcgagaacattgcgagatcttctaaagcctggccctgcaagtgttgaaatcgatgatcaccctatgcaaattgaagaaacacagtacccgaaaaccttcttctataaagaagaccttcatccaggcaaaacaatgaaagtacaattcagcacgcctccctttcaacaaccatggggtgttggtccatggttaaaggaaattaaagacactactaaagaaggatatagttttgaagagctatgcatcaagaaagaagccattgagggagaagagaagttttgtgcaaaatccttgggaacagtaattggttttgccatttcaaagctgggaaagaacattcaagtactttcaagttcctttgtcaataagcaagaccaatacactgtggaaggagtgcagaatcttggagacaaagcagtgatgtgtcatacgctaaatttc

SEQ ID NO: 9988 - DNA, 564 bp, Glycine max
  Clone ID: jC-gmfl02220108d09a1
cacaattcaacgaattttaattcccacaaatctaaatcaaagccatcgcactaccctgatgcaccctctcccaaattattttttaaatgtattccatctcattctgtgtaccttccacaaccccactatataacagaccctccatattcaaaatggtgcctttcactcccagcaacaaattgcaacaatcaacaagtagtccaacccgaataaacatgatgggaaaatgtagtaagtcccttatggcgttcccaatcctcctcctacgcaccctatgcttccttttgttctcacaacccctcctttctcaggagaacaattttgttcgtcagccagctgctcaactcatcatcactccccaccatcgctcccattcagacccccaacaggtgacttgggacaaacagaatggactgcatcaaccttaaaacacattgatagcagcgactatgatgtgttcttgttaccaggagacctatcctatgccgattcccaacaacctttgtgggactctttttgtcgtttggtggagccatatgctagtaaaaagccatggatggttac

SEQ ID NO: 9989 - DNA, 481 bp, Glycine max
  Clone ID: jC-gmfl02220108d10a1
attaccacttcccaatcgcactctgcttccgttctcactttctctcacacctgaaaagtgaaaactcatcatcatgttctctctccaacaattccttccacacacttcctctaaactgcttgaccattctctttccttaaagcgccacggccaccgccgcttccaccgccactgccccaccactctcagcagttcccaccaatccggaccctcgctttgtgattccaaaactcaagtgtctcgtgttccgcttttgacttccactcaggcctatgaaaagctaaaaacatttagagaaaatataaagggcaagcaacaattccttgccatgtattctagtatttttggtgggataacaacagacccagctgctatggttattcctatggatgaccacatggtccacagaggcccacggtgtctttgatactgcagcaataatggatggatacctatatgagctagatcaacaccttgatcg

SEQ ID NO: 9990 - DNA, 487 bp, Glycine max
  Clone ID: jC-gmfl02220108d12a1
cttagagagcggtatgaaattcaccacaagctccgctatactgatgaggctcttgtagctgctgcacagctgtcctaccagtatatcagtgatcgatttttgccagacaaagctatcgatttgattgatgaagctggttcacgagtccggcttcaacatgcacagttacctgaagaagcaagagaacttgacaaggaggtgaggcagattattaaggagaaagaagaagctgttcgcaaccaagactttgaaaaggctggagagctacgtgatagagagatggatcttaaggcacagatctcaacacttgtagagaaaggcaaggagatgagcaaggcagagactgaggcaggggatgaaggtcctattgtgactgaagctgacatacagcatattgtctcatcctggactggtattcctgttgagaaagtctcaacagatgaatctgatcgccttctgaagagtggagagactttacataggcgag

SEQ ID NO: 9991 - DNA, 601 bp, Glycine max
  Clone ID: jC-gmfl02220108e02a1
tcctaagccaattctctattggttttcttctgattggttcaccattcaacgagggtccttggaaaatgtcaccttcacatctgatccagaaacttttgaacttggatttgattaccatgtggccaattcttcatctggtggcaatagaatccttggcaggccagtgaacaatagcaccataacatatctcaggcttggaattgatggcaacattaggttctacacttacttccttgatgtgcgtgatggtgtatggcaagtgacctacactctatttgatagagattctgatgagagtgagtgccaattgcctgagagatgtgggaaatttgggttgtgtgaagataaccaatgtgtggcttgtccattggaaaatggactacttggttggagcaacaattgcactgccaaggctgtgacatcatgcaaggctagtgatttccactactacaaaatcgaaggagttgagcattacatgagcaaatacactacaggggatagagtgagtgagagtacttgtggaaacaaatgcaccaaagaatgcaagtgtgtgggttatttctaccacaaggagaattcaaggtgttgggagcttatgatc

SEQ ID NO: 9992 - DNA, 133 bp, Glycine max
  Clone ID: jC-gmfl02220108e02d1
tggtcgggggccctttcgttcttccttatagcttccacatctatattcttattacctcaaatggttttgctcatgcatgttccatgcccatgggggacatattcataccatctctggtatcccggcaccagga

SEQ ID NO: 9993 - DNA, 581 bp, Glycine max
  Clone ID: jC-gmfl02220108e03a1
ctggctggttcagctgatttcaagactgaacttagtcagtcagatatgtttgatcctcgacttcaggcaaaaatactcaatgttgttgatgtctcctacggaggcgagaatgggtttaatcaggctattgaactctctgctgaaattctgtccaatgtgaagtttatccaggagaagcgattgattggaaaatactttgaggaaatcagccaggatactgggaagtatgtttttggggttgatgatactctaaaggctttagagatgggagctgttgagacacttattgtgtgggaaaatctggatatgaataggtatgtcttgaaaaatagtgctactggtgaggttgtcattaagcacttaaacaaggaacaggatgccgatcaaagcaattttcgggatcctgagagcaatgctgattttgaggttcaggagaagttgtctctgctggagtggtttgcaaatgaatacaaacgcttcggttgcactcttgagtttgtcaccaataaatcacaagaaggctcacaattttgcagaggttttggtgggataggtgggatcttgcggaccagctggatatg

SEQ ID NO: 9994 - DNA, 304 bp, Glycine max
  Clone ID: jC-gmfl02220108e03d1
atataatgccttttttttaattttatatatatttggtttttatgtttttggcttttatcaggagggagaaaaggcctctcctttgtcagctaaaccccccctgggggagagtaaaaaaaaaaaagaaggggtttggttgccccccagctcaaaggcaaaggcgtaaaaaaaaagaaaaccccgggaaataatccatgagcgggaggcccccccggaggaagaaaatgtggctagcccccctaaaacacactgggcatccccggggggggaaaaaacccctgacagggagaaggtactgacaaaa

SEQ ID NO: 9995 - DNA, 435 bp, Glycine max
  unsure (1)..(435): unsure at all n locations
  Clone ID: jC-gmfl02220108e04a1
gcttttccatggatattgtcagaggaatggcctatcttcacaatgaaccaaatgttataattcatcgagacttaaagccaaggaatgttcttttagtcaattctagtgccgaccatttaaaagttggagattttggattgagtaagcttatcacggtccagagttctcatgatgtatacaagatgactggtgaaactgggagctaccgctacatggctcctgaagttttcaaacatcggagatatgataagaaggttgatgtgtactcctttgcaatgattttatatgagatgcttgaggtgaccacctttgcangtcgtgaaccttatgaaggagcaaaatacgctgcagagggacacangcctcattttcgggcaaagggtatacccctggattgcagagttaacagagcagtgttgggctcatgacatgagt

SEQ ID NO: 9996 - DNA, 550 bp, Glycine max
  unsure (1)..(550): unsure at all n locations
  Clone ID: jC-gmfl02220108e05a1
cgaaaccggccaggtggtgagccaggaagccatcacctggtcggtctcgggttaccccaccatgaccctagaggacatggtgggagtacttgaggttcccctcaagagcaccgaattcaaccgctccatcactaaacgcggtgtcaatttagcagacctggcatgcttgccaatctcttcagggtggtatgggacacaagtggaggagaatacaaggttgattaaggtgcagtgctattccaaagaaggcactgtgaacttctacatgaaaccaattgagggtgtgactgccttggttgacatgaataaaaaagaggtgctgtcaatttcagataatggccaaaacatccctgtggctaatggaattaacactgactaccgttactccattcagaagctgaatggaggagagttgaggatgctgaatccaatatccttggagcaaccaaaaggtccaagcttcacaattaatgggcacttggtgaaatgggcaaactgggaatntcatctgagaccagacccaagagctggggatcataattcacaagcc

SEQ ID NO: 9997 - DNA, 545 bp, Glycine max
  unsure (1)..(545): unsure at all n locations
  Clone ID: jC-gmfl02220108e06a1
cactggcgcagctaccctgaggcttctcttctcttctcttctctgtcgtgagtcaccatggtgagggttagtgtgctgaacgatgctctgaagagcatgtacaatgctgagaaaaggggaaagcgccaagtcatgattaggccatcctccaaagtcattatcaaattccttttggtgatgcaaaagcacggatacatcggagagtttgagtatgttgatgaccacagggctggtaaaatcgtggttgaattgaacggtagactgaacaagtgtggggttattagtccccgttttgatgtgggcgtcaaagagattgaaggttggactgctaggcttctcccctcaagacagtttgggtatattgtattgactacctctgctggcatcatggatcatgaagaggctaggaggaaaaatgttggtggtaaggtattgggcttcttctactagtttaatttttatcaaggatgtcagggatttcaattntgagattcatcggttgtaatggaggataatgctagccccctagtagtatcaatcatagc

SEQ ID NO: 9998 - DNA, 507 bp, Glycine max
  unsure (1)..(507): unsure at all n locations
  Clone ID: jC-gmfl02220108e07a1
ccaacaatggcaatggcaacccaagcctctctcttcaccccacccctctccggtctcaaacccagcgaccgagccaccgcgccatggaaacaatcctccaccctctccttctccacctcgaagcccctcaagttctcgcgaacaatcagagcagcagccaccgaccagaccacagaggcaccggttgggttcaccccaccggaactggacccaaacaccccttccccgatcttcggaggcagcaccggcgggctcctgcgcaaggcccaagtggaggagttttatgtcatcacatgggactccccgaaagaacagatctttgaaatgcccactggcggcgctgccatcatgagggagggtcccaaccttctcaagttggcgaggaaggagcagtgcttggctcttgggactaggctcaggtcaaagtacaagatcaagtaccagttttccagggtcttccccaaggngagggtcagtatttgcacccaagggtggtgtgtaccctga

SEQ ID NO: 9999 - DNA, 571 bp, Glycine max
  unsure (1)..(571): unsure at all n locations
  Clone ID: jC-gmfl02220108e08a1
cacaaagtcacaatggaccccctctctctcttctgcaccggagccctcctcgccggcggcctctactggttcgtgtgcgttctgggccccgccgagcagaagggcaaacgcgccaccgatctttccggcggctccatctccgccgagaaagtccaagacaactacaaacagtactggtccttcttccgccgcccaaaggagatcgagaccgccgacaaagtccccgacttcgtcgacaccttctacaatctagtcacagacatctacgagtgggggtggggccagtccttccacttctccccctccatccccggcaagtcccaccgcgacgccacgcgcctccacgaggagatggccgttcgatctcatcgaggccaagcccggcaacagaatcctggatgtgggcctgtggcgtgggcggtcccatgcgggccatcgcggcccactcgcggcncaacgtagtcggcatcaccatanacgagtaccaggtcaaccgcgcaaggatgcacaacaagaagcagggttggagtccctctgcaagtcgtgtgcggaattttctcagatgcccttc

SEQ ID NO: 10000 - DNA, 555 bp, Glycine max
  Clone ID: jC-gmfl02220108e09a1
ttcaacaccggaataagtgggaaattgtcttcactgacgatgaaggtgacatgatgcttgttggagatgatccatggcctgaattctgtaatatggtgagaagaatcttcatttgttccagccaggatgtgaagaagatgagttgtggaagcaaactgccgatctcctcagtggaagacgggactgtaataagctcagacacaaccgaaacctgaaacttttgacattctttcctgtggttttgcgtttgtttgtcagcagcacccaaatgctgatccttcttgttgcttcaaattgtttgtgggaaggaagttggtctatttgggctggggtaagtttcatgttatcagatgtgagacactagctaattgtaacttaatttgtagagacaccaccaccaggcattaattgtgctagaaaaaaaaagacctaaacagatttctttaataaattagtaagtgggaagatggcaaatttaggcttagtatattggatattcatgtcaagttggaagaagaatgtggggggtttgatgttttgaaagacttgcctttt

SEQ ID NO: 10001 - DNA, 472 bp, Glycine max
  Clone ID: jC-gmfl02220108e10a1
cactggcgcagctaccctgaggcttctcttctcttctcttgtctgtcgtgagtcaccatggtgagggttagtgtgctgaacgatgctctgaagagcatgtacaatgctgagaaaaggggaaagcgccaagtcatgattaggccatcctccaaagtcattatcaaattccttttggtgatgcaaaagcacggatacatcggagagtttgagtatgttgatgaccacagggctggtaaaatcgtggttgaattgaacggtagactgaacaagtgtggggttattagtccccgttttgatgtgggcgtcaaagagattgaaggttggactgctaggcttctcccctcaagacagtttgggtatattgtattgactacctctgctggcatcatggatcatgaagaggctaagaggaaaaatgttggtggtaaggtattgggcttcttctactagtttaatttttatcaaggatgtc

SEQ ID NO: 10002 - DNA, 432 bp, Glycine max
  Clone ID: jC-gmfl02220108e11a1
catcaccatcactgtaaaaagcttaacttgcaacgggtgttcttgtcttgcccaagtgttctgccatattatactggttgattttatataaaatcgtaaattttcctcctattggtttcgttagcctgtaggcaatatagcccccacatggagaagtaggaatttatacaagggcaatctgtgctctatgtaattttaatgtagagaccatgcgctgctaaacatgttgagacactttatatattacctagggaagacttttttctgtgtttttaaggatctctcgattcattgctttgttgtctttccaggtcagctgtaagttgtatcattctatcattctgtttgaccttaagccatgtgttctaaattattgtcattaatttattttatgaatatttttttttaaaaaaaaaacaccatacaatcaag

SEQ ID NO: 10003 - DNA, 473 bp, Glycine max
  Clone ID: jC-gmfl02220108e12a1
cttccccaggaagtggaactatcttgtgttgttcatgtttagatacctgatgaacctgtgtttggtttttggttttgtgactgacaccaatccgataataatactgattctttctgaatatccttctttggtgacacgtgtcagatcatgtgacagctgaggtgagggttgagaaactgcccaaggcttgaactgagcactacatggctaccactgggtatgatgaaaacggagataacagaggcggtatgtgggttttggaacagaagattgaccatccaatggatgaacaagctgaaaggctcaaaaattcgctcagataagaaagactttttacattgctgcttctgcggcttgcatatcctagacttggtgtactataaggagattcgtgaacttaccatttattcgcattatataatacattccctcaacaaatggacagtctgaggatgtgactggagcttgttttt

SEQ ID NO: 10004 - DNA, 567 bp, Glycine max
  unsure (1)..(567): unsure at all n locations
  Clone ID: jC-gmfl02220108f01a1
ggatgccttctctgctgcagttattgtcaatattgctttctcttttatacctgcctcatttgccgtttcaattgttaaggaacgtgaagtgaaagctaagcagcaacaactaatcagtggggtttctgtcctgtcatattgggcttctacatttatttgggacttcgtgagcttcttgtttccggcctcttttgccatagttctcttttacgtctttggtctggatcagtttgttggaggggtttctttgttaccaacaatcctcatgcttttggaatatggacttgcaatcgcatcatcaacttattgccttacatttttcttttttgaccataccatggcgcagaatgtggttctcttgatccactttttctctggattgatactgatggttatctcattcattatgggactcatgccatcaacaatgagtgccaattcttttcttaagaattttttcagaatatctcctggattttgtttcgctgatggtcttgcttcactagctcttttacggcaaggaatgaaagataaaacaagtgatggngtgtttgattggaatgttac

SEQ ID NO: 10005 - DNA, 404 bp, Glycine max
  Clone ID: jC-gmfl02220108f01d1
cttattgtcttttgctctgtttactttcattttatagtgatcaatttggttgtatagaaatgcttggagatattattcctagaccccgcctagaaaccatcctaaagaaccacgagctccaccaccgtgaacttaaaccccgccagcggcacggacccagagggggggggcaaaacccggcgattaaaaaacgtttactcccagaatggaacaaaggcccggacataaacaaaaatgtctactttggcgaatccatcaaaacccaaaccggcccgtgggccttgaggaaaggctgccctaagccgggcccctcctgggccgcacggcccaagagcaaagcctggagcccaagggcgagaagggcgtgcgtgcatgcaccatcaccaaacaacaaatgttcgcta

SEQ ID NO: 10006 - DNA, 555 bp, Glycine max
  Clone ID: jC-gmfl02220108f02a1
ttcagaaaacgcagattttctctgctaaaaaccctactgggtcaattagaacaaagaaaaaaaaacttgattcatcccctgtttcgaagaaaggggggatttttctagggacccagttttcgtttcagtgccgcaacacaatcgagtttctgttggcttttctaaatgcatgagttcgatttgattttcccctgctcctgccactccgttttttgtttctgttcaaacactcactgatagaaaaaaagattcgagaattggttttgttttcattggtgagttggaagtgagagtggcattgctgaagtgtaattccattgaaatgagggaaattttaatgagagggcaatgaaaggggcgtctgagattttagagataataagatgagtggtggatcattgggtattcgttctgggagttatgggtctttggagaagcagcagcagcagctacagaacaatggtgtgtcgcttattcaatcagcacgcaaacccaccaagacgctgaaggagaaagacaggttctttctttggatcttcaagtttgctggcagaa

SEQ ID NO: 10007 - DNA, 385 bp, Glycine max
  Clone ID: jC-gmfl02220108f02d1
gggtcgtgaatatatttttcatggagtacaagtgagagcgactacactttatcctatagtaatggagcaacagagtgggttaccacatgtgaggaatttggtcgcaagtgacaaccctgatatcatgataattattgaggattttttaactctatatacaacaaaaaagaataacgatgaacgaattgcacaaagtaaaaagaatgaggggcgtctatgcggaaccgatacaacactcatcttccctccggggctgtgctatgaaaatgatttgtgtagggggaatgccaaaaccaaaatgatcaatcatataatcacacaaccaaaactgtataattggcttcatggttatggtccttgcttccggcacgaatttaccgggggg

SEQ ID NO: 10008 - DNA, 515 bp, Glycine max
  Clone ID: jC-gmfl02220108f03a1
ttgatcacaagaccctctattatgatgtagacctgtttctgttctatgttttatgtgaatgtgatgatcgaggttgtcacatggttggctatttctccaaggaaaaacattctgaggaatcttacaatttggcatgtatcctcaccctaccaccttaccaaaggaaaggctatggcaaatttctaattgcattctcatatgagctgtccaaaaaagagggcaaagttggcacacctgaaagacctctttctgaccttggactgctaagctacagaggatattggaccagggttctcttagacattctgaagaagcataagggaaacatttctatcaaggaactgagtgatatgactgccattaaagctgaagacatattaaccactctgcagagcctagaattgattcaatacaagaaaggtcagcatgttatatgcgcagatcccgaagtgttggatcgccatcttaaagctgctggcagagggggcctggaggttgatgttagcaaactgatc

SEQ ID NO: 10009 - DNA, 371 bp, Glycine max
  Clone ID: jC-gmfl02220108f03d1
aaaaaaaaatttccctgttgccttcatcattagaaacgaagatccaaactaaacatattcctacgggtacgggtcagcacatagaacaatcaggtatgtgcctattctcatctaaaaaggtattaaatcttatttggaaagaccaatccatcaaagggtttgtccaaaaaacctagcctacatatactttatacacaaaagcacaagttacatcacatcatagtatttccttgggggatatgaccaatgaccatcaactttgttctttataagggggccagaacagttgggtaacataaacctgcaggccccctttgccagcagctttaagagggcgacccaacacttttggatgtgggcatataacatgc

SEQ ID NO: 10010 - DNA, 51 bp, Glycine max
  Clone ID: jC-gmfl02220108f05a1
cgtgatccagtctatactactatagtagaccgaaatataatttcggggcga

SEQ ID NO: 10011 - DNA, 470 bp, Glycine max
  Clone ID: jC-gmfl02220108f06a1
gaaaaacacacacacaaacaccctttgagttcattaacctcttcagaaaaaacaacaacaacaacaaaaaaaaacatcatcatcaaaaaaacttccgagagtttaatggcaacacgcgtgatccctccaagaatcctcaagaagctccgttacaacacaacaaccaagccactcaacgctgcccacccctcaatctctccagtcatcgccccaccgtcactcttcgagaggtcgccgtcccctgtcgcggatgctgtttcaacaacatccacgactatggagacggcgaatctcaacctcgacgacgcggagcggcttttcgcgtcagtatcgacggaaaagctgctccgggtcgtcccgcggttttgcatgcgacggcggtggggcccatggtagacctgggaatgtggttgatgaagtctcccgtgttccagaccgggctgccaaaggatctcatcatgggccgcacg

SEQ ID NO: 10012 - DNA, 549 bp, Glycine max
  unsure (1)..(549): unsure at all n locations
  Clone ID: jC-gmfl02220108f07a1
ggatggcaaacacaaacagcgacaccaaagaagaaagcaaaaaaatggatgaaagagagacaatacctctcctcacctcatacaagatgggaaattttaatctatcccacaggattgtgttggcaccgttaacacgatcaaggtcttacaacttcgttcctcagccgcatgctgctctgtattattctcaaagaactactaagggtggcttcttgatcggggaagctactggtgtatctgatacggcaaaggatgggtaccctaatacacctggcatttggacaagagaacaggtggaagcttggaaaccaattgtgagcactgttcatgagaagngaggtattttcttttgtcaactttggcatgctgggaaagtctccaactatgatgaattccaaccacatggtgaagccccaatatcaagcacaaacaagcagcctcgtaaggaaatccccacgctgtcaatgnattcgtaattgcggccaaaaatgccatggagcgggttttgatggaatagaactacatggagcagatgggtacttgctggat

SEQ ID NO: 10013 - DNA, 563 bp, Glycine max
  unsure (1)..(563): unsure at all n locations
  Clone ID: jC-gmfl02220108f08a1
ctcgagccgattcggctcgaggcgctacgtctgtgatcatctcttccaacatctaaaacgatttgcatctgagcagaagtccatgtctatggaggttattcggaaggcataccaagccacagaagaaggttttttgtcagtggttaccaaacagtggcccatgaatccccaaattgctgctgtgggatcttgttgtttggttggtgtgatttgtggtggtatcctctatattgctaaccttggtgattcccgtgctgtgcttggccgggtggtcagagcaactggggaggttttggcgatccagctttcgtcagagcataatgtggccatagaatctgtgagacaagagatgcattctttgcatccggatgactcaaaaattgtggttctaaagcacaatgtatggcgggtgaagggtctgatacagatttctagatccattggcgatgtatacctaaaaaaggctgaatttaacaaggaaccgttgtatgctanagttcgtgtgccggaaggttttaagaggcccattttgagctctgacccatcaatttctgtccatgaac

SEQ ID NO: 10014 - DNA, 556 bp, Glycine max
  Clone ID: jC-gmfl02220108f09a1
ctcggggaattccaattccacattttcaagaaataaggaggcaaaaatgttcatatatgaattggaattatttgttttcttattaggcctatcctgaagccaaaggaaatgagatcggaattcctcggggaattccatttcacattttcaagaaataaggaggcaaaaatgttcatatatgaattggaattatttgttttcttattaggcctatcctgaagccaaaggaaatgagatcggaattcctcggggaattccaattccacattttcaagaaataaggaggcaaaaatgttcatatatgaattggaattatttgttttcttattaggcctatcctgaagccaaaggaaatgagatcggaattcctcggggaattccaattccacattttcaagaaataaggaggcaaaaatgttcatatatgaattggaattatttgttttcttattaggcctatcctgaagccaaaggaaatgagatcggaattcctcggggaattccaattccacattttcaagaaataaggagggcaaaatgttcatatatgaattgg

SEQ ID NO: 10015 - DNA, 549 bp, Glycine max
  Clone ID: jC-gmfl02220108f10a1
agctaatgccggtgattcacgttgtgtgatatgtaggaagggtcaggcgtatgatttgtctatagatcataaacctgatattgagattgagaaggaaagaatcataaaagctggtgggtttattcatgcccggaagagttaatgggagtttaagccttgcaagagcaataggtgacatggaatttaagcagaataggttcctttctgctgaaaagcaaatggtgacagccaatccagacatcaatactgttgaactttgtgatgaagatgaatttatagtgctggcttgtgatggcatatgggattgcttgtcaagccaacaattggtagattttgtacgtcaacaactgctcttggaaagtaaactttctgcggcttgtgaaagagtactagatcgatgtttggcacctacaataactgttggtgatggatgtgataacatgaccatgattttggtgcagttcaaaaagctggctcaacaagtgcaccagcataagagctattctcttcaaatgaaacagctacatcagaattaagactagagagcag

SEQ ID NO: 10016 - DNA, 467 bp, Glycine max
  Clone ID: jC-gmfl02220108f11a1
atattaagaataaggggaagaagtaacctgaaccatcacatgtaatgcatcaaatctctcgcaataggtaaaaggcctactaaagccaatataggattaatttgtacactacaatgcaaagcggcaaccacttccatcaagaaaccgatctgtatgccaccctttgcactgtaattcttttataaaggcagggaagacctcattcattttctcataggcctgtagcagggtactggtactgagctcgtgagaggacttgccaatttgtacagcatatgaagcaactagccaccctctcaatgcatctttgccgatagcatcctgctccaataccatgtcgatgcacctattatcaccatttaaaataaacttttccccagggaatacttgttttgattcaagaagccttgaaggcttaataaccttgtgcaaatccctaccaactcttacattttcagcatttttta

SEQ ID NO: 10017 - DNA, 383 bp, Glycine max
  Clone ID: jC-gmfl02220108f12a1
attaattgcaagaatggcacttcgttgcttggtgatgtccctttctgttctcttcactcttggtcttgcgagagaaagccatgccagagacgaagatttttggcatgctgtttggccaaacactcccattccaagttcattgcgagatcttctaaagcctggccctgcaagtgttgaaatcgatgatcaccctatgcaaattgaagaaacacagtacccgaaaaccttcttctataaagaagaccttcatccaggcaaaacaatgaaagtacaattcagcaagcctccctttcaacaaccatggggtgttggtacatggttaaaggaaattaaagacactactaaagaaggatatagttgtgaagagctatgcatcaagaaag

SEQ ID NO: 10018 - DNA, 550 bp, Glycine max
  Clone ID: jC-gmfl02220108g01a1
atttcagttaccttgaaccacctccacttccaaacagagtctattattcagagagaattccaagggagcaggcagatttgctgaaccgatctacaaagtcagatgatgctcatggttctcacttactcatgtcagatttgctttctgacttcagccagaagaattcaattacagaatccagtgacatattgcacagtgggaatatgtcaaatctgaacatgatgtccagctcagcagcaaagcctttgcaagcagatggccatactattaatgatgtcccgccacagacatacaaacagttgcctgatacgacaagtaaggtgaattcgaagttattgcagcatgtgaattctgagtcgaagcaagtgttagaagataataaagtttctagaaatgaggatcaggtccttagttctgaaaacagaaccaaaggtgctgaacatcttgcatttcatcgggttccttctgttgaacacaatcagaatctaacatctaaacttccagacctcaatttgtctgaggtttctaccagggagtctgataatgatac

SEQ ID NO: 10019 - DNA, 351 bp, Glycine max
  Clone ID: jC-gmfl02220108g01d1
ctctctcatttttcttatagtcttcaatggttcctactgttattatggggaccccccaggcccctgggaaaaccctagaaacgaacttggttattggccccggaggatcgttcgggggttgcctacgcccacttcagtgttgagatcccagtgattaatgttgccggacccgacaacgtggatggacacaaaatagagatgcccgtgaagaacgaggaggcttgcgataatggggcgttattccaagaagctgatgacggagtggatcaacaactcgtggtctagatgacccgcctggcggagagttctttgctttggcaccgggcgagaagctttcacatgatatgggcg

SEQ ID NO: 10020 - DNA, 537 bp, Glycine max
  Clone ID: jC-gmfl02220108g02a1
aaagcatcccccccaagctacaagcacccaaaggggaggaataataataagcctaacttctaaggccaaaaaaaaaaaaaaaatagcaaatatgtcaggaaagatcattatctcggctgtttctctcatcctggtggtgggtgtggcaatcggcgtggtggtcgccgtgaacaagaagggcgaggatcctgcagttgaatcccaccaaaaatacgtaggggtcatatgccaaaacaccgatgagaaaaagctctgccatgacaccctgagctccgtgaagggcatggacagcgctgaccccaaggcctacatcgccaccgctgtgaaagccaccatggacagcgtgaccagggccttcaacatgagcgacaggctcaccacagagtacggtggcagcgataacggaaccaagatggcccttgacgactgcaaggacctcttgcaatcagccatcgagagcctccagctcagcactgacatggttcacaacaacaacgtccaggccgtgcataacccacaggctgatttcaagaactg

SEQ ID NO: 10021 - DNA, 402 bp, Glycine max
  Clone ID: jC-gmfl02220108g02d1
aaataaatcatgtaatttttattaaaaatattatccggagacctccaaagataaatgcaaagaataacaaattgtcacacggactatgaccctcaacatgacaaacgctaacactcagttaatagagtgagcattgatggatatacggtttaatttcaagctttcatgaagttaagtgcatgaggaacatggagagccttcaaccagacagttccaccgttggaaccagcctggaggaattgggcaggggtgaactgagcagctatttgctggctaatgagaccggggaaacccttccacttgatccttccgttaacgttggcaccaggtccatcggtggtgaattcagcgtagtacagggtgtcatagaagtgttcaccggcccatgggcaccatccttcc

SEQ ID NO: 10022 - DNA, 585 bp, Glycine max
  Clone ID: jC-gmfl02220108g03a1
ctggaatagtaatccaagggggatccattgtgtctgatcctgagttctactctgtgagatttgagaacaaggcttacctagctcgtccatggaagaattactctaggaccatcatcatggacacttacattgatgatttgattaatgttgatgggtatttgccatggcaaggactagagggtccttctggtatgaatacttgcttctatgccgagtaccacgacagtggcccgggttcagacaaatctaaacgtgtgaaatgggctgggatttggaatctcaattcaaaagctgcacgttggttctcagcatctaagttttttcacggaactgactggattgaagttactgggattccttgctttcgtgacattcccgcacaccataggcacaaaaagacaaggcttaattggtaataaaagtgatgagttgtgaaagcaagaaatataaattaattaataaggaatgattgagcttctttattctttaattattttgatttcattaattaattttagagtgagctacatttttgtatctcaaggaattgaaatcaatgtaacgtaattcctctttgatattttt

SEQ ID NO: 10023 - DNA, 464 bp, Glycine max
  Clone ID: jC-gmfl02220108g03d1
gattgaacatgttttgttagttattgtgactttgaaaagttgtcataagtacatgttctcatttataggaatacttttgacacaaaagatccttacattgtcacaccattagcctcgataccctttcttaggaaatacaatgggtaaaatatctagaagacccatttattagtcactaaacaaaaaaaaaaatatcaaagaggaattacgttacattgatttcaattccttgagatacaaaaatgtagctcactctaaaattaattaatgaaatcaaaataattaaagaataaagaagctcaatcattccttattaattaatttatatttcttgctttcacaactcatcacttttattaccaattaagccttgtctttttgtgcctatggtgtgcgggaatgtcacgaaagcaaggaatccccagtacttcaatcagtcagttccgtgaaaaacttagatgctg

SEQ ID NO: 10024 - DNA, 449 bp, Glycine max
  Clone ID: jC-gmfl02220108g04a1
ggaaggccaaggaagacgcttctttttctaaagcgacaatgacgaaaattattaaagagatgttgcccccggacgtgcgtgtcgccagagatgcacaggatttattgatcgagtgttgtgtcgagtttataaaccttgtctcgtcggagtccaacgaagtctgtaacaaagaagaaagaaggacgattgcaccggagcacgtgctgaaggctttaggggttcttggatttggcgagtacattgaggaagtttatgcagcatatgaacaacacaagttggagacaatgcaagactctttaaaaggtgccaagtggagcaacagagctgagatgactgaggaagaagcattggctgaacagcaaaggatgtttgcagaggcacgtgcaagaatgaatggaggagccattactttcagcagtcagacgctaccaaagtttagagagcttact

SEQ ID NO: 10025 - DNA, 496 bp, Glycine max
  Clone ID: jC-gmfl02220108g05a1
caaatatctctccgttaatgctctcaccacaaacttcaatagactagccaaaagctaacaccaactataggccaaatcaccaataaatattatttcccgttcttttggcgtgttggccacccactgaacacatttgcactcacacatagaagcagagagaggccattggttggtttcagagatgggaagcatgcacatagaaaccccagaaacttttgctgatggtagcaaaaacttcgatgatgatggacgagctaaaagaactgggacttggattactgcaagtgctcatatcataacggctgtgattggttctggagtgctatctcttgcatgggcaattgcacagatgggttgggtagctggtcctgcagggctctttgtcttctctttgataacatacttcacctccactcttctcgctgactgttaccgttcacctgaccctgtacatggcaagcgaaactacacatattctgaggtttgtcaaaagcca

SEQ ID NO: 10026 - DNA, 363 bp, Glycine max
  Clone ID: jC-gmfl02220108g06a1
gaactgtatttgctccactttatcggttgaagattttgctacaggttcagagtccccacagtattaaatacaatggaacaattcacggtctaaaatatatatggagaactgaaggttttcgtgggctgttcgacgggaatggcactaattgtgctcgaattgttctaaattctgctgtgaagttcttcagctctgatcaggcttacaaaggtatactacatctgtttcagatgcaaactggatacgaggatgctcagttgactcctctttttcgacttggggctggagcatgtgcgggaataatagccatgtctgcgacttatccaatggacatggtttgatgcagaataactgtacagacag

SEQ ID NO: 10027 - DNA, 539 bp, Glycine max
  unsure (1)..(539): unsure at all n locations
  Clone ID: jC-gmfl02220108g07a1
acaaaacaaaacagtaagctaagcttcactgccatgcctgcaacgccattctcgtgttcgttcctcactcttcaaccgcgcttcaactcctacgttaaccccatcttccgttcactcaccttccaactctcttcttcgccgctcccattcaatgccaacttctccagcgtcagactccactcttcgctctcgcgagcggcggagaccgattctccgaccggcggaaggtccggcgcgctaactcccggtcccgccgtcgccggtgaagttcaaaagatcgacgtgaatcctcccaaggggacgcgcgacttcccgcccgaggacatgcgcttgcgcaactggctcttcaatcatttcaaagagggttcgcggttgtatggatttgaagagggttgattacccggtgcttgagtcggaggcattgttcactaggaaagcaggagaagaaataanggatcagctttattgggttgaagatcgaggcatcgccgtgttgcattgaggcctgaacttactccttctttggcaaggctggtgat

SEQ ID NO: 10028 - DNA, 471 bp, Glycine max
  Clone ID: jC-gmfl02220108g08a1
cggctcgagccagggtgaacccggtgctgtcattcgagggaagaagggtcctggtggtgttactgtgaagaagaccggtgcggccttgatcattggcatttatgatgaaccaatgactccaggtcaatgcaacatggtagttgaaaggcttggtgattatctcattgaacagggtctctaatctttgcttaatgtcttgttatcgtgcatatttcattggcttctgtacaagtttttgcatcgacctggactggaatgctttgattgcagtgtaataatcttgtgagtatgaaaagtcacgggatctgcgtgttgcgaagaaagtgtttgatgcttgagaaatgatgactataatctctatctttgtacttttttagtggggtacctgtatacattacactggttttaaatttttaatgctatggtataatggttggcatatttatcaaaagtttgcagattcttcttgtc

SEQ ID NO: 10029 - DNA, 579 bp, Glycine max
  Clone ID: jC-gmfl02220108g09a1
ctcatacatacccctccgtttttggttggattctcggctttttagattccgtttctggtttttcccaattccaaagtagtctgttatcatcgtcatccctttataggacagacaaagctgattcacttaggagcctcaagagctatgtctacatcttctcgtgctcttcccactcccttggaaaacaagtatatgaaacccccagattcttttcagctttcacccgtcagagatctgactgcaaattctgcctcatcaaattcaatcagaagtgctgggaagatgttgtcttcaccttctgaatgtcccgatgatatccctttttcctttgtttctcagacatcaggtgacaatgtgtcttccgaaattcattcaacagcattgatttctcaccctcaagaataatgaagatctttcctggggaccagatccatttcaggatattcttggctttcctgaaaatgtttctgtccagcatgatcaggtgcaaaacaatggttgttacataaatgatgataatgtcaaaagatctgattttgggagtgggttgatcagttaatgtcaattgatgattctctt

SEQ ID NO: 10030 - DNA, 467 bp, Glycine max
  Clone ID: jC-gmfl02220108g11a1
tcaacgcacgaggttgaagttaccgcgccggcttccgctgttcttgcgccaccgggtttctatctgctgtttgtggtccatcaagaagttccaagccacggtatttgggtccagatggtgtgaaattgtgaattctcgtctctgcctgctcgacaacttcgttcgtatatgttctttttattcaagttatttattgttgtgaatgtctgggagtgaacagattcttgagtgagtatttaaactgtaagatatgggaagataaaattcaaataaagccatttatggcctatggggcgtgtaaataataccctaggaagtttgtaattatagttcatggatatttctttgcaattcttaacattgtgtttggtcagaagtgtaaacaaaaaatttgaaaaaaaaatagaaaataaagttattttattaaaataaaaatgaatgaaaaaatatttaaattgaaacaggtt

SEQ ID NO: 10031 - DNA, 455 bp, Glycine max
  Clone ID: jC-gmfl02220108g12a1
ctcgctccctcgtgcaatttcaaaattacattacactctcttcgacctcgcatcgcaccttcaacttaacctattccacttgtaatcgtaaacgctttgctagaagaagagacaaagtgtgtctgcgtgtgtgagagagagagcaatggctggctcgtgggcacgccgttctctgattgttctagccatcatttccttcggatgtctatttgcgatttccattgctaaggaggaagccaccaagttagggacggtcatcggcattgatcttggaacaacctattcatgtgtcggtgtttacaagaatggccatgttgaaatcatagccaacgaccaaggtgaccgtatcaccccatcgtgggttgctttcaccgacagtgagagactcattggggaggctgccaagaatcaggcagctgtcaacccagaaaggaccatctttgatgtcagagact

SEQ ID NO: 10032 - DNA, 599 bp, Glycine max
  Clone ID: jC-gmfl02220108h01a1
aatgtcgaataaattttttaaattttaggaatttatttgatatttttctaattcagggactgctataaatacgcccagcatattcagggagtattgattaaaatggggtatactcatttctcaggtgacgctggggatttttatcttgtacagaatattgattttgaaatgtaattgtattgggcttcatgttctcacttattttctgcactttatgcaatgccttctatttctacattttactgtgatagattctcttgcatccttctctttcacatttatttgaatccttcatcctatctttttgatggcagagtttgaaaggaagggatgaaccggttgacatggcgggaggaaattcaccacatgttccgtatgcctcagagtcatatgtagatgcccctgaaagatacccaattcctcaagctgaactacatgatattgatgatccagcagctttctcttctaattaccaacacatatcagttgaagagaggaaagagcatcttgtggttgctcgaaacagtctcgaattgctctctagcatattgaattctgatgcagagcctaaaactttgaaggaagattaaccgtgagct

SEQ ID NO: 10033 - DNA, 437 bp, Glycine max
  Clone ID: jC-gmfl02220108h01d1
aacttacataacaaaacattattatcatatataaaactgaaacaagagtccgattttctaatctgtactccaatgtgcgcgattagttgtttccacactctatgcacttaccacagtgctaactttatccccttcgcgcattaataatataaggaagcggatcaaaatgtgggaaccacttaatattatgagaaactagcatgatctcacaaggatgttatcacaatcctcgggatggaaactcctgcccattacacatttgggcaatgaaaatcacccgcatagaaggactatagcttattacaagatatgaacaaagacctgataaaatgcgaattacaagatacatatgccaactatgctttgctcattcggtatctcgcttggaactagattcagcattcttctccttcgtgccatcatactactattttagt

SEQ ID NO: 10034 - DNA, 555 bp, Glycine max
  Clone ID: jC-gmfl02220108h02a1
ctcaaagttcttaccttttctgtccaaattctgattctcttcatggatttcccgttcctggaaaagctgaaaatttggaagaaaaaagcagagcaagaagaagaaggtcctcctctggtgtggttcgaaacctctgccactgtttctcgccgcttccagtttgaacccaatggccaactttctgtaacgcttgttggtgattctaggccattataccacaggattgttgactctttcttgaataaatttttcccttcaggatatccatacagtgtgaatgaaggttacctcagatacacgcagtttcgagcactgcaacacactgcgagtgccgcgctatcagtgttatcaactcagtcactgctatttgctgcaggcttgcggcccactcctgcacaagcgactgctgttagttgggttttaaaggacggtatgcaacatttagggaatataatatgtagcaagttgggtgcaagaatggattctgagcctaaacgttggagaatcttagctgatgtgctctatgatttagggactggtttggaagttctttct

SEQ ID NO: 10035 - DNA, 538 bp, Glycine max
  Clone ID: jC-gmfl02220108h02d1
ttatatactggctgtcgagctccttgacgagccggacctaaatacacgcgtgcgtacgctctgactagtcgtcgggagtaccactttccaatcgcactctgcttacgaacacacactctatcacacctgaaaggagaaaactaatcattgatgtactctctccaacaatatgctaacacacacattcatgtcactgtttgaccattctgtcaccttaaagcgccacgggcaccgccgctatcaccgacactgacctaccagctctcagtaggcaccgaccaatccggaccctggctttgagataccaaaactcaagtgtctcgtgctccgcttttgactttcactcaggcctatgaaaaggtcatgacatttagagcaaatatagagggcacgcaacactttcttgacatgtattctactattgctggtgggataacaacagacccagctgctatggttattcctatggatgaccacatggtccacagaggccactgtgtctatgatactgcagcaataatggatggatacctatatg

SEQ ID NO: 10036 - DNA, 431 bp, Glycine max
  Clone ID: jC-gmfl02220108h03d1
catacccatcactgatcaaagcttttctcttatcggacgttctctgacagcccaagagtggggacatattatactggttgattttatataaaatcgtaaatattcctcctataggctgcgttagcctggaggcaatatagcccccacatggagaagtcggaatcaatacaagggcaatctgtgctctatgtaattctaatgtagagaccatgcgctgctaaacatgttgagacactttatatattacctagggaagacttttttctgtgcttttaaggatctctcgaatcattgctttgttgtctttccaggtcagctgtaagtggcatcattctatcattctgtgggaccttaagccatgtgccctaaattattgtcattaatttatttgatgaacatgttctcttaagccacggggttttgatacctgc

SEQ ID NO: 10037 - DNA, 378 bp, Glycine max
  Clone ID: jC-gmfl02220108h04a1
aaagaaaactactaagtgaataaaaatggccggatttatgaaaaatccagattcattgactgcctgcggtctaaagcgtatgaacagacaggtggcgacccaattgtcctgggctgacgtctggaggcatagaacaaccaattttttggcgaagagcatgggactgctctttctagggattattgggaattgtgaaggagcatatcacggtagggtcgtttatagctcatggcacctggaagaactctacacttttggccggctcaggaagaataaccttcaacatagggaatcgttacttccatttgagacgaatgaaacgaaggagcactacccaaatatggtcggggtttaaaactcggtgggcaagaatgccca

SEQ ID NO: 10038 - DNA, 473 bp, Glycine max
  Clone ID: jC-gmfl02220108h05a1
tgagtctgctttgataaatccttcagctttagtgcccgatccatggcaagtatctagtgagacattaaccagcattgaccctgaagcagtggctgttgaacctgcactagttccatgtgttcaggcttatgttgattcagttcttgatctagcttcacactttatcacccggttgcggcgttatgcaagtttctgccgtacattggcaagtcatgctgtaactgcagggacgtgaaataaccgaaatgtggtagctagtcctgcccaatgttctgcaactcctgcaacaagtcagggaggtcaaaatgggacaaccagttctagtggaagcacacagatgcaagcttgggtacaaggggccattgccaagattagtagcactactgacggagtgtccaacccggttctaaccccccatcagtggtccttcgtcctttatgcccataagcattaatacaggaaactttccctga

SEQ ID NO: 10039 - DNA, 533 bp, Glycine max
  Clone ID: jC-gmfl02220108h06a1
gttcttcatcatagtcttaaacattaaaccttagcaaaactcaacaatgctagacatcaaaggctacctcgtactcttcttcctatggttcatatcaaccattctgatacgttccatcttcaagaaaccacagcgtctaagactcccaccgggtcctccaatttcaatacccttgctgggacacgcgccatatctccgttcactgctccaccaagcattgtacaagctatcactgcgctatggacccttgatccacgtcatgatcggttcgaagcacgtggtggtggcgtcgtcggcggagacggccaagcagatcctcaaaacctcggaggaggcattctgcaaccgtcccttaatgatagcgagcgagagcctaacctacggcgcggcggactacttcttcatcccctacggcacatactggcgggttcctgaagaagctctgcatgacggagcttctgagcgggaagaccctggagcatttcgtgagaatccgcgagagcgaggtggaagcgtttctcaagagatgatgg

SEQ ID NO: 10040 - DNA, 411 bp, Glycine max
  unsure (1)..(411): unsure at all n locations
  Clone ID: jC-gmfl02220108h07a1
aatagataataaataaaaaaagagaaaagagtaagaaaagaaaatataaaaataataaaaataaatataaaagaatgagaaaaatataaaattatanttaatttaaatgaaaaaaacagggggataggcttgtatgcnagancngaanatngaaattaaaaanaggaagaaaaagaaaaaanaaaaaatngaagaaaaaaaaaaaaaaaaaaaaaaaaatttttttataaaaaagaagatataattaaaaagggggaaaggagaaaaaaaaaatattaaaaaaatatataaaaaatntaataaagaaatttataaaaaaaagagatgaaaaaaaataaaaaaaaaaaagtaggaagaaataatataaaaaaaaaaaaagaaaaaaaagtgaaaaaaatatatagtgggagg

SEQ ID NO: 10041 - DNA, 416 bp, Glycine max
  Clone ID: jC-gmfl02220108h08a1
cttttacttctcctaaccttcttttttattaacaggagaaggaatcacagggacaggatacacaatggctcccgctttcactttcaccaaaaccctaattctcttcgactccctctcctgccttcttcctccaacccactcggcccgcggaccccgcaccgtgcaggcccgtctctacagcctctgcaagcccaccaccaatgttgggctgtgctacaggaccatcctgccggaggtgctgggcctgccccgcttcaactattacaaggccctcgaggtggagatgctcgcgacccacaaacaggtggagaaaacctctacgttgatcagcgtgctcctggcgaggcccggaaacttgaaggatcctggcgactcactccagattttgaaggagcagtacgggaacatcatggact

SEQ ID NO: 10042 - DNA, 521 bp, Glycine max
  Clone ID: jC-gmfl02220108h09a1
agcataacatttagtgttgatgggagaaacaccctcgagatcacaaaaaggacaattacaaatgttgcatcaagccgttacagcattcaaagttcttggtaacctataaaataaatgattaacaacatatattacacagaacttcctatctgaaacaagccaaaacagatagctatttttctttttcctctccttttgaaataacacctggtttttctatgataaaaaagaaatccaattgcaatcaattgcaataacaagcagctcatactaattttactaatgctctctaaatatcataactgagaactaaaaaggtggtgggatgctgatatgcaagattatttatcacctcacatatacatccattggacttttaccatatgaggctggttaataagataaactatagactccttttttgatctaagaatggatgaagtatccacaaaataagaatggccatgtaccaaccttttaggtcaagcatttatttctgaattgcattgatgcttcccgac

SEQ ID NO: 10043 - DNA, 534 bp, Glycine max
  unsure (1)..(534): unsure at all n locations
  Clone ID: jC-gmfl02220108h10a1
atgacctatttcctgtagcncagtcggacttagaatgaacacngccatgacgatgctactatttctcgggcgccctttttttttatcctcatctttttcattttacgaaaacctaccacctattgcgggggggagaaacaccttctatatctccaaaaggacatttactaatgtatgatcaagccgtttcagaattcaaagttcttgtaatcctattaaataaacggttcacaacatattttacacataactttctatctgaaacatgccaaagcagatagctttcttttcctatcccgttcctttctaaataacacctggtttttttatgatgaaaaagaaatccgattgctatcaaaagccttatcaagcagcttatcctaattacactaatggtttctaaatatcataactgagaacttaaaatgtggtgggatgctgatatgcatgatgattcatctccttacatatacatccattggacttttcactatatgaggctggtttataacatacactatttactcctttttt

SEQ ID NO: 10044 - DNA, 564 bp, Glycine max
  unsure (1)..(564): unsure at all n locations
  Clone ID: jC-gmfl02220108h11a1
gacatgccaaaaggactgggaatttgcagagtgctgtagctcatatcattactgctgttattggttctggtgttctttctcttgcatggagcacttcccaattaggatggattggagggccattttccttgctttgttgtgcaattgtcacctatatttcttcattcctcctgtctgattgctacagaactcctgatcctgtcactgggaaaagaaactactcttacatggatgctgttagagtttatcttggttataaaaggacatgtgtagctggcttccttcaatttttgactttgtatgggactagtattgcttatgtactaaccacagcaaccagtctgagtgcaattctgagatcaaattgctatcacaagaaagggcatgaggctccttgcaaatatgggggcaatctgtatatggcactgtttggacttgctcagattgtaatgtcattcataccggatctccataacatggcatgggtttcagttgttgccgcacttatgtactttacatactcattcattggactangacttggcataagcacagtcataaaaa

SEQ ID NO: 10045 - DNA, 442 bp, Glycine max
  unsure (1)..(442): unsure at all n locations
  Clone ID: jC-gmfl02220108h12a1
ggcttcgacccttttaacaaagatgcgtgcgggtcaccgctcgatacacccttcttcgagcctcactcaccagccacagattctctcttctctattcagacaacggatgttgtgtatacgagctggcccggtctcagcctctacatcccaaaacatcacaacaactggttgggctcctgggatggctccttcctcagccgggggaagagctacatgttcaacacaatctgtatcgacaagtgagccagctgggtctgtcgattggctgtatgataacctgcaggagccagatgtcaaggaactagacgcttggtggtacaggccggaggagcagaggtatacactttatgaatatcaggctgatgacattcctggtgcccttctcttntgatgtagatggaagagcagatcgggctacagaattaccacgcatgctgtcatc

SEQ ID NO: 10046 - DNA, 534 bp, Glycine max
  Clone ID: jC-gmfl02220112a01a1
gttttgctttgttcaagtagccagccagtcatggtgctcttcaatgtttcacgcgtagagaccactcccttcgatggccagaagcctggaacctctggtctccgcaagaaggtgaaagtgttcgtgcaacctcattacctccataactttgttcagtcaacattcaatgcattaactgtggaaaaagttagaggtgcaacgctagttgtatctggtgatggtcgttatttttcaaaggaagctattcagattataactaaaatgtcagcagcaaatggagtatgacgtgtttggattggtcaaaaaggattgctttcaactcctgcagtatctgctggtatacgtgatagagttggagctgatggatccagagcaacaggtgcatttatactgacagcaagtcacaatcctggtggccctcatgaggattttggaattaaatataatatgagaaacggtggacctgcaccagagggaatcactgacaagatatatgataacacaacagacaattatgagtacttgattgcatca

SEQ ID NO: 10047 - DNA, 494 bp, Glycine max
  Clone ID: jC-gmfl02220112a01d1
aaaggaatatggggcgatatattggagtctgcatgggcaaataaatgctcagtaaaattatgatacatgtacattcctcagcacactaaaacagatcagtggccaaaaaagaaaaaaccaaaaaccaatcagaaacagattggagaagataatatacattgataactgtgaatgatgagtggcatacgcaaagtaatcttgcaacatgtatgggactgagaactccctcattgtagtgtaagtcacaaaaaagccgcacaaacagggtggaactagaacgagatctcacaaggtgcatgaaatgttcttcctcgacatattggttccaggttttcaccagcatacgaacagagtggtgacacttcaacacctgttgcatataagggcactgaatgagctaagaagccacctgcagcaactacccaacgagtatggagtcgaagaacaagtagtttcgcactgtctggagtgtcaacattggaaccatttgcatt

SEQ ID NO: 10048 - DNA, 502 bp, Glycine max
  Clone ID: jC-gmfl02220112a02d1
aaatcgaaatacaatacgttttttcaaaccggccagccaagaatacatatgaaaaaagaaagatttgttctcttgctcaatatatatgatcagagagtgacactgcggagcacaacagtctcaacggtgagtccagggccgaaaccaaatagcacaccccagtcaagaccttcaccggttgtgccaagtccattttctattgatttcttcctcatttgatccaagatgaatagcacgcatgcacttgacatgttaccatactcgctgagcacatgtctagtagcttccattttttcaggcttcaggcctaacttagcctcaacttggtccaaaattgcgggtccaccagggtgtgcaatccagaagatagaattgtaatcggagattcccaagggttggaaggcttcaaccaaggccttctcaatattcttggagatgagtccaggaacatccttgaggagatggaaagtgagaccaacttcgcgaaggtgtccatcaatag

SEQ ID NO: 10049 - DNA, 371 bp, Glycine max
  Clone ID: jC-gmfl02220112a03d1
ggcccttaaaacccaagcttaaccaaacgggaaaaaaggccgggttaaaaaaccccggcttttttttaccaataaaaaaacaacctttagaaaacaaaaccccaaaaagcaaaaggggcccaaaaaaaaaaaaaaaaccccccggaccccaaaggtttaaaatagcccccctttaatccccaaggtttaatttgcccccaaaatttcccgggcttggtttaaagaactttttggatttgctttcccaaagggtcaaaacaatccccacccattggggggggaaagccacacccgaaccgagccttccgaaaggggggcaagaacccatttttgggaatttcaaagattcccccaattttaacaaaaggggg

SEQ ID NO: 10050 - DNA, 551 bp, Glycine max
  unsure (1)..(551): unsure at all n locations
  Clone ID: jC-gmfl02220112a04d1
caggaaaggaggatgccagaagctctactgcaatgagcgtgaataagatatctggaggctcttcacggcaccgaaaatctattaatggattttcaggttcaactccatccggagggcaaagggaaactggatcaagtaggaattcctccttgcacaaaaatttaacttcagagaaaatatctcaacctggattaatggataaggcacttgatggaacttctcttgaaggagttacttgcaagttgattgttaaaattccaagccaaggtagaagccctgctcaaagtgctagtgcaggttcttttgatgatcctacaatcatgaatagtcgagcctcatctcctgttcttccagagaagcacgatcagtttgatcactgctcaaaggaaaagagtgacctttatcgagccaatattggctcagatattaatactgaatcttggcagagtaatgattntaaagatgtattgactggctctgatgaggctgatggatcacctgctgcagttactgatgaagagcgctgtncgattgtcaatgattgtaagaaa

SEQ ID NO: 10051 - DNA, 487 bp, Glycine max
  Clone ID: jC-gmfl02220112a05d1
ttcaattggtgccaggacaagaatgtggtgactgtttttagtgcacccaattactgttaccgatgtgggaacatggctgccatactagaaattggagagaatatggatcagaattttctgcagtttgatccagctccccgacaaattgagcccgacaccacacgaaagacaccagattattttttgtaacttcatataaccctttgtttgtaagctactgctttatgctgttactgtagatgtgtctttaaggagagaagagtttcactgtttaagtgggacggttatcatcaacataattctttcttttggagtttgtctgctgttgctgctgctgccgtcttatttggacaagaaacaaatagaaattgacacaattggtgtttgtatatttttgataggaggaagcggcaataacatgatatatcatgtgctggaattttttcttaaattaaatctcaagttagagagcagatttttgagttct

SEQ ID NO: 10052 - DNA, 414 bp, Glycine max
  Clone ID: jC-gmfl02220112a07d1
aataaaaaaaaaggcaacgaaaaaccattcattaaactgattcacataataatcacaataacaatttataaatttccaacccaaattaaaaaaaaggcataaaaatttaaaaattattcattaaaaatcagaaaaagaaaaaggatcacccaaaaattcatctttccggttacaaattccccgggtttccacccacgcgcctagacccgttttgaagaaaagaccccacgcgagtgattaataattaattaatcaatcacctaaccgcgatcgagtggaaacgtcgtccttttgtgttatcccctttttgccccttctttttctaaaattggtctccgatttaggggtgtcaaactttgacaatctttggggcctttaagacggggttctttttcgcgatgggcttttttcccg

SEQ ID NO: 10053 - DNA, 552 bp, Glycine max
  Clone ID: jC-gmfl02220112a08d1
ggaagataattataatttatgattcagaaaatagtcaaaaatacagtgaatcatacttatacagatgaaaatacagtttgatatttgcctctcatcaataagcaaccgaatcagataaatagcttgactcaatcaaaagtacttactcctcaaatatatatatgaaaaaaagaactagaataaggcagggataggcacaacacaacacaacacactcttgaagctaactctaacaaacaccattcatcttgtcattgttcttcttcctctccaacacaaacttcttccaaatggcagtgatttccctctgagtctacatagcactcttcttagcaaccactaccttgccattttcttcagcagtgactgtcacactagtgctgcttatgaccctagcaggaagtgaatcaagctcatgcagaaccttctcaacatcggccacgaggcgctctgcgagagtcctcgagaagtccttcctgatgacaacacgaagcactgtgacatgttgagcatctggtggcatggtgtatgctggcactatccacccaaagc

SEQ ID NO: 10054 - DNA, 430 bp, Glycine max
  Clone ID: jC-gmfl02220112a09d1
aacgtccgctcgagattaacttatcttcctattatctttttttttttggtgaacacccattcttggggatgcttttattaaattgactatgaacatcctgatgttttgggcaaaaactataaccacggtgactaaccacctttaattggttggatctttaccaaaaataaagatgtctggggagagctcttgaacgaatatgactatatgcggcccctcatggtgcagacgcctttaccacttgactcaatcaagaggggccggtggtgccaccacaaccttcactattgggaaagcttccgccttatgaactggatgaggattacagcatgaacatctgcgctgttgtattcaaaaggggcaccgatacggtgtgggtgcacttggaacaccgcgaatagctgccgccgtgagcaccaccgggaccacc

SEQ ID NO: 10055 - DNA, 430 bp, Glycine max
  Clone ID: jC-gmfl02220112a10d1
aaagaacgaaaatgatcaaaccaaatccttagcacaaccacattatattacagagagttggcatgcacaattgcaccataagtgcaagaggctgtctaaatgccatacatacagagagaggcaatgtgtccgtgcttgtgcctccccaaagttttaatttattattattattagattgggccagaggatcctcgtgaagtatgtcttagcaggagaatacataagcttaaggtttctcccaatcatgagatatatacattatgatatgatacaagattaagctggaacagcttcctgcactttgccgttgcttgagagtactaagctatcatagtaatcaaccagcacctttcatccaccagggcacataaatccatcaggaggactttctttgttccttgccagtgtgcgcatctttgtgcctgatatg

SEQ ID NO: 10056 - DNA, 498 bp, Glycine max
  Clone ID: jC-gmfl02220112a12a1
ataaagtattattgcttgattacttgattgataggacaagtctaaataacaactgtaaaactcatcgtagttcctctgtacatgaaaatagacggatcataacaatcatgcccaaatcactctcaaaattcatccattcaggattacacgagaaggacacaggcttatccatgtcattggatacaaacttagtagccacgaattgtattgatgatggtgttgtgccacgggtcagagaggtgctgcaataggttctcaaatggtcctttgcctgtcacgttgtgttgaactatgaatcccaagaatgccaacatagccaatctcccattggcaagttccttctccttggcctccaaagtaggtgcaaagttcaaggggttaaacacactaccagggtatccacactcatgttggggcaagctgtattgcttgaaaatggggtctaggttgacagagccagggttcttgatgtcctgccatctaccgatctcgacgtag

SEQ ID NO: 10057 - DNA, 516 bp, Glycine max
  Clone ID: jC-gmfl02220112a12d1
aaaatgaaataaagctggtcgataagaatcaagttgaagcaccataaaataaatttgggattgctcacaaattagtcgactatgcgttaagtttaaggtttaggattgcccagaaattcatttacatcctttctgttccatacttccaggtggtaatgtcactttcaaacaaaactggacacctataagaccttaaccttcctatgaaccaatgacttaattagatgctcaagcgaagtactcttctgggacataaaattttaaaccaatggcctctgcaaatttaatatcagcgacactgtgatctgattctctcccggctgcatcaccaacaaaaaaggatttatccatatcaatggcaatgccagagttgaagtgttgctccataagatgccacatccctggtttgggtttgcgaaaggatcatcttcctttttggttactttacctgatttactacctaccccacaagctataaaaacctgaactggaaccttcactttcacaataaaatta

SEQ ID NO: 10058 - DNA, 484 bp, Glycine max
  Clone ID: jC-gmfl02220112b01a1
ctgcaacttatccacttgatcccccttcgtaagcctcttcacatcttcacttcttcacttcttcttccgcactaatacgaaaccagagggaattcacaaaagaggttaccatgtcggtcgatgagagtgaggagaaggagttggatctcacttctccggaagttgtcaccaagtacaagagcgccgcggagattgtttacagggctttgcagttagttatttcagaatgtcaaccgtaagcaaagattgttgacctttgcgagaaaggggattcgtatattagagagcaaactggcagcatgttcaagaatgtgaagaggaagatcgagagaggtgttgccttccctacacgtgtgtctgtgaacaacactgtctgtcacttctctccgtttgccagtgatgaaacaagtgttggctgatggtgagatagtgataattgacatggcttgccatatagatggactcattagtgctgtggcacaca

SEQ ID NO: 10059 - DNA, 471 bp, Glycine max
  Clone ID: jC-gmfl02220112b01d1
agcataaatcttgagagaacatttttttttggttcatcatataaaatatatatgttctgaaagaacattttcaagtacacaaaaaaaagggggaaattcataaaaaaatacagaaaaaaaaaaacagaattgagtaagagggaaggaaacatagagaaaattttagcaatcagataataagaagccagtagtagtgcaaaagtcccttgccaagagtgttggaaccccttttagttaagcaggtacctttttccccttgagtggcttaaccactttccatgtgaagtcagggtcatctctgccaaagtgtccatatgcagcagtctttaagaacctgccattttcaccccttttgagatcaaggttgatggagatcatgccaggcctgaagtcaaaactcttctttacaatgctgaggatttccttgtcagggatctttccagtgccataagggtcaacaaacacagacaa

SEQ ID NO: 10060 - DNA, 440 bp, Glycine max
  Clone ID: jC-gmfl02220112b02d1
tttttttttttttttttttttttttttttttttttttttttttttttttttttttgtttttttttttttttttttttaggtattcccaaattcgggccccaaaactgggtatgaaaacccattggaagcccctaatcggggcccaagtcggataaaaactaaatttgccccaaagggtggggcttgggcctccggcttaatcaaaaaaacttctggtttttaaaaagattggtgggctttttggggaacaaaggcactacccttttccgcatgatttactaaaacagggggcccaatatggggtattttagcaaaaccgcccaaaaaagcccttgggaaccaatgggctttaaaaaaaccttttttcaaaatacccttattcacgggtggggcaaaaggcccctgatttgggaaaaccccaaattggccccttttaggag

SEQ ID NO: 10061 - DNA, 509 bp, Glycine max
  Clone ID: jC-gmfl02220112b03d1
atccaaaaactagaatgattcgattctcgtttaccacgaacgcactactaactcaacacaataccacgacgctgaatatgtaaaaacaagtataggcatattacaaggcatgcccaaatagctacctatctattttttctttttggtttttctaaaatccaattaacacggttcaaaacaccgaaaactaaaaacataaccttattataatatataagaagcaactaaaacccttaatagtccaaattgaagcgccacagagaaacaaatctgagaattattattcatttcattcagagcgattggcgaacctctcaaccttgtcatcggtcaaattgataccaaccatggcttcacccaatccgcagctaacctccgccaaaatctcagggtcgctgtagtgagtcacggcctgaacaatcgccctggcgcgcttcgcgggatcgccgctcttgaaaacgccggagccgacgaagacgccgtcgcagccgagctgcatcatgagcgcg

SEQ ID NO: 10062 - DNA, 625 bp, Glycine max
  Clone ID: jC-gmfl02220112b04d1
ttcattgtgatggatggaaatggcaccctttttgggactttaagtggaaacactcgtgaggtacttcacaaatttactgttgatctaccaaagaagcatggtagaggaggtcaatcagctttgcgttttgctcgtcttaggatggaaaagcggcacaactatgttaggaaaacagcagaatatgctactcagtatttcatcaatactgccaccagtcaacctaatgtttctggacttatacttgctggttctgctgacttcaagactgagctaagtcagtcagatatgtttgaccctcgattgcaagcaaaaatattaaatgtggtagatgtttcttatggtggggaaaatggattcaatcaagctattgagctatctgctgagattttatcaaatgtgaagttcattcaagagaaacgcttgatagggaaatattttgaagagatcagccaggacactgggaaatatgtctttggggttgaagacacttttgaggcactggagatgggtgctgtggaaacactcattgtatgggaaaatttggatattaataggtatgtgctgaaaaatggtactactagtgagaatatcataaaacactttgacaaggaactagatgctgatc

SEQ ID NO: 10063 - DNA, 585 bp, Glycine max
  unsure (1)..(585): unsure at all n locations
  Clone ID: jC-gmfl02220112b05d1
gtacgtcacctctcatcaagtggtgttgatgtatatactgctattgctggggctgttggagctctatatggacctcttcatggtggagccaatgaggctgtcctcaaaatgttgagtgaaattggaactgttgagaacattccagcattcattgagggtgttaaagccaggaaacggaagctcagtggttttggacatcgtgtgtacaaaaattatgatccaagagcaaaggtcttgaggaaactgacagaggaagtgttttccattgttggccgggatcctcttatagagattgctgttgccttggagaagattgcactgtctgatgagtatttcatcaagaggaagctatatccaaatgttgacttctactctggactgatttatagggccatggggtttcaacctgagtttttcactgttttatttgccatccctcgaatggccgggtacttggcacattggcgagagtccttggatgatcctgatacaaagattatgagacctcacaggtttatngttgggagtggttgatgcattatgcnaccattaatcaaaggactgcatcaagtaacactgacaaac

SEQ ID NO: 10064 - DNA, 690 bp, Glycine max
  unsure (1)..(690): unsure at all n locations
  Clone ID: jC-gmfl02220112b06d1
tgcttagtatcgtacgagtcattacgaccttatttcctttggcttcaggataggcctaataagaaaacaaataattccaattcatatatgaacatttttgcctccttatttcttgaaaatgtggaattggaattcctttcctttggcttcaggataggcctaataagaaaacaaataattccaattcatatatgaacatttttgcctccttatttcttgaaaatgtggaattggaattccccgaggaattccgatctcatttcctttggcttcaggataggcctaataagaaaacaaataattccaattcatatatgaacatttttgcctccttatttcttgaaaatgtggaattggaattccccgaggaattccgatctcatttcctttggcttcaggataggcctaataagaaaacaaataattccaattcatatatgaacatttttgcctccttatttcttgaaaatgtggaattggaattccccgaggaattccgatctcatttcctttggcttcaggataggcctaataagaaaacaaataattccaattcatatatgaacatttttgcctccttatttcttgaaaatgtggaattggaattccccgaggaattccgatctcatttcctttggcttcaggataggcctattaagaaacanataattccattcatatatgaacatt

SEQ ID NO: 10065 - DNA, 352 bp, Glycine max
  Clone ID: jC-gmfl02220112b07d1
ttgtcgtcctttttttttttttttttttcaaaactttgagaacaataatacactgattgcaacatactttcaacttatccaaacaaaccggttcctatatacattacagactccacatggacatatattcaaggtgcttacttagggtattattgtagaaacaaatgtaacacaggctcaagaccaacaactattctgggacatgtaatcattgacaacagcttgaatagcactttaccattaatgcccattattcattgatttatatcagccatatggtgtttccacaccctcataatatctccaaggacttgacccctgcatacaaaacgatgtgtacaggtccaataca

SEQ ID NO: 10066 - DNA, 491 bp, Glycine max
  Clone ID: jC-gmfl02220112b08d1
ccttcaattctcctttattttttatttatccaaaataaaatctccacaacaaacaagcccatgtgaaattgatctcatatgattgtcacattgtttgccatgtggcctacatgcaagcctttacaccaacagcagaaagtagtactagaaagcagtatgaaagcatgaactccattcttaaaacctaaatggcctcatcttgatcaaatttcgaagccatcgagagagtattcaattcaattgcatacgatcccacacaatccaaggtccaagggcaaaagcaaaaccttctcaaacttaattgagtgggtcccattaggcttttaataatagaaacctaccgctatatatcaccataaattattaataacaacaacagggttaaatatgtaaattacaagatctatctaatctagcacttgttgggcgagactcccaccaaagagtttgctagatcgaagctgacacgtgtcccctgctgctgcacgttc

SEQ ID NO: 10067 - DNA, 405 bp, Glycine max
  Clone ID: jC-gmfl02220112b09d1
gcgaacttgtatgttttatataaaaattctcgatacatgtagctattgacattcacattaatgttccaaaggccaaaaaagtgttaactctgcaaaagggttctaaatgaataataacgcgaacccactcctttgctacatacaaacctacttactaagacagaagaatcccaagatgaaaaatgcttctcaacaattttgtgcccaccacattcatagggatggcacacaatatatgactcatcaagctttgcgtatataccctccaatcctataccacctcttatccatgacaacatagtttgtacgacatgacgcagacaccaaaaaagccatggcaaaaacataactcaccattaaagcatttattttggacttagaagcacttcctgtggacaatggatg

SEQ ID NO: 10068 - DNA, 471 bp, Glycine max
  Clone ID: jC-gmfl02220112b10d1
aggagaaatatgcagaatctcgtagcaatactatgaggtttagttacccaatatctacaagtagaatctttttttgtacgagtaagttattctagaagattttacaacctaaaataaatggctcgcctatgcaaattacaatgatttagcagcaccttctatgtaagcgatggcttccacctctgaaagctgttctccatcaaccaacccttttattaagggggtggcatatgctttattaggggcacgtaagggtagcttcccagatttgaaatttccaatatcaagaagggaacacgttatgggaactactggaatatcctgctccttttctaaggagacaacattggcataccaagcacccttgacaaccttcaaagaggtgaactccttgttagagatagcaatcacgggtgttatatcaaataaaggagagcctgcatcaaggcttaaagcattttttctgaaaca

SEQ ID NO: 10069 - DNA, 593 bp, Glycine max
  Clone ID: jC-gmfl02220112b11a1
gctccgaatccccaacttcatcgctgtcaacgtccgtcaccgtctccgtaacttccctaatcctattcctttccttctctccgtttccgtcgctgcatctctccctccgttacggaaccgaagcccgtcacagatggcggctcgcgaatcgatgatggcggattacgcgaaatcggggaagtcgtcgtgcagggcgtgttcccaaaagatcgaagcgaaggcattgaggctggcttcggtctccaaaggaaatggtccgtacgacatcgtcaagtggcaccacctccgttgcttccctctttcctctcactctcactcctctcctgagagcatcagaggcttttcctccttgaagagtagtgaccaggaagctctgaagaagttatttgctgaaaataacaagtctgaagagaaggttaatgaagcagatggaagatgtacgaaatgagctgcaagagactggagagcgtggttcaaagagattaaggagtagtgaccaggaagctttgagaagtattttgctggaaatacaagtctgaagaagagttgtgccacctgatgtaaagctgggtgaacattaaatttaggttctg

SEQ ID NO: 10070 - DNA, 491 bp, Glycine max
  Clone ID: jC-gmfl02220112b11d1
agaaattatatcttttttaaaaggaaataaagctggtcgataagaatcattgttgaagcaccattgaataaatttgggattggtcacaaattacccgactatgcgttaagtttagggtttaggatagcccagacattcatttacattctttctgttccatacttgcagctggaaatgtcactttcaaacaaaactggacacctatgagaccttaacctttctatgaaccaatgacttaattctacgcttaagcgacttgctcttttgggacataaaattttaaaccaatggcctctgcaaatttaatatcagcgacactgcgatctgattctctcccggctgtatgaccaacaaataaggatttatccatatcaatggcaatgccagagttgaaatgttgcttcataagatgccacatccctggtttgggattgcgaaaggatcatcttcctttgtgattactttacctgatttactacctacccccaagc

SEQ ID NO: 10071 - DNA, 441 bp, Glycine max
  Clone ID: jC-gmfl02220112b12a1
tttatatttttttttttttgaaagtttttactacaaatgcattcatgtgaaaaaggtgcttatactacattgatccatcaaagggactataacgcagataaacctcatactgtataagatacatgttatgattaacttatttaattgaaaagcagagctagaagctttatgtaatctactccctaaggtcgaaccaatgaaaacattcaaactaactaaaagaaaataaaaaacaaaggtttcataaagatagatttcatatattataggatcatatgtaaccccaactacaccaccaagaggacaaagaacttcacagaactaaccctaaaaccactctacctaccacattctgacttcctacccactcttttagccgtagcctttttcgctggagactttacactctttggattcacactctgcactggcgctttctta

SEQ ID NO: 10072 - DNA, 368 bp, Glycine max
  Clone ID: jC-gmfl02220112b12d1
gtaagtacaaacttgagttttataccaggtatatagctctagatataaatacacatattatccataagagggacggcctagtaatagatacattatacatgcgtaaaactaagggaaaaaacgagggctacagtttcatactaagtttccacccaaagtaaagggcttagtctacaatgagtgacagactaatgaagattctctggggggccttcaaaaaacttgacataggaatttttatttgattatctgttgagaaagaggagggatttaagaggacctagagatcttacagagaatctgatagttcaagaggatctggttacagtgggccgtgggatgaagatagtgctgagaaacatcataac

SEQ ID NO: 10073 - DNA, 192 bp, Glycine max
  Clone ID: jC-gmfl02220112c01a1
tggtgatgctttaagtctattggctcaaaacatagcaacaaccttggcagggttgatttttacttccgctgctagctggcaataggcatttattcttcttgtctaggattccctcattggaataaatggctacatgcacttgaatctcatgaagggatcctatgcagatgcatagatgatgtatgaggaagc

SEQ ID NO: 10074 - DNA, 532 bp, Glycine max
  Clone ID: jC-gmfl02220112c01d1
aagattacaaagacagagaacacggcagagcttatactactcctatctatctagaaatttcaaacgggttaatcacaaaaaattatgtctttccttttcacagaatcttgagatctttattgaatcgaagatcagattcatattaagaccatggaatccccaattgaaagccaaaaacaaacttttgatattgtattcaattgtcctcacagcagtaaagaacatctaattgtaaaatgaagaaattagaaagaaaaaagaataccaagggtaaaactagtcacaacatacttgaattaactaacctaaatgagatcaaaatcggaatgaaaataaccgtacatgaccaaaagcatatatagttacaaactctgactttacctgtacaaccaggtatgaacagaaaacttggtaaatgacaacatgagagagagaacgagagtgaagttgtacaaacaaactctggtttcccgcagcagagaaatacatgcgagtgattaagtgaataacgcaaaagcggaaaggaccaaag

SEQ ID NO: 10075 - DNA, 502 bp, Glycine max
  Clone ID: jC-gmfl02220112c02d1
attcgaaacgtttattaaaagcaaatttaatataaggtctgaattcagaactcgacaaagccagcacatgacacatggcacgtttccaaattatttacacgcgtgcatgcatctaatctgcatgatgcatgtatgcacattaacacaacaacactagaggcaaaatataatcactaatagtatgaaatatatcatatgattagtgactttcaatctataaaaatatgatcacagatcatgatatcaactccaagaaaggcctttcttctctccacaagattaacttagaaataaaaatcaacaaatcgattttaatatttagtatacctgaatcgcctagtatacccaaaatctggtcacctcttcaatgtaaaaatattggtatcccattttataacatagtatggttcagtgcttataacaagccagcttccaagagatttctccgactgaaagtctcatcaacaagcttgaaagtcttcttcacaaccttctgatcaag

SEQ ID NO: 10076 - DNA, 359 bp, Glycine max
  Clone ID: jC-gmfl02220112c03d1
atatccacccttcaaaccatctattacacataagagttactctgttaacattcatacaccattttcatgaatctatacggacatataatgactacactacggccatggaacagctagaagcttgaccacttatcaatatccaaatatttttagcatatgggttatactcggggacatgaccgctaaacgtaacgtactctatgtgtacaaggagctatgttaatattaaaatgccatgactactgcgcttagagctcgagacacctaaactcatcatctatggcgacctaatgtagaattggaataccatattctaattgatcattgactgaaacatggggtgcatgattccttaagcc

SEQ ID NO: 10077 - DNA, 597 bp, Glycine max
  Clone ID: jC-gmfl02220112c04d1
ggaatagtctgtttccaaacagcataggatagcaatgacattcttaactcatgggcagcaaacttggagaaattacttgatcttgtggagaaaagttgtcatcagatacacaaggaaaccatggtccacaaagctgctttgaaggtttaagaaggttcgaatcagcagttactgtcacaggggcatctcaatgatgtgattttgtactgaagttgccttttcaggaaaatgttcttttgaactgtcaccgactgagttggtgaggaatttcgttaaacgattatgcctttttcacttttatattctgtcactcatgctttcagggtagagctggatatatgcatcatagtactgaaagtagcattgttgtatactaccggtacataccttaccactgacttatgacaggatcgtaaaagatcttgattgaagcagtggctggaaattgagtgtttgctcatttatattcttttgcctggttgatttttttcccctcttgtacctcttctttcttctctatattacattttcttgtgaaatttggacgtttcgtgctatattccctgatgacaagcaaaacacctatttatttgagtg

SEQ ID NO: 10078 - DNA, 607 bp, Glycine max
  unsure (1)..(607): unsure at all n locations
  Clone ID: jC-gmfl02220112c05d1
gactctctctgactcactcctaagaaagaacatacaaacaccgtctttctcttttctcgcgtgtcgtacggatcgtgcaattttcgtgaacgcgatcggcgaatgaaaatgaaaaagaaacgaaaggaaagtgaggccagtggatggtcgtcgaacttgccggagatttcgaagtcgcatcactcgctggagcggcgttcgcggctgaacaagcggtgcagggaagatcgcggcgtggcgacggtgccgccttcacgcggcgcgtcgttactcttgacgccgtcgcggggcttgaagcggaagatagggtgcatcgacaaggccacgcagatgggaaggagcatgaggatcgaggacgattacgtgaccgggggcagcgcgatcgggcaggggaagttcgggtcggtgacggtgtgccgcgcacgtgcgaacggcgcggagcacgcgtgcaagacgctgaggaaggtggaggagacggtgcacagggaggtggagataatgcagcacgtgtcggggcaccctgtggtggtgacgctggaggctgtgtatgaggatgatgagcgttggcaccttgtgatggagtngtgttcttggaggaaggtggttg

SEQ ID NO: 10079 - DNA, 303 bp, Glycine max
  Clone ID: jC-gmfl02220112c06d1
gctggagctatctcctttgtaatgattggttacaaatttatcactgatcttggtgcaacttatttcatttggcttaaaaaggcctaaaatcgggcctttggtggggtggaagaaagggccacttaaaatggaccggaagaacctaccaccccatggtcctaacttccaacctccttttatgccggaaccaaatttggagaaaccttaccggtgcttttttttaaaaaccttttccggggctttctaagttccaccggaactttttaaggcccagtggttcacaaggggttgcagtttaatggt

SEQ ID NO: 10080 - DNA, 595 bp, Glycine max
  unsure (1)..(595): unsure at all n locations
  Clone ID: jC-gmfl02220112c07d1
ggcaactctttataatttatgacatgaatatattcactgaaattcatcagttcctaaaaaccatactcctaaaaacacaaggaaatctccgagagactgcaaataatacaaccaagcatgaaactatgcttctaaccttccgttaaaaagctacatctttgtgttttccacttatcttaagacatgtctgtgttaagcaaaagagtaaacaaatgttgggaaaatctgcatggtgcaaaatagtctaaggactataactgtgctaagaggcaaaggtgacgactgattaaataatctgaaaatcttccataggcactgaaagtcaaaagggccttaattaattaatccgagacatggccacaggttgtcctcacataaggactcaaagggctcaatgcgaatggtgaaagacttcctcttttcttcacaaaactgctctcggagtcagagacatggccgcttgatttctttcttctcatataggggcttaatgccaacgatgacaacctaccttttgtcatctttaaaccgttatccaaatctgagacatgataactacgacttctgtntgtgcatattctctgagagcataacg

SEQ ID NO: 10081 - DNA, 440 bp, Glycine max
  unsure (1)..(440): unsure at all n locations
  Clone ID: jC-gmfl02220112c08d1
gggggggaaaaaaacccccgggggggaaataatttttttcagccttgtttttttaccccaaggttttttttccccaagggggttttttttccccccccacttctttggtgggggggggaaactttcccccccgggaaaaaaaatcttggggaaaaaaaattctttttttttattttttaacagagggccccctctttggagcccccaaatatttttccccccccctgggggtggttttgcccccccccttcttggtgtcccaggggggaaaatttttttccctctcccccccccccaagggggcccccgtggggattttttggggggggcccccccctttttttttttttttttgggggaagccccccccacaaaatatacactctttttgggaaagatttcttttnttttttttttttgggggtggggggccccccccc

SEQ ID NO: 10082 - DNA, 490 bp, Glycine max
  Clone ID: jC-gmfl02220112c09d1
agagaagagcatttcgttatgttatcatttgatgaacaaacctctacaaacaaggtaacatggagaatatccatatacagcacagcctatggatcaaatcacattctaatttaaataaatactaaagtcaaatatgaccgaccgtctactgaaacataggaagcaagaattttcattactaggggggctctctattataaatatacacatctatgctaggtatgtcggtcatctaaataacaggccgggcttttaagtgtccgcatcataatgattgggagctcccttccatttaactacttggatttacgatcatgtgaaacacgctgaatttttgatatgatcaaagaactgtccaatacttataataggctatatgttcgctggatcctgcgataggatcttcaaggctcaaccatgtcggatgctgattgcatggaattgccgtttaaaggccttaacatatcgactttacctgatttaacacgtg

SEQ ID NO: 10083 - DNA, 398 bp, Glycine max
  Clone ID: jC-gmfl02220112c11a1
gattaatatatagaagacccatttattatccactaaacaaaaagttatcaagagaggaatcgtgctacattgatttcaattcctggagatagaaacatggagctaactgtaaggctaagcaatgaaatctatatacttaacgaataaagatgcgcaatgattactttttaataaaccgatattgcttggtcgggcaagtcatctatctaatggccaagacaccattggcttcttgtgcctatagagcttccgcacgccaggatagtaagggactacagtaacctcaatccagtcaatggcatgataaaacttagatggtgagaacgaacgtgctgctttggaattgaggttccaaatcccagtccatttgacacgcttggatttgtctgaaccagggc

SEQ ID NO: 10084 - DNA, 367 bp, Glycine max
  Clone ID: jC-gmfl02220112c11d1
aacaaaatataaacatttccctgggacaaaccttatgttcgggaaattaattaccttggaataagccaggttagtggtaaatttttatatacagcattttttacgggaattgcacaatgaaacggggacgcaatgagcattcggaatgatagaatcggtgaactggctaaaaagggtcaggcaaacctatgggagccactctggggggaaccttttccgttgcggaatgcacaatcaacccccccgcagcactgcctacaagacttttgaagccaaaatgcctgctattggagatcatattgcccgacacttcctgatacactaaatctaacggagggtccggtcccccacacaaaggattatccaa

SEQ ID NO: 10085 - DNA, 511 bp, Glycine max
  Clone ID: jC-gmfl02220112c12a1
ataataaatttagggacatattacactttatttcaaatataaatggctgcaatgataagcatatgaagctcattaaagttatgtgaaatttctcttacatgcccttttcaagggaatgggcggatctgtgaaagccccagaagagattaaatcaaagacaaccttgctagctgcttcagtgtagtgggttccatcccataccactctaacagatggtctttcgcatgaacccacaacaatatttgtgccattgacctgtatggttcctccacattcaacactctggctgaagttgtacgtccctacatagccacaacaagcaacatgcgggagttcaaagccatatttctttgggtttttgaatagcaagtacttagcagagtagatatctacatatgtaattgcagccaaaggaagctccgtacgaagttgaactaaagcttccttcacattgtggttaaaagactgagccacctcattatatgcctttgcgcaatcatagctatcccct

SEQ ID NO: 10086 - DNA, 427 bp, Glycine max
  Clone ID: jC-gmfl02220112c12d1
atgaggagggagatatgaccatggctgtttaatgattaatgcctgaatacattgtggacgaaggggcgaggattgcagccaaagtgtccgcggttctagcttcggggaactctgataggttccggctaacaggaagaccctacacagtaagagacgtggtgtctctccgaggcaacctcagacaaacctatgccttgaacgagatggctaacaagctgtggtgcgttctgaagaaccaccaagcctgcggcacagcctcaaggactttcggtgctcttgatcctgcccaggtcactcgaatgggcaagcacttggacacaatgtatgccttagggcggcagagctcaggcactcacaccacgagcaacgagccgggccctgatggtgaggaatacccttatgatactgtccaagacaaggttgatca

SEQ ID NO: 10087 - DNA, 508 bp, Glycine max
  Clone ID: jC-gmfl02220112d01a1
ggatgataccatgatcccaattgaatgttttgaggaaccatgggttatctttcgagggaaagatgggaagcctggatgtgtgcagaacacctgtgctcattgagcctgccctctgcaccttggttcagtaaatgagggtcgtatccaatgtccctaccatggctgggaatatactactgatggaaaatgtgagaaaatgccatctactcgacagctaaatgtgaaaataaagtcagttccatgctttgaaaaggagggaatgatctggatttggcctggcaatgaccccccagcagccacacttccatctatactacctccttctggatttgaaatccatgctgagattgtgatggaacttccaattgaacacggtttacttttggacaatcttttggatcttgcacatgccccttttactcacacctcaacatttgctataggatggagtgttcccagcttggtgatatttttgacacctgcatctggcctgcaggatactgggatc

SEQ ID NO: 10088 - DNA, 504 bp, Glycine max
  Clone ID: jC-gmfl02220112d01d1
gatatcaaacagtagtaacattaatgggacaatagagttcaacacaaaccaaacttattttcaaaggtcattacagacccattacacatcacatttcttcttaaaatgtttgggaaaatccaacatcgaacatcacacagaaatcagctccagcttaaaaccccccacgaagacgcaacaccaagtgcagagttgactccttctggatgttgtagtcagcgagggtccttccatcctctagctgtttgccagcaaaaataagcctctgctggtccggtgggattccttccttgtcctggatcttcgccttcacattgtcaatggtgtcggagctctccacctcgagggtaatagtcttacccgtaagggtcttgacgaagatctgcataccaccacgaagacgcaacaccaagtggagagttgactccttctggatgttgtagtcagcaagggtacgtccgtcctcgagctgcttgccggcgaagaacaacctttgctggtctg

SEQ ID NO: 10089 - DNA, 451 bp, Glycine max
  Clone ID: jC-gmfl02220112d02d1
aatgaagaatatatagaagacccatttattatccactaaacaaaaagttatcaagagaggaattgtgttacattgatttcaattccttgagataaaaaaatgtagctaactctaaagttaagtcatgaaatagaaatacttaaagactaaagaagcacaatcattactttttaattaatttatattgcttgctttcgcaactcattacttttattgccaattaagtattgtctttttgtgcctatggtgtttcggcacgccaggaaagtaaggaattccagtaacctcaatccaatcagttccatgaaaaaacttagatggtgagaaccaacgtgctgcttttgaattgaggttccaaatcccagcccatttcacacgcttggatttgtctgaaccagggccaatgttgcggtactcggcataaaagcacgtatccataccagaaggaccc

SEQ ID NO: 10090 - DNA, 249 bp, Glycine max
  Clone ID: jC-gmfl02220112d03d1
aattgaaactgatgcttgaagtgaaaactaaagcaccaccctcctgttgcttctttctttcaggggtggaaaaggattaaggatagaggggcatatattgaagtgcccccaccatggaaaaataaaaataaaaattacagagtcaaagtagaaaagaaaagataaattttttttttttttgtgactttggaaagtggattgcttctcagctattaaatccatgcgttttctttcccgtgctggcctttt

SEQ ID NO: 10091 - DNA, 607 bp, Glycine max
  Clone ID: jC-gmfl02220112d04d1
gctccgaatccccaacttcatcgctgtcaacgttcgtcaccgtctccgtaacttgcctaatcctattcctttccttctctccgtttccgtcgctgcatctctccctccgttacggaaccgaagcccgtcacagatggcggctcgcgaatcgatgatggcggattacgcgaaatcggggaagtcgtcgtgcagggcgtgttcccaaaagatcgaagcgaaggcattgaggctggcttcggtctccaaaggaaatgggccgtacgacatcgtcaagtggcaccacctccgttgcttccctctttcctctcactctcactcctctcctgagagcatcagaggcttttcctccttgaagagtagtgaccaggaagctctgaagaagttatttgctgaaaataacaagtctgaagagaaggttaatgaagcagtggaagatgtacgaaatgagctgcaagagactggagagcgtggttcaaagagattaaggagtagtgaccaggaagctctgaagaagttatttgcttgaaataacaagtctgaaaagagttgtgcacacctgatgttaaagctgtggtgaacattaaaatttcagttctgatgtcaagag

SEQ ID NO: 10092 - DNA, 469 bp, Glycine max
  Clone ID: jC-gmfl02220112d05d1
tgcaggagtgtctgatccagtcgggagaccgttcgaattaatggggggggggaggagcttactaggggggggccgcccttttattttttttctatttaaagtttattactgaaaggatctatacttagtgtacagattaatcgaaccattggatacaacaaacgcgtcagatgattaagggtccctatacctataacactaaacattaaaaacagttgaaacctcagaatttacagttacaactgatgtgcatacatgacgatctaacagcacactggatggtgctctttctgtaatgtacttccaaaggcatagcaccatcctgggactttgtacaggggcaatcacgtaatttgactcaaattcagcgatgtacaacctctaatcattttcataatgtacttctttaccatcattcttgaaatggtcaatacatatgcccatgggaacatcttctaatttaaagagc

SEQ ID NO: 10093 - DNA, 560 bp, Glycine max
  Clone ID: jC-gmfl02220112d06d1
gaatattaaaatgacaactggtacaattatgtttgggaagagttgcattatacatcaaagggttagtagaacccagtagtctcttgtgcacatatattcaattacataatcagaagaatgtgctgcacaaatcaaacgaatgaataatacatacaaggcgaggaaagaatcatcaaagacctaagtggcaccacaagcacccacctaatgatgacaccacaggaaaatgattctattcggatgctgatcagccaacttgatagctttcgacattaaaacaaaactaggccaatgcacatccgaataaaagccacttgaaatgagattttgcgataagaatacccgatggctccctttagaagacactcttccatgccataaaccataacctcatgtagacaattgaaacctaccactaggcttctttcttctccatcccaaggcagcataatatacaaaagtcaatccagccaatgcaacaaatgcaatctgaaagacgttgtacttgtacaaatatttaattccacgaagagattccaaggtgtggccaaatatttcct

SEQ ID NO: 10094 - DNA, 544 bp, Glycine max
  Clone ID: jC-gmfl02220112d07d1
aatagttcgacattttataattttaaaaaaagtgcacaaggcttaaataaactatcaaaaattaaacacatcgttacttagttttttttttggggggtggggtacagatacacatgcaatagccaaattcaaatcaaggttgcaaatgtcaaaatcttgtcaaataacttggttttatgctgttaaaaaccaaacaccttatccaacttcccttgaaccatttaactctttccattatttttgcacctctcaacaatgtatgttctccatgattattgcacctctcaagcatatatcttcatcatttgcacctttatcaaacacaaactctacatctgttaagcactcatgatagaaacacctacaattcaattgtaatattagcttacacccacctattatcacatgaatatacaataacaataaagaagctagaggacttgaaggaagcaacactgcacaaacagcaaatttttctatatgccaggtcataacttagcaatcaaaagcttttggaaaggaaaatgtttcgtttgtcaaacca

SEQ ID NO: 10095 - DNA, 270 bp, Glycine max
  Clone ID: jC-gmfl02220112d08d1
gttccaatcaagagatgatatgttgttattttatattactccagcaagctcatttaatattcttattagcgtggaaatacaagcgtacaagccaagtcgtgcatagaaccatttaccacgggcgtgcattgcgctcactcagacactattgaactgcatatattaatcaaggggcacatttgtatcctgtttaaaacgccaaatatgctagtgctctaactgtaaatgacatgctggctactttatcgatggctgacactagaaaatgct

SEQ ID NO: 10096 - DNA, 507 bp, Glycine max
  unsure (1)..(507): unsure at all n locations
  Clone ID: jC-gmfl02220112d09d1
ggaaggggggctattgggttttttttactgngccgggagaagaaatttgggagtattgatgctatgaaaaagctgaagaaatctgaaatgcttaggagaggccaggtggaacatgttagagctgagaggaatttgctggtcgaagttgccagtcattgcattgtgaaactttactactcatttcaggatgctgagtacttgaatttaattatggagtatctgcctgggggtgacgttatgactctgctgatgagggaagacaccttaagtgaaaaaggtggtaaatccacatacggccaaaggtgttctggccctagaatctattcacaaactcaattacattctcagagataataaacctgataaccctcttttggataaaaatggtcacatgaagctctctgattttggtctctgtaagcctctggattgtattgcctcgcctacactgcatgaaaatcagaccatagatgatgaaactttggctagacccaatggatgttgatg

SEQ ID NO: 10097 - DNA, 332 bp, Glycine max
  Clone ID: jC-gmfl02220112d10d1
gaatgaaatgaggatggttttttcatataaaaagcacacaacacttgcaagtgggatacttctacgtcttaaatggataaatacattcgtggtttcaaaaagtaaccagagctacaattataacagcttatttacaacacgcttaacaaatttacaaagaaaatcctccagaaagcgtaattagactgcttcggcaaagccaacttggagatttccatagtcaaagacggtgtgatatgccctcatgaaaacatcgccaagaatccacaatggaccctttggaggaggaacatcaaaagcaataaacccactaaggcagacttctgtaatgc

SEQ ID NO: 10098 - DNA, 539 bp, Glycine max
  Clone ID: jC-gmfl02220112d11a1
gatgttaccccttcgacaataataaaaacgcaagtgatacactgttcactttctcacaatcatttcatcaaacactacttatctttaagccacacactacagttatggaacatcaacagtattatcatcatatcatcattttcatcaattctgaatctagcttccacacaaagtcattactgctgggcgcactgtaccctctgtgcaccaccaggcatgtcatcatcctcatcatatgcctcctgagcttgttgctgcttcctcctagtctcctcctccatgttgacatcatggagtgtagtttcctcacattcatccagctccatgtctgtcaattgtgaagaaggctttggtggcagaacagcctccaaggccttaacttgatcacggtctatagactctggaaactccacagtgaagtgaatgtaaagtttccccttcatgaatggcctctgatacatgggcattccctcatcatttatagcccttgatgaatcaagctttacaacttccccgggattgatgtaataagaagctga

SEQ ID NO: 10099 - DNA, 316 bp, Glycine max
  Clone ID: jC-gmfl02220112d11d1
ggcaaggaaaccaaactcaaaaaattttcaaaactgttgtagaattagggacaacatggctggaggatcacttggagacaacattggattgaaggaagatgctatcaagagggtgcgtcggaaggcctgctaagctaacaattacaaggcaacggataagctctacttttacgactcggttcagatttcttcggaaacttaccatgtttttcagcttcccggaatctagggacccctctcaaaggattgttaacaaacccttaggggtatccaacatatatgctaccccctccctttttttaaaacttttgttaac

SEQ ID NO: 10100 - DNA, 401 bp, Glycine max
  Clone ID: jC-gmfl02220112d12a1
tttgttttttttttttttttcatattttttttttttttcaaaaaacagcaattaattcattcaaaataaacggagacgctacattttgatgaatgcacccatttcgaccaagtattgtcattgccagttttttattccgatattttaccccaaacgaaccgatcttaatcttgactcaaacttacaactacgaagacccgacaaaagaaaaaatttcaaaatacaggcttcgacatacgatgctcacatgattgaatcaaccaatcaaacagctgatacgactacagcactccggcgaccacgagggaccacggagatcattccgacggcggcggcgacgattgctgtggcagcaacagtctgtacggcgacaaccgcggtggatgcaatgggaatgaata

SEQ ID NO: 10101 - DNA, 279 bp, Glycine max
  Clone ID: jC-gmfl02220112d12d1
gacgacaattgaaaaaccgcttattttttggcgatgttggaagacccgccctctttacccgggatcacaagggggcgtttccgggcccctggtccgtcttggttcctatttagaaaaaaacaaaacatggggggaggggtctggaaccttgtgtttcaacccggcggggggggggggaaacctttcgggactcaaaatagggggggccccccccccatttttggttattatatggggggggggcccaattttctttggggggggggaggaatttttttc

SEQ ID NO: 10102 - DNA, 455 bp, Glycine max
  Clone ID: jC-gmfl02220112e01a1
cctcggggaattccaattccacattttcaagttataaggaggcaaaaatgttcatatatgaattggaattatttgttttcttattaagcctatcctgaagccaaaggaaatgagatcggaattcctcggggaattccaattccacattttctagaaattaggaggcaaaaatgttcatatatgaattggaattatttgttttcttattaggcctatcctgaagccataggaaatgagatcggtattcctcggggaattccaattccacattttcaagaaataaagaggcaaaaatgttcatatatgaattggaattatttgttttcttattaggcctatcctgaagccaaaggaaatgagatcggtattcctcggggaattccaattccacattttcaagatataaggaggcaaaaatgttcatatatgaattggaattatttgtcttcttatta

SEQ ID NO: 10103 - DNA, 432 bp, Glycine max
  Clone ID: jC-gmfl02220112e01d1
gggaaaaaaaaggtaataagcgccagggggtaaatacccccccagatttgggggcaacgaaaaagcctttttgggggccgcttggaatttgtgtgggccccgaaaaaaaagacaggtttgtgtaaacccaagggggaaaaagggggggcgaaaaaaaaaaaggggcaaaaaaaaaaaaggaaaaaaactgggccgaaatgcaaaggtgacgaccggggaatgcaaccgaaaagctttcatagggggtgaccgaaaaaaaggccctggggcggggatttaaaacatgggcacggggaaaaccccggggggacccaatggaatcagcggggaatggagaccgcctttcccagtggggacaaaactgaaaagggcctcacagacatggctttcagaaagatggcccccccaaaggggaatggggcccccctggga

SEQ ID NO: 10104 - DNA, 507 bp, Glycine max
  Clone ID: jC-gmfl02220112e02d1
attcaaaaacaagaatgattcgattctcgtttaccacgaacgcactactaactcaacacaataccacgacgctgaatatgtaaaaacaagtataggcatattacaaggcatgcccaaatagctacctatctattttttctttttggtttttctaaaatccaattaacacggttcaaaacaccgaaaactaaaaacataaccttattataatatataagaagcaactaaaacccttaatagtccaaattgaagcgccacagagaaacaaatctgagaattattattcatttcattcagagcgattggcgaacctctcaaccttgtcatcggtcaaattgataccaaccatggcttcacccaatccgcagctaacctccgccaaaatctcagggtcgctgtagtgagtcacggcctgaacaatcgccctggcgcgcttcgcgggatcgccgctcttgaaaacgccggagccgacgaagacgccgtcgcagccgagctgcatcatgagcg

SEQ ID NO: 10105 - DNA, 527 bp, Glycine max
  unsure (1)..(527): unsure at all n locations
  Clone ID: jC-gmfl02220112e03d1
gctccgaatccccaacttcatcgctgtcaacgtccgtcaccgtctccgtaacttccctaatcctattcctttccttctctccgtttccgtcgctgcatctctccctccgttacggaaccgaagcccgtcacagatggcggctcgcgaatcgatgatggcggattacgcgaaatcggggaagtcgtcgtgcagggcgtgttcccaaaagatcgaagcgaaggcattgaggctggcttcggtctccaaaggaaatggtccgtacgacatcgtcaagtggcaccacctgcgttgcttccctctttcctctcactctcactcctctcctgagagcatcagaggcttttcctccttgaagagtagtgaccaggaagctctgaagaagttatttgctgaaaataacaagtctgaagagaaggttaatgaagcagtggaagatgtacgaaatgagctgcnagagactggagagcgtggttcaaagagattaggagtagtgaccaggaagctcttgagagttatttgctgaaaat

SEQ ID NO: 10106 - DNA, 580 bp, Glycine max
  Clone ID: jC-gmfl02220112e05d1
ttttctttcttttttttgataaagttatctgatcaaattccactcaagtgcccatagcaaaggctgcaaacaaccaacactagtgttcggccatccgtaagaaactgaacaaagaagaaatgactgggagaaacttcaggatctaaccaccttccacctgtctgtgttcatgtaatgactgtcggagcggatcgaccagtgaattcttccatcttcgaaagtttcaatgcaacttccacaagaggagcatgggcttcatttgaaagtctcccaatctttgatggatccttctgatattgctcaatgtatagccgaattggtgcaccttctgatccagctccagataggcggaaaatcaatcgcgatccatcctcaaacaaatatccgattccctgatgtgatgagatggaaccattcacaggatcattgtactcaaatgcatcaccgcgaacaacattcgaaacatctgaccttatccccttaataatgtgattgacttctgcaagtgatgactgcagcttgaccaaatgtgccatcagttcctttggtgcaactgcatacacattttcatagtcatatc

SEQ ID NO: 10107 - DNA, 538 bp, Glycine max
  Clone ID: jC-gmfl02220112e07d1
cttggacaaatctgcttatggttacaatagaaaattaaacaacttgctgaaaatggtatttgcaattgatgatgatcattgacactgcgtggataaaatggaaaacggtaatccccatctaaaggcaacccatcctgaagctttaatttggcatcacaaattatgtcccatttcatcaccattttgactaaataaaactattggcaaacatgctacatccacatgaggttctgcctccacctcagtttctgtctttgttaacctcttcaacccatgttctggccagctctggatcctctagtggaatcagaatcagttcatgttctgcaaataaatcactgccttataatttcaacttatgtagttccatgtacacccattaactgaatcatagaccatatgctagattttatcctcatcttctgtaacagagctactgcagcctagaatagtctccatatgtcgatccctctcactcaaaaactttgttgagttgtactcttctgcatctaagagttcttcagagtatgtcctctga

SEQ ID NO: 10108 - DNA, 419 bp, Glycine max
  Clone ID: jC-gmfl02220112e08d1
gggtgtaggaagaccgatgcattagccaaacccagttattaaggcttgtgttaatgccaaaactcataaaatgaaacttttaacagaggttaatggggttcctataatgaggggggggggcgctatctcaaaagtcggcgctgtgaaaaaaggggggccttaagaagatctacttgagctagaatcctggtaaattctttctgtgggagacacaccacaaagcggtgactgggaccaagtttagagggtttaacccgggcgttaagggggcggggctacaaaacaaactccttaggaaatgccggttacttaaaatctgaggagtctgctttggagctttgccgaacactttttggggttttggcactgggccttgcatgaatgaacgatgattcctcctctaaaagaacacttgggct

SEQ ID NO: 10109 - DNA, 418 bp, Glycine max
  Clone ID: jC-gmfl02220112e10d1
ggggaaaaaaaacaaacctttttttttttttaaaaaaggggcacacacccagttttttcgaaatttctgaagaacaaaaaacccgggggcccggtttttttttccccccccaaaaaaaaacccccccctttggaaacccttcccccgggggggggggccccccccccccaaaaaatttttccaccccaaaaaaaagggcccgtttttttgggcaaaaaaaatcccccggggaaaaaaaggccccccccaaaacttgggggccccctggggggggggggaccctggcccaaaaaaaaatgggggggggataaaaaaaaaccccggggggatttggaatccccacagggggggggggttttaaaggcccgggcccaaaaatttttttgggggcccccccaaaacccaatttggggggggg

SEQ ID NO: 10110 - DNA, 530 bp, Glycine max
  Clone ID: jC-gmfl02220112e11a1
tttttaattttctctattcacaggattaattctgaagttatcatcatacaactggagtacatgacagcttgaatatgcttaaggtatagttcaatcctacacaggagacatgtacattttgaatcttcaaaagtcgtccagaagccatccaagtcgcaaaactatctatagcactgatcactaatcaaagtaatcacacaggttgatgtttacatacccgatatgccacgagccgctgccacttaggaacttggtctagatgttggttcatacaatatcctcgcaaatgtatcggaatatcttgcatcagtgaaaactatctctgcaaaagcattctcatatgctagcagcaaacttctgatttgcggctcagacacaagactctccaatatcatggcggatttgcggcaaacttatggaactggatgtggcatctttatcactttaagcaaccgatcaataggccatatctcgttagcaatcttcaaatctgagtccatattagcttcagcaaggttatagagtgcacc

SEQ ID NO: 10111 - DNA, 462 bp, Glycine max
  Clone ID: jC-gmfl02220112e12a1
aattcaaattttcattcaatcgtcaatctcaaaatttgaaagaaagcgttattttggtaaaacctgaaaacagtgcataggagaaaaaaaaacaaaaaatcccaaagaaaatcaagaggcattccctcctaaattgatagcaagcaaatccaacggaaaattgaaacattagaggaagaaaacgaaatcatgctagcatttttgtcaaaagattctatgcgcctttgatcagtttcagtgcatcctcctctttgggaagggcgggaattgctcccttttgggtagttgtaattgctccacatgcatttgcatacttgagtacttctcttaaccttggttcatcttcaagaatggactgatcatcgacaatcttggacaatagagcaccaacaaaggaatcaccggcaccagttgtatcaactgtattaacatgaaaagcatctactgatcctttgaaattct

SEQ ID NO: 10112 - DNA, 323 bp, Glycine max
  Clone ID: jC-gmfl02220112e12d1
attagaactcaaaaatttgctctttaacttgagatttaatttaagaaaaaattaccgcacctggtgtctcatgttcttgccggttgctcctatcagaaaatatacaaacccccatggtgacaatttctattagattctgcgtccaaaaaagacgggatgggcatggcactgctgacaaacttccaaagaaagaattatgtagcggatgaccgtcccacttaaacaaggaaacttttttcttctttaagacacctttccacggactggatatagctgttgctttcaaacagcgggttatatggaggtaccaaaaatagagcggc

SEQ ID NO: 10113 - DNA, 431 bp, Glycine max
  Clone ID: jC-gmfl02220112f01a1
caagacaagcacaacaagcattctgaaattctcttatttgttagtatcaggactagtaacaattaaccttgaaaataaagcttcatctagttttatcttccataggtagaaaagtgatcaagagaatacacaagtcaccaggtgggaatgtaccatcatcaccaacaccaaggaaaaaacattcattcttcttccagaatgccaatcccctctgagaggcacatgttccttcaaacaggaaatggatctggtgattctggacttgtgctttcaactgatgctaagcctagattaaaatggacaccagatcttcatgccaggtttatagaagcagtcaaccagttaggggggagctgacaaggcaactccaaaaacagtaatgaaactcatgggatattcagggcttaccttatatcatctaaagagccatc

SEQ ID NO: 10114 - DNA, 521 bp, Glycine max
  Clone ID: jC-gmfl02220112f01d1
gcacaattctggtaaaattccagatcaataaggattgcggcgaagccgcaaagatacaacattcattagggaaaacaggagtggggaaaaataaggggggaggggttgaggaagaatcaattgctcacagagcatgctaagacacctaaatattccacacacagttattgaaacaacccaatatagagaaaatttttctttggtgtattataatataaagcagaaccaaatgacttggaagattctactttcttataccattcacttggcaagttcgttgcggatgagttttgctgcggcaaccatgtttgtgagggctggcttcacctcagtgtacttacgggtcttgagcccacagtcagggttcacccacaagatgttcttctcgagcactgccagcatcttgttgattctgtcagcaatttcttcagttggtggtattcttggggagtggatgtcatagacaccagggccaattccagcaccatactttacaccttcgcggaagactgacagaagct

SEQ ID NO: 10115 - DNA, 522 bp, Glycine max
  Clone ID: jC-gmfl02220112f03d1
ctcaactcaaagaaacaaatagtttctcagatccccagacccagttgcgtgaaattcacgatgatcaccgtgatgatggtcgccgacaccgtcgcagtaaccaccgccaaaggcctcggcgtccttcgcgcctgccaatccacctgtaacttttccctcgccgatcagatctccgccatgattcagacttacgacgccgtcgcgccgccgccggtcaagcctactacctacaggctaagacgccggacgctcctccggagaaaacaacgaaccaaacgcagattatcaggagacgactccggggacgccggtgacgagggattcctcttcggtgacggcggagacggtccttttggcggcggtggtgggttcggtggtagcggtggtggttggaattttaatagatttgggagtgggcacaattgggatgaaccttcgtcttcggtgccggaccctgcgttcgatttcgtgtatcaggtgctgtcgtggattatgctctcgaaatgcttgcatttgcgttca

SEQ ID NO: 10116 - DNA, 587 bp, Glycine max
  unsure (1)..(587): unsure at all n locations
  Clone ID: jC-gmfl02220112f04d1
gcaaacgatccaaactcttttttcatttgcagcatcaaaatgagtggtagcaacgatggtagcggcagctggagctctaggtttttgaaggtggctagtgcagctgccgctacagccgccgttgccggcggtttatatgccattctttcatcctcaacctctgctagctctgagatggaagtgccgtttggcagcgcacggcgtgagagcaaagaacgtgacgatggtggctccgggtctcatcctcgcgagggtgccaccacggtcagtcgttggaagaaacctgagattggttgggtgaagctgaacgtggatggttcacgcgacccatacaaaagttcctccgctggttgtggtggtgttctgagggacgcatcagcaaagtggctccgtggctttgctaaaaaactgaaccctacttatgcagtgcaccagacagagttagaagccattctcacgggcttgaaggtggcttcagagatgaatgttaagaaactaattgtggagtcagacagtgactctgtggtgagcatggtggagaatggngttaagcccaatcaccctgactatggtgtcgtggaacttat

SEQ ID NO: 10117 - DNA, 557 bp, Glycine max
  unsure (1)..(557): unsure at all n locations
  Clone ID: jC-gmfl02220112f05d1
tgcgttgtaagtgatagatncaagatcggggaggcctatattgcagggacgacgggctcactaagctgaggccgccctggtcgtccttttttttttttgtttttttttttttggttttaaatctgaaatcttgggagaataaattaaaacccctccaacaattaaacatatttatgctgaatcaacgagttcaggattccagaaaagtgcgggagcctaagaaatcaaatccctattaacaatgcatgtccgaatgctagggtaggtttcctatcgaacatattcaacttggggaaaaatgtacccaaattgaaagggaacgaaccctgacaaaaagggttgatcccttttaagcttagcctgggcctgtaccaccatgagtggcttccacaggtccaatgtgaagccacggctaaccttgcctaagcgttccaatgccttacttcttaagaactgtgcccaatgcatccctctcgcgagacaaggggatcgtctatcaggccaggcgctgaagcaaaaactgtacttaacgaggcttaagatattcttgtccaggg

SEQ ID NO: 10118 - DNA, 410 bp, Glycine max
  Clone ID: jC-gmfl02220112f06d1
cttggacaaatctgcttatggttacaatagaaaattaaacaacttgctgaaaatggtatttgcaattgatgatgatcattgacactgcgtggataaaatggaaaacggttatccccatctaaaggcaacccatcctgaagctttaatttggcatcacaaattatgtcccatttcatcaccattttgactaaataaaactattggcaaacatgctacatccacatgaggttctgcctccacctcagtttctgtctttgtaaacctcttcaacccatgttctggccagctctggatcctctagtggaatcagaatcagttcatgttctgcaaataaatcactgccttataatttcaacttatgtagttccatgtacacccattaactgaatcatataccatatgctacattt

SEQ ID NO: 10119 - DNA, 360 bp, Glycine max
  Clone ID: jC-gmfl02220112f08d1
tttctagcgatttaccatattttgactttttatgccacagcactggaggagaattggggaaaaccccttggctatctgaatgcggatggacagaatcttttggtatatgggaaacaacaaggcaatgtctttatgggggagaagactacatttggctatgaaggggatcccatgaagctgcttttttacaaatatgccagccctcatcatggattagcagcatattattcccttgttgagaaaatcttcaaagctgatgctgggcttcattttcccacacatgggtgccttgaattcatgcccggaaaacaggtggcgatgatagatgacagcaaccctccctgtctgattgggaataag

SEQ ID NO: 10120 - DNA, 351 bp, Glycine max
  Clone ID: jC-gmfl02220112f09d1
aaaagagatccagtacttctaattgccaggcattcaaagaaacatcggcgaacgaaagtaatatctacactgaaattcatttaagggagaaatgaacaaaagagaccctttggtgtttgtctagcaaagttgggtttcaaatttaagatttatgcccatgctaaagagctcctggcataataactttgctccatacgggacatgagccaccacaatgtcatccgcagattcacagtggcggcaataaggtcctcgtattttccggccaccagagacaggccgcaagatcacatttgcaacatttttgcatttgctgcagatatgaatctgagaggagtcactggagtgtaa

SEQ ID NO: 10121 - DNA, 205 bp, Glycine max
  unsure (1)..(205): unsure at all n locations
  Clone ID: jC-gmfl02220112f10d1
caaaggtaggtggagatatatgtaaggtaatattataaaagaccaatgatataatgtaaaattaaatgaaatagtcaataattgttggaaaaacacctannanaanaaggccgtgttactcagtantcaanacnannntnanngggnangcacgcgnacggaaacacggaaaagggcaagagagcaaaaacagcacggccttttc

SEQ ID NO: 10122 - DNA, 246 bp, Glycine max
  Clone ID: jC-gmfl02220112f11a1
gtagccaatgaggttgaactccatacgtagggcgaaagtaaacctgatcataacagaacagcctccattgccggagaaaaaccccagagacggtagctcaacccaaaagaacatagtgcgcacaaaaaggaagatccaggaacaaaggacttgcgaccccgacggaggaagtgcaaaccactggagagacgcaacccaaaatgcagatggaagccccctcggagaaaatcgcactgtccaaagagg

SEQ ID NO: 10123 - DNA, 553 bp, Glycine max
  Clone ID: jC-gmfl02220112f11d1
cttccacttgcacatatatttgatattgtcattgaggagacattcatatggcatggtgcttcaataggtttctggcgtggggatgtcaaattgttaattgaagatgttggcgaactaaaaccaactattttctgtgctgttccccgtgtgcttgatagagtgtactcaggtttgacgcacaagatttcttctgggggcttcttgaagaagacattattcaactttgcttattcatataagcttaataacatgaagaaagggcttagacatggagaagcatctccacttcttgataaaattgtgtttgacaaggtaaagcaaggtttagggggtagagtacgtcttattttgtctggagcagcacctttatctgcacatgtggaaggttacttacgggtggtgacttgtgctcatgtcctacagggatatggtctgactgaaacctgtgcgggaacctttgtctcattaccaaatgaaatagaaatgctttgaacagtgggcccttctgtacaaaatgtggatgtttgcttgaatctgttcctgaaatgggata

SEQ ID NO: 10124 - DNA, 71 bp, Glycine max
  Clone ID: jC-gmfl02220112f12a1
ggggccgccacctttaatcatgtggtgtcgaggatattaccgctattgctgaacctgtgactgctagtata

SEQ ID NO: 10125 - DNA, 423 bp, Glycine max
  Clone ID: jC-gmfl02220112f12d1
gaaaccatggccttattgattccatgattttatttatctatttgatatcataattttatacataaacaaacaaacttattttatgtaccaaaaaaaaaattatgttttttctctggagtgcggaccttattgagcacttggcagactcactagataagccccagatccagcaagacgcctatttgaggcgtctgatacaacccatttacccagtttgtcagggttacttgacgcagacctttgaataaatggtgcataatggctaaaccactccccaacataaacctgttgaggtctcataatctttgtatcaggaacattcaaggactctcgccaatgtgccaagcacccggccattcaagggatggcaaatacaacagcgaaaaacccacgttgaaaccccatggccctataaatgagccc

SEQ ID NO: 10126 - DNA, 578 bp, Glycine max
  unsure (1)..(578): unsure at all n locations
  Clone ID: jC-gmfl02220112g01d1
agcagccgaggtccagcgccagcttcaccgacgaccagtcgtgcacggcggagacgatgcgctgcgccatgtcgaagtgcagcggcaccgacgagtagaagaagttcgccgccgcgaagaagaggcacagcgcggagagcgccgtcaccgagccggtgattccggccgcgaatctcgccgtgcctccgccagcgccggaaaagatcctctcgaaaaagttacacacaagatcgaagtaaagaagatacaaaacagacaacactgaaaacagcatcgcctgacacaagaggaaaattagggtctgccattgctccattccgtagatcgcgtacatctgcgtccagtctctgttattattcgtcgattttcccatccgcttcttccagaaccttctcttcacgcttcggtttgtttaattcaccgcttcagcgagtcgctgaataaaagaaaccgcaataataattcagtgcgaggtttatgagaaaacgtgcttctcgttttcgctttcattgcanaanaaaaaaaaaaaaaaagtgaatcgtttgaatgtttgtcttgcgagtgagagaatttgaaga

SEQ ID NO: 10127 - DNA, 413 bp, Glycine max
  Clone ID: jC-gmfl02220112g02d1
ggaacagacaaaccgaagccggccattgggttttttgggacacaggaaagcaatataagattatacatataatatttacaattttgcaatggaaagcttttaacattacaaaggttgggttgaaaaatcatacatgcaattttacaaatttgctttgcttgcacacaaattttaaaccctggacctacttgccaagccaggcaacctatcattttttacaagtaaccgggcattcattttgggtctggacaaattaaaaagacatttcaattggaacaaacaaacaaacaaacttaccaaggaaccaaccaatcacatcatgaattgcattagtttgaaccaagccaaaccaccaccaacaccaccacattccgggctctctttttttggcttttttgcacaagacgcaaacg

SEQ ID NO: 10128 - DNA, 373 bp, Glycine max
  Clone ID: jC-gmfl02220112g03d1
gccttttgttttttggttgttttttcctttttgtctttaatttaaattgtagtggaacagtgaatcttaaaattcgaaagaaagctttatttcggtaaaacctgaaaacagtggctacgggaaaagaacaccaacagtaccaaagaaaatccagaggcattccctcctaaatagatagcaagcaaatccaacggaaaatggaaaccttactggacgaaaaccaaaccatgctagcatttttgacaaaagattctttgcccctgtgatcggtgctgctgcattctactcttcgggaacggggggacatgatgccttgtgggtagctgaaattgctccacatgcatttgcatacttgggtactaatgttaacctt

SEQ ID NO: 10129 - DNA, 415 bp, Glycine max
  Clone ID: jC-gmfl02220112g04d1
tagctgctctgttacaaagaaagatctccaaattatgcagcccatgttaaccatccgtgccacccatggtcttcctatgtgtctctcaaggatgattcaccctcttgctctctctcacgatgtgtgtaggatagcggatcacgaccgtaggagacgcaccatgaggaagcataggcactgatcactcaccagagagggtagagtgcatgatgccgctcgagaaattcactttgcggaggtcaaaggcgagaccgatttgcatgatctctcccacactcatcacctggcgttgacaccaagagctgcttagaatttagctgcttctccaaaaatgatgaatctcgctagctcctaccactttgttatgcactctatttaatttcactgcgatggactctttcgctatgatatatat

SEQ ID NO: 10130 - DNA, 365 bp, Glycine max
  Clone ID: jC-gmfl02220112g05d1
tggttgttagtagctgatgtacgtcgggaaatcggtccggattggtgcccgggtcgactagcttactggtcggtggacgtcctttttgggtggtcaatatttttaattttacacagacgtatcattaatgggataatagagtacatcacaaaccttacatattttaaacggtgatttcaaacctattacacatcacattttttactaaaatgtaagtgataatccaacattgaacattacaccttaataatatcctgcttaaaacatcctaagacgacgcaccacctattgcagagttaactacttctgcatagagtagtcatgaaggggtctttgattcttgagcagtttgccaccaaaaataa

SEQ ID NO: 10131 - DNA, 93 bp, Glycine max
  Clone ID: jC-gmfl02220112g06d1
atacattaaaggaggacaattttggtattataattttaaaccattaataagacagttgcatcacttcatttgtggaaaagtagccaaagcctt

SEQ ID NO: 10132 - DNA, 525 bp, Glycine max
  Clone ID: jC-gmfl02220112g07d1
attaaaataccaaatcatgattatgcattctcacatgggccgccagcaccattcacaagtttcaacaaaaaaacatataattataataaatgaatggaggggcacggaaaggatgaatcaagccaagtctgcgtgtttttccttttctacccctaagcgaacaccataatacccgacgtaccactgcacgaactttctgagaccagcggcgagatccgtggtgggcttgtaccccaagtccctccacgccaagctcacgttagcatgcgtgaacggaacgtcgccgtttcgaggcattttgatcacgtgcttcttcgcctttaccccgagcaacgtcttcaacacggaaacaagtttacccaccggcaccggcgatgtgttaccgagattgtaaactctcagctgcgcggggccgcgctttttccctacgacgccgtcggtgctcttctccgccgtgtcgagggcaccgaggcagcccttgacgacgtcgtcgatgtaagtgaagtcacgcgcgacttctctctc

SEQ ID NO: 10133 - DNA, 465 bp, Glycine max
  Clone ID: jC-gmfl02220112g08d1
tcggttgagaatgcttaccctgtagttagagcgagatacaaatgggatgctgcagtgccatccttacccacatgagtatgtagacacatccaagccatgtgcacattctgcatttttcatgggcttgcaaaggaaaaagggagtaagaggtcaagaggggcagcaatttgatatacgtggaacagttgatgaattcagacaagaaataaatatgtacatgtactggaagccagggatggatatttttgtttctcatgttcgtcgaaagcaactccctgcatttgtttttcctgatggttacaaacgcactcgaatgccaaggcatataagccatcaagctgaaataaccaagtgatgatgccacaaactgctactctgggcctggattgtctgaaagatgcatcaagaggaaaaaattactctgaaatggtggataagaagccagacaaaccaaataagccggca

SEQ ID NO: 10134 - DNA, 496 bp, Glycine max
  Clone ID: jC-gmfl02220112g09d1
actaactgcgtgcgaaggattttactttgaacaattcaaaccaaactctaacgcgaaacctaaaatatggactgagggttataccggatggtttgttgcatttggcgatgctgtgccttacagaccagatgataatcctgaattagctgtggcacgcttttaccagcgaggtggaactctacaaaattactatatgtaccatggagggactaattttggccgggcttctgggggaccttttgttgctagtagttatgattatgatgcaccaattgatgaggatggatttattaaacagcctaagtggggccaccttaaagacgtgcataaggccatataactttgcgaagaatcactgatagctactgactccaacaattacatctcttggaccaaatatagaggctgcagtttacaagacaggagctgcctgagctgccttccttgatcacattggcacatctgatgcaacaaggacccttaatggaaaatcata

SEQ ID NO: 10135 - DNA, 405 bp, Glycine max
  Clone ID: jC-gmfl02220112g10d1
gcaccaaaaacatcgcatatcattatcaaatgtttgaacatgaacacgaacactatacactaacataaaaatctagcctacaaaactgtaacaagacgatggcttgattctagctgttaagataaacaatgtatcaagcgcgatcagaatttcaccggattaaaaaaaaagttgctcagatgacacggtcagatttccccattggactcttaagataaaagctcctgacattgttgccagttctttttcaacgaagagacgaggggattaacactcagttgaacattttggaagatttgcttttcctccatactaacattcgagacagctattgtcatgcagagcaccttcttaagttgaaatttaatcatggccgtggactgggtcacctttgactcaagagtt

SEQ ID NO: 10136 - DNA, 526 bp, Glycine max
  Clone ID: jC-gmfl02220112g11a1
gtagtaatgtgacaaatatttgaattctggtatgcttatctgaggaaaacaaaatgacagtaactataagaggacttgcagtgatttgaaacacaatattatataaaattaatcgcgtttgattggagtagcttgaactcgaagaggctgaaccttctttaatgatatcgcatattgctcctccatgttcatgtgttctggaattaacccatcagctagcttccattcaaagttgtgtacaagggatgctactattaaatgcattgtcctgtgagctaatggcaatcctgggcatatccttttaccagcttcaaagggtatgagcttaaaatcgtgacctttaaaatcaatctcacatttcaaaaatctttcgggcataaaaattgttggattctcccaaatggttggatctcgatccatgggccacacattgaccaagatttgtgcatttttaggcacattgaagccagatatgtttaccatttcatcacacttatggagtactaaaagtggacctggtggatgc

SEQ ID NO: 10137 - DNA, 304 bp, Glycine max
  Clone ID: jC-gmfl02220112g11d1
atcacaaatttattcagtttccgcttatagataaagttgctgctcttgctataaatggagcggcagaaataacaactggacatgttcctttaaatgcactgcaagctattgagggttaaccttatcatggatacactcaggtgcgcttgctctggctgctgaaccacctacacaacgactgatgcgcagattacgcttactggcctagagaacctatgataacgcacattatgtggagaaactagatcatacctgctgtctatgagaaagcaattctactcgctcttaacttatgacgtgaaag

SEQ ID NO: 10138 - DNA, 463 bp, Glycine max
  Clone ID: jC-gmfl02220112g12a1
gacgaaaataacagtactgtctcatcagaaacaagaaacaatgttgcatgcatgcacacacagagttgttaatcaacgcgtgtggttaataatagtaataataaggacctattgttctctagatctcacccactgtctctctcacacgacaatttacatcttgtgattgttaacaatgccgtccatgacggcgaggcaattgccgctcaactggaacagcttggggttatcttcagggaagggcatgtcgaccccgggagactctttgaaagcatccttgcatgcttctttgtacgaaaggacagagctgaacctgtaccaagcattcaccacgttctggtttgccaacaactccacagattcctttatgttatctagaatgttatcgtactgcgactggcagatgcccaacgcgtccatggcgttcttcgtcgtggtcgggtcggctagcatatttttgatg

SEQ ID NO: 10139 - DNA, 541 bp, Glycine max
  Clone ID: jC-gmfl02220112g12d1
gcaagagcaaaaacatgcagccacacgttaacattaatatgtacaagttctgtacaactgagttttctcagctaatcattattaggctttatggacagaggaaccaaagaaacatactgtaattagatctcacactaaaaagaaacttgggagggaaactggcacccaggtcaacctaatatgggatgttagcatgaaatccacttttgccaactgtagaatgtgttgggctaagtttattataaaaccccagctaaagcagtcgatattgtgggtgtatgccatcggtgtcaacctgtcagtaagtcagaatgctttacagaggttagtcttcatgttagatgaaccttgctgatcaagtggacttgtggttgagggaccccacaacttggtcctctttgtttcggatatcctcacacgtgaaactgcagtggaaagtgcatcaatccacacacagtcctcatgattctctgaattgcaactttcagaggatgaaaatgggcttgaataatcctcatcaagggaaccatcatcatctatc

SEQ ID NO: 10140 - DNA, 470 bp, Glycine max
  Clone ID: jC-gmfl02220112h01d1
agttaagcaaaaattactcatgctctcgtagaggtatttccagatcatgacagagacaacgcaatccggaagcaagacttaatagaagtactactaagtaaaaaataaaataaaagcccttcatagttaacatatcctttaactttgtgttttcttgaatctaaagcacaataaaaacattaaacacccatagtggatactcaaaagtatagtgaactctttactttgccaatgatccaagctcatggctcgaagttctcatgttcatcttcaaactcctgctggttctggttcccgttgtagttgccacctctgttgttgtaccagttgttagtgttcacttcccttgatgagtcaccatagtttgttggattgtacttctcggcggcaacgtcatgaaagtattttccacccttcaaaaaccttgtgtcactcattccttgcctctcaccattgtacccgttaacggc

SEQ ID NO: 10141 - DNA, 429 bp, Glycine max
  Clone ID: jC-gmfl02220112h02d1
aaaactccaacaattttattaatgaaaatactttacaatttcagcacatatacactgccatgaatataattttgcacgctataattatctttcgccacaaacaatggagtagtgctcaacaaagcacaaaccaacaattataacagttttagttgcattaatttacacaagaaagtaaattaacgtaataggcaacacatgtgtgtcacgttcatgaggatcattttataatgatatgcaacattgaattaaatattctcatgcaatggagcattctggaggaaggccttgagggaaacgtttgatatcagtgcaataattgtaaatcatgtaatttttttgcacccaacggatctttgcctgccccgtggcgtccagtgattggccagtggaggaagaagtttgggaattgaagtttctgtatgaggc

SEQ ID NO: 10142 - DNA, 584 bp, Glycine max
  Clone ID: jC-gmfl02220112h03d1
cacaaccactcttaatttctctcttccttgctcatttacacacctctccaacctttcactttcagctttatttgaatccctctctctcctttccaaatggccagcgttgaggttgcacatcaaacaccaacaacagttccagaaaatgaaacaaccgaggtaatcaagacccaggaaacaaccccggaaccagtaccagccactgaggctcctgcaacagaacaagcagcagctgaggttcctgctcaagaagaacaacaagcaactgaggttcctgccccagaatcaaccaccgaagcaccaaaggaagaaaccaccgaagcaccaacaacagaaacagtagaaacaacaactacagaagaagccaagccagaggagcctaaagaagttgcagttgagaccgaggaggtggtgacaaaggagacagaggaagagaagccagcagcagaagagaaatcagaggagaaaactgaagaagtgaaagaagaagcagaagagcctaaagaaactactgaaacagaaacagaatcagcaccagcagcaaccacagaggaagagaacaaaccagctgagacagtggaagc

SEQ ID NO: 10143 - DNA, 588 bp, Glycine max
  Clone ID: jC-gmfl02220112h04d1
tgttcaggagtggaatccaaccactgacaaatatatagctgtcaaatatgatgtttcaacagtattggaagcaaaggctcttctgaaagaagccctccaagcagaagttggattgccagtcgacagaaatattcctctcattggtttcattggtaggcttgaagagcaaaaaggttctgatattcttgcagaagccattccccaatttatcaagcagaatgttcagttggtagccctaggaacaggaaaaaaacaaatggaaaagcagcttgaggaacttgaaatatcataccctgataaggccagaggagtggcaaaattcaatgttcccctagcccacatgataatagctggagctgattttatattggttcctagcagatttgagccttgtggtctcattcagttacaagctatgcgctatggatctgtaccaattgttgcctcaacaggtggattagttgacactgtcaaagaaggcttcactggatttcagatgggtgccttcaatgttgaatgtgatgctgtggatccggctgatgtggatgctatatcaaagactgtcaaaagggcccttgcagtctatgg

SEQ ID NO: 10144 - DNA, 463 bp, Glycine max
  Clone ID: jC-gmfl02220112h05d1
ctgaattaaattacattgccctgaatattgggtcagacaacattcccctttgaataagggtaaggttaaggcaccagatgagagatggtgcatatttcacaaggggaaaaaaatggtttgaaactgtacacatttaaaaaaaatgaaaaaagggtgaaaaggggtcaagactccactatcatagggaaaggaacagcctttgatgaatacaacagtttccggaagctcttgttcagatgatgaacccttgagttgaaaaaagaaaaattccttattgaaggatttaagaagcatcactgagtgagactaaacagatgctaaagattgttcactttgtactcaatctatgtgtcgtggtgaaaatgggggtcgttaggatcatctgtccaatgcatctattcacattctgtatcttaccccaagcttggcttaggcgtctgggaaattccatacgttcgtacca

SEQ ID NO: 10145 - DNA, 498 bp, Glycine max
  Clone ID: jC-gmfl02220112h06d1
tgcttagtatctgatcgagtcggtagccgttcggggtatcgacagggtcagtaatgctactacgcggttgtcgtccttttttgggtaataatttttctttttttagctattttctaggaaataatacaaactgaattgaaaatttaaaaggaatatcaaaattatatatatcaagtctggctgccactataagcctcagaaacagtatcattaaccaactcttgatgttagccgtcactcggatgctactcgaagtttatcatacatacattcctacgaaacataatagtaatcatggtatcagctgatattaagcggcttcatactgtaagaaatttatattattcccaagacttgaggcaatcttcctgagctatacttataatattgatgaatacactcaaattaccatcttcttgatttacaatgctatgttaaccaaattttttttatccaaaacacttttagttataggtttgccccaaggaatccaaaatc

SEQ ID NO: 10146 - DNA, 580 bp, Glycine max
  Clone ID: jC-gmfl02220112h07d1
agcaataaatttcatttcatttcatcagaataatgggtacattacaaagctttcttatatcacaaccaatatacgcgcactaaaatacaaagaaagagggccacaagaggtttattttaactcaaacaacctatgccccgtctgattcaaacacaggcttcgtccaacgtacgagctcggacccatggaataattcgttatatgcacaatgtgtacataacacaacaaaaacaaattaacagtgtaagaaacaaaataacaaacatgtactacgtattagtgaggcatgcatgaatgttgtgaaccactgaaaatttaattaaattaaatgccagcaaggcactctggtggggtcactgggaaccttgacttatccttacaatagtcatagataacatggttcagacgaacccacctgtaccttcttgcttcaatggagttaagggcttggtatgctgccccttccaccagttacttgggttggaggcacagtttgcaggtcctggcactgcacatccttcaatgttgaagtccttgtagtaagcgtagaatggtgctttgctccatctatttctccaat

SEQ ID NO: 10147 - DNA, 514 bp, Glycine max
  Clone ID: jC-gmfl02220112h08d1
tttcgagcgaacaatttatttccggtatggaatatgccgccaacaactttgccagaggccacttcaccgttggcaaagagatcgtatatctgtgcttggatcgcgtccgaaagctcgcaaacaactgcactggtccttcagggctttcctcgtcttcaacgctgtcggcggtggcaccggttccggtctcggatctctcttgtcagagcgcctctccgtcgattacggcaaaaagtgcaaatgagggttcaccatttacccttcccctcaggtttcaaccgcgggcgtggagccctacaacagcgtcctctccacccactcccttctggaacacaccgacgcggctgttctctaggacaacgaagccatctacgacatctgtaggagatctctcgacatcgagaggcccacctacaccaacctcaacaggctcatttcccagatcatttcgtcgctcaccacttccttgaggtttgatggcgctatcaatgtggatatcactgagtttcagacc

SEQ ID NO: 10148 - DNA, 321 bp, Glycine max
  Clone ID: jC-gmfl02220112h09d1
gctcgagctagttcctaatgcttactttttatttttcagcaaagacagaaaattggcgccatttccttgccaatctgaatgcaaatggagagaaacttttggtatgtgggaaacactaccgtacagtcttcattgcgtgtttatgccggacattagactccgaagcgcggaccaatgttgcatgttttttttcaaatctggcgcacttcgacatggatttggagtgtacccgtgctgtgcggaaaagatttgtattgctgatgctgaacttcgttacgggacacatggtgcgtttgattttactcctggaaaacagggggg

SEQ ID NO: 10149 - DNA, 405 bp, Glycine max
  Clone ID: jC-gmfl02220112h10d1
tttcgagctccggtttgttcagtcttttttggttttttgttacgcgcacacatgtatagctccgtgccgggaaagacaaccatcccacgactagctggtgatagggaagaccactgatatcatggggccaacaatggtggcagaagctcgaactagtgagtctcagagccaccggcccacggggacatgcctgagtgacacctgctgtggctctgattgccgaaccgaacctcttactggacgacactggggtggcttacgaagaagatgcttctgctctcaaacattgataaattgtacaaaagtgaataaccggtgctttgattcaagaggaaagaatctatgcatctgtctacacagggaagccaataaccgctttgtgtgtggcactaatggctacccatt

SEQ ID NO: 10150 - DNA, 516 bp, Glycine max
  unsure (1)..(516): unsure at all n locations
  Clone ID: jC-gmfl02220112h11a1
agtgtcggtttattgcagcggaatcatcacatgtaatctcgcaacccacaaccacaaacaatcccattcctccttttttttttgtatccataaccgacaacataaattggaaaagcaaaagcaatctagagtttttcttttaataaagctgtagtaacatatagatatatatgctcctctcactattcttctccagtaatgtatttcactacaccggtaaaaaaaagaatactaatactgtaataatcctgaaccctaacagaaacgtgcgtagtcacgagtgttattacccattggaggaatctcgaaatgccagagccttccaacacctttgaccaagtgcttcctacacagaaactccttcgcgtaaaccttctccaccttccgatccacatcgtgcaagaacacgtgcgtcacaccggatcccttcctgtccctagccatcaccgtcgncgagaatattgccgtcatgcgccccggcgccttcgaaagtaccccttcggcgcgtcgatcatg

SEQ ID NO: 10151 - DNA, 510 bp, Glycine max
  Clone ID: jC-gmfl02220112h11d1
ggataatatcataatttaagaaattctcaaataaggcgaatgttcacttcaggtgaaccccaaatcattgcactcaaataaataggtgttttgcttgtcatcagggaaaatagcacgaaacgtccaaatttcacaagaaaatgtcatatagagaagaaagaagaggtacaagaggggaaaaaaatcaaccaggcaaaagaatataaatgagcaaacactcaatttccagccactgcttcaatcaagatcttttacgatcctgtcataagtcagtggtaaggtatgtaccggtagtatacaacaatgctactttcagtactatgatgcatatatccagctctaccctgaaagcatgagtgacagaatataaaagtgaaaaaggcattatcgtttaacgaaattcctcaccaactcagtcggtgacagttcaaaagaacattttcctgaaaaggcaacttcagtacaaaatcacatcattgagatgcccctgtgacagtaactgctgattcg

SEQ ID NO: 10152 - DNA, 565 bp, Glycine max
  Clone ID: jC-gmfl02220112h12a1
aactaattctttctactgaaatgattataattaatgaataaatcaatgaaccataggatacaaaatacgtgtaagatgattagtggtaacttacatataaccttaacatttaaaattgctcaaacctcagaatcaacagttacaactcaaaaacatagatgacttactcacagcacactggctggtgttctttctgtaatttctcccaaaggcatagcaccatcctcggactttgataatgggcaattacataatttgattcacatccagcgttgtaaaacctctcatcattttcataatgtacttctttaccatcattcttgaactgttcaatccatatgcccatggcaacatcttctaatttaaagagcttgagttttctttcttggtgggcatggacaataaattttgctatgtctcgtgagataacatagccaggaccatgtgcccatggtgggtatgtatcatggggccattcctcctcactgatgtaccacttgctgccttcgtccctctgaggagatgatttagaagatatgagaccgtacaagaggcctttcgatgg

SEQ ID NO: 10153 - DNA, 581 bp, Glycine max
  unsure (1)..(581): unsure at all n locations
  Clone ID: jC-gmfl02220112h12d1
tggccatacgtgcctgaggtactcttccacaggagaggtggagaaaatggctggtgtgggcggcggaggtgggggggttcccattgcaaaggaaattcagtctcccctggtgccctgccagctccctgcaccccagggagcagactgactctgggaaagcgggcaggttatggcggctgatttatcgcaggcccagctgccttcccgcacctctcgagctccctgtgacctggcttcccagcaacccctattccccaaataacctctggaggggcttaatgaggggaggctggatacctccatcttccccactgccctctcctttctcccatgtccacctcttgggagtggaatttatgttgtctccccagagactgtgctgaaagtcaagatgtctgagccaaagactccttagagatctgctagtccagaaagacaaatcagcagccctttgctggtgnttttggtctgcttctcagtctgcacagttaaaaaaaaaaaaaaaaaagaattagttgccaacatttaaacagaaataggttgcacataaaaatctgatttctgatttctcttaaaaatcc

SEQ ID NO: 10154 - DNA, 352 bp, Glycine max
  Clone ID: jC-gmfl02220113a01a1
attcatttgtctgcagcaaatttttcttccattaattattatgtatataggactcagctctggagagatcttattatgaacagtccatttaatttatgtacagaaaataaagaaatgggatatgttgcctcatttttatactgtgggaggacatgccacccccggccgaacgatttagagaacgaagcctactttttatcaatcccaatattctttgccaaggctcccccgagcaagcttttttaataaagtttaggtttttttgtataaactttttacacttaactttgaaatctaggtgtgtaaacaacattgctcttttagtttacaaatcgtgtatgtgtttttttca

SEQ ID NO: 10155 - DNA, 434 bp, Glycine max
  Clone ID: jC-gmfl02220113a03a1
gtgaagcagcagagggaggatcggcattaaaaatgcagatcttcgtgaaaaccctaacggggaagaccataaccctcgaggtcgaaagcagcgacaccattgacaatgtgaaggctaagattcaagacaaggaaggcatccctccggatcagcagcgtttgattttcgccggaaagcaacttgaagatggaaggaccttggccgattacaacatccagaaggaatcaacccttcaccttgtcctcaggcttggtgggggcatcatagagccttccctcatggctttggctcgcaaatacaaccaggacaagatgatttgccgcaaatgctatggctcgtctgcaccctagggctgtgaactgccgtaagaagaagtgcggtcatagtaaccagttgaggcctaagaagaagatcaagtaaactctgggtgggat

SEQ ID NO: 10156 - DNA, 387 bp, Glycine max
  Clone ID: jC-gmfl02220113a03d1
aaaacccataaaaaatcccggaaaagggggccaaaaattaccggttttaaaaccccaccggctaaaggggaaaccagaccaaaagggcaaaaaacccaataatgggccaaaccccaaaggggcccaaaaaaaaataaagggccaggcaaaaactttgggccaaaaacaattaaccttaaaaaaaacccgaaacgataaatccccaacaaggccccggtttaaaacaaacaaaacgaaagtggagccccacaatttccccccccaaatttaccgggacttttttttaggccccaaaggggtaccatgaccccccttttttttacgggggttcacacccccagggggccaaccagcctaacatttgggggaaaaaaatttggcccgggg

SEQ ID NO: 10157 - DNA, 501 bp, Glycine max
  Clone ID: jC-gmfl02220113a04a1
tggacacagacacatggattgggtgtcagagttcatagctggtggttcatacgggacccctccttacaatgaaaatttccataaatatcttgtttcaaagattcctatcaaaccacttgatttagatacaacaactgcattattgcttgactatttcccagaagaaggtcaatggaaactttttgaacaaccacaaaacatggaaattgcttcttctcatactgaaactagtgaagaggctgggcccaaggtgaaggctccctcatctgcaaaatcttctaatgcagagcaatatattgaaccactatatgtaatattggatactgaaaagcaacaagaacctgtcaaagagttcattacaacagacacagaaaacagaatgactgacataagtgatgacaggtcagatgaattgatgcaatttgtgaaacacagagtgttacattttttgagatggaagttggtcccagctgaatgctgctgaaatgatagaaatgaagt

SEQ ID NO: 10158 - DNA, 544 bp, Glycine max
  Clone ID: jC-gmfl02220113a04d1
caatataaatatatatgcctctgaaaagggtaaatttaagagagaaaagaggagcaaaacaaaactgatacctacatgatcctatatcctagctcttctacatcataatgatcatattctgttttgctaaatagtgatacaacaagcaaaacttacagtaaccctactgtccacttcgatcgacggagaaagtacaaaaataaaatacaaaaatctctttacaaacttgtaactttctactttcaaaatcaaccttgtacaccgtacctatagtctataaatctaaaattcacatcataactgatgcctgcctctaggttccaaatgagaaatttacaagatactcagaattgaagcctttaatgttcctaagtttcacctttcgtttatgcccctcgattactgtcttctcattctttactccccaattaacagtacaagagatacttgtacagtgtattaatagaatcaaaatgcccgactggctaactctagctttggcatattaacacaacggcattgtcaaattcataactgtaatgat

SEQ ID NO: 10159 - DNA, 234 bp, Glycine max
  Clone ID: jC-gmfl02220113a05a1
ggcaaggaaaccaaactcaaaaaatttccaaaactgttgtagaattagggacaacatggctggaggatcacttggagacaacattggattgaaggaagatgctatcaagagggtgtgtggtttggcctgcaaagctaacaatcacaagtcaacggataagctctacttttacgacaaggttcagatttcttcggaaacttaccatgttttcagcttcccgggatcttgggatcc

SEQ ID NO: 10160 - DNA, 531 bp, Glycine max
  Clone ID: jC-gmfl02220113a05d1
ctgaccctactattaaacaaatttatttagtccagcagtctgaatgatttttggttctcacaagtaatacaaaacttgggaatcaaaaacattaggaatacaaatacaaagttacaacactgaagtaaccaacactacacctgcatgacaaatacacatcaaaagcatcatcagaagcttatagcttcctcattgagtggaaaaaagactaatacagaatatcctttcacagcagtaactagactagctaggaagaagtgtccttgagttcctgaggtagaatatccttccacctaataaagttaggatccttcaagaacgtatccttggctagtactttctcatcatcagtccaatttttaaggtctttttgaagctgcttaaccctttgctcgacatgatcatcaagaggcttcttgctgttaatccagctataaagttcctccacttcagcccaaaaggttgattcagtgataggagcaggtggcatccctttagcatgttccaaccatctttgagtgtacctatacc

SEQ ID NO: 10161 - DNA, 532 bp, Glycine max
  unsure (1)..(532): unsure at all n locations
  Clone ID: jC-gmfl02220113a06d1
aactcaaatgtaaacaagcattgtaattccacttatagaacgtagatttgaccaaaaataatccgaatctcagataattcacccattaccaatttttccagcaaagaatcccagcatcaactctcacccacgacgatttttccaggtacaattcaaattgttatacaaaacgtagagaccagacaaaatcaacaaaaattaagcagagcctgtgttctctggtttgtcagtctccattggttcagcagatgctggtggtggggctggattagcattgtcccctgccttttcattagtactggcattaggattctcctcaggtggttgttgatgctgctgctgtggctgctcaccaccctgaggaggtggggttgctggtgcttctggtgtagctggcttgggtggtggtggctttggtttcatcataattggcttacagaacctgtcaacagcttcagctttctttcttatgtcagctgacaaaagtaccggngtgacatatttcggaagagagtcctgttgctgctttttc

SEQ ID NO: 10162 - DNA, 550 bp, Glycine max
  Clone ID: jC-gmfl02220113a07d1
caatcaagaaactcattagagatctcttgctatacaaatgaaagaaataattggtctatggccgctaaagatattaactagacaagagcatacccatagttaggacatgcatgtgataatttacagagaaatatatgatttgataaatttccttgcttttcaaattttgtgcattgatataatcatgaaccagcatgtaacaatgagaacttagcccataaacatatcttacccttatccaagaccaagcttgccccagtgaccaaccaatggccaggactatcttgtggacctttacacaactgtgacgtttctacaaatttcaacagcttttgtgtttgcacaggcactggaggtcctgttggaaacacacttgaatccaaaaccacaactggttttttctggttctggtctttaccagaaattgatgtgcttattactgagaaaatgccagacctttgggataacccggaggagccctgtgtccaacttgatttacaactgcacaattagacaccttagagaacaacagcctcaatgaaggacactc

SEQ ID NO: 10163 - DNA, 318 bp, Glycine max
  Clone ID: jC-gmfl02220113a08d1
tcgtcctttattctacttcttaatctcaatctattcgagtatatattattttatgtacttggcacttatcacagttcacatgcatatatcatgccatcatatctttagggaacattctccaatccatactgatctcccatattttactgcaagatgattaacttaaagacacacagatatatttcagctaaaagcatatctatatactaagacaagtctaatgaaaatgcttacaatctggctgctttatgctttaggcaaatagatggtggtgtttctttccatgagctttctcatctcgcaactttgcttactttt

SEQ ID NO: 10164 - DNA, 493 bp, Glycine max
  Clone ID: jC-gmfl02220113a10d1
aacacaatgcatttgtattatagaaaacacagtatggtacaaagtcactaaaacaaatgattaaccgaccatgctggcaatcatacccatatatttttcaaaagtgcctaactaatgtctatctcaattcaacatgagttcattccccacattaggccgaaggcaaacacaaacttcatgctcttctgctcctggaagaagttttggcaccattatctcaagcacagatcctggcccatcgtagtacgcttctatattggcatcttcaggaattcgagttgaaagtgggatttcacgaacaaactcaccaggagggcagtgctctgacgatggctctgaaagcttgaatgtcctatcgtttcttttaataaatggcttgcaagatatgctcacacaagaaacctttatgataccatgagtaacaatgttcctccatgaaactttcacactaggaagaaccacgaatggcagactgataatgatcaagaaacct

SEQ ID NO: 10165 - DNA, 440 bp, Glycine max
  Clone ID: jC-gmfl02220113a11d1
gcaatcagaatcaacaaagagccgagtccatcagcaagtatataataatccaaaaactccatcccctacacagaagagacaacaaaaaaaagcttaatgctcctaacagggtaacaacaccggttcccgaaaccgatttattcatacttctcatttctgcccgagcaagaagacactaaatcgcagctagacaccagcacataatgtctagacaagctacttttttttcagtacaaccttaaaaagacttcttggcaacgaatacaagcaggtcaatgacacgtgagctggatccccactcggtggcataccaagagacaagcttcacaaagttgttattcaatgcaattccagcctttgcatcaaaaatacttgatctgctatcgcccacaaagtcggcggagaccacatcatcttcagtgtaaccaagaatttccttt

SEQ ID NO: 10166 - DNA, 449 bp, Glycine max
  Clone ID: jC-gmfl02220113a12d1
aagtgtaacgtagtgttttattaatagtgaacacagaaaaaactagcctcatcaaccactcaaaggaattcacaattctacataatctgcgtacgcaataactacatgttatttggaaaaggtgatccaaaacagtgccatctagtcatgcatgatacagctcttataaaccataaatgccaatgaagggcatcaacactgatgcaatccaaagcttcccatttttcttttccacttcactgatgaacttcaagggcttcccatcacaatcttccaagacttgtaatatctgttctttatcactgagctttacagcagcatcatgaggcttccaccctgcaaatgatgtgtgcagctgcttgaaattaaatccaattttagggaatgcctttcccacccaaggattggaagaaacccactttgtgaaagggcttctctttggatgcaga

SEQ ID NO: 10167 - DNA, 449 bp, Glycine max
  Clone ID: jC-gmfl02220113b01a1
acttctggtaatgaacgtgttgatctagaagaatttgttaatggtgtcagtagatggcttcaaagggcccagcgtgctcgagttgcatctggtgatgctggtccacacacaatgaagtttttaagtgattttcacacggaaacaaagagggaacatgatctgctggatgtgggaggtcaggttaatgaagaggctgagggcattgagaatgctaaatggatttccatcaaagcagttctgcttctgctattgggtactattattgctgctgcgtttgctgatcctctggttgatgcagtggataacttttctgaggctacaagtattcctgctttcttcatttccttcatttttctgcccttagcaaccaattcaagtgaagcagtgtcagctataatttttgcttagtcgtgataagaggcaaactgcctcattaactttctctgagc

SEQ ID NO: 10168 - DNA, 409 bp, Glycine max
  Clone ID: jC-gmfl02220113b02a1
ggaaggggggcttttggggaggttagactgtgccgggagaagaaatctggaaatatttatgctatgaaaaagctgaagaaatctgaaatgcttaggagaggccaggtggaacatgttagagctgagaggaaatttgctggccgaagttgccagtcattgcattgtgaaactttactactcatttcaggatgctgagtacttgtatttaattatggagtatctgcctgggggtgacgttatgactctgctgatgagggaagacaccttaagtgaaaatgttgctagattttacattgcacaaagtgttctggccatagaatctattcacaaacacaattacattcacagagatattaaacctgataaccttcttctggataaaaatggtcacatgaagctctctgatttt

SEQ ID NO: 10169 - DNA, 520 bp, Glycine max
  Clone ID: jC-gmfl02220113b03d1
aaacaaaggctttttattgatgataatagattatacgagtatttacatactccaaacacacgagatattaataccaaattacgcaaattattggtgctgataatatggtaaactttgtaatgcaccccgtatcaacaaacaagttaacataaaatcacaatgtccaattactttttgttgtaatgatggggcaccacacttttcttgaacatttacttccagtcaagcatgtccaacagccacaagacttcttccttagaatttgctacatcacagaaatccatttggatcccaaatacatccatgagatcttcatttctatcttccatgaatagcaaagagatccatgcacggatgccagacaaaaatgggtagccaggggatatgtctaggtaatcaaaagccaaggctctatatgatgaacgatcgatgtaatcaaacatggacttgtttattacacgagcaaccttatttgaatccttccttccaaccatcacagagacactaacattctggtttt

SEQ ID NO: 10170 - DNA, 406 bp, Glycine max
  Clone ID: jC-gmfl02220113b04d1
tttttaaatattattttccctcttttttgaacaccaaaacacattgggttaaactaggattaagaccatttataaatcgactggtttattcatgcctgtcggcaaataaatatataatgtaaaaaaaaaaaaccacaaataaagatctaaaaaattgacactattatatacatctcaatatcaatcattacatatcaccctgatcggcatgatccaccggagttgttgtacggcccctccgtcgagattgccggtggcgactgccgccaaatttcaaccttccggactccttaaacctttgattctcggagggtacaatgacccactcgggttgctggcacagggtaccttaaaggatcattcctatattaataggccatgtaacgctgacggaaccgtcgcatgg

SEQ ID NO: 10171 - DNA, 380 bp, Glycine max
  Clone ID: jC-gmfl02220113b05a1
ctctgctcgtgcctctagggttatcatatctccatttccatttcctctctctcagtttctaagaatcttaagctatgggaaagtcttacccaaccgtgagcgctgattaccagaaggccgttgagaaggcgaagaagaagctcagaggcttcatcgctgagaagagatgcgctcctctaatgctccgtttggcatggcactctgctggaacttacgacgtgagctcgaagaccggtggtcccttcggaaccataaagcacccctccgaactcgctcacggcgctaacaacggtcttgacatcgctgttaggcttttggagccactcaaagcggagtttcctattttgagctacgccgatttctaccagttggctggcgtt

SEQ ID NO: 10172 - DNA, 553 bp, Glycine max
  Clone ID: jC-gmfl02220113b05d1
aatagacatattactagttattacggtaaatggtcacatactacaaagggtaataatatcgcaatcgctgaacaatgttatttaacaaaaggatcgaccacaaataaaaacaacccaactccaatcatcatcaccacgtccagcaaaatacattcaaaagctatctaaaaatttgaggaacccacagtggcgcattagaaaccatgaccatagaatttatgagagaaatattatgggcaccgtgcctctccaacaatccccaaaacgttgcttaggcttcagcaaacccaagctcagaaagcttttggtgagcctcagcgtaatcagcgaagaaagcatcttcgtccgatgcatatttctcaacaagagggcggaacacagggtcagacaaaagtgccttgtcagaaggtagctgaaggaggccttctttctcaccactcaacaactccttgaagtatgagttgtcgaaaataagaggattagaggtccagggaccctcgaatccagaacgctccttgtgcgcagcttccatagtgtgacccccagacagagc

SEQ ID NO: 10173 - DNA, 564 bp, Glycine max
  Clone ID: jC-gmfl02220113b06d1
ggggagataaatataattcatgattcagagaaaatagtcaaaatacagtgaatcatacttgtacaaacgaaaacacaatttaatatttgcctctcatcaataaacaactgaaacagataaatagcttgactcaatcaaaagtacttactgcccaaattatatatataataaagaagtacaataaggcagaggcataggcacaacacccccttgaagctaacactaacaaacaccattcatcttgtcattgttcttcttcctcttcaacacaaacttcttccaaatggcagtgatttccctctgagtctccataggattcttcttagcaaccactaccttgccattttcttctgcactgagtgtcacagtggtgctgctgatgacccttgcaggaagtgaatcaagctcatgcagcaccttcttcacatcggacacgagacgcttcgcgagggtccttgagaagtcctccctgatgacaacacgaagcactgtgacatgttgagcatcctggggcatggtgtatgctggcactattcacccaaagcgccttaaaaagtctgagat

SEQ ID NO: 10174 - DNA, 592 bp, Glycine max
  Clone ID: jC-gmfl02220113b07d1
ggtacaaactttacacctttgctgattatttcatagcaaatgttacacagaatagagtatgtgattcaatgtatggctcggtgagccaagaaggaggcaataaataggccaatgttagtatcagcaaaaatgcacaaaatataacattcgggtcagcagatccttcgaaagtgggagtaaataatttataaaccacaagaaatgaaaaggaattcctcagaaaattacatcaagtgcatcctcttctcatttctatggcaccattgttgaacatctaagccttcccaaatttctattaaccttatgcacgttttccttgagccaagcttacacgcatagcccgtccttctagttccacatcattcaaggctgcaacagcagcttccatctctgcttgtgttgaatagcaaacgaaaccatagccacgtgatcttccagtttctccatcatacaagacccttgctccaaccactgttccatattcttgaaaggcttgtgtcaatatctcattagttactgaccatgacaggtttccaacaaaaagcttggttcagtttcagggtacaagggttcttttggtcttggtttgcta

SEQ ID NO: 10175 - DNA, 482 bp, Glycine max
  Clone ID: jC-gmfl02220113b08d1
cggtcgcgcgtcattgatccatcgtcagctacgtcagggaagcattacggaatttatcgacggtcactactagctcactcgtcgttggccgcccttttttttttatttttaaaaaatttttacgacagtatctattaccgggaaaatgcttatacatcgaaggaaaatgcctatgaacagcatggcatataactccccgaaggctcattatcagtggagaaacagtgatggaacacctataaccatatacagattcgaaaatacgctggtaccagcttgcccgactccagcctagacttgaccgctacgtgtgtaatcaaaagccagccagccttatattgggccacacggaatggaccactgaaatctgtcaaatgggattccactgcgcttgccaaacctttgtccgaatacccgtgtttcccatgaccagcattcaggtccaagcagcggtggaagattctcacctggatccaaagact

SEQ ID NO: 10176 - DNA, 424 bp, Glycine max
  Clone ID: jC-gmfl02220113b09d1
acaaaagactacataattaaaaatataacaactcttggacactttttagtttgggaaacaaacaagaaatgattaccaagtgagatcagacaataagattcttccaaacaagaataggcctaaacagatccaaaataaggggggcctcgtgtattgatctttccaaacatacgacaaatattctatagacaagcaattacttaaggggttgataaatccggagaaataatatgggaaattctccatatctctctctctctctaattttcgaaataagctgttccaatcatccaaaccaaatactaaggtttgggttcctgaggaatttccatagctgcttggagaattatcttaaatgcactttgcatggacaacttcaatttatggtcggctatgaaggctttttccgttttgaggggaacac

SEQ ID NO: 10177 - DNA, 509 bp, Glycine max
  Clone ID: jC-gmfl02220113b10d1
atgtaataatggtacaagatgaattctcattttacagtactctcaggattttaataaatacaaggattatttccagaaccttgtttaaacgataatacagtctgttagtagaaaaaggaacttattatcttcaatcagtaagagttatgttgatctattccgcttcatattctgttgatcagatcttcagcaactacaagaattatgcacatgcaatgaaagaataatgagtccaattttcagtttttcaattcctttcacctgcacccaacagttgcatcactatctcacaagttcccagtcctcttttgacatgtcataaatttcaacacaaccatcctcaaacatgatcgagtgttttcgggaatatttatcaaatcgtttaataattccaaacctctcatttcaagttggtttatcctaataactttaccaatgcaattgtgtaagcactttggttggtcaaacacacgagaacttccaatttgcaaaccttcattctgataaac

SEQ ID NO: 10178 - DNA, 414 bp, Glycine max
  Clone ID: jC-gmfl02220113b11d1
gtattattgagcgagagagaaaggtaaaaaaaaaaaaaagattggaagagtatgagcgatttcggggaagggaatgagcttttataaatgtctggtgctgttgaggaatcgatccactctccttccttgccttccttccttcccctttcaacgatgttgattgcagcgtttctaaaactcgccattaccattagacaagactgcagtgtgctgtttcgggttgcggtaacacgcgacttccgattggtgagaatagactagggtttcattataagtgaggaacataacaaaacataacacacaatgcccagcttaaacaaaagattttgattttaggttattggtacttactgcacaatgcccaaaggcagttgatagcaatagagggaatgtccacggtaagcttgcggaggt

SEQ ID NO: 10179 - DNA, 459 bp, Glycine max
  Clone ID: jC-gmfl02220113b12d1
ggaaaatagttgctatgtattaatgctttgaagtacaacgtgattcatgtttaggcgataatgtcttacaaagcaattactttgcagcatgcattgttgggggcgtggcgcaatcaccattgcgtcctttctcagtataataatgagtcaaccgttctttatcttgctctcctcgaaaagtacgaccaccatcggaagctgatcctttccaagcgggagtgaataacacaaaccatcacgatggccatagaattcaaattaaactaaaatccccaattatttacacaattacactttgtgaggcttcacttgactccgtaaccccgaacccaacttgctgacccataataaacccaaacccgaatgggtcacctgagcccggtaacaatcgggtatctggattcggttgaaaatgccccggcccgtcgacccgtcgggttctcacaccactttgaacct

SEQ ID NO: 10180 - DNA, 467 bp, Glycine max
  Clone ID: jC-gmfl02220113c01a1
cgagtaccaaaatttgactttttattccacagcactggaggagaattggggaaaaccccctggcaatctgaatgcagatggagagaatcttttggtatatgggaaacagtatggtaatgtctttatagggtggtcagcctacatttggctatgaaggggatccaatgaggctgcttttctccaaatctgccagccctcatcatggatttgcagcatattattcctttgttgagaaaatcttcaaagctgatgctgtacttcattttgggacacatggttcccttgaattcatgcctggaaaacaggtggggatgagtgatgtctgttaccctgacagtctgattgggaatattccaaatgtatattactatgctgcaaacaacccttctgaggccaccatcgccaagcgcaggagttatgcaaacaccattagctatctgactcctccagcagaaaatgctgggcta

SEQ ID NO: 10181 - DNA, 506 bp, Glycine max
  Clone ID: jC-gmfl02220113c02a1
aaattatgatttagtacttctaattgccaggcattcaaagaaacatcggcgaacgaaagtaatatctacactgaaattcatttaagggagaaatgaacaaaagagaccatttggggtttgtctagcaaagttgggtttggagtttaaggatttatgcccatgctaaagagctcctggcataataactttgctccatacgggacatgagccaccacaatgtcatccgcagattcacaggggcggcaataaggtcctcgtattttccggccaccagagacaggccgcaagatcacatttgcaacatttttgcatttgctgcacatatgaatctgagaggagtcactgagtggaaacaggcgttcatacaggttggctgatgcaccatgagctattaagcaatcacgctccatctcaccgaacttgatacctccaaatcgttttctgtcagctacaggctgtcgggtcaaacggtgaactggaccaagtgttcggaatttcacttttgt

SEQ ID NO: 10182 - DNA, 504 bp, Glycine max
  unsure (1)..(504): unsure at all n locations
  Clone ID: jC-gmfl02220113c04a1
attgcttcttctttttgtttcctgtaatccaggaaatgaaattgctagcttaatattgatctgtagagaagacaagggaacttgcttgctatggcaactctgagcaattcaactaatatcttttggcaagattgtcaagtaggaaggcttgaaaggcagaagctacttaaccaaaagggatgtgttgtatggattactggactcagcggatcaggaaaaagcacattggcatgttccctaagcagagaactgcactcaaagggaaagttatcttatgtccttgatggagataaccttcggcatggactaaacaaggatcttggtttcaaagccgaagatcgcgctgaaaatattcgcagaactggagaagtggcaaaactgtttgctgatgctggcttaatatgtgttgctagtctgatatctccttacagaagagaccgagacacttgccgtgccatgttacctgatgcanattttattgaggttttcatgaacatgcctcta

SEQ ID NO: 10183 - DNA, 375 bp, Glycine max
  Clone ID: jC-gmfl02220113c04d1
aaaaagcggaaaaaaccccggaaattttggccccacccatagaaggaatggccccacttataaaattttatttaggaggggggaactttatcagcccatttaccccctcacccctttggtcccgggccttcccaggaaccctttttaaacctcatttaaaaaaaaccccctttgggggaaaaaacccccttccaaagggggttaaacttaaaacccctggggttcaaaaaaccctttattccccaagggaggaaccccttggcccgccctaaaaggggggggtggacaaaccccattttccgggtttatttaaacccccccgtttaggggggggccaaaagggtccacaatggcggaaaaacccttggttttccc

SEQ ID NO: 10184 - DNA, 216 bp, Glycine max
  Clone ID: jC-gmfl02220113c05a1
cttccacttgcacatatatttgatagggtcattgaggagacattcatatggcatggtgcttcaataggtttctggcgtggggatgtcaaattgttaattgaagatgttggcgaactaaaaccaactattttctgtgctgttccccgtgtgcttgatagagtgtactcaggtttgacgcagaagatttcttctgggggcttcttgaagaacacatta

SEQ ID NO: 10185 - DNA, 552 bp, Glycine max
  Clone ID: jC-gmfl02220113c05d1
aaaaatagttttatatttcatgtctgcagttgaacatcagccatttctgaataattatatatgtaaaaatgattcatggatactgtaatacacctagagatagaaaaagagaagaaagacaacttacttagataagtccggtagaatagataatatgacgtgaaaaaaaaaatcaaaataaatgacgtatccatatataactactcagcgtatatacagtcaccaaaaggaaacaattgaacggagacaaacaccatcacatacagaaaataaattatctcccaaatcaggtctcaggcactgggtttacttccactcttatacatgttgtcaatggcattctgatagtatttaagcaactgtggcctcttcttcttgtatgttggagtgataaggtcacgttccatgtcaaatggaattgagtcaaagtgaactgcttttataaactcaaaacctttcaacttcttttccttcgcaaactttgagagctcttcaattatgtaactctttgctcgagcatcttcacagagagaattggagtccatggatata

SEQ ID NO: 10186 - DNA, 509 bp, Glycine max
  Clone ID: jC-gmfl02220113c06d1
atagagtattcagacacacttgagcattaattatgtaaatcatactttgcgccatgtcttgcgaggtaaaacaaagtacaaattcgagaatagaggcaagtacaacttagcaaagcctattgataaaaagaactacgactgtataagcaaaactgttataggaacccaaattcaagagggaaagtcaatcacacaatttggtagctatccgttatcagctgtgttctctgagcaaatttgggaggattaccaccctttaatggtatgatgttggtaaccttcaggtcactaaacgtgtcagttgccataaagcagactgaaatgggaaagaatgttgatgaatctgctagtggaacaacaaactccattgacccactgcggttggaattatcaatcagaaggacagaccactccaaaatggaattcctagagtcatacctccattccccatcaatctgcctaacagatggtgcttcttgaagagctggaagaggtacagagatcacaac

SEQ ID NO: 10187 - DNA, 507 bp, Glycine max
  Clone ID: jC-gmfl02220113c07d1
gagcttcaaggacttcttcaagatgaattatataaatctgatctttctaaagttaaaaagcactgtggcttagcactgtcaggaaagaggattagtagaagatacatgttttctttcaccgtagaaattacatgatggcaactttagctattctcattatgtatatttacatcattggtctgactctaagtcactattttcgaagtctttcactataacaatctccgtattttcgttttgtcgtctcactttggcatccacgtgatcttttggaagcacattacagtcgatggtatgccatactggtctctcctcttgaaataatgggtgcttgcatagctgcggacattgcactgtaagtgcatacttgcaagtggaaatctctgcgattgaactaatcattgctctcggttcagagcatacaaaccttaccttggtctctcgtggcttatttgtaagatcacataccgtgccattagtatattgatgagcatgatacccttgaga

SEQ ID NO: 10188 - DNA, 263 bp, Glycine max
  Clone ID: jC-gmfl02220113c08d1
gattaatatatttacaatcagattttttagggtttaatgtgttaaataaattttttatgtttttgaactagtataaatacccaaaaccaaacatggtataacattcaagaaaagacacgactacaacccagtaaagataggaaaacaagaagaagccaaccaaagaataagagacccaaatggaagaaccaaaaaacaaccagaaaaggcaaaaacaatagaaaacatacaacatggcaccaacagaaaggcacgcaaagaaa

SEQ ID NO: 10189 - DNA, 457 bp, Glycine max
  Clone ID: jC-gmfl02220113c10d1
aaaaactaatgacctcaattaagagaaacaggccacgggaaccaaaccctatgtaatgtaactagattatcgcgctttacacaaagacactgtttacagggggaaaagataatgtttactgtgaactgaattatataaaacacctacctagtaactaacatataggtcacaccgaacaaagcataagatgatggggcaaactggtacaaaacattgaagacccaccaaatcgcttcttctggtgaccatattcttagaccggacaattccacaggacgctgattataccgctccctgactctttgtggaacccccaaatattctgtcctttaggggttacacacctacacgggggtacaagtaggcccagaatagcatgcacttataatgtctcaatggcccaaacacccttaggaccaggggtggaagacatcaaacgggcggagcgtacagggaa

SEQ ID NO: 10190 - DNA, 380 bp, Glycine max
  Clone ID: jC-gmfl02220113c11d1
acctaaaacctttcatttcattcaaaaaaaaaatccccggaaaaaaactgggggaccccccaaaagccggtttaacccccgaaccaaaaaaaggggccccaagccgtttatttgcccccccaaaccgggcccccggaaagggggtgggaaaaaccccaaaggctaacccaagcccttggcccaacccccccttttcaaaaaagccccccaagcccggaccgggggtattcaacaggcaaccctttcccccaaaaaaatggcaggcctcattaaacaatgggcccccaaggccccttttaaaaaccaaggggaggcccacccgaaccccccctaataccctcccgcattgaggaccccacacttggccccaaaggccctcc

SEQ ID NO: 10191 - DNA, 453 bp, Glycine max
  Clone ID: jC-gmfl02220113c12d1
tttatttttttttttttttgtttttttttttgtgttgttttttttttattgtttttttttttcaatatggttggagaacacttgttctatgtcatttgcctcgattgatcagaggacaccacttttttccgtgcacgagccaatggaaggaacacgcaccaaaaacacccccgttttaaaataaaaaaaacgcgggggaaaaaaaacaaaaatctggggggggggggggggtttttatttgtcctaaaaaaaaagggccccccgcaaacgggggcaaaaaaaaagccggaaggaaaggggggggcccccccttgaaaaaaaacgcacgccgagccaaaaaaaaagactgggaggaaaccgcccaaaaagaaaaaaagggggggaaaaaaaaaaaaaaaaaatgtttttcactttttcggggaggacggcaacaccctcgggtgggtaaacttt

SEQ ID NO: 10192 - DNA, 177 bp, Glycine max
  unsure (1)..(177): unsure at all n locations
  Clone ID: jC-gmfl02220113d01a1
caaggatgtcatatggnatttactttttttcaactcctcagcacatccgcatggtgtaataagaagatggctttcacaactgcaccataattgcaagaggttgtctaaatgccatacttttcttaggagtggtcttgtgaccgctcttgttcttttcaaaagtttcaaattattatt

SEQ ID NO: 10193 - DNA, 486 bp, Glycine max
  Clone ID: jC-gmfl02220113d02a1
attaacgcgtgcaatggattttactgcgatcaattcaaaccaaactctaacacaaaaccaaaaatatggactgagggttataccggatggtttcttgcatttggtgatgctgtgcctcacagaccagtggaaagatcttgcatttgctgtggcacgcttttaccagcgaggtggaacttttcaaaattactatatgtaccatggagggactaattttggccgggcttctgggggaccttttgttgctagtagttatgattatgatgcaccaattgatgagtatggatttattagacagcctaagtggggccaccttaaagacgtgcataaggccataaaactttgtgaagaagcactgatagctactgatccaacaattacatctcttggaccaaatatagaggctgcagtttacaagacaggagttgtatgtgctgccttccttgctaacattgccacatctgatgcaacagtgaccttcatgga

SEQ ID NO: 10194 - DNA, 510 bp, Glycine max
  Clone ID: jC-gmfl02220113d03a1
ctcgagccgatcacttttttttactttcttctccatccatcccttgactaattaattatccctcacaactaccaatggccgaagagaaacaccacaagcaccgcctcttccaccaccacaaggacgaggataataagccagtagaaaccgatactggttacgacaacacatcatattccaagccttctgatgactatgactctggtttcaacaagccatcgtatgagtcttctggcggtggctatgaaggtggttacaacaaaacatcttattctagtgatgagccagcttctggtggtggctatgaaggtgggtacaagaaaacaggttattctggtggcattgatgagacttctggtggctatggcgctggtggtggtggatactctgacgtcactgatggtggctacggcaaaccaagtggtggctatggcgcccctggtggtggtgggtgtgtaccctgacactaccactgatggtgggtacagcaaaacaagtggtggtgggtat

SEQ ID NO: 10195 - DNA, 527 bp, Glycine max
  Clone ID: jC-gmfl02220113d03d1
aatctcaaaccatttgagtatatattattttatgtacttaacacttaacacagtacacatgcatatatagagcaacacatttcaaggaaacattctccaaaccatactgatctcccaaaataaactggaagatgattaacttaaagacacacatatatatataagccaaaagcatatatatatataagacaagtagaaggaatatgctcataattggttgcttatgcttcagccaaagagatggtggtgcttctttccatgagcttcctcatcttgctcctttgcttcctttttctcatgatgttcatggaaggcaaacccaccagatcccactgcagctgctgctgcaacctcctcttctatcttgtgcctgtgagcatgctctgggtctttctctgccttgcgcttctcatgcaaggcgtaagcagcagcagatgcagcacctaactcaccaaggtgctcaagatgcttgtggtgcttctcttccttttatagcaacctcatcattatcccaccaccacttgttt

SEQ ID NO: 10196 - DNA, 571 bp, Glycine max
  Clone ID: jC-gmfl02220113d04a1
atcttttccaatggcctccaacggcgacgccgttcatccccacccttccaaaaagatcaaactcttcagcaattccattaactcaactaattcctcgtttatcacccatgccgagatcgaatcggaattcttccaccaccaccccacggtggcgcgcctcaacaacggcgccttcgggtgctgcccggcttccgtgatcgccgtgcagcgcgagtggcagatgaagaacctccggcaaccggaccacttctacttcaacgacctcaagaagggactccttcactcccgcaccatcatcaagaacctcgtcaacgccgaacacgtggacgagatctccctcgtcgacaacgcctccaccggcaccggcatcgtcctccagcaagccgcctgggccttccaggaagcaaaattccagaaaggcgacgtggtcctcgtgctccactacgcctacggcgccgtcaagaaagccatcgaggcctacgtggtgcgcgccggaggcaccgttatcgaagtccccctcccctttcccgtcaccttcaacgacgacgtagtcaacgaattcccgaaagcc

SEQ ID NO: 10197 - DNA, 465 bp, Glycine max
  Clone ID: jC-gmfl02220113d04d1
aggtcaaaacagagtatctgatgaaaaagttagaagtgtcaacagggaattaattccaaataatagatacacacagcatctaatgagatagaatggtttgcaaatttccaattatacacccaaaatagtgtaaacctatggatatcatgagtgtttatttgtgcttcagcagcaatgttgtaaaatatcaaagaagcaaccaccagaccactacagtactgatggtgcaatattgcagaaacgagtagtgaaaatgttaaacaacaaatgtccactcaaatacttggatatatagacaatgaaattttcaacagaccgggcaaaatagcgcaatcagcaaagtgcaaactcaacatttgcaaatagtatcccacatataaaatggacgaatatgttattgaagagttaattaaaactaagagcagagcataggctaccccaatttaagccgaaagagagcacagt

SEQ ID NO: 10198 - DNA, 575 bp, Glycine max
  Clone ID: jC-gmfl02220113d05a1
ttcagaaatttatccagttccagcttacagttaatgttgctgctcttgtaataaatgttgtggcagcaataacttctggtgatgttcctttaaatgcagtgcagcttttgtgggttaaccttatcatggatacacttggggcgcttgcactggctactgaaccaccaacagaccgcctaatgcacagatcaccagttggccgaagagaacctcttataacaaatatcatgtggagaaacttgatcgtacaggctgcctatcaaatcgcagttctcctcgtccttaacttttgtggtgaaagtattctaccaaaacaaaataccagagctgatgcctttcaagtgaagaatactttaatattcaacgcgttcgtcctgtgccaaatattcaatgaattcaatgctcggaaacccgatgaaatgaatgttttccgtggagtgaccaagaacaaacttttcgtgggaattgttggagtgacctttatacttcagataatcatcatcgagttccttggaaagttcaccttaacggtgaggctagactggaagctatggcttgcttctcttggtattgga

SEQ ID NO: 10199 - DNA, 442 bp, Glycine max
  Clone ID: jC-gmfl02220113d05d1
aaaaaatcagtttgatagtatttctaaagtgacaaggaacaactttaacaatatcttgtaatgttacaatgtacatttgaaccaaaatttttttttaaaatgaaatgatgttaaaagtaaaaggaatcacgtaatgattgctttatgtttaaaccctttgggatttattgaataatatacattacattcgaattctaaaaggatagttcggcaatatggagcagtaataatatatactagtatattgtaacctgtaaggcgttagcttaatatgcatggctggttatccacgcgatgcctattgtgtagcacgagacctaaacctttttaatcgcctgagtggcttcaagaagttacgagccaatggtgttttgggaactggaataaattttccgactttatcaaggggccaactgacaaatccattaccaagagaagcaag

SEQ ID NO: 10200 - DNA, 504 bp, Glycine max
  Clone ID: jC-gmfl02220113d06d1
gagtcagcaagagtaaataccatacaataatgttgaaaaaggttcactttacaagttgggaaaacatctcccatgattatcctatgatgtcatgattaaaagaaatcagagttcaatttcaacatttcctatatatcaagacaatttcctcgtggagacacccaatctcatccctacagaaaccaaggtctccagtgatctggcgctatttgctaaaaggtcttcatcaattgcaattgaattctcttcaaaaacgcaaattacagtgcttccaccgaatgagaaatatccaaactcatctcccttcttaacatagtcgccctttttctttgtaaaagtaatgctaccaaccattgtagctccaattgcaacaaatgccacctttccaaaatctacagttgaaactattgaaacaactctcttgttctccgtgaagacattgcagtacttgctatttacagcaatgggattgacagtatacaagcatccagggatatctacaga

SEQ ID NO: 10201 - DNA, 552 bp, Glycine max
  unsure (1)..(552): unsure at all n locations
  Clone ID: jC-gmfl02220113d07d1
ataagaaaatatatcaaattctacattgataaaccaggagacagtattttctataagtaccacccctaaagaaaatccagaattaaagccaacttaacaaaaccagcatccaccatatataattcagaaacaaatgcaaagctaacaaatagaacctaagcctcggtggtaggatactcaaacacaatatctttgcccgaaagtttcctgtatactgcagcaaaagtctccaatttgtactcggtgttgtttcgctccttggggtccaaaaagaccttcataatcttggaaccatcaattttatacctaacacgctttccaacaatctcagcaggcaatacaatatcttccagcattgcctcgtgtacagcagtgagtgttcgggtgcggggacgctgaacagcagaacctttctttggtggcctcaatatcctccgggtggcaatcaggattacatcctttccactaaactttttctcaagttctctcacaagcctgacatgaatcttccggaatcctttncttaatctgtangggacatggataaccaca

SEQ ID NO: 10202 - DNA, 306 bp, Glycine max
  Clone ID: jC-gmfl02220113d09d1
gttatattaattttttattagttttgatagcttttattatctcttcaaacaatttgggtataacataaatatagagcactagctataaccagccaaaaatgcccacgacgaacggggacaacacagaagaagaagacaactgcaagaaaaaaaggggacccgaaaagcgaaaagaaaggccatttcctgcacaaaggcaccaacagaagggcaagagaagaaaaggctataaaagacaacgatgacaagaagaacccaacgagcaactgaaccataagcatagaaaaagccatactaagaaaacca

SEQ ID NO: 10203 - DNA, 422 bp, Glycine max
  Clone ID: jC-gmfl02220113d11d1
tcctttttcttttttttttcttatctttttaatttttttttctaattcaagcaacaaaggataactggtatatataacaacaaattaaaatttaattccattgtatcaaagctcagactacctataaactgtaattattatgcctaatattaagacaaaatcctgcattttatattcaaggcaagtcttttcctatgcttacatgactaggggacctaccccgggctggttccctttcatctcggttcggacttggacttccgctttgactctgggccctttgctggactttgactacgactccttgagccctcattataaggaggagatcgtgagtttgacctctttctacaatgctgtgaaaatgatcttttttgactgttccttctatccttaggggagacagaatttgaatacttcct

SEQ ID NO: 10204 - DNA, 359 bp, Glycine max
  Clone ID: jC-gmfl02220113d12d1
gtgtattctgttgtctttttttttagtttatttgttgttcttgttgtagccaaaaaaacaaaacttttttgccttgggacccatagggggcccctggggttggccgactccaaaacggtcttcttcccctttacgacatgggggaccccccctaccacaaaggggccgccataaaaagccttttatatcaggagagtctctcccacaaactcaataagaacaggaagcccccgttttgggccccccaggtcaaaaaaaatatggggcaaatgtggttttgccgcatttttgagagagccccccttggaaaaaaacgcacccgctcattcttccccccgtgttaggccccctttcttccc

SEQ ID NO: 10205 - DNA, 552 bp, Glycine max
  unsure (1)..(552): unsure at all n locations
  Clone ID: jC-gmfl02220113e01a1
aaaatgctcaagatcccggttcaccaggtggccgggcacaaggccaaggacggaatcctgggcccactcgtcgacgattttggaaaattctacaagcccctccagaccaacaaagacgacgacacccgcggctccaccgaactctccttttacacctctctcgccgccgccgcccacgactactccatccgctccttcttccccgcctttcacggcacccgcctcctggacgcctccgacggctccggtccccaccctcacctggtcctggaggacctcctctgcggctactccaaaccctccgtcatggacgtaaagatcggctccagaacctggcacctgggagactccgaggactacatctgcaagtgcctgaagaaggacagagagtcctctagcttgcccttgggtttcagaatcttcggagtcaaggactctatctcctcctgggaacctaccaggaaatctctncagtgtctatcccgcaatggtgttgcactttgttctcaacagtttcgtttcctcttataatatcaaccatgatgatcatca

SEQ ID NO: 10206 - DNA, 464 bp, Glycine max
  Clone ID: jC-gmfl02220113e02a1
tcggttgagaatgcttaccctgaagatagagcgagatacaaatgggatgctgcagtgccatccttacccacatgagtatgtagacacatccaagccatgtgcacattctgcatttttcatgggcttggcaagggaaagagggagtaagaggtcaagaggggcagcaatttgatatacgtggaacagttgatgaattcagacaagaaataaatatgtacatgtactggaagccagggatggatatttttgtttctcatgttcgtcgaaagcaactccctgcatttgtttttcctgatggttacaaacgcactcgaatgccaaggcatataagccatcaagctgaaataacaggtgatgatgccacaaactgctactctgggcctggattgtctgaaagatgcatcaagaggaaaaattactctgaaatggtggataagaagccagacaaaccagataagcgggca

SEQ ID NO: 10207 - DNA, 511 bp, Glycine max
  unsure (1)..(511): unsure at all n locations
  Clone ID: jC-gmfl02220113e03a1
cgcaacttgcctctgtgacagttggacgttctcatccttgattaccatatattcctgcactgggaatgtttcggaagctgaaagaatgttgaatgaaatgattgagtctggctctcagcctactatttttgttctgacatcacttgtccagtgctatgggaaggttgggcgtactgatgatgttgtgaaaacatttaatcaactcttggatttgggcatcagtccagacgaccgtttctgtggttgtcttctgaatgttatgacccaaacaccaaaagaagagcttggtaagctaaacgattgtgtgaagaaggctaatccaaagcttgggtccgtggtaagatatttggtgagagggcttggggagggtggttgngagatttaaaaaaagaagcatctgaactctttaattcaattgctgatgaagtaaagaagcccttttgcaattctctgattgatctttgtgtcaacctgaatttgttggacaaagcatgtgagcttctagacctgg

SEQ ID NO: 10208 - DNA, 593 bp, Glycine max
  Clone ID: jC-gmfl02220113e03d1
atccaaaaaaataattatatatatgatctattacaaaaaaatcctcaaaagacaaaggaaaatgcataaaaactgcatggcatatcattccctgaaattacattatcaatggagaaaagctgttggaatacctaaaaccataaagagataagaaattatgctgttaccaattcccgagactccagccatgacttggctgctacctgtgtagtcaaaaaccagccagccttatccggagcctcatggaatggagcattgagttcgttcaaatgtgattcaactacacttgccaaacctttgtccgaatacctgtgtttcccatgaccagtattaattccaagcagcggtggaagatcctctcctgattccaaagtcttggacaagtcatttatccaagcatgtaatgcagtcagcgaagctccaagcgagagactctttagatgtagagaccactgagtttgagacttggactgtacatccgtatatatttcaagggtcaaccccaggtctagaagctcacatgctttgtccaacaaattcaggttgacacaaagatcaatcagagaattgcaaagggcttctttacttcatca

SEQ ID NO: 10209 - DNA, 511 bp, Glycine max
  Clone ID: jC-gmfl02220113e06d1
acaaaggattagataaccaaatttgtatagtgaatgtttgaaaaaacaaaagatgaatagaaaaaaaagacgggtacaataagaatgcttcccctcactcatacatgttagattcatcatcattagaaaaataaaaataaaatgtaaccctgccaaactctcgcattttaaggcccaccaaccaattaccctgagcctcgtgtggacatccaccagcatacctcgatcttcaaaatcgttcacactccctttccctctttccaactcttaaaaaatgagagcatccacctcactcaacaagaatgtatctgccaatacatttggtaatagtgtcatgtgcaggaagcttgtcatgtcagtgtatcttgcttgtcatgtcagtgtaatgttcctctggtggagttacatatgtacatgacatttgcaaaagagaaaaagagctctaagtgacgccttgagaaacacaccaaggcagtggcacagccaaatattctactatttggcagaagaa

SEQ ID NO: 10210 - DNA, 567 bp, Glycine max
  Clone ID: jC-gmfl02220113e07d1
aaaaagaactctcatactctatttcttcttttttgtttcactgtatactattctactagcagggtcctattaaacaacaggaagttcatctttggtatcttcattttctcctcatgctcagaaattatatccagcatgattatttcactagttcttagtaaagagtctatgctttgcctgtatattagtagcttttttctgatagagctttccaattaaccaaaaggaaaatctccttatctaacagccaccttcgcctaattttaacactcatgcccctaaagagatatatttaaagcacattttttgtctcatcactttcatattccaaatcctgcaatatcataattcttaattctaaacataactcatggagctccaacacatcccccagcattcaagtcaagtggctgagtaatgaataatgcttttgacgtatatgttggagaatatttgatcacagtttcaatttcatgtacttctcatagaagtcttgtatctcctcttagtgacgccttcatcatattctccagcactttcttccacccagcgaacgtaaaatgcatc

SEQ ID NO: 10211 - DNA, 89 bp, Glycine max
  Clone ID: jC-gmfl02220113e08d1
ttttttgattattttttaacgttttatctcttttaattcctccaacgggacttatttttatacttacaccaaacttttttaactattct

SEQ ID NO: 10212 - DNA, 466 bp, Glycine max
  Clone ID: jC-gmfl02220113e09d1
acgttctattatatatatatctatctatattctatatatagatatattggttagggtatcaagttttaatctgaaataaataagaattgctgcttctaatacttataataattactacaaattctaataattactacaaaagggatatatgttagataaaatagattaattaatctatttcacaaaaaaataatggatccatagcacagtttcgtcttataatacctcgggggctaatgaactattttagtgaaatttaactgtctcaattcccgggcgattgcccaaaagattcgagttccttttggaattccttcttgatcaatgacaactgcagcattatcatcatactgaattattataccgttgctacgtttgagttctttacaagtacgtacaattacagctctgatcacttctgaactttctaaagtcgtatttgggactgcttgtttgattaccgcaa

SEQ ID NO: 10213 - DNA, 459 bp, Glycine max
  Clone ID: jC-gmfl02220113e10d1
aaaccagaatttttgtaaacaaaatttattggtccaattataaatcgagtatgataaaactacatagaactagaatccacaaagaatatcaacagtcagcaatacactgcatggatttcttattttataaccgaaacatatgctttaggcagcaggatttgattggttggattcttgctgttgtttccactggtctggggtaacagctttcttaatagagagagcatggatttgtttcatttcctcctctaaggcagcattcaccattcgatgcctctcaagtagccttttgccttcaaattgttctgatacaatctccaccacaaaacttgcaccgcaccctccagatgtatcaaccacttcaagatgagaagggttcagtttggccttcaaggatgattcaacttctgtcttcgtcacgcccatctctcttctctcagtcttctttttcgcccttta

SEQ ID NO: 10214 - DNA, 522 bp, Glycine max
  Clone ID: jC-gmfl02220113e11d1
gcatatatcacatgtcctctttctcattaattatatcatcacacatatcattacactctactagaaagccacacagctctggtaaagctatgttcttaattcctatcacaaatcatatatagatccttaaaggatcataacactagtttggtccccaacttcccataacctataatagctagaagtacaaagtacatcaagaatatctactaccttttgaacaccatctacctcacaatttcccttgtggcctccaaaggaaaaactcacgagaggaagagatttaatcaaacacacttatccttattgttcaaccatgccaaaccctaagaaaaccaaaggaaacaaatctcattatgagacaattaaggttaaaataaagttaattttatttactgctgcaaccttttcttcttcatcttcttcaggaatcacctccttcttgcagcagtctctccttgagcattgaagtaaactgcagcaactggtaggccaaggccattctcttctgagaacctcctt

SEQ ID NO: 10215 - DNA, 287 bp, Glycine max
  Clone ID: jC-gmfl02220113e12d1
tcgctctgagatcatattaaatacccgctcatcattttaaaacaacaattcactaagcttatatcaggacatcattggattcctcctgttgtctttctctgacacagctactgttgccaactgcacaccagtgtctcagaataatgcgatcacttgtgggaagtacataagctccttttctttagtgggaggaaaccgaaggtgatcattttttgacgctcacttggagcccaatagccctactataagatacccggattgcatgagccatgagtggaactatgtcg

SEQ ID NO: 10216 - DNA, 574 bp, Glycine max
  Clone ID: jC-gmfl02220113f01a1
attggctgatgtcagcagatagcatggaatcttgatgataaattatgctactgggtgcatatttgagtatgacaaagctcatccagagggttctggcattggctttaaggaggaagacaaacccaacttcattggttctttctattccaaaactaaggctatggtcgaagagctcttgaaagaatatgacaatgtgtgcaccctcagggttcgcatgccaatttcatctgacttgagcaatccgcgcaatttcatcaccaagatttctcgttataacaaagtagtcaacattccaaacagcatgaccattttggatgaacttctgccgatttcaattgagatggcaaagcgaaacttgaggggcatctggaacttcacaaatcctggggccgtgagccacaatgagattctcgagatgtacagggattacattgatccaagcttcaagtggactaacttcaatcttgaagagcaagccaaggtgataattgctccacggagcaacaatgagatggatgcatccaaactgaagaacgagttccctgagcttctttccatcaaggaatcactgatc

SEQ ID NO: 10217 - DNA, 501 bp, Glycine max
  unsure (1)..(501): unsure at all n locations
  Clone ID: jC-gmfl02220113f02a1
cgaacaactcatctccggcatggaagatgccgccaacaactttgccagaggccactacaccgttggcaaagagatcgtagatctgtgcttggatcgcgtccgaaagctcgcagacaactgcactggtctgcagggcttcctcgtcttcaacgctgtcggcggtggcaccggttccggtctcggatctctcttgttagagcgtctctccgtcgattacggcaaaaagtccaaattagggttcaccatttacccttcccctcaggtttcaaccgcagtcgtggagccctacaacagcgtcctctccacccactcccttctggaacacaccgacgtggctgttctcttggacaacgaagccatctacgacatctgagngagatctctcgacatcgagaggcccacctacaccaacctcaacaggctcatttcgcagatcatttcgtcgctaaccacttctttgaggtttgatggcgctatcaatgtggatatcactgagtttca

SEQ ID NO: 10218 - DNA, 471 bp, Glycine max
  unsure (1)..(471): unsure at all n locations
  Clone ID: jC-gmfl02220113f02d1
attcaaaacgaaaatctggtaaaaattgcgagcatataaacataagaaatcaacttttgacatggacaattctgaaaacatgacagaggtcgcaaacaacaggtcctaaaccaccaaaatagaagcataatgatgatatcacttcacagtttgaataatggagaactatatcacacaggagtaaaaacaaaaaggaacgaacaatactggttcagggtaatgtaacgaagcatataccctttttactcgaaacaattacattgataataaaaccttcatttatgaatagtcctctccttcctcatcatcttccgctccttcagccccaacctcctcatagtccttctcaagagcagcaagatcctcacgagcttcagagaactctccttcttccataccctnaccaacataccagtgaacaaaggccctcttggcatacatcagatcaaatttgtggtcaatgcgagagaa

SEQ ID NO: 10219 - DNA, 292 bp, Glycine max
  Clone ID: jC-gmfl02220113f03a1
cttcctcttcacaggattaaaggaactccaaatggggaggaaagggggttggttttctgcagtgaagagagtttttgtttctgattccaaaaaggaacagaaacaccatcatcatcatcatcatcataagtcaaagttaggatgttttgggactcatcactatgaggatctagaaggagcaccaattgccgttgttccttcacttccaccaagaaaagatcccaaaccaataagtgaggcagagaataatgaacagagcaggcaagccttttctttggttttggctactgct

SEQ ID NO: 10220 - DNA, 593 bp, Glycine max
  Clone ID: jC-gmfl02220113f03d1
gaataattgataaatactttacaaacagaataattaatgagtaattacataaagaatatatattgtcatcaaactagtatcacccccaaaaccaatcttgttataacatcacaaatagcactactataaccagttaagaagtaaaagaagaagttgcctacattgattatgaagacaactgtaggaataaaatgattacttgatcagccaaattttattccatttcctcccccatggcaccaacagtatggcttgtgaagaaaagttgatagagacaactataaaaagatgataccatcttttatttgattcatcttcattcatatttctattctaagtacaccaatggcacgcatgagcatgatgcatccctacctgctccctccatttctcattctcactttctcctcagggatggtagcattagcaacactcttgttggaagccacatttcccggtctagttgaaacagcataccttcttgtaccggctggagaagcagggaaagaaagcctcttctttatgagagcagaagctgctttttcaggtgttccattactatgttcgccaaccaatgcacttctcactttgga

SEQ ID NO: 10221 - DNA, 583 bp, Glycine max
  unsure (1)..(583): unsure at all n locations
  Clone ID: jC-gmfl02220113f04a1
ctccggcttgttcagtctttcttggttctttgttactctcacacatgtctcgctccgtgcctttggtttcaaccatttttgtcttgcttctgcttctggtggccactgagatgatggggccaacaatggtggcagaagcaagaacttgtgagtctcagagccaccgtttcaaggggccatgtttgagtgacaccaactgtggctctgtttgccgaaccgaacgtttcactggaggacactgccgtggcttccgtcgcagatgcttctgcaccaaacattgttaattttaaaaaattaattaagagtgctttgatagaagatgatagatctatcatctttctactcgtgttgttaattaaccactttgtgtttgagaataagggttacccattctactatgggtttctttgtttgcctcttattttatctagttagagatccttttatgaaacgagtgatcagtgtgaaggattatgtatctgtgttggtaattaatattattctagtaaattttattccgtcgngactttttatattctgttttggttgggtcgcagataaaaggatntattatgtacatnct

SEQ ID NO: 10222 - DNA, 596 bp, Glycine max
  Clone ID: jC-gmfl02220113f04d1
aggatgtagcataataaaatccttttatctgccgaacaaacaaaaacagaatataaaaagtcacgacggaataaaatttactagaataatattaaattaacaacacagataacataattccttcacactgatcactcgtttcataaaaggatctctaactagataaaataagaggcaaacaaagaaacccatagtagaatgggtaacccttattctcaaacacaaagtggttaattaacaacacgagtagaaagatgatagatctatcatcttctatcaaagcactcttaattaattttttaaaattaacaatgtttggtgcagaagcatctgcgacggaagccacggcagtgtcctccagtgaaacgttcggttcggcaaacagagccacagttggtgtcactcaaacatggccccttgaaacggtggctctgagactcacaagttcttgcttctgccaccattgttggccccatcatctcagtggccaccagaagcagaagcacgacaaaaatggttgaaaccaaaggcactgagcgagacatgtgtgagagtacacagtttcaagaaagactgaacaagccggagctcgagct

SEQ ID NO: 10223 - DNA, 410 bp, Glycine max
  Clone ID: jC-gmfl02220113f05d1
acattaaatgccctggacggatttgcattaaaaccaagttccggaagggaacttcaactaattctaggcttacaacaattaccattaggaagggaaaaaaagagagtttcaaaaaccatcgagtattggggatcaaaaaaaaaaccaagggaaaaaccgtaaagggcaacccggggggggggggggttccctggtaaatataccggataaaaaattaacccaccttcaacatgcaaaagcatttcaaattttcaccccaattttggaacattaactttatacccaaattgggatttaaaaggttcatattgaagcttcaatttccaggaaacccatcaaaattggaaatttgagggactctttacaaggctattccctttttttttaaagaagtcacccttacttaaaca

SEQ ID NO: 10224 - DNA, 469 bp, Glycine max
  Clone ID: jC-gmfl02220113f06d1
acaacaattaattgtttttttttttgtacaaacaattatttatagctatacatacaggatattcttcatgtcacaatgaaaaagtacaggatatgtaatcaattaatattggtataatcctatctactatctataatcgaatcatcgatcggatccagctatagctccttcgttccgtcgacaaaaggaatgcagacagtggacaagggaagacgaaagtacagcaatttgtgtaccctcgaaagcacccaacacaaactacatgacaatttcattttcctatattttatcaacaacttgttatccattttttggaaatcaattccgccccacaacacaacacatccgttttgtttcataaacctgcatcaaagggtacgccactcccaggaatccacgagcccccagccaagaaacttccaacggtgaattttacagcctcagtactggagatcacgcgaaacccttt

SEQ ID NO: 10225 - DNA, 268 bp, Glycine max
  Clone ID: jC-gmfl02220113f08d1
gatgtaaactatgacgaccccacaaacttggaaaaggtacatgatcactggctcgaaaatgttgagtccaacggaagaatgaaatggctacgttatacagtactcacaagagaaacgcttttcggcaagaacaataaataatggatgttacactttaagcacctacctaatccaggacatggtacacaccagaaaaatgtgattttttctggtaaactatgtgctgcttgaagtaggaagctgtatgcatacttcttattttcttatt

SEQ ID NO: 10226 - DNA, 393 bp, Glycine max
  Clone ID: jC-gmfl02220113f09d1
aggtaaatatgattcaatgaaggctcttttcatcatttttcaacctaaaagaaaaagaaaaaaaatgctatctttctgggtgctaatccttacctagtgaaaaggttcatgtgggtaccatgtagcccattcatcttggagatatttcacccttttttttcatttttattttctccctaacctttttttcttcttttctttatgggactcgtataattggtggctttttatcactgaaattgaagatattgggggctcatgagtggctgcttgaacctgaaggtcccttggggattctgggtctggaggttggtgttggggaaattgccagagggaccctgatatttctttaacgggtataataacatgttggcctcatgatccctgtttgga

SEQ ID NO: 10227 - DNA, 546 bp, Glycine max
  Clone ID: jC-gmfl02220113f10d1
acgattgaaacaccattgtattaggttccaaactggtgaagaaaaatccagtagtacaacttgaaatgaccaaaagtaaaaagaaaaggaaaaacttacaactgaaacaacaaacaaaatttgtgaaagaaatttgactgaatattctttgcatggtttatactattgtatagcattaaagctatcaaactggattgttcttcaccaggtgtatattgcaatatgtgttatgtttcaatctctataataacttaaaattcattgtaattcctctgaaggacattggatcaactctaatatgttgattaccttagccatatcaggacggtttgagggcacttgtgatgcacaaaccaaccccaattttatcacaggaattgctttatctgcagcaaaattacccttaagcttctaatcaacacattgctccactttgtcatcattcaatgcacttattaccttgtaccaagaacacaacatatcctccgtgtattcaaaggcttttcctgttccacctcaaattaaaattcaaactataatggacac

SEQ ID NO: 10228 - DNA, 526 bp, Glycine max
  Clone ID: jC-gmfl02220113f11d1
ataaattatgtttatttaattatagtaaaattagtattattgggaacataattttaaaatgcattggttaagcatatatataagtatagcgacacaaaagagcatatataattatgatattatcaaataaaaaactttagaaaaatatataaatttaaataaatcacaaatgaattcagtaaaaataaattaggcccatagaggaatataaacacatacaactttgattgacattaattctctgagcaacaatgtcaaatagtcaatattaaagctagtagtagatgcaaattatgcaatgtaaattatcattgtttagaaacatattatcattagtgagatctgatttcattacctatgaatacattgtatactcataattaatatcgagaaacttaaagagtgccaatatttttcttcacaaattatgaaatacatgttacatacaaagttgtagaataatcaagttaattattaaattcatgatcataaattgaaaaatggtagaaacttgaacttacatgat

SEQ ID NO: 10229 - DNA, 565 bp, Glycine max
  unsure (1)..(565): unsure at all n locations
  Clone ID: jC-gmfl02220113g01a1
gccggggttttggttgcgcttacattgtgttctctgcggcgcgagctagctagggtttagaacctcgcagttacagaaaacatggcgactgtggtgccaacctccgaagaagacgctgcactctccgtcgttcgattcgcctctgaacttgcctgggccgatgccggtcccgaggttgctgagccccaagttagcagactctgcgtggaggctgaagaattcattgttatgggaaagtggttggagctagcatcattgatgattacctctgctgaattgattttctcgaaggtttctgaaaaagatatagagtccatcttcactatcatctgcaatcttgttacaaagaccgaaaatccagatgaagtgatggagattgtnaaagttataactacaaaaatactccagcagccaaatgaaaagcctgctgtgcgattgaagattatgatcagcctgtacaaccttttggagactccatactgncagttttatgtctcatgaagttactgaatttagctgttgatgggaaagtcacagaacacattataccttcattcaataagaa

SEQ ID NO: 10230 - DNA, 327 bp, Glycine max
  Clone ID: jC-gmfl02220113g02a1
aacaccgtgaccacctcccctcctataatcaccggcctccaaccacacaaaaagaaccttttaacgtctgcaacaaggagaacactcatgtggaggcagatcgtgaacgttaccatcactacccagctatgcatacatctgagctcctaccgcacagagcgcaccttcggacgcgaagggcaagggccgacactctagacctccgcacgagaagcatactccttcagtacattaattaatctaacggaggcggtacagaccaccccgcatgcactgttgtgaaaatatagaacccactgatggttgaagacagtgagaagcccaatc

SEQ ID NO: 10231 - DNA, 339 bp, Glycine max
  Clone ID: jC-gmfl02220113g02d1
ataaatactagtttgacaccctagttgacaaaggtgcttagaaaattgaggaaatgatgacctatatgattgcatacctgtggcatgtgcatatttatttctaccaactgcaacgcctatgtgaccaaagcacaaacaaccacactactacaagacaataacatgggattaatgcatgcctttattttaagagccatgagattggactctaattgattaaaccatatactctaatatattttggcatgagtggatgcatgggagttcgtaacagctacactagatcaatccatttcccgaatgacgatgctccttgtggggagggttatagtgaccatc

SEQ ID NO: 10232 - DNA, 496 bp, Glycine max
  Clone ID: jC-gmfl02220113g03a1
gttgctttccattttggctataatttcacaaaatgtgccattcattgcaagtgtaatattactagcatttccatatatcagtccatggcctccttaatgctcaatggagctcatcaaaatccaaacctcattagtggcatagctccaaatggccttaactttcacaacaagtgtttattccaaaagggtgtgctgtctcatggtaacaagttaagggtggtcagaaaaaacttcactcccaaaggcagcatgtcagcatcatcatcatcatcatctaggcctggttctcagccaaggttcatccagcacaagaagggaggcatttggttctacaggtttctctctattgtgtatgaccacatcataaacccggggcactggaccgaagacatgagagacgaggcactggagcctgctgatctctacaaccgcaacctgagagtggtggatgttggaggtggaactggcttcaccactcttggtatagtgaagcatg

SEQ ID NO: 10233 - DNA, 447 bp, Glycine max
  Clone ID: jC-gmfl02220113g03d1
gccaagggtaaataaattaaaaatgtatttggggattaaaaaagcctattccaattcagttaaaacttgccaccaacgcacattttccaattaaagctaaaacaaacctttttgaatgttgtcatggttaccttggcttgtccatttggtcccaagcaaagcaaaagaagcccaacattttgatgatcctgccctggttcattgaaccattggctgccaacacacattctatatttctttgcccaagcaacaatgaccaattcaaaacctagtgaagctagtaatggcccaaaactaagctaatggttttgaagcatttcatccctaagtaactctttcctactatgttggcccaatggaaagattccagattgaattattatccttcacaaacaggcgtttaaagatgtgttgcgggaaaacttgaccttcctacccgagttactt

SEQ ID NO: 10234 - DNA, 508 bp, Glycine max
  Clone ID: jC-gmfl02220113g04a1
gcagaaagcaagctcatcctagagttttaaaaatggcagcagcctcctccatggctctctcttccccatccttggctggcaaggccgtgaagctgggcccatcagcccccgaagtcgggagggtcagcatgaggaagaccgtcaccaagcaggcctcctccggaagcccatggtacggcccagaccgcgtcaagtacttgggcccattctctggcgagcccccgtcctacctcactggcgagttcccaggtgactacggctgggacactgctgggctttcggccgacccagaaaccttcgccagaaaccgtgagctcgaagtgatccactccaggtgggccatgctcggggccttgggctgcgtcttccccgaactgttgtcccgcaacggggtcaagtttggagaagctgtgtggttcaaggccgggtcccagatcttcacgagggtgggctggactacttgggcaacccaagccttgtccacgcccaaagcatcctcgccatctgg

SEQ ID NO: 10235 - DNA, 556 bp, Glycine max
  Clone ID: jC-gmfl02220113g04d1
gtaaaaagcaagtatcattaagttggattgggatacacaagataattcacattatctgaagtacattgcaataacatatacttcaccaaacacaaatctaaaaactctcaaaagtccacaagtcatccttttctttcatgctcacttgccggggacgaagttggtggcgtaggcccaggcattgttgttgactgggtccgcaaggtgatcagcaaggttctccaatggacccttaccggtgacaatggcctgaacaaagaacccaaacatagagaacatggccaatctcccgttcttgagttccttcaccttaagctcagcaaaagcctctgggtcatcagcaaggcccaatgggtcaaagctgccaccagggtagattgggtcagtgacctcaccgaggggcccaccagcaatacgataacccttaacagcacccattaggataacttgggtggcccagatggcgaggatgctctgggcgtggacaaggcttgggttgcccaagtagtccagcccaccctcgctgaagatctgggacccggccttgaaccacaca

SEQ ID NO: 10236 - DNA, 570 bp, Glycine max
  Clone ID: jC-gmfl02220113g05d1
aattgaaccagcgagaaattaacccttttatcatagtctgcatttataccaaatttaatcaacaaattacatggcacaataaactgcaagttacacgaagaattacactcttcaataagttctccattccgtgcgctattataatatcccacttacataatcaacgtcactcgatcaccttcacttcacttcacttcacttggtataccaattcacaaagatattagccttgaaatggaaaaaaaagggtattaagtattaacccataaaggaggaggacatagaaaaataaaatacagaataaacaactttagagagaaagatgatgatgaagatgattaatatctctctctaagtagtagagttagttgttgtctttggcatgatcttttgcaatattatcgttttcaacttctcctccttccgtggtaatagcagaagaaacgtagctcagcaccaaagaattatcgtcggggctggtggtggttgcatttcgagcttggaactgttgtttgcaaagtggcaagtgatttggagcatggtggagttgatttgcttcattgcatgttc

SEQ ID NO: 10237 - DNA, 449 bp, Glycine max
  Clone ID: jC-gmfl02220113g08d1
aacaccaaaacacatttattaaacaaaaataaagaccatatataaatcgattggtttatttatgcctgtcggcaaataaatatataatgtaaaaaaaaaaaaccacaaataaagatctaaaaaattgacactattatatacatctcaatatcaatcatcacatatcaccctgatcggtatgatccaccggagttgttgtacggcccctccgtcgagattgccggtggtgactgccgccaaatttcaaccttccggtctccttaaacctttgtttctcggagggtacaatgacacactcgggttgtggcacagggtaccttaaagtatcatagcaatatgaatagtacatgtaacgctgacggaaccgccgcatggtgaggcggcgcatgggggtcacgccggcatagtcttgagcctcgagatcggcgtgttggtcggagcaagacttg

SEQ ID NO: 10238 - DNA, 476 bp, Glycine max
  Clone ID: jC-gmfl02220113g09d1
attcaggaaaagtacttactacataatcaaattgttcattacatttatctttaccacaagtagcatcacttgctgctctttgcttaattttaaccgcacaaggcagcttgcaaagatgggatccatgcttacacgaataatgaaaacagagaagttgaacagagttctgcaaaatactgaaaacaaaagttttcataccttttcttcattttggcacaatagcattccgttgatctgagtcattaaccagtaagtttaatttgttcaagtggcaaagtaatcccatcccaatatagatagcggaagttataaaataactgctgaataggtttcaaacaaataagataagatcgttgtgtagtccccagattgaaatccagtattgtgatcaatgaagtaaggaacctttttagatccagaagcatccaagagtaacttcattcgaggagacccttctcctacattttgaagaatgt

SEQ ID NO: 10239 - DNA, 445 bp, Glycine max
  Clone ID: jC-gmfl02220113g10d1
aaagagaacttcatgatcatcaaccatccaaggatttaagacgaaaggaacaagtacaaccctcgaaagtgaattaggaagaaaacacaaggaaggaaaaccatacacagaagaagattccagagaaattcaataatacacaatccttttttttttattttcatttccccccctctagtagtcagtggcgggaagctgctcgtgggtgtggctgataaagacagcctcgtaaacaaggccagcgaatccaccaccgatgagaggcccggcccagtagatccagtggttggtccagggccagctcacgacagcaggcccaaatgtcacatcggggttcaaggccgatccagagaatgccccacccaacaaaatgttaacgccgacaatgaaaccaatggcgatgggagcaataattcccaaattacccttcttggggtcaatggca

SEQ ID NO: 10240 - DNA, 449 bp, Glycine max
  Clone ID: jC-gmfl02220113g11d1
gctggtgtaaaaccttcacgactttctatataacagaatataatagattgttacattctaatatagcaactattgtcaaaatcaaggcaatagctgttgttggtgtgggagatacaacaggtaaatgaaataatctacatgtaaaattctaaatagacgagggtttagatgaactccaataattacattaacttacaaatatggattactaaaagaacacaaatggcgagtacattcacgtaggccagcaaactagtgaatgggggtatgtgcaaaatcgagctaaattaacaacgcatagggaagagtaagagatgctgcttgcctatgcttcaaaagaaaataaaagtgtcctataaagttagctctctaaactttggtcagcctctggctccttggattgaatggctcctccattcattcttgcacgtgcctctgcaaacattctt

SEQ ID NO: 10241 - DNA, 313 bp, Glycine max
  Clone ID: jC-gmfl02220113g12d1
caatgagcaagatatgactatgactttttatttgactggaccattctaaaatatcaggaggcgcatcagacaaagaaacaaaatcaatcatcttcttcaacatgccgtgcctaacaacatatagccggtcgctgtggaaatgcataaaggaggaaatgaggcagtgcatggtactggcacggaactggtgctcaacttcatgaggctgggtggactaagagatctttataagccaactaatgtggataatttgtaagccacaaattatattgggatatacgggaggagcgatagaacatgtaccttctaagcc

SEQ ID NO: 10242 - DNA, 492 bp, Glycine max
  unsure (1)..(492): unsure at all n locations
  Clone ID: jC-gmfl02220113h02a1
ttttaatttgttttgttattcttgttttccctttgcaattgtttcgtgtatatcttcttacatataacaaaccattcatttttatggcattggcattgggtaacattgttgctcttcctctctcaaacttgaaaccttctctaaagttatcttcttcttcatcctcttgttgtatcaccaaactcttccccatttcccgcatcaatgtctctcccacctcggtattagttcgagcctcttcctcatcctctttcgggtctcgcctcgaagacaccatcaagaagaccgtagctgagaacccagtcgtcgtttattccaaaacctggtgcacctattcttccgaggtcaaaatcctcttcaaaaaactcggcgtcgaccctctcgtcttcgaattagacgaaatgggtcctcaagggccacagttgcagaaggtattggaaaggatcacagggcaacacactgtgcccaatgtattnattggtggcanacaca

SEQ ID NO: 10243 - DNA, 571 bp, Glycine max
  Clone ID: jC-gmfl02220113h02d1
attatatattttttttgggattttttttttttttttttaattgttttttgtatatggggttaaatataataaactatttaattttatgtgtttgattataagagaaacaaatgatgcaaattacaatcataaaacttaaaaaaaaaaaaaaaaaaaaaagggcccaaaaaaaaaaaaaaaaaaagagacggggggggagaaaaaaaaagggggcaaaaaaaaaaaaaaaaaagggggaaaaaaaaaaacacccccaaaaaaaaaaaaaaaaaaaaacacaaaaaaaaaaaaaaaagggggaaacccaaaaagggaaaaatacaaaggaaaaaacaccaaagaggaaaaggaaaaaaaaaaaacggaaaaaaaacccccagggggaaaaaaaaaaaggccccggggggttacaaaacaacggagggagaaaaaaaaaagccagggaaaaaacccaaggccccaaaaaaaaaaaaaagggggggggggaaacagccccaaaaaaggggccacaaacaaagacccgaaacaaaaaaaacaccccaaaaaaaaagagggaagaaccccaagcggc

SEQ ID NO: 10244 - DNA, 567 bp, Glycine max
  Clone ID: jC-gmfl02220113h03a1
atcgtagtgtctttcttccttctccctttgtgatcgccttctgttgttgctccactcactatcttcttcttctaaaattattttccttttctatccttctatctatcattcttttacgctaaaaatcttctcgcttcttagcttagctgttctgttccagaaacgataaaatcaatcaatcaaaggaagcaaaaaagtcagaatggatctgtgtgctgttcatgcgaagaaccttttccacacaaattcgttttgccacagacccatttcctcccatttgggaaggaccagagtgtttgagatcactgtttcgaggagaaagccttactctaaagttgggtatcgcccatttgttgtcagcgccacggggaagaagaatcatggcaactcctcttcttctggcaatgaagaacggtccattcccgaaggagatggtactagagggaacaattcttctgatggcaacaaatcagaaaacaactctgagaaatgccaccatactaatctgggatggcgcgagttcacgggcaagctatatagagatgagctgaaagaatatcagatgct

SEQ ID NO: 10245 - DNA, 564 bp, Glycine max
  Clone ID: jC-gmfl02220113h03d1
agataaaattcgaaagtttaatcgtaaaatgcagccaacagaacttattctcatacttacatcaaactattctaacaagcataattacaagaacgaagcaaggtacagttcctcttataacaatagagtaggacaggaggataaattatctacttatttggcattaaagtgaacatcggtaaatttgactttgcagcaccttgattacacgttcttcatttgtctctaaatctgaaaccatacattagtacctacatgtcttgctttggcttccggctcaatttggagtaatggccacccattagctgcaaaatcttctcccacaaactttctgacggatctgataaagccccacaaagcaaacttgagctacatgcagctacataccaataatctgactcaatctcatctctcaactgatccagttgccatccggcataaccaacaaagaatctgaagtcatgaggcttgagaatccccttcttcacaagccctgcagcatcatccaaactgtatcgagatccaaaacatagcccagggattacctcttcaaatcctggaagc

SEQ ID NO: 10246 - DNA, 521 bp, Glycine max
  Clone ID: jC-gmfl02220113h04a1
gttataacatttatagaaagaaaaaatagaagaagaaagagttctgaccatggctgcatcattatttatgccttcatccatagtggacgaagaagcgaggtttgaagccgaagtggcggaggtgcaagcatggtggaactctgagaggttcaggctaacaaaaagaccatacacagcaagagatgtggtgtccctccgaggcaacctcagacaaacctatgcctcgaacgagatggcgaaaaagctctggtgccttctgaagaaccaccaagccaacggcacagcctcaaggacttttggtgcacttgatcctgttcaggtcactcaaatggccaagcacttggacacaatctatgtctcagggtggcagtgctcagccacacacaccacgagcaacgagccgggccctgaccttgctgattacccttatgatactgtcccaacaaggttgagcacctcttctttgctcagcagtaccatgacaggaagcaaagagaggagaggatgagaatgagcaggga

SEQ ID NO: 10247 - DNA, 459 bp, Glycine max
  Clone ID: jC-gmfl02220113h04d1
gcatgtccaaatatacactataagtaaaatatgtttaacagtaggggtaaaacaaattacaaaacacagaaaaacaaggtttccttggtctccttgcccacatggccaagagtctgaacaagtaagaaatataagaaattatgaaggcaaaaattgcagaatgattcaatggcccgtttaatacttcaattattgaggacatttattccaaattccaatccaacacagaaattggggaattttccccaagttccactctcggcagtatagttctgcaaaagtagcactttcacattctggccttagcaaccacaatactgcctctatcaatttctacagctcctggcctagtccatgattctttaaactgctcttcagttactccttttcccattgcagcagttgaagccacacctccctggacagtcttgagatacctatcatagtagttagcaccag

SEQ ID NO: 10248 - DNA, 420 bp, Glycine max
  Clone ID: jC-gmfl02220113h05d1
ggaaaagtaaccacccccttaaatttttttgagaatctcaagggatttagcatttgatccacgtcggagaccaaatttttgacagtatcttggttagaacccagtttttttattttggttggaagttgaaatttccccataaccattcaccagtcaaagttttacccttttcaaattttctaccgcaagaaatagccatccagagaatttgccatcaacctagctacccagggtgggtatgcacactccaccttcagggttttgctggtctttccatatccttcctgttactcggagcttcaactttttcctgtctccacccgagaagaaaagcgccatgttgcggtaaatgatgagaccctcatgggtggctcttaccttcttatgggtacctctaatgctttttggacccccctaaaa

SEQ ID NO: 10249 - DNA, 401 bp, Glycine max
  Clone ID: jC-gmfl02220113h06d1
aattcaagcaacaaacataactggtatataaaacaacaaatcaaaatccaattccattgtatcagagttcagacaacaataaacagaagtaatttgcctaatattaagacaaaatcctgcatatgatatccaaggcaagtctttccccatgctcactgactaggggacctaccccgggctggttcccttccatctcggttcggacttggactcctgctctgacctgggccctttgctggactctgactacgactccttgagcccccattataaggaggagatcgtgagtatgacctctttctactatgctgtgaaaatgatctttctcgactgtaccttctatcctcaggggagacagatcttgaatactcccttcgtttggcaggaggagaataataatc

SEQ ID NO: 10250 - DNA, 470 bp, Glycine max
  Clone ID: jC-gmfl02220113h07d1
atattattatataaagatagtctataatcactagaatttctatatatttatacttagtatataataattctagtgattatagctaagccaatatatatcataatataatatacccttttcttattcaaagaatttatggctatgccttatcatttttagtcaaagaaaagaaattatggaattgaaataactcactcagaacgccctttaaaagattacgcggtacgattgaatcaaataagcccttatggaataaatattcagctgcttgtgaaccttcaggtactgccttattcaatgtttgttcaattactcttttaccagcaaatgcaatataagcatttggttcggcaataatgatatcccccaacatgccaaaactagcagttacccccccagtagtgggagatgtaagtatggatacatagaataactttttatatttttgataatcatataaagcagaagag

SEQ ID NO: 10251 - DNA, 480 bp, Glycine max
  Clone ID: jC-gmfl02220113h08d1
aagtcaagatttattatatgacaaattatttgtacaatagataattgagtttactcataaacttaatgacacaggcacaaatgagcaacgacgtaatatatattcaacactaactaattctagtagtatctcaggtggtaagaaaggtgggaagaaaagacaggacttgccgtctatccacatgtgcctctcataacacgcaagagattttattcatgaaatatgttattttaagtacgtagaattacactgtcgtctcaactatgtatcctctgatagctagggcatcagcaccttaatcaagcaacttcactcactacatcatccccatctcaacagcctttacggaaatcctcctgggatgccaccaacgccaccaacaccaccaaagccagtgtttgagaagccgccgtcgacgccaccaccaaagccagggaagatgccggggaatccagtgccggggaatccagtgccggggaa

SEQ ID NO: 10252 - DNA, 525 bp, Glycine max
  Clone ID: jC-gmfl02220113h09d1
gttgataaaaataataattttaattaatgtttatgaaatactgaatttataacaatttcttacataaatgccacacaagcaaattcaaaggagcccgaacaaacttacacaatcgaggattattttttgttcatttcattgcccttgatcttcaaataagaacagtaaattattcatatcacagttacagcacatttattaaacaagttgtgaaattgtctgcttggttccttgggtaatggaacaaatttgtacaataagattattcaccttccacattattaaatcaagcttccaaccaaaatgattgcatgggatctttacaccaatagcttccaagtttctttgtagtccttagtaagcacaccagtctttggtcttcggtcttcggtcttctacaagatgtttattcttgaatagaacaagtcatgtgatccaagaaatcaagagttctgaaactgggatttgtagatgtcatgaccagaagtggctggatttactgggcacagcctaacagagaatgag

SEQ ID NO: 10253 - DNA, 159 bp, Glycine max
  Clone ID: jC-gmfl02220113h10d1
tgtacgtctgtgtgatatgatgcaactcgactgctacctctgcaggataccggttccggaattaagttcaccgggtacgtacgagctcacttagtccgtcggctcgctcctttatttttattttttttatcgaaagcattaatagaatattaactagta

SEQ ID NO: 10254 - DNA, 499 bp, Glycine max
  Clone ID: jC-gmfl02220113h11d1
acgtaaaattaaaaccagtatatgtcaatgtagtagcttatcgtgctaggtgagtacaacaccatggacagaaggctaaaagttagacctctttttgtagaaaacaagagaataagaggtattattgtttctacttgattcatttatttgtactaatttctagctgactattttttagtttcgacgtgcagatttcatgctccatgcttttaggtattccacggtgatatgctcagtaccgttattgaacacaaacaaatgagcttttttctttattgctagggtaggataaaccctagacaagatgtttgttcttcctccggctccaaaactctccactactgagtgatcaatcaaactcttgagagagagctttttatttttggctaaatccacattcacaaagcctgcaaatgatggcttgtacaattctctctttaaagaggaacttcttgcatcggagcacatgaaaatcacgtgctcgtttggagctttaaaa

SEQ ID NO: 10255 - DNA, 405 bp, Glycine max
  unsure (1)..(405): unsure at all n locations
  Clone ID: jC-gmfl02220113h12d1
gcgcgggataattgtgatctttcttgtgaaaatagttgcgagcgtagtagcattacactaaatcattaccttatgatgatttgattagcacaaatttacattagtttcatggcatccgatgcaaaaatgattcacaaattaacaaaggcatccgagtaagcccgaaataattatatatcatcatatacgacgatgaccgaaaaagtataaattgtacgacgaaatgcgccaacgctggtttcactntcatgaggggtaaccttgtaaaacctttttttccattccagtaaaattttcttgacagacctgtttctcagtctttactggtggattgatcactgatccattatgcatcgnggcactggatttgaaaggaaagtttcgttaggaagcaacaccgatgga

SEQ ID NO: 10256 - DNA, 484 bp, Glycine max
  Clone ID: jC-gmfl02220114a01a1
gcttcgcggcgttgtcaacttcccttcacccaaccaccttccatctccaaacaaacatgggttggaaacacgacgccgttttggccagcgaacctgtcgccgaagaagccccctgcagccctgagctcgattccgggaagaagaagaagaagaaaaagaagaacaaaaacaaagacaagcaccaaaccgaaagcagccccaaacgaaagctcgacgaacactacccccaaaacggcaccgaatcgaagaagaaaaagaagaagcaccacgagtccaaggggaacgccgaggaaaccaacggcgatagcaacaacaacaacggcgatggtgctaatcgcgaggaaacggcgacggatgggtctgttgtggtcaccggtaacaatgcgggagaggcgaaatacgccgcggtgaagagcttcgcggattcggggctgccggagaacgtgctggagtgctgcaagggtttcgagaagccttctccgat

SEQ ID NO: 10257 - DNA, 527 bp, Glycine max
  Clone ID: jC-gmfl02220114a01d1
ggtcgtaaaactaagcaaaaaaacaaagtaaaagtaatttcacaagtatcttatcatcggcaccaaaaaagcaagcgcagagcgcaggggaattcttaatttcccatatatgataaaaatttagactaatctagagctcatcgtgagaatcatcctcgtcttcgccttcgccacctgcaccacctggggctcctcctgatctctgatacacagcactgatgattgggttgcaaacggcttcaacctccttcagcttctcttcataatcttctttctccacactctggttgtcatccagccattccaatgcttctttcactgcagtctcaattttctccttttcatctgactccaacttgtccgcgagcttgtccttgtcactgacctgattcttcatgttgtatacgtaggtttcaagactgttgcgagcatcgatcctctccttcaccttcttgtcttcctcggcaaactcttctgcttcacgaaccattctatctatttcttcctggctaagacgtcccttttcg

SEQ ID NO: 10258 - DNA, 559 bp, Glycine max
  Clone ID: jC-gmfl02220114a02a1
cgcgctatcactgattagaacctaattgaacaccaatattgtaggagttgtgtactaaagtccggttaaagaatatgtagttcaagacaatcaagtcactacatttttctcggatgaaagttcataaacactaggtataaggttcaaacccgaaaggttccttataccgaaatacaatatcacatgttctttctcttattttttatacaaattatctttcggaaaatatattttaaaattttaaattatgtgggggaatgttggtaaatatttgtgttttaatttaaaatttataaatatatattaattccatcttataaaataaaatatttattttagattttcttaagattttgttttaatgagtcaaactagtttgttagatttgttttgacaactataagttagtttccaacggtcatattttgtttgttgcttagggtgatctgtgcctatatattatctttcattatttctaaaaagatgacagaacaacagtctcatctttttctcccaaaattttctatttcttctcttataaaaataattatttcttgag

SEQ ID NO: 10259 - DNA, 559 bp, Glycine max
  Clone ID: jC-gmfl02220114a02d1
gaaggagcaactacaaacatcacaaggataatacctaattttggcggtgtaacacgaatcacatgatcataattccaaagaaatttgagatctaggtgaattagttgataactcttggaactttacatagtgatcagtagaataatactcaaatccaagttcgtttggtcacttttaatgacaacatactgataaagaacctgtcaggtaatctacatgtctcctctcctgtacaattccatccaccttcagtttctgcaggtaaaatacaagcaattcttccctcaccaaaagagaaactcaaatgacaattttgtattgaagccagctatacaactcgaacccatgttccaccacacattggacatccataagcccagcggctgatccaccaaatctcccggtcattttgactgggaagattggtggaagctggtgaggcaaaagcacaagtctgccgcagacatcttatacactgtatcaaacagaagttaaatggagaatgagaaaagtaaataatatttacatgcaagcagataatgaaattaaaaggtcagga

SEQ ID NO: 10260 - DNA, 296 bp, Glycine max
  Clone ID: jC-gmfl02220114a03a1
tttccatcttttaactcacatctccctcctgccacagatagattacatctggatgttgggcacaattggcataatcacttctgccacccatttgttcccacattacagcaggcaagaaatcctcctattgaaggtgggtgcaacccaatcctgtctcgtcctattcctatgagattggactggcccccagtttttcgtggtggcatgaccccatcaccaaactataactatgactatggttgtatatctaggaagcaatgtacctttttaaaaggattggttgttcacaacatgca

SEQ ID NO: 10261 - DNA, 523 bp, Glycine max
  Clone ID: jC-gmfl02220114a03d1
gtaaagctagaagaatttattactgtcgaaatctcaccataacttacaaagaagccctatggtgaggatcaccttagaacgttcaacaggatctaatgtgctcttaacttaattcattttccacatataattgcttagctttgtcaacttctgagaacttctggaaagttatacaattatttctctaacttcaatctttacaaaacatgttataccccaattatttgatgcaactagaacggtttatcacatcatattttctcaagcgatcaagtccatccaacttgttctacagttgctttcacgttccattctatctatgcagccgaaaacactctttcttgatatagggagggtttacaagtacaaagcctctactccattagtggataagttgtctccgaaatgtgaacctgactttgctgttctttatgcgacaaagacgactcatgactactgtgcattaaattaccatctttgcctagttttgcatcagcaatggttgacagaactccggatcagt

SEQ ID NO: 10262 - DNA, 315 bp, Glycine max
  Clone ID: jC-gmfl02220114a04a1
agtgaatgaaccatgccctcatcagaattgcacttttggcgggatatggaacggtggaggggggagtggacaaaaagtcctttatgttactacatctttctattatctggttatacaggctggtatagccgatgcaagtaaaaccagttccaaagtttatcctgcggaattcaaggccgcagctaagcgagcgtgtcaagtcaaatttgaggatgctcaatccacttatccacttatgatggaagatgcactttcatacatttgcatgatattacgtatcagtatacgttgctcgtcgatggatttggcctggat

SEQ ID NO: 10263 - DNA, 540 bp, Glycine max
  Clone ID: jC-gmfl02220114a06a1
atcattttaatcacgcgcacatcagcacaacacaacaattcactaagctaaaatcacttcatcatggcttcctcgtgtgcttcctctgccattgcagctgttgccatctccacaccaagttcccagaagaatggatcactcttgggaagcacaaaagcttcttttcttagtgggaggaaactgaaggtgaacaactttacagcaccagttggagcacgatccagcactacagtttgcgcagttgctgagcctgataggcctctgtggttcccaggcagcacccctcctccatggctagatggcagtttgccaggagattttggctttgatcctctaggtcttgcatctgatcctgagagcctgagatggaatgtccaagcagagcttgtgcactgcagatgggccatgttgggagctgctggcattttcatcccagaattcctcacaaagattggtatcctgaacaccccttcatggtacactgctggagagttggagtactttacagacaccaccacactcttcatagttgagctcttt

SEQ ID NO: 10264 - DNA, 405 bp, Glycine max
  Clone ID: jC-gmfl02220114a06d1
aaaaaagggccctttaaaatccccggggcttgttcccaaaaaaaattggggcgggtttatcatccatggaaaaacggggattacttcctgaatttacattaaaggcctttaaaccttaaaaagggttttggccattgaatcttcaatttttgcctgacaataaaaggagcccttttacaaggttttaccaacataaaccctcccacctaaaaccttttaagggttacaacttagttaaaaagggttgccaatggttttccaagggttggaaacatagagggggtccaacacttttcacttgggggggaaagccccaaaaatagttccatgggccggatctgcaaggggaccaaaaagggtgcgaataggacccgggcccgggtaaatgggctggaaccatgcccc

SEQ ID NO: 10265 - DNA, 478 bp, Glycine max
  Clone ID: jC-gmfl02220114a07a1
ctgccatccgtgctgatccttctctcaagaaatctgagaagcagcccccgaaggaacacaagaggtacaatctgaagaaactcacttatgaggagaggaaggctaagttgattgctcgtgtggcggctatcaactctgctgctgataatgatgaagatgatgagtgaaagttcattgcagattccatgtcatcgttgcacaactaaaactctcttattttgcgttcagtcaatcattttatttacatgtgctgtttattttctaggtccaaaattttggatactttttgaagttgagtaagccgtatttttggtcaatttcgtgtcaacatgaattgatgtcttaccttattttatgatatacgctttgtttctagcacgaagttgtttagtttaacgaactgtgcttgttttttttttcgacaatgaaagaatgtaccactttaatttgttaggttaaatttaatccagatttactt

SEQ ID NO: 10266 - DNA, 475 bp, Glycine max
  Clone ID: jC-gmfl02220114a07d1
aagtaaatcttgattaaatttaacctaacaaattaaagtggtacattctttcattgtcgaaaaaaaaaacaagcacagttcgttaaactaaacaacttcctgctagaaacaaagcgtatatcataaaataaggtaagacatcaattcatgttgacacgaaattgaccaaaaatacggcttactcaacttcaaaaagtatccaaaattttggacctagaaaataaacagcacatgtaaataaaatgattgactgaacgcaaaataagagagttttagttgtgcaacgatgacatggaatctgcaatgaactttcactcatcatcttcatcattatcagcagcagagttgatagccgccacacgagcattcaacttagccttcctctcctataggggagtttttaaaagatggccctttggggtccttcgggggctggttctcagatttttgagagaagtaccaccccggatggcag

SEQ ID NO: 10267 - DNA, 478 bp, Glycine max
  Clone ID: jC-gmfl02220114a08a1
caaagaaggcgtcttcataaacgcctttcttctccgtttccgtttcctcgttcgaattcgctttttgatctgcgaaaatgagagagtgcatctcgatccacattggtcaggctggtatccaggtcggaaatgcttgctgggagcgctactgcctcgagcacggcatcgggcccgatgggcaaatgccaagtgacaagacagttggcggtggtgatgatgctttcaatactttcttcagcgagactggtgctggaaagcacgtgccacgtgcagtgtttgtagatcttgagcccactgttattgatgaggtgagaaccggaacttaccgccagcttttccacccagagcagctcatcagcggcaaagaagatgccgccaacaactttgcccgtggccattataccattgggaaagagaatgttgatctgtgcttggaccgcatcagaaagcttgctgacaattgcactggactccaagg

SEQ ID NO: 10268 - DNA, 532 bp, Glycine max
  Clone ID: jC-gmfl02220114a08d1
gaagcataaaagcaatgcatccaaattaaaaccacatcggtactggtacacatctgaacatcaaacacaacagaaaacagaccacaagaacaagaatctgaagtagattctagtagtcttcatcctcttcctggccctcaccagactcagcacccacttcttcataatccttctcaagggctgcaaggtcctcacgggcttcagaaaattcaccttcttccataccctcacccacgtaccagtggacaaaagcacgcttggcatacatgagatcaaacttgtgatcaatgcggccaaacacttcagccacactggtggagtttgaaatcatgcaaactgccctctgcaccttggcaaggtcgcctccaggaacaacggtaggtggctggtagttaataccacacttgaaaccagtagggcaccaatccacaaactgaatggtcctcttggtcttgatggtggcaacagcagcgtttacatctttgggcacaacattaccacggtacatcaggcaacacgccatgtactttcc

SEQ ID NO: 10269 - DNA, 547 bp, Glycine max
  unsure (1)..(547): unsure at all n locations
  Clone ID: jC-gmfl02220114a10a1
cttataactaggtatttattttctcatatgctcttcttaaacttctctttggtagtgtgttcacatacatatctacttattgttattattattgtcaccacatacaataatgggttccattagtaacaccgaggttcataatcatcacaatgatgatgacgacgatgatcatcgtcatcgggtgaatttctcgatccagagaggatttgggacaaaattgaaggaggcattgaaggaaacattgtttccggatgatcccttcaggcagttcaagaacgaggagaagccaatggggagggtgatgaaaggggtgcaatacttcatcccaatctttgagtggctccccacttacaattttcgcctcttttgctctgacttgatcgctggactaaccatctcaagccttgccatccctcaaggcattagctatgccaaacttgctgaccttnctcccctcattggcctttattccagctttgtcccacctttgatctatgctgcttttgggagttcaaggcacatggccaatgggacgatagcagcagca

SEQ ID NO: 10270 - DNA, 544 bp, Glycine max
  Clone ID: jC-gmfl02220114a10d1
gggaaaagttttttttttattagcgaatattttctcaattccacagatatatagttgtataataatactattctataatacaacattgatgtgggcaaccgaaaggctaattaattaactacttaggcatgaatttcttcttgaacaagcttttgagcactatttgcaacctctgatgaacgaagtgtatattgacttgccatcactgcatcatccaatattagataaaacgactccttcccaattttctgaacaaacttgggtattataagctactgcatgaccttcagccatgggtttacgaacaaaaccttaactccatactttcccaatattgtaattaactcgggcaatgcttgaatagcagacgtggcaaggtctgacactcctgacaaattaagtatgatgtgctcaactacatctacagtagagctttgctcacttcgaatataccttataatcctatctttgacggataatagaatttgcagagtaaacgggagaaccaagttgtacaacaagaaactctgggtatgacgataca

SEQ ID NO: 10271 - DNA, 542 bp, Glycine max
  Clone ID: jC-gmfl02220114a11d1
accggttcaaccacaggaaccgtgttttttggcaaaatttcataaccaaaccgatattttgaacattgttctacataatgaacccaacaccaaaacacagacggtaacgaatgctacttaaaaataaaaaaaataaataaataaaaataaaaagaagcatgcaagtatttttatcttacaagaacaatttgattgaactcatacaaaccttcaaaagaaaccagtaaaacccatatgcttgcacagttagaaactactgagaaattactatttgaagataatccaaactgattgccattgacaccatacccagcctaaaaccaacccaaacatggcgaagatcgacattcgataaaagacactggccttggcaacttccttgagcaaacaagtggagctctttctttctgatgttacaaagattaacaactaagataacttggctttcaatggacccaatgggatcttactcaagaccttagcatcaaacacagcatactgctttttaatctcaataactgccttctctgcaagtggatcta

SEQ ID NO: 10272 - DNA, 501 bp, Glycine max
  Clone ID: jC-gmfl02220114a12a1
gatataatctatttgatgatacagtgcaattacattaatatcaaactacaaatttgttagaattctctcctttgaggtgagttcttcatcaaacaaaacttgtattattccaatggcactggcagtaccactttattcactttctgaaatcccccacaattgcttgtactctatcttactctcaataacactagcattcagctttaaacttttttatatgaaacattatataaccatcaatctacaaactcaaatagagtaagcattactaaggggagtggcataaacaacctttcaggctttcagctattttaatttggcacttactattccttcaagtgagccaaccaagcccattacagtgaccagaaagcaagcaaagcttgaatgttctaagaacaatacatttgctactccaagctgcaattttctgctgtacaaagtacatctctactgggaaatatatagccaatggccagaagtttatggctcctaacactc

SEQ ID NO: 10273 - DNA, 352 bp, Glycine max
  Clone ID: jC-gmfl02220114a12d1
aaaaaaaaaaaatagggcctttaacgggggggccccccaggaccagggggccccctctggagaatcccaaagccctagcccccaaggaattaaaagggtttaggacccggacccggacccggaaccccacccgccccccccccccgaaagcccgggaccccaccgggcctgacaaagggcatcccccccaccaccggggggggaaaccttagcccccaaaccggaaacctgaaaacccaagggggaacccctttgtccaaaaaaaacccccccccgttcaaaggcggggcccccacaatggtggccccccccattggccccccccaagggaaggggttcaaaacccttgggg

SEQ ID NO: 10274 - DNA, 407 bp, Glycine max
  Clone ID: jC-gmfl02220114b01a1
gggacctacgcgtgcgacgtgtgcggcgtatcgtgcacgggtgaaggcgaggccatcatacgtggcacgctggcgcgtgaggtggcagcggtgatggaatacaaaggcttgaagcttcaagaagccgtggattttgtgatcaagcaccgtctcgatgaagggatggctggtctcattgctgtgtccaacgctggggaagtggcttatggtttcaattgcaatggcatgtttaggggctgtgccactgaaaatggcttcatggaggtcggaatctgggaatagcttcattattttccttcatggttgtttcgatgcaacttttggatttctgtaccatgttccactgtagtgtagggtctttctgctggtgcccgatttagataaaaaatggtaaccttgtttctaag

SEQ ID NO: 10275 - DNA, 379 bp, Glycine max
  unsure (1)..(379): unsure at all n locations
  Clone ID: jC-gmfl02220114b01d1
gaaccatcctatcattatatttataagccacatgatgggatttaatattatttacattcgcacatattaccaattattatgaatcttaaccacggctaaaccactacagcaaactgtaacgcatacaaaaattggtgagttcaaaatgttcgacaaatgaaaacagccccttcacttgcagatactttacggaggcatgcaaaattaactgtattgaattcataaggtgtaaacaggagtatttgattgtgctccccattcagatcaagatgcatcataaactggctcattagactttctaagacgatgaagacccattgcaagaatgcangcagttacgcctgctccacatgaagtcacagctgggctttccagagag

SEQ ID NO: 10276 - DNA, 414 bp, Glycine max
  Clone ID: jC-gmfl02220114b02a1
cgctacctaatttgttcctgtcctgtgacaaacaccaacactggctcactcttttcttctaactgcgaccacatgcagacctgataagcactctcgcatttcccaactctctcacaccgcccaaatatcctctcttctcactctctctctctctctccatttgttttcgttttctttctcgtgaggaatttgcaatctcccagaaaccctatccactgatttttttcccatcaaactcgatactcaattcgattaaacggagctagggtcttgactctcccgaaccgctgacataaatctcggttcctgccccttcaatatccctctcctttgccaccgaataaatgttcctgtttaggttttgatttgggactaaccccaaggatgtatgctgattcggttggaaagtggaac

SEQ ID NO: 10277 - DNA, 575 bp, Glycine max
  Clone ID: jC-gmfl02220114b02d1
ccaatatcacaattgttggtcttcttctgcaggccaatggattatcacttgcctggtctgcgccagccaataggcaatgcatcacatccatggaatttcacatccccaatgggcaattctatttctaccttttggacaaaacaaattcagagttcaagcaattccttctacatgcctagttcgaactagagcctgcagcacaagaagcttttgtgttattgtctctcaaaagaccgtccccttcattgcctggtgttaaagtttgaccattatattcctgaactgaaccatcctctatattactgggggcagaattgctattgcttctattattgtcgctggtctccaggcgttccatcatgcgtgacacagttgcaatccctgcattaacttctcgcctaacttcagatccaaggtcagacatagtgttgttccgagagaaccatctctccttccaccctcttgtgctcttggaaattgactccttgtatcttgttgatacagcattcagtttagatttcagagattctgaaaatgaatgtaatctgatggccctgctctgtcttgactacttg

SEQ ID NO: 10278 - DNA, 573 bp, Glycine max
  Clone ID: jC-gmfl02220114b03a1
ggacgacgttgttgcggaacctgaaattcacgcgctgatttcagacgaagagcacgagcacgatcacgatcacgagcatgagcatgagcatgaccatgacctcgagcacgatcacgagcatgagcatgaccaccacgaggaccgcgatgatcacgccgccgtggcagctgtctccttggaagatctcaaactcaagatcattaagcaggtggagtattatttcagcgatgaaaatctgcccactgacaagtatctgttgggttttgtcaagaggaacaaggaagggtttgttcctgtatcagtaattgcttcttttagaaaaataaagaagctcacgcgagaccatgcatttattgttgctgcatgaaggagtcttcactgcttgttgttaggggtgacgggaaaagggtcaagcgggttaacccactttgttttaatggatctagagatcataagagaatttgccagaggatcattcaagggagaacattcaacaaatattgcatgaagctgggaatataaagaggataaccattcatgatccacattctacttcagagtctacaagacaca

SEQ ID NO: 10279 - DNA, 555 bp, Glycine max
  Clone ID: jC-gmfl02220114b04d1
atatataatgggcattcatggttgatgatattaaattgatgtttcaatattgatagcacacaaatggatctggaccataaaacctatatatagcactaacatttattttaggaccacaaggcaagagatacttacatattaaaattgattacatgccctaattatatctcgcataccttttcaattatgtccctctcgagctacaataagttcttctaagttatcagcatcaccagtgtctatagggagcatgatctcatcctcaattgtgaaattgtaattaatcccaatggcttttagaaactggtatacttcaaacatggtaggcctctcctttggcattgctgtaacacagttgcttgcaaccttcagaaattggaaaagctcctggtctacacccttcccaactagtgattcatcaatgacttcatggagttttgcattgctagattgctgttgaatccactctaccaaattttctttaaaagtttctggagctttagccacatgggtaggtctttcacctgtcaccaattcaagaagcacggtcccgaa

SEQ ID NO: 10280 - DNA, 372 bp, Glycine max
  Clone ID: jC-gmfl02220114b05a1
caaaatttgattgatccctcattaatacaaatctgcagctcaaattttctaattaatggccagatctcttaattgagaacaggatataacgttgcttgatttgctatactaacactatgtcattaacccattgttgcaattgcccttgggacaaaacctgtcatttgtacgtagtagaaaccactgccttacaatggaaaacgtacgctacttgcacactcctgtttacaacttagtcttgcaggtgatcgctaagaaacctcgtttaacttctgaaaccttccactattcgactatggaagcatttttgctctaaaactcctgtttctagccggcgaaggctctcattataaccatacagacctaaaatta

SEQ ID NO: 10281 - DNA, 412 bp, Glycine max
  Clone ID: jC-gmfl02220114b06a1
agcgaatatgcgtggagcgaaataggaagattcttgcgtaagcagcatcttcctctctcttattctattcccttattttccctttttgtttcttatttctcaaaattcaaagaacctgaaatcaaccacaaccttctcctatatataatacacacttctgcattgctattccttctcagcattctccttagcctcaggcagcattgttggctagcacttaacactttccaaccaatcagtaccagcaacttcttgctggcactcaagttgtgctgcatcttctgtgggggatgacatgactcaaaacagcatactgaatcacagtagagctcttgagggtgtccatggggcccaagtggaccctaactcgccatttgatttgacagaaactaatcaaagtggggactttcgt

SEQ ID NO: 10282 - DNA, 566 bp, Glycine max
  Clone ID: jC-gmfl02220114b06d1
catgatataatatatttccaatcttcagaaaatcccatcacacttcaaactaaaaagtcaagagtctccatagtatctcaacatacatgttcagatagaattataatgcacgatgttttatatataactgcatgtttatctaaggagaagaataggtgccagatttttgctgcatgaatcgctttctccaatgagtttaactaatgaacataaaactacaaattgaagaggggtagaataatttggaacctaatttgcatatctacatcctcaaccgaatccaataaaatacaatgtactaccttatgatcttaaccattgcttctacaaattaagtcgacagattatgctgatgctattcttactcagaatgcatagtttccagctttcgaatagagtgtgcacacctactcaagaagcttattgcaggtgcctacaccaacagcagcagcaagatgccatgcagcatgaaggtaaggagttttaggaaataaatcatcagctacaaaaagcataccaccaagtaacgacgatgtcttatgcactgtgtgagccattctcaagtc

SEQ ID NO: 10283 - DNA, 534 bp, Glycine max
  Clone ID: jC-gmfl02220114b07a1
caaaaaaaaaaaaaaaaaaaaatccgcgattcgctcttctcttggaaaagtgaaaaccagaagtacgaacgaaagagaagagcgatttagaagtgagagaagatggggttgtcgttcacgaagctgttcagcaggttgtttgcgaagaaggaaatgaggattctgatggtaggtctcgatgctgctggtaagacaaccatcttgtacaagctcaagcttggagaaatcgtcaccactatccccaccatcggatttaatgttgagactgtggagtacaagaacatcagcttcactgtgtgggatgttggtggtcaggacaagatccgtccactgtggaggcattattttcagaacactcagggtctcatttttgtggttgatagcaatgatagagatcgagtggttgaggcaagggatgagctgcacagaatgttgaatgaggatgaacttagagatgctggtttgcttgtttttgccaacaagcaagatcttcctaatgcaatgaatgctgcagaataactgacaagcttggac

SEQ ID NO: 10284 - DNA, 456 bp, Glycine max
  Clone ID: jC-gmfl02220114b07d1
actcatggaaatatattcaatcaaaaatcaaacaaacaagatgtaagcaacacagcacgcacgcacaagagggtgcaagagttccaattatagctaaaagtattagctaatttaagcaatcatacaaacccaagttacacaaaagagaatacttctagcaagcattctgctattacaacattcgctagaaaagataagcatctttctccaagaaccgccagactcgcatgaaatcaccagacaagaccaaaatttttcaaatgtctcatgctttgctggcaatgttgttagaaagccagtccaaaccctcatagagaccctctccagaagttgcacaagtgctctggatataccagtggcgttgacggagtgaatgaagtccaagcttgtcagttatttctgcagcattcattgcattaggaagatcttgcttgttgcaaaaacaagcaaaacagc

SEQ ID NO: 10285 - DNA, 511 bp, Glycine max
  unsure (1)..(511): unsure at all n locations
  Clone ID: jC-gmfl02220114b08a1
gccgcaggaggagaaggccgaggaagacagatccaaggtcgatgatctccgaggctctcccatgagcgtcggaaacctcgaagagctcatcgacgagaatcacgctattgtctcctcctccgttgggcctgagtactatgtcggaatcctgtctttcgttgataaggatcagttggagcctggttgtgctattttgatgcataataagggtcttttctgtggttgggcttcttcaagatgaagttgatccaatggtctctgtcatgaaggttgagaaggctcctctggaatcttatgctgacattggtggtttagatgcccaaatacaggaaattaaagaagcagttgagctacccctgacgcatcctgaactatatgaagacattggtatcaagcctcctaagggggtcattttatatggagaacctggaactgggtagacattgcttgcgaaggctgtggcanactcaacatcagcaacattcttgcgtgttggtggtagtgaactgat

SEQ ID NO: 10286 - DNA, 503 bp, Glycine max
  Clone ID: jC-gmfl02220114b08d1
caaggatattgaaagaaaactatattgaattaaaatcgttgttgagattcaaagcccctaaaatacaactgacatttgttcgcagaatacaaatgaattggcatttgttcgcataactagaacgttaaaagaaagacaagagggccagagataatagaggatagtttttcacatatacagcccttcaggcaccccttctttcttcttaaacatcactttatccttggccttcttaaagtcggcatgagtcaccttcattcgacgttctcgtagagcaagtaaaccagcttcagtacatattgcctttatatcagctccggagaattcgtctttagtcataacaaattcttccaagttgacatcatcagctaatgtcatccttgacgtgtgtatctggaagatgcgtctccttgttttgatatcaggaagaggaaattctatcttcctgtcaattcgaccaggtcgtagcaaagcttgataaagactttcaattctgttggttg

SEQ ID NO: 10287 - DNA, 514 bp, Glycine max
  Clone ID: jC-gmfl02220114b09a1
gaacagtgtcgtgagaacctaccctcaaatacccggtggagatccacggtgttatcctagcaccggttccgcagttttgcttcctcttcgagaacctaatgtggaggctgaggttctgatttgtggtggagccccgagaggggcttttcggaatactctctcgggtaagtttgttggagcgttgagaacttgcgctcggattaaaataaccgacccgaaagcgaattgggtgatggaaaccatgccgggtgcgagagttatgagtgacatggttttactccccaacggcgacgttttgattgttaatggagcagctgtggggactgcgggctgggaattgagccgtaacccggtgttaaacccgtttctttataaacccaacaagcgggtcgggatgagatttgaggtccagaacccgtctcatattccgaggatgtaccactccggtgccgttttgcttcgcgatgggcgagttcttctcgctgggagcaacccttacacgtattacaatttc

SEQ ID NO: 10288 - DNA, 553 bp, Glycine max
  Clone ID: jC-gmfl02220114b09d1
acacttctgaccaaacacaatgttaagaattgcaaagaaatatccatgaactataattacaaacttcctagggtattatttacacgccccataggccataaatggctttatttgaattttatcttcccatatcttacagtttaaatactcactcaagaatctgttcactcccagacattcacaacattaaataactggaataaaaagaccttttccacaccaattttggcaaccaggcaaagccgagaattcccatttttcccacctatctggacccaaataccgtggcttggaaacttcttgatggaccacaaacagcatatagaaccccggtgcgccagatcaaggggaagccggcccggtaacttcaacctcgtgcgttgattctccaaccccactcaaatggtgcggcttcagcaccaacagcctctgattcatggagaacgagtgcgtgttaaatggcggcgccagcatggtaacagacaccgaatccccaaccaaagtcgcgctcaccttaaaccgaagcctcaacgtctgaccgtacttgagtttt

SEQ ID NO: 10289 - DNA, 553 bp, Glycine max
  Clone ID: jC-gmfl02220114b10a1
aaaacaagcgccgcaaccccgccgccgacgagtcctcctcctccctcatcaccgctgacgacaccgtcttccgctacctctgccccgtccgcaagatcggcagcgtcattggccgcggcggcgacatcgtcaagcagctccgcgccgacaccaaggccaagattcgcatcggtgacgcgctacccggctgcgacgagcgcgttgtcaccatccacagttcctccgaggagaccaaccatttcgacgagaccgatgatctcgtctcgcccgcgcaggacgcgctttttagggttcaccagcgcgtgattgcggaggacgcacgtgaggatgaggacgaggagaggaatcatgtgactgcgaagcttctcgtgccgtccgatcagatcggatgcgtcattggaaaaggcggccccatcgtgcagaatatacggagcgaaaccggcgcgcagattcggatccttaaggatgatcgcttgcctcctgcgcgttaagcaccgatgaacttggtcagatatctggtgaggctgcgggtgtgaagaaagctctgtttcaa

SEQ ID NO: 10290 - DNA, 515 bp, Glycine max
  Clone ID: jC-gmfl02220114b10d1
ggtaccaccatgcttttgtattatgacaaacatcagatattctctatactaatcatgctcaagacaagggaaaaaaaaaacttttcaacgggatccatcatccatcaccagacccaaatctacttcatttgatttagaaaattcctgttaggcacatttgcttctgcacatcggtgcatcgtaaatgacctaagggagggagcttacctgtttcatacctgaaatgacctggcaaaatgagttacaaataagggtgattcagctgcagcattcaattaaagctacagaccaaaagtgcgctaaaagaaaatacataccacacgtcaccgtatttcaattatccacgttaactcaaaatattgcttgatttccaaaatcccagggatcatcaaaatggcatatgttagcatttcattcttcctttttttattgaactgcctaaatacaatacaaaactaacatctaataaaagaaatccatgtccctcaagcctcctgttcattacagctagaatt

SEQ ID NO: 10291 - DNA, 391 bp, Glycine max
  Clone ID: jC-gmfl02220114b11d1
aaggaaaaagggcccaaaatttataaaaccccccaaagaaaaaccccccaagggaaacccctaaaaaaaattggggccccccaaaggaaaccacaaaaagggaaactggggccccaatttaaaccccttttaaacccaaaaaaaaaaaaggagccacccaaaatgtggaaaggggaaggaacccccgaaaggaaccccggggattaagaacctaaaagggcccgttttcccccttggggcccccaaagaaaaccccccatggggccccaaagacccccaaaagggggtaaccccgcctaaaaaaagttccccccccggggggtttggaaaaaacccgctttgggggggaaagaacttggggaaccccgaaaaataaattctcccctggggg

SEQ ID NO: 10292 - DNA, 285 bp, Glycine max
  Clone ID: jC-gmfl02220114b12a1
accgcggtgggctccagctttgtccctttagcgagggtttattgcgcgctagaaaaaacatgacataccggaaaaaacaaggaggtggttgcatagctttggaatttcccaatgaaacgctcaagtatggtcgtccttgtcatggggctttctggagaggatcatgtgccttggcgagaaaatgccagagtgaccccctttgggcaaataatccgggggcttgaagagcatttcatgaacatccacggtccccttgggcgcgattcccaaagcggggagaacagt

SEQ ID NO: 10293 - DNA, 544 bp, Glycine max
  Clone ID: jC-gmfl02220114b12d1
aaaatatatatattaatcacaacctttttcttttggcaaataaggtttccggaatggtgtgccaaattcgtatacaacaagcatttctctattaatatttgcgtgtttgtgcttgctgcatatcttctatccaacaccatttaccaatatcatccagggttatgttgtgaatgcaatgcatggaagagaggagcgaacactaccaactgcatattccacaattcatgttgtacaaaacctataccaacttggattacggttaggaatgatccttagccacgctattccattggggaaggtccttcttcaattctgatgtcactactatgctcgctgcctagcatgattgccattagcataagtttgcctgcaactggaaaatccttgtgctgcatcaatattgtttcaactgaactacccatatcccccaaaatagaagtctccatgttttcttgtctcaaggaaaatacttggccaaacccttcttcaaatgttcactttgaggtccataacacctacttgaagccttgaaagtatagtattt

SEQ ID NO: 10294 - DNA, 569 bp, Glycine max
  Clone ID: jC-gmfl02220114c01a1
cacatccctagctctgtcgttccgtcgttgacgatggcgtttcgggtgcgaagccctgacctccgctctctctttcttctctctctcttgtccatcgcttccgccaatgtcttcttcgaagagcgtttcgatgacgggtgggaaaatcgatgggttaaatcagattggaaaaaagatgagaacgtggctggggagtggaaccacacctctggtcaatggaatggagacgctaatgacaaaggtattcaaaccagtgaggattacagattctatgctatttcagctgagtaccctgaattcagcaacaagggtaagacactagtctttcaattttctgttaagcacgaacagaagcttgactgtggtggtggctacatgaagatgctcagtggggatgttgatcagaagaaatttggcggggatactccttacagtattatgtttggcccagatatctgcggttacagtaccaagaaagttcacgctatttttacctacaataacacaaaccacttgataaagaaagatgtccttgtgagactgaccacttactcatgttacacatttat

SEQ ID NO: 10295 - DNA, 235 bp, Glycine max
  Clone ID: jC-gmfl02220114c01d1
gctcgctagaaaaaaaaatgagagtacctgaaagaaacaaggaggtggttgctatagctttggaatttcccaatgaaacgctcaagtatggtcgtccttgtcatggggctttctggagaggatcatgtgcctttgtgagaaaatgccacagtgaccccttttgggtaaataatcaggggtcttgaagagcatttaatgaacatccacggtccccttgggcgcgatttccaaagcg

SEQ ID NO: 10296 - DNA, 609 bp, Glycine max
  unsure (1)..(609): unsure at all n locations
  Clone ID: jC-gmfl02220114c02a1
cctggagctctgttaatgggtgatgctttcaacatgcgtcatcctttgactggtggaggaatgacagtggcactgtctgatattgttgtgctgcggaatcttctaaagccaatttgtgacctgaatgatgcaacctcattatgcagacatcttgaatccttttacatcttacgcaagcctatggcatccaccataaatactttggcaggtgccctatataaggtcttttcgacttcacccaatgaagctagaaaggaactgcgccaagcatgttttgactacttgagccttggacattttttttcaagtggacccatcgctctactctctggtctaaaccctagcccgctgaatttaattctccatttttttgctgttgcattatatggggttggcccgttgctcttaccatttccttcattgaacgtacttggattggagctaaatagtnttgtgtgcatttggcataatatttcccatcatcaagggtgaaggagtaaggcaaatgtttttccccacatccataccggcattntatagagctcctcctgatagtggtgcatcgaggagtaagggaaccatngtctgcctgcatgcattttcaattaa

SEQ ID NO: 10297 - DNA, 519 bp, Glycine max
  Clone ID: jC-gmfl02220114c02d1
gagatagatatcaacattgttgaggtatcaacatcacatggaaattatgtacaacttagacctgcattgagagcataataacaactaaaacctaaattgttcaatgctatagtgagttcggagtttccataatccaaccaccccaccaagccattattctaaaacaccttccccaagatctattacatgcttcagagtaaagagcacagaaacaatgtacaagaaaaaaaaatgtaaagaaaaagaaaatatttaacttatgggaaggaaagttcaaggccatggcctgacataaataaaatagaatcacttcctacccaaccttactaaatgctgctgatgctttgcttccgccgccttgtcagcagcttcccttttctgtgccctctttgcccttctgcctgtgataattttcccagcctctttcttcttcggctcatgcgaagaagaacttgctcctgaatcctgaaagtttggacgatggactggccgagcttcttgacgaccagccctgacata

SEQ ID NO: 10298 - DNA, 126 bp, Glycine max
  Clone ID: jC-gmfl02220114c03a1
ccgtgaatgttgtacttctgttatttggtccttgcatcggtgtattttttatccataggattttgcatcggtgttggttcgaactatttgggaattttgcttgaaagataagatagtagtattttc

SEQ ID NO: 10299 - DNA, 397 bp, Glycine max
  Clone ID: jC-gmfl02220114c03d1
ccatctcctctacgccaacttcattcccccccaggaccgcccagtgtggaaaaaaaaaaaaaaaaaattctctcctcccccaaaaaaaagggggaaaaaagcccccggggggggggggaaaaaaggggggggggcaacccaaaagcccatgggggggggggggggaaaaaaaaaccccccccattttggggggggggaaaaaaaacggggggggggggcccccccccccccgcggggggggaaaaaaaaaacaccccccccccctttttttgtccccgggggggggggggaaaacaaaaaaaaggccgggggggggaacaggggggggggaaacaaacccccccaaaaagggggaacggctcttgacaaagggggggggggccccacccaggggggg

SEQ ID NO: 10300 - DNA, 598 bp, Glycine max
  unsure (1)..(598): unsure at all n locations
  Clone ID: jC-gmfl02220114c04a1
gcagtggaagaaaaaataacgatgtgacgcttttggggctaacagcgctagatcttgtgatgatggctttgttgttctcagccaatggtgcagcctgtgcagtgggagtgatagcacagaagggcaactcgcacgtgcaatggatgaaagtgtgcaacgtctttgacgcctattgtcgccacgtcactgctgcattggtcctctccctcttcggctccaccgtctttctcttgctcgtgctcctttctgttctcaaactccattacagaacaagaagctagatctcaatatgatacacactataatatatatattggtagtgttaattaattaattaagggtgtgaatcgtatttttggcttagacctagcttgcacttattgttgtgtttgatgaagaacgccaaagcacttaaagatatagatatgccccaagtagtgattaaattgaatgtgggtcgtttgtagtaaatatactttagcagatggtaggtcgatttatttnagagagcagtaacaggtaaattaatatagctagctagctagctactgtaatggtttttctgaatgatgcgtgataagtgatatttcactttgac

SEQ ID NO: 10301 - DNA, 557 bp, Glycine max
  Clone ID: jC-gmfl02220114c04d1
gctgtgacgttttctatacaaaatctggaaaacaatgagaacccaaactcaagaggactacataaaaattgtatgcatgctagtatgctacttagtatgctactgaaacataaagaaaaatcatcgaaggattctaaggtttattttgttgtataaacattagcattaactccccaagaggactacataaaaattgtatgcatgctagtatgctactgaaacataaagaaaaatcatcgaaggattctaaggtttattttgttgtataaacattagcattaactccccatgtttccccctctcagcagaataaaaagtcagcaaactccggaattcagttctgcatctttctcaaaaatatcccacccatcatcaagaagagcattgtgatcagctttggatttttcctcgtcatgcccaatcttggaagaaaggctttcaattgaggttgtccagcttgtcttacgtattccagatgactcactatggtcagaacccgcatcagatgccaatgttttgtgggaagaacctgatgaagctaacttgcaactagtctg

SEQ ID NO: 10302 - DNA, 489 bp, Glycine max
  Clone ID: jC-gmfl02220114c05a1
gtagaggagaagatcgagaaggggttgcagtagccgggggcttcttctggtcctacacagacgaaccccatgccacacgacgtcgtcagatcctctccaaataccctcaaatcaaacaactctttggccccgaccactctgctttcttcaagattagtggagttgttctgcttcagcttggtacgggtgctttacttcatgatgctggctggctgaagatatttttagtagcatacttttttggttcttttctcaaccacaatctctttttggctatccacgagttgagtcacaacctggccttctcaaccccagtctacaaccgttggttggggatttttgctaacctccctataggtgtgcccatgtctgttaccttgcaaaagtatcacttggagcaccaccgcttacaaggtgtagatggcattgatatggatgtccctagcctcactgaagtccgtcttgtgaaaaatattattgcagaaacca

SEQ ID NO: 10303 - DNA, 446 bp, Glycine max
  Clone ID: jC-gmfl02220114c05d1
aaccaccaagccaccacttatttccataaataatatacccctgccaccaagtttacagaagcaacgcttctttccaaaacaaatactagtgccacaaagtaagcaaaaataagggaaaaatatagagtggggaaagcacacacaactagagaaaccattccattcacagtcttcaggcagcgaacggggtgaaacgcggaacaggcttgcacttgagggggttggccaaaaacacagtcaccctcccttcctcagacatgtgaacatgatgggttttaccatcattaacgatccagtcgaagcactggatcaaactcgctagcgttgcttgcatgacaagcaacgctagcgagggtccggggcagcttcttttcccgctcccaaagggcaggagctgatagtactgccccctcacgtcaatcttgcttttgcccgggtcgtcggaa

SEQ ID NO: 10304 - DNA, 431 bp, Glycine max
  Clone ID: jC-gmfl02220114c06a1
caatgagcaggatatgagtctgactatatattggactggaccatcctaaaatatcagcctgcgcaccagacaaagaaacaaaatcaatcatctccttgaactgcagtgcctagcagtctagagccagtagtggtggaaaaacataaaggagtcaatgattcagctcatgttactgtaacaaaaatgttggccaatgtggaacgtacaagtgcaccacgtgtgcatgctaagccatctaaggttcagaatctggatgccaagaatcatattgagaaacatggggtgaacaatagtccatatacttactctgccactaccaaatcctctacagtaaatgcgcttgaaaccagaaaggcccggaggaacctcaaaccttggacgtgtatatgggagacatgccccgcgtatcaagcagatggagtgcttcacta

SEQ ID NO: 10305 - DNA, 356 bp, Glycine max
  Clone ID: jC-gmfl02220114c06d1
gtcattacacttcaaactataaagtcaggagtgccccatagaatgttaacatacatggtcacgatagaagactaatgcaacgatgacaaaaatataacatgaagtttataaaaggagaagaatacgggccaagatgattgctgcatgaatcgacatcaccaaggaggacaactaatgaacataagactacaaactggagaggggtagaataataaggaacccaaacggcatatcaacgtactaaagcggaaccgaaaaaaacaaaggactaccttatgatcttaaccaaagctagtacaaatgaagtcgacagaacatactgaggctagacccccacctaagggggagctcccagc

SEQ ID NO: 10306 - DNA, 449 bp, Glycine max
  Clone ID: jC-gmfl02220114c07a1
ggagcagaggaaaagcgtgtggcgtcttcttctccggtgaatccccaaggatgtaatttgggatcagccactcatgaatgaaaatcaatcgaattaaaccaaaatacctttctcactgttaattcattaataataataataccaaatttgttggttctttgattcacacttgacacatattggctttctcttcttcctacatataaaaaggaagaagcaaagcatctttttttcagctttcacgcctctgtcctcttattttcacttgtcaactctctttattctccaagccataattggcgacccaccatggcaccaaatactactgccttaagttatcgtttgaattggagggttcttcctctgggcactatttattttattacctatgggcctggcatcatttttgatatggaagtatgaagaattcaataaatccaggaatgaaa

SEQ ID NO: 10307 - DNA, 489 bp, Glycine max
  Clone ID: jC-gmfl02220114c07d1
atggttgatttacatggttagaccagagaacttttatgaattccatctgaagttgcaaatacaaatacatatcacaattacccccgcacaaaaatgatagtcctctaaacactctggggggagggatggggttacaaattgatcttcaaagttaaaatctgctttagccacgatgaagatagccttactccgatgactaatcttcaatgtattatcaccgtataaactgacaagagccaggaaacaattttgacaaccacaagtgcttgaacttcattatcaaagcaaagaagccatagcatggaatgtgcattacacccacaccaaagtaccataagggtgcatatggggatgacagatcaaggaaaggataaggccaccataatgaaacacaagcatgaatgatccactgaaaaatcacatatatagctgtccacaaaataaaatatgcaaatcgaaacactggaaatctcatgcaattcaatgatg

SEQ ID NO: 10308 - DNA, 407 bp, Glycine max
  Clone ID: jC-gmfl02220114c08a1
aagaatgcccatcttctctgcaacgttgggctccttcacttccatctcctcctccttcctctcacagtcacacctttctcctttcgtgaagacaccttgccaatggcagcatcactatcacactgctaaagtcttggtctctgcctctggcaatacccaaattgaccaaaatcccgactctggacttcttcaacgccctactcctccagacccactcgatgacgctcgtcaggctcggtagagatcgtcagattggaaggctgcaaagacatatcaagatagtaaagtcatttataatggtagggttgaaggttttaattctggaggcctgctggttcggttttattctgttatgggctttctcccattcccacaattgagtccagtgcatgcttctaaagaaccag

SEQ ID NO: 10309 - DNA, 489 bp, Glycine max
  Clone ID: jC-gmfl02220114c08d1
gttggcaattttgaatgaataactcgagtaatgtgcatgattttacaactaagaactttttttaatcttgaacatttgaggaataagaagatcggatatataataaatacactccatatatatataatggcatgcatgtaactgtacaaaatcgatcgcagagattatcggaagaaaggtctgagtgaatgaaattcaggggacacgctccaatactcgttgtaatgccctcctgataccttcctgatcaagggatgtagtgagatgtatctcctgcacctgcaccacgggacaaaacatttgagacattttttaaatgtgtatatctaggttaaagtggcccattccattgggttaattatttaaggaaatttgtcacctgtcttccagcccgggcaagtagagtaaacctttggttcgtgggaggtgcattagaaagccaaagctgcaagacttgcgagaccactcttttttcaaacccttgacggc

SEQ ID NO: 10310 - DNA, 480 bp, Glycine max
  Clone ID: jC-gmfl02220114c09a1
aggagtagtatgttgtttttctaatagaaaatttaatcaccaactttctctttacattagaaagatcatagaagaaggtcttggctgtcttctaatttatgtagtgtttggttttggaagcatatataccactataagcctaagtatagtacggtcatggaagactatttgagtggggagagaactttgtggctgggagaattttatccaagaaaaagattgcagaacatgggggtttgtaaaacttatatggtcataaaaatattccttattttctataaaatttttcgatccgtcaaaatgattgcttgtgattctatccatacgcgagaaattggagagtctttcttttaaggtacgtacatgttatatgtttggagcatatatttaattttatatgccctgcccccccataaatatataaatggaacgtggggagatttagatcttaaagaacatatggaatcaagaggcttcact

SEQ ID NO: 10311 - DNA, 498 bp, Glycine max
  Clone ID: jC-gmfl02220114c09d1
aaactgcataatataacttgacctagttccccatttttattcatatccatatatatcttaattactccagtcttaatatcaaatatagcgaggctaaaatgaacattcttgtctcataggctcataaccaacatccaactttcagagcaaaaaagtacaaatataattggaagttcaaaagtaaaaaaaaatcatatatatatatataaagaaacactttgcatttaatgaattcgtcgtgattttttttcaaaaagaagcacgtggagaaatttttagcaaaggaaaaagaggatcaaagttaacagtgaagcctatggattccttatgctctttaagatctaaatctccccaccttccatttatatattgatgggggggcagggcatataaaattaaatatatgctccaaacatataacatgtacgtaccttaaaagaaaaactctccaatttctcgcgtatggatagaatcacaagcaatcattttgacggatcg

SEQ ID NO: 10312 - DNA, 528 bp, Glycine max
  unsure (1)..(528): unsure at all n locations
  Clone ID: jC-gmfl02220114c10a1
ctcataacacaaagcacaaagcaaagctcatccttgagttaaaaaatggcagcagcttcttccatggctctctcatccccatccttggctggcaaggccgtgaagctgggcccatcagccccagaagtgggaagggtgagcatgaggaagaccgtcaccaagcaggtctcctcaggaagcccatggtacggcccagaccgagtcaagtacttgggcccattctctggcgagcccccgtcctacctaaccggtgagttcccaggcgactacggctgggacactgctgggctttccgcagacccagaaaccttcgccaagaaccgtgaactcgaagtgatccactccaggtgggccatgctcggagccttgggctgcgtcttcccggagttgctgtcccgcaacgggcgaagttcggagaagccgtgtggttcaaggcccggtcccagatcttcagcgagggtgggctcgactacctgggcaacccaagcctgatccacgcccagagcatnctcgccatctgggccacac

SEQ ID NO: 10313 - DNA, 376 bp, Glycine max
  Clone ID: jC-gmfl02220114c10d1
gtaaaaagttcgttacattaagttggattcggatacacaagataattcacattatctgaagtacttcaccaaacacaaatctaaaaactctcaaaagtcattgcgatctttgacgctcactttccggggacgaagttggcggcctaggcccagtcgttgaagttgacagggtcagcaaggtgatcggcgaggttctgcaatggaccctttccggagacaatggcctgaacaaagaagccgaacatagagaacatggccaatcgtgcgcacttgagctccttcaccttaagctcagcaaaagcctgtgggtcatcagcaaggcccaatgggtctaagctgccacctgggaaattgggtcagtgacctcaccgagggg

SEQ ID NO: 10314 - DNA, 524 bp, Glycine max
  Clone ID: jC-gmfl02220114c11a1
gtatcacattaaaatcatatgaatggttaacagcttaagtataaaactggtcaatgaaggggaaactcaccccataattaggttagatggacttacaacatcaatttccgctaaaattgacgaaacaaaaaaaatcttatagaaaagaaataagtaaaaaagaaatgtttttccccacccatcataacatggctccattctatagatctcagaatctgaagtcaggatccacatccattgcccaacagaatttcgccagcagagacttgttgaaaatcttttcaataggaacttcatgccgcttgcaccaggcaactgtaatcctagggtcaaggtagtttatcttggatgtgcccaatgccacagttttcagatcttcttttgtcttcatatcacgttgcattttctcaatttttgcattggtttgagatatctttttctctagcatttcgggacccaagttcttttttctctttccatctgaactcttcgagggggctttcctttccttgccctgtctaagt

SEQ ID NO: 10315 - DNA, 523 bp, Glycine max
  unsure (1)..(523): unsure at all n locations
  Clone ID: jC-gmfl02220114c11d1
acaacatattattttaacaaaaatttatttattttaatactaatcatttaacaaagggagaaaaagattaaccaatcgccaaagttcaaggcagatctggcttaacaaaacttagcatactaacgaattatttagcatttttacattcacttgctcaaaaaaaccaaacacgctagtaatattatgtttgagtcagcaacggagcaataaattcccgacacataatagtaatagtagctgcaaacgtggcagatgcttaacgaaaaacgacaatatttacatgcaacccacggtcatcttagctaaagacttcagcttcagcggtgcctgcttctggtctccccactgtacagccagtcatagacagtgggagtgttgggaagtggtttgtcaaacatctgagcaccgatggtctttgtggcggagttgctcccaggatggaagacgctcctcaaacgttgtcagctttacgggccgatcccggtgtcgttggaagtcgcggagtcatcggngttgttggtgt

SEQ ID NO: 10316 - DNA, 478 bp, Glycine max
  Clone ID: jC-gmfl02220114c12a1
cccttcttagagtctacactatcctccctcagaaagtcacatgctggcttttgctgatcagctgatctctgattgctaccttctgagccaaacctggaatttttcttcacagctttggaatcctcaggatcatcactgctactcttcaaacttttcttgttccaaccaaaccagctcttcttttctttaaccacaccattggcttcagaagtctcacaggaagctgcagaaccattttcttgaccatcaaaggctccatgttcctcatcctcgtgagtaacatcagagttccccatatgcagggcagaatctaattgcattctttcctctgcagtcaatacatcatcatactcatcattgttttccccattcatgatgctttctccatactccacagcaaaaagttcttcatctgtcatagcacctggaacccgccttgacttcacactaaccatcacatgaagcatgtcataaactt

SEQ ID NO: 10317 - DNA, 453 bp, Glycine max
  Clone ID: jC-gmfl02220114c12d1
cgaaagagagagggcatgctcacagctcagcagcagacccaggaccggaatataatatcaccgaggtacgacagaagcatcacatagatcgagcggcacgcccattttttattttatattatttaatttttgttatttatttatttttattatattttttatattattggtttatttattttattatattatattaatttattttataatattactttaaataatatatccaagaaacagtataaaaaaaaaggaacacaagcaaaaacaaaaagaaaaaaaaaaaaaaaacaaaaaaaaaaaaaaaaaaaaaaaaaaaaaaaaaaaaaaaaaaaaaaaaaaaaaaaaaaaaaaaaaaaaaaaaaaaaaaaaaaacaaaaaaagaaaggaaaaaaagaaacgcaagaacaaaaaaaagaaaaaaaaacacaaggaaaaaaggaacaacagaaa

SEQ ID NO: 10318 - DNA, 563 bp, Glycine max
  unsure (1)..(563): unsure at all n locations
  Clone ID: jC-gmfl02220114d01a1
tgaatgtctttggcattgagaacagggatacattaacacacaaggccacagggtattcagcaaagcttttgaagaaacctgatcagtgccgagcagtttatgcatgctctcatctcttttgggttgatgatcaagatggtattaaagatggagaaagggtattgctttgccttaagcgtgctttaaggattgcaaatgctgctcaacaaatggccaatgcagcaaggggtagcagtggtccagtgacgctctttgttgaaatactgaacaagtacatttactattttgagaaaggaaaccctcagatcactagttctactatccaagggcttatagaattgatcacgaccgagatgcagagtgactctgcttcagctcttccagcttcggatgccttttttaccagcacattgaggtacatccaattccaaaaacagaagggtggtatactgggtgaaaaatatgatcccatcaatgtctcaatccctgcctaacatatccaggacgcccaaatgggaagttgtatgaaaagccanacatgttgttgtgagtgttcatcttca

SEQ ID NO: 10319 - DNA, 504 bp, Glycine max
  Clone ID: jC-gmfl02220114d01d1
gaaaatgtaagtacatttaatatcttgcagtataaaatacattcaattatttcttcatttagcaagtagaagaatttgtaggaagattattcacttctaaatgaacttgatgccactgcaaacactttataatgcacaagtagtgaacactgataaacctttttttattttgtttttcaagatgaagatgaacactcacaacaacatgtttggcttttcatacaacttcccatttgggcgtcctggatatgttaggcagggattgagacattgatgggatcatatttttcacccagtataccacccttctgtttttggaattggatgtacctcaatgtgctggtaaaaaaggcatccgaagctggaagagctgaagcagagtcactctgcatctcggtcgtgatcaattctataagcccttggatagtagaactagtgatctgagggtttcctttctcaaaatagaaatgtacttgttcagtatttcaacaaagagcgtcactg

SEQ ID NO: 10320 - DNA, 327 bp, Glycine max
  Clone ID: jC-gmfl02220114d02a1
atgatttgtatgattcacaaacttggctatggtaattgggatgagttgaaggcagcttttcgaatgtcgcccttgtttcgatttgattggtttgtcaagtctcgcacaacacaggaaattacaaggaggtgtgacaccctcattcggctggtagagaaggaaaatcaagaatatgatgagagggagaggcaagctcgtaaagagaagaaacttgctgctaagagcatgaccccgtcgaagcgttccatgcctagacagactgagagtccatctctgaagaagcggaagcagttaaccatggatgactatttgagctcggggaagaag

SEQ ID NO: 10321 - DNA, 533 bp, Glycine max
  Clone ID: jC-gmfl02220114d02d1
gagagaaatatatggaagcgataaattataaagaaatattgcaagtaatgataatgtgccatgttacagccgaaccataaaatcaaaacttgagtatatattagcggagaatacatcaggcaagttgatctcaaaactgctgtatctaaccaacccaacattatgcaccaccaactttctgagccttatttcggcgatctctagacccattatctctagagcgtgcatgtttgccccctctcccatgccatcctccccttccttgcttattcttgaattctcggtgtttgccttgattaccacgaagcaggctccagtattctttttcggcctcaccagtcactggatctagaatagcaatataattctttacaaccaagccatccttttctgaaataactgcagcagcacgagctttctgagcagcttcagtttcttcaaagcggatgtatcctgactctgctccaatcttgaaatcaatgtacttcacggtaccaaatttctcaaagacactctttaaatccttacgtgag

SEQ ID NO: 10322 - DNA, 565 bp, Glycine max
  Clone ID: jC-gmfl02220114d03a1
ctttcttcttcttcttctcttcttcttcaagattgcgacgacgatccaagtgatagacactcgttgcgatggaacttgtagctgaatccgagcgaactctgtacccatacgtgactggatcctctgtagtcgctatcaaatacaaagatgggattctaatggccgctgacatgggaggttcgtatggatctaccctgcggtataagagtgttgagcgtatcaagcctattggaaagcattctcttcttggtgctagcggggagataagtgactttcaggaaattttgcgctaccttgacgagcttatcctttatgacaacatgtgggaggatgggaattctctagggccgaaggaggtgcataattatttaacccgtgtaatgtataatagacgtaacaagttcaatccattgtggaatgcacttgtacttggtggggtgaaaaatgggcagaagtaccttggcatggttaacatgattggcattaattttgaggacaaccatgtagcaaccgggcttggaaatcatcttgctaggccaattctccgtgacgagtggcatgaaaa

SEQ ID NO: 10323 - DNA, 423 bp, Glycine max
  Clone ID: jC-gmfl02220114d03d1
ataagaaaagtatgccccggttttcataatttattatttatacaacatcccaggtcttttttctttataggctttaggaaaagaaaatttacccggtttacacgtgacactaaacggcaaaagcgggcttacagggttttgaaaattttgaaaccctccgaagtccgaaccaaatccatcaccaccttttttatgcattccctggttccggtcccattggccaatttttacaaccattacacaacctcgccacgggggtggtttaagacgagggtcttgcttgtcaaattctgggggtcccacatcggtgggacgagagaccttctttcattcggaccatgcgcattgggactcgccccgggtgccttatccacgggaacccgacccggattacccgggtgcgaccccttttcgaaaacacca

SEQ ID NO: 10324 - DNA, 492 bp, Glycine max
  Clone ID: jC-gmfl02220114d04a1
caagagagggaagcagctgctctacttgagtggagagtgagtcttgacaaccaaagccaagcttctttgtcatcatggtccagtggtgtaagtccttgcacgtggaaaggaatcgtttgtgatgaatccaactctgtgaccgctataaatgtggcaaatcttgggctaaaaggtactcttcacagtctcaaattttcatcttttcccaagctgctaactctggatattagtaacaacagttttaatggaatcattcctcagcaaatttctaacttgtctagagtttctcagttgaaaatggatgctaatctttttagtggttcaatccccatttccatgatgaagttggctagcttgtctttgctagacttaacaggcaataaactttctggtaccattccatcaattagaaacttgacaaatttagaacatcttaagctcgcaaacaatagtctctctggtcccatcccaccctacataggagagtttgtg

SEQ ID NO: 10325 - DNA, 383 bp, Glycine max
  Clone ID: jC-gmfl02220114d04d1
tttccttttttttttttattattttttttttgaggcacgagataaccactttggaccgtatatatatagagagagagaataccaagcacactgattacaggatgatgctctctttaagatgggaagccgatcttatcagatcacataggtaggtggaaataatatctctagcaatctaactagagaaggtcgttcttgcacaacacacagcacatgagaaattaatggatacacaatctcattctcatggtgctcaagatgcatggactaattaagcaacaatgttggtccgataggaagtgcccacagataaattgggtgcccataaaaaggccttgcttccaaggaaatggcaaacagggttagttccatgaacaactccc

SEQ ID NO: 10326 - DNA, 408 bp, Glycine max
  Clone ID: jC-gmfl02220114d05a1
acctttttattttttttggcgcgggatgattgagacctttcttgtgaaaatagttgccagcgtaggattgttacactaaataatttccttatgatgattagatgagcgcagagatgcatgaattgcatggcttccggaagtcaaaattgggttgcaaattttacaaaggcattctaccaagcgcgaaacaaggatatatgattatatgcgacgatgaccgataaagtttaatttgtaccaggaaatgtgcctacgcttggttcaattacttgaggagttaccctgtaaagactttgtttccactccagtagaaatgttctgacagacctgtttcacaatcgttacgggtggattgatcactgatccattatgcatcgtggcactggatttgaaaggttaagttttttt

SEQ ID NO: 10327 - DNA, 469 bp, Glycine max
  Clone ID: jC-gmfl02220114d05d1
ggaatgcttattttatatctatgcgtttcactactcgtgcgagaattatacgcaaaaagtgagcaacgaaatagtatactcgagacataatagttatgcacgggacataacaaagaaattttgtatcccagtcactgctcgactgtagtcagacaaacaactttatacagattactactcaattccacctatggcgttcaaggccgtacaatttgaattccaaaaaacatgtatgtaagaaagaaataacccatattgtcacagctaaaatattcattataaggaaatgctcggacaattagcatattaaaagaacgtatacaaaaagcatttcttgcattagatcggcagctggattcctggtatgcacctgggtatagcttaaaaggggacaactacctaagagacagattagtagcatatgctcgaacacgtgaaaatgaagcagatgatagacttatgcacgtag

SEQ ID NO: 10328 - DNA, 478 bp, Glycine max
  Clone ID: jC-gmfl02220114d06a1
gcaattttctattttcttctctcatggcttcagattccaaaaaggatttccctgctgatgacaaagctggaacagcagagaataaagcattcaaagatgaaacgtcatctaaagattctccagcagcacgaagagctactacagctacttctggacctgcaactggttttccaggcaaccctttagatttctctgcaatgtctggcctgctcaatgatccaagtatcaaggaattggctgaacagatagcacaagatccatcattcaaccagatggctgagcagcttcagaaaacttttcaaggagctccacaggatgctatgcctagctttgataatcaacaatatttttcaaccatgcaacaggttatgcagaatcctaattttatgaccatggctgagcgcctgggtaatgcattgatgcaagagccatctatgtctgccatgcttgaaagtttttttaatccatcagataaaga

SEQ ID NO: 10329 - DNA, 435 bp, Glycine max
  Clone ID: jC-gmfl02220114d06d1
gccacgaagcaatgtagtccaagtaaaattgaagcctgaataaaatcatgacggccctaatcttcaaaatcatgccgggggacaataaatgcattacaagaaccttgataacaaattctatggggactcacattcaacaacgttaatcaatttagtttaacccacaacggttggaagaaacccaaagataaattacaaagtcgggcctttttcccctcagtttcccctttgcttgttggggaccgcatggcatcatgcattgcaattaccgaaaagcatttttctcaagtagcttcaggacttcattttgattggttagcttcgcaacatctattggagttttaccatccatattctggagagtaactgcagcaccattttcaaggggaagggccacacattcctttctgccataaccagctgcataatggagag

SEQ ID NO: 10330 - DNA, 497 bp, Glycine max
  Clone ID: jC-gmfl02220114d07a1
aactctgcaccaacaatataaattggttaaagagaggactatatctggagattcatactatggctctcacgtgatgcagtatggtgatgtagggcttagcagagatgttctcttccattatttgggtacagatcctgctaatgataatttcacttttgtggatgaaaactccttatggtcaccttcaaaaccagtcaaccaacgtgatgctgatctcatccatttttgggataagttccgcaaagctcctgagggttctctcaggaaaaatacagctcagaaacaagttttggaagcaatgtctcacagaatgcatgtagacaacagtgtaaaactgattgggaagcttttatttggcattgaaaagggtccagaagtactcaacgctgttagaccggctggatcggcacttgttgatgactggcactgcctgaaaaccatggtgaggacttttgagaacacatgtggatccttgtctcatacgggatgaacacatg

SEQ ID NO: 10331 - DNA, 555 bp, Glycine max
  Clone ID: jC-gmfl02220114d07d1
aaacacacatcatattactatgtgttgtcatacatgcattgtaatgagtggatattccaaagcaattggtccctttatccctccttaatccttatgccgtaaatggcaccatcccttgtaaattgtaattgcttcttcagaaatagaattatacaaaggtagttgcaatatctatttgccaaactataaatgtaaagacccttcttcccaatcctagtagtgtcccaattgtatttacaaaggtgggacaagatatgtatatacaagtacaaccatgtaacataatgtaacaataatcatactttggtctttactagtgcacattacagggagttattatgcactgaaacccctttgcagagaactccagggattggaaggaatactgacacaagcttgtgctgaagcctcagccatttgttcattctttatccctacattgcagatgtttgcaagggacctcatgtgtttcatcccgtattgagacaaggatccacaatgtgtctcaaaagtcctcaccatggttttcaggcaatgcccgtcatcaacaagtgc

SEQ ID NO: 10332 - DNA, 515 bp, Glycine max
  Clone ID: jC-gmfl02220114d08a1
ggcccttaaactttcgctctctctgcttcactttctcgctttggcattttcttgggaaaaaaaaaaatcctcagaacaaaaataggtcttcttcttctctgatctaccaaagcttcaaattctccttagtttggtttgtctgtgagtttggagtgtaatgtcgccgccgacgctggtaacggaggaggaggggcggagcaccgtggcgtccgattcttcgcaatccttggactgtttctctcagaatggtgctggattgaaagaacggaattacttagggttgtctgattgctcatcagtggatagctgtgcctctactgtgccaagcttgtgtgatgagaaaaaggagaacatgaatttgaaggctacagagttgaggcttggtcttcccggattccaatcgcctgaaagggaaccggatcttttctctttaagctcaccaaagcttgatgagaagccactcttccctttgcttcctactaaagacggggattgctcgtccgggcagaaagctg

SEQ ID NO: 10333 - DNA, 540 bp, Glycine max
  Clone ID: jC-gmfl02220114d08d1
cacaaatatagtgttagaaccgtatggtggcggctgtaacagatgttcaattcttccaaaacaaacggattcctataatgattacagactccacaaatactaatatttcattgtagctttcatatgatattacagtggtaacaaattaacacaggaccatgacaaactcttgagggacttgaaaacaaataagtggaagggcgttaaaccaccaatgccaggatttcagtcatcatcctttgcttttcccattccggaggatccaacaataaacacttgattagacaaaagaggaaatccaggataccctaaatcctgcttttagactttaccatggccctgggagctaaaccaatggcatcagaaccttataatttcagcctttgcaaacttcatggaacctttttcccaggggcaatacccttaaaggtttcaaatctccatctttatcttcataagtgagaacatactcagaaccatgcagaagatccctcagcttgctctcactcaacatttctcttcctggagctccatgggaac

SEQ ID NO: 10334 - DNA, 448 bp, Glycine max
  Clone ID: jC-gmfl02220114d09a1
agagctcaaaaggaccaaagggctttaagtttactgatatagtcaataccattgatgtgctttctaattctgagactgaaatacaggctactttcactgctggtaattaacctgaaaatctggaggatcataacagtcaaggagggctctattgtagaggttttcaaagacggagaaggattcacagcagcatggtacacagacagcatatcaaatctgaaggacggtatagcttatgcatgctatgtagtgcttcttgatgatgaaggtgcacgacctttgaaggaatggatttcccttgtaggtggagaagtcacatttacgagaatacgtactaatgatcatcttcctggcttgcataatgacggaacaaggaacagaccgagggcagatatggtcgactatactggaactggagatgatacggacgacgctttcaacgtagaaa

SEQ ID NO: 10335 - DNA, 417 bp, Glycine max
  Clone ID: jC-gmfl02220114d09d1
ttcttgattttcttctgtaattctttagcttgatctcgattagatcgaacatttaccatgggaacatagataacaaaccttactatatgcaagccaacacattacccactctattctatacatcatggtttgagctgatcataatggatacaacgtacagtccgtatacactgaagctgcatcaattgaggatggaccgctcgatccaggaatctccattggtatgttccctatcatagcagtcatgatagggatccacatgtatgccaagcgagctggtctgtcaaatgaacacaacagttgaacccgccaacactagttaaaccttggtgaaaccccctagaacattatcgctcacggtgtttgagaccctctccatgtgcagcggaaggaaactctataggccgatgaacatat

SEQ ID NO: 10336 - DNA, 522 bp, Glycine max
  Clone ID: jC-gmfl02220114d10a1
cgcggcttcaaccttgtagttattctctttcttcttttttagctatccctctcttgaaaaatctagatctcgttcttccttgatctacgttacgcttttagtgaccggatctgtatggatctgaaccagatctacacgccgatggtggttttggcctggtctttcatagatctgatgcatggaggctcagatctactgtacagagatactgtagataatcgatgagaagaacgcagatccagccgcttccgcttgttcgatcgctacagacgcttgtatcggattattcatgattgattcataagcagcatgtcttcctccggctatagttggtgcagatctcggatgttgtaaaattagtgtatgatgtgaagctatgggctggaaaatgtggatgtaggagatttcgggacgaaaggcctcaaaacgcttcgtcgtttgtggttactgagtcctgagtgatcttgtcatccgacctttgccatgacaggtgcgcttgcttgcaggtcaaatatgttaata

SEQ ID NO: 10337 - DNA, 405 bp, Glycine max
  Clone ID: jC-gmfl02220114d10d1
ggaccattaaagattaaaactactttactgggctgataatatattttggtttggctcaattaacatctaaaccgacaactgccatgattttccaattatccatgcgtctcggaacaatataaacatcagtagatataaatacataaaattatgtatacataaagaataactaaaataacttaataaaaaactacgtatactgaatttctgaaatacataaaaactgtagatacagtataattataaaataaaaacacgatttttttaatgtgttccctgcccacgtttaaactttcttgtataacaaaaccgttcgtcatccatcaatagcagataacagaaacttatcaattgaattgcaaattgaactcgaaccacaagtgaaaccttgaaaataggaaaggt

SEQ ID NO: 10338 - DNA, 492 bp, Glycine max
  Clone ID: jC-gmfl02220114d11a1
agccaaaaaaaacattttaattgcaaaataccaccagtaaagcagtcagaattgagttatatcccaattccagtggaattacaaagttctatttagaatatatagaaacaagataccaataaaccatcaaaagaaaatgagaaacaaaactgtatcataatgacattgtcgacaaagttaacacttgctctagaaagagttcaaacaggcaaaataataaaagacaattaacatgacaactctaataaaatttgtgattaactataaccactcaaacctaaaagtcctccaaaaagatgtctcattgggttgttcaaattcaagcctttgaggcttgcttttcctttgccttctggatcttcaagaccttcttcacaatcttttgctcttcaactaagaaagctcggataatcctctccctgacagcacttccagacaaaactccgccatatgcacgggtgacagttctacggtttctgggtaaccttgatc

SEQ ID NO: 10339 - DNA, 365 bp, Glycine max
  Clone ID: jC-gmfl02220114d11d1
ggggcgaaaaaaaaaaaaaaaaaaaaatggaccttttaaaaaaaaaacgaggggaaaccttaatcccaaaaaaaaaaaggggcccccaaagaaaaaaaaccaaacccaaggggaagggggaaaaaacccccaaaaacggggggaaagggaaaatgggggggggaaaaaaaaaacgaaaaaggggggaaggggggccccaaaaaaaaacgtagggggacaaacaaggggcaaatccccggggagagtaccaaaagaaaaggggccgggccggggggccacaagagggggagggctcgccccagggggggggggggaaaactggcctagccaccccgggttccccccctgggggacaaaaatccccc

SEQ ID NO: 10340 - DNA, 387 bp, Glycine max
  Clone ID: jC-gmfl02220114d12a1
aaaaaaaaatttcttggtcttttttctccaggggggttattttcaccttttgcttcacacaacatgggatttccaaatcccccgcaaaacccccgggccgaccttttcaagccatcatgaaagaaccggaaaaaaaaaaaatttgagatataacaatttttccttgttaagcaggatcccgggcccggaatatattagggggcccaactaaaggcaggggccaagttgcccctgggcttaggggcttgaaaccgggcccttacctagagggggacagctttttttattttgaagggctttaaaggggtccaaaccttttccggggagggcttacacccccggggcctactgggaaatgggggagggccctttggggaaggaatcatt

SEQ ID NO: 10341 - DNA, 357 bp, Glycine max
  Clone ID: jC-gmfl02220114d12d1
ctcttcccccggggcaaaacatcccggccccccaacacactctcccccccccccccaactgggggccccccccacgggccccccagcgccccccccgggaccccccccccaccccaccccccccaaaacccttagcccggccccccgccaacgccacacccccatctggccccccccccccccccaatccggcgaaaaacgcccggaccacccccatgctaccgagcgccccctgcatcaccccccttaaagcccgaaccccccccccctacttccacccccccgggcacaaaacccgaaaaccccgtgccccctcctacccccccccccccagccgggggcgcccccccacccccc

SEQ ID NO: 10342 - DNA, 552 bp, Glycine max
  Clone ID: jC-gmfl02220114e01a1
ctctcttccaaaacctaattttcattttttctcttcaaacaaattttcaaaatgcgtgagatccttcacatccagggtggccaatgcggcaaccagatcggcgccaagttctgggaggtggtttgcgcggagcacgggatcgaccccactggaaggtacggtggggactcagagcttcagctcgagaggatcaatgtctactacaacgaagccagctgcggccggttcgtgccgcgcgcggttctcatggacctcgaaccgggcaccatggacagcgtccggtccgggccgtacgggcagatcttcaggcccgacaactttgtgttcgggcagtccggggcaggaaacaactgggccaaggggcactacactgagggtgctgaactcattgattctgttctcgatgtggtgcgcaaggaggctgagaactgcgattgcttgcaaggttttcaagtgtgccattctctgggaggaggaactggatcaggaatgggtaccttgttgatttctaagatcagggaagagtacccagataggatgatgcttactttc

SEQ ID NO: 10343 - DNA, 381 bp, Glycine max
  Clone ID: jC-gmfl02220114e01d1
aaaggctaaaattatagcagttgtaaaatgggttccctaccaaccgggttttcctaaaaacggaaacaaacccgaaccgactttattgaacagttatgcaaactagacctacccggaacaaaacccttccctgaaaagagacaataatgaaccggcaaccggaaattgcagcttggtatccatattgttgtctaaaggccccggaatgaaccacacccaaggggaaattcacatattatggtggggaaacccctcctcgttcttttcctcttaaaactcaacctcatcagcagggggattccgggactggggaaactccgacaccagatcggtcatgggggtctcaacccttgggaactccattttgtccatggcttcccc

SEQ ID NO: 10344 - DNA, 530 bp, Glycine max
  Clone ID: jC-gmfl02220114e02a1
gaagaattaacaaagtcagaagctgttgaagtactcaggactactaaaggaattcttttggatcttagcaagtccccctataaaacaagaaggacctccattgattcagttctagagaacccaaaatttcagaaactatttccatcttttgatgacttactttgtgctctttttctggggaaaaagttgaatacagatgggagagttgaaatttgtttggttggtgaccctgtagtaacttctttagcattgcctgttgcgttagatgctctggatgacatgatttacaatcttaacaagtgtgaaaactatgggaaagatatgtttctgttgccacttttaaagttaaatagaatacattctggttcagcaattgcaagttcagaggagttgccttttgggattataacatcagcatttgatggcactcgaatgtctaaatgggaagaaccaaatggaggaagaggttgttgggtcgtgtatagaacatttgataacaagatgtttgagctcgcaacatatgagttgat

SEQ ID NO: 10345 - DNA, 488 bp, Glycine max
  Clone ID: jC-gmfl02220114e02d1
aaaatcaatgcggtcacatatatatagcttttttaataaaacattgaccagtataaataatattactgttatgtatgggcagtaatctcaagccaggaagttttagttttgcctcctcatttcatccacggtgatgggcttccttttaaggcatagacaaatttaatcttaattttctttttcttataaaataagacatagacaaaagaatttgctcaactatgctcacaatttacctatatttcatatagatttttttttcttttatcttaatttttcggatcatcggaagaaggagaccttaactatttcgtaatttagtcgggaggtaattaaagtctccggatttcatatagattttgcatagaggtcaatgctaccgatttgcagccgggaattagactgaatatctctgactgccagaaacctaaacctgaaaacattacatggaaaacttgcagaactgattgtgtatgttctgcgctgga

SEQ ID NO: 10346 - DNA, 380 bp, Glycine max
  Clone ID: jC-gmfl02220114e03a1
gagaaagaaggcctccttcagctaccttctgacaaggcacttttgtctgaccctgtgttccgccctcttgttgagaaatatgcatcggacgaagatgccttcttcgctgattacgctgaggctcaccaaaagctttctgagcttgggtttgctgaagcctaagcaacgttttggggattgttggagaggcacggtgcccataatatttctctcataaattctatggtcatggtttctaatgcgccactgtgggttcctcaaatttttagatagcttttgaatgtattttgctggacgtggtgatgatgattggagttgggttgtttttatttgtggtcgatccttttgttaaataacattgttcagcgattgcgatattt

SEQ ID NO: 10347 - DNA, 538 bp, Glycine max
  unsure (1)..(538): unsure at all n locations
  Clone ID: jC-gmfl02220114e04a1
gtggcagtccaattgtaatttgcaacaagggcatctaaacccagaacccaatcatcttttattgcaaacttttgtgcattggaatttggaggccataaaaaagatgcgatgctacacgcaaacaagtagtacaagtccaataagaaaagcaagatagaaagattggctagttcacacacctcaattaatacaacaacaccctgttgctgatagttattatagagagagttcgatcaattcaagcttgcaagcttaaccatggaacggtatgagataattaaagatattgggtcaggaaactttggtgtggcaaagctggtcaaggaaaaatggagtggtgaattatatgctatcaagttcattgagagaggcttcaagattgatgaacacgtgcaaagagagattataaatcataggtccttgaagcatcccaatatcattagatttaaagaagtgttgcttactccaactcattttgcaatagtcatggaatatgctttcggnggagaactgtttgaaagatatgcagtgctgggag

SEQ ID NO: 10348 - DNA, 243 bp, Glycine max
  unsure (1)..(243): unsure at all n locations
  Clone ID: jC-gmfl02220114e04d1
aaaagancaaaatccaaatttcacccaggttgatgggataattattacttataacaataagttaaacccaagataataattattatgaaaaaaaaaaaaggagaggtccgggaaagaacaaagggggggggggttatattttgggattttccaatggaacccttaagtattgggggcccttgtaagggggtttttggcaaaggatattgggattggggggaaaaaggccaaggtacccccttt

SEQ ID NO: 10349 - DNA, 481 bp, Glycine max
  unsure (1)..(481): unsure at all n locations
  Clone ID: jC-gmfl02220114e05a1
ggcaaagaatacatcactctcgatcaactgaggaacgagatggtgtcggaggtgaagaaaatagggcgcgtttctttgatcgatctcgctgacgctactggagttgacttgtactacgtggagaagcaggctcagagcgttgtaacggaacaccgagaactgatgttgactcagggagaaattatgtcggagtcttattgggactcaattgcagaagagattaacgagaggcttcaggaatgtagtcaaattgcgctgacggaactcgcagcgcaattgaacgtaggtttggacttggtttccaccatgttggagccgcgccttggaacaattgtgaaaggaaggcttgaaggcgggcagttgtatactcctgcctatgtggctcgtggtggtgccatggttcgtggtgctgtgcgaggcatcaccgttcccacannattgactgtggtatggagctcattgcagcagttgctgcaagaaa

SEQ ID NO: 10350 - DNA, 475 bp, Glycine max
  Clone ID: jC-gmfl02220114e05d1
gtaaaaatcaagtaacattaagttggattgggatacacaagataattcacattatctgaagtacattgcaataacatatacttcaccaaacacaaatctaaaaactctcaaaagtccacaagtcatccttttctttcatgctcacttgccggggacgaagttggtggcgtaggcccaggcattgttgttgactgggtccgcaaggtgatcagcaaggttctccaatggacccttaccggtgacaatggcctgaacaaagaacccaaacatagagaacatggccaatctcccgttcttgagttccttcaccttaagctcagcaaaagcctctgggtcatcagcaaggcccaatgggtcaaagctgccaccagggtagattgggtcagtgacctcaccgaggggcccaccagcaatacgataaccctcaacagcacccattaggataacttgggtggcccacatggcgaggatgctc

SEQ ID NO: 10351 - DNA, 256 bp, Glycine max
  Clone ID: jC-gmfl02220114e07a1
gtgcatacatatctatctatttatctatagcaagtgcgtcaagagacacgtggtaccctagctagagtgccattctgtggtttctttctttctttctttctgcatcacatcacaatttgcattgcctcgtgtcctttttcttctttgctctccaaaaatctcacacacacaggtatctagcaaatgggttctcaccaacaagaaccatggctattggagaatgggaaaccaagggttttgaccaaggagaccaggc

SEQ ID NO: 10352 - DNA, 529 bp, Glycine max
  Clone ID: jC-gmfl02220114e07d1
gatgcatgctttctttttcacagataaaagattgtcacggtcgaggaagatcaaggtttggaccatccaactacaactcattgaatgtgaataagtgtgggagttgaattagttcaagggcaacctcatgcaagagactcccattacgagagtagctatacatgtacaaaaaattctttagaattttaatttgtaataattacacgaaaacgatttttcttgagtgtaaactcatgacattctcaaataaaaattaaagacaaatctgtagaagtatcaaaaaaattcatttaagaaactgattttttctaataatttttttttatcagttcatataccatttaaaaatttaacctactgatcttatatttaaaagatgaagttatttatcacattttaataattactttgaatgattgaattagttgagttgatgaatgattgagttagttggaactgagaaaacaatgcaaacatgtgcaacatcaacaacaactaattaagtggagtgatgatgagagggactcac

SEQ ID NO: 10353 - DNA, 484 bp, Glycine max
  Clone ID: jC-gmfl02220114e08a1
tgggacagtcaccgtccaccaccgccgcgcctccgccagacctcaaccgccaccaaattcctcagatacatccaaacaccgattccgatttcaccgattacaccctccgtctctccgacgattgcctggccgcaatctttcatttcctgagcaccgtcgatcggaaacgttgctctctggtctgccgccggtggctccgcgtcgacggccagaggcggcaccgtctctccctcaacgcacagccggaattactagacttcgtcccttccctattcaaccgcttcgactcggtgacgaaactcgctctacgatgcgaccgaaagtgcgcgagcataaacgacgacgctttggttctgatctctctgcggtgcaggaatctcacgcgcctgaagctgcgcggctgccgcgacataactgaactcggaatggccggcgtaggcgaaaactgcaggccttgaagaagctatcgtgcgcgtcgtgcatg

SEQ ID NO: 10354 - DNA, 453 bp, Glycine max
  Clone ID: jC-gmfl02220114e08d1
aaaagggaaccaaattttctgcagtttttatcttcttttttggcaactctgcagtttttatcaaaaaaaaaaaactgcactgttaggaaataaaaccgaccttttaccaaggggtataaccataacaaattggaaagggccactcagtgagggtaactgacaaatctagtcaacaaaaaaaatgctgctgctatcagcaactaacctgaaaaacaaaaaatcccatagcaaccctgcaaaaaacaggcaatcgacatgagaaccactattatagatatgggggaatgcccacttggcaaaaatgtggctgctggcttgctgcttttttactaacattatccaaaactggtgctactggagacattatcaccgttagaccattttttgaaggcccccggtactaaatttctaccagccaaaaacccaaaccttgagcttaacattggcaatcgg

SEQ ID NO: 10355 - DNA, 512 bp, Glycine max
  Clone ID: jC-gmfl02220114e09a1
gtgcagcatttgttcagctaattgaagttcgcccatctttcttggagccacatttacggaatgttattgaatacatgttacaagtcaacaaggatacagatgatgaagtagcccttgaagcttgtgaattttggtctgcttattgcgatgctcaactgccacctgaaaacttaagagaattcttgccccgtcttattccagtattgctgtcaaacatggcttatgcagatgatgatgaatcagttattgaagctgaggaagatggttctcagcctgatcgagatcaggatcttaaacctcgatttcacgtatcaaggtttcatggatcagatgaagtagaagacgatgatgatgatgttgtcaacacatggaatttacggaaatgcagtgcagctgctcttgatattctttcaaatgtgtttggagatgagatccttccaactcttatgcctattgctgaggctaagttatctgctggtggggatgatgctcggaaagatagggaagctgct

SEQ ID NO: 10356 - DNA, 298 bp, Glycine max
  Clone ID: jC-gmfl02220114e09d1
aactaattattgtctcaatcaaaatttaaatgatgcgctgcctgaggcaacacagttgaaattgattttcaagttacggctcacacaatttaacaactaaatacgctggaaaatacaagtcagatcatacccccccccctttaagcgctcctgagtctctttctatctctggtgggacaaaactgtgtaaccaagacacaacctattaacttaaaaacggaaaaatattgaaaaactgttacgactatcacaatggtcgaataaaactgctagcttttaattaagggtttaactttta

SEQ ID NO: 10357 - DNA, 559 bp, Glycine max
  Clone ID: jC-gmfl02220114e10a1
tttccaacacacactttctctctctatctctctctctctctctctctggttgtctttcattttgttcattgttgttgatgatgtcacgcgccgccgtgttattacacgcgcaggaggaggaggaggaggagtgtagtacttcgacgtcgtcgtcgatcgggaggaacagcgacgtgtcgtcggagagatcaatggaggaaggagaaaacgaggtggaaagtgcctaccatggacctttgcatgccatggaaactttggaagaggttcttcccatcaggagaggcatctcgaacttttataatggcaagtctaagtcattcacaaccctggctgatgcagtgtcttccccatcagtgaaagacatagcaaagccagagaatgcatacaccagaaggcgtaggaacttgatggcattgaaccatgtcttggacaagaataatagaaactaccctctaagaagcagtggtggtggcatttgcaagagatcaatcagcttgagtagaagctctctagctcttgcagttgccatgaacaactctgacagcagtagtagtatcac

SEQ ID NO: 10358 - DNA, 574 bp, Glycine max
  Clone ID: jC-gmfl02220114e10d1
gctctaattattggccaggcatatcattatatcttacggaagttaatctgaagtgatcgtacgtacgtaaaggcattgcttctacaagtttttgctccctcaaacaaataggactagagcaagatattcattcatataagctaaaagttaataacatatagtttgttatcctctttgttttttttttttttactatgatggatgagctgttttatttccaacggagggacttgaaatctttattgttgcagcaatggcacaatgctgctgtagatcagccacggaaaatgatctccagggagagaaattccgcaacaaaggagaggatggacctgagccggaagaagaagacactctatttcggggatggagaggcggtagaggagagggagagtgtaacgaattcgagctggaaccagaatcttcgcttgtgatactactactgctgtcagagttgttcatggcaactgcaagagctagagagcttctactcaagctgattgatctcttgcaaatgccaccaccactgcttcttagaggctagttctattattcttgtccaagacatggttca

SEQ ID NO: 10359 - DNA, 300 bp, Glycine max
  Clone ID: jC-gmfl02220114e11d1
gattaacaatcatcattcaaaaaccacacatgataaaactttgtccaaaagaaaacgaaaaagtgcacatcatcaaacacgatataggagatatttgacacactctaatcatcaaacacgatataggagatatttgacacactctaataatcatcatctccttcaccatcatcatctccatcaccagactcggcaccaacctcctcataatccttctcaagagcagcaaggtcctcacgagcctccgagaactcaccctcttccataccttcacccacataccagtgcacgaatgccctt

SEQ ID NO: 10360 - DNA, 594 bp, Glycine max
  unsure (1)..(594): unsure at all n locations
  Clone ID: jC-gmfl02220114f01a1
tgaagattgaaaagaattctgaaaaaaaaaattaaactaagaggttccctttcgcagttagtggcactgcatgtggtaaggaatcactcagtttaactttatatatgcatatcactcctcagtcacctatcatataccccttctccttccctccttataacatcactgatttctcaacacttgttaaaccctctccatcttttgcatgtctaagaactttttttccaaattcagaataacaatttgacatttcatcagtctcgattcataggacaaatgggtgaggaagcaaaacaggagcaagtacaaccagtggctgaagccaagcctgaggagaagaaagaagagaaggcagaggaaaagccagcagaggaaaagaaggaagaaaaaccagaagaaaagacagaagaagagaagaaggaagagcctaaaccaccttcaccatgtgtgctgtttgtggacttgcattgtgagggatgtgccaagaaaattgagagatacattatgaaaatgagaggagttgaaggagtggtaattgacatggctaanaatgaagtgaccataaagggtatagtggagcctcagcaatctgca

SEQ ID NO: 10361 - DNA, 313 bp, Glycine max
  Clone ID: jC-gmfl02220114f01d1
cacaagcatgtgcacaatgatgatgtattactatttgtaataataatatatcgtacatacataaataagacagaacgatatatcatcaatcagcttgttatcaatatgattccatgccatttcatttgacaccttctcccattccaccagcccaactcaataaaaaaatttcccatattggtggtgcttacaaacaactttgaaacctttttctcattcctatgatgatcgtttatacaatgcagcatgcattaggattttcatcactgaagaactgtggagggggtattctttcaatgacagagagtggagg

SEQ ID NO: 10362 - DNA, 593 bp, Glycine max
  Clone ID: jC-gmfl02220114f02a1
ttaggctactgcaatggaatgaacaaaaagcagtcaaaatccaaactttgagtggtcatattttggagacaatttcgagtgcaaggttcttattgtttcaatatagtgttgtgtataagctgcatcttactggaaacaatacatcacttgcggggattgccacctggactggttcctatttcagaaccttactttgatggtgagttgcctgaggtggagcttattgttgtagacacaagcaagtttgatgatgcaacgactccagaacctgaacatactaataaggaagacaagtctgaactttacaagccaaaagtttctacctggggtgtcattcgtagacctggcaatatttcaaaaacatttggtggtggaagagttatatgcccaggagaggttctagagagcaaagaagaaaaagttgttaaagaagcacgcacaaagcagctacttgctgcctacaacaacaaaactggattaaatgttgatccaaagctgaaatctgagtgcgaggagctaagcatatttagtgatatccaaatattacaaccattctttccttcttttattcatggctttcctttttatgcaca

SEQ ID NO: 10363 - DNA, 427 bp, Glycine max
  Clone ID: jC-gmfl02220114f02d1
gttctatcatttatgcgctatctgtcatagccatgaatgtcaatgaatacaacgagcaatagctatgacagaaaaaacgcccaacaatgcgcataaaaaggaaagccatgaataaaagaaggaaagaatggttgtaatatttggatatcactaaatatgcttaactcctcgcactcagatttcagctttggatcaacatttaatccatttttgttgctgtacgcagcaagtagctgctttgtgcgtgcttctttaacaactttcgcttctttgctctctaaaacctgtcctgggcatataactattccaccaccaaatgtttttgaaatattgccaggtctacgaatgacaccccaggtagaaacttttggcttgtaaagttcagacttgtcttccttattagtatggacaagccctggagtccttg

SEQ ID NO: 10364 - DNA, 611 bp, Glycine max
  Clone ID: jC-gmfl02220114f03a1
tcttgtgtcccaccctgcatctcagcagagccactctgggtcactacaatgccattgttaacttcctctttgtttcacatggttcctctcttctctcttcttttactctcactcatgattcgttatggtacttctcagggtccaccttcacctggctactaccctagttccaaaactaatcctgttagctttgatgagggatttagaaacctttggggacctcaccatcagaaactagaccaagactcgttaacaatctggcttgactcctactcagggagtggattcaagtcacttcactcttatcggtctggatactttggtgctgcgattaagcttcaacctggctacactgcaggagtcataacatctttatacctttcaaacaaccaagactacccaggacaccatgatgaaatagacattgagttccttggtaccacgccagataagccatatgtcttgcagacaaatgtatacatcagaggaagtggagatgggaacattatagggagagagatgaggtttcacctttggttcgacccaacacaagattttcacaactatgctattctgtgggaacccagtgagatcatatttttagtggatga

SEQ ID NO: 10365 - DNA, 496 bp, Glycine max
  Clone ID: jC-gmfl02220114f03d1
aaacaatcaccaaatagctagcgaaaaagaagtgtaaaattaaggtaaagagttatagcattcctggcatgacatgagatgacaatatagcatataaacgaatggaagaagcatgggggaatgatgatagagttgctcacaaatcatagggttgcttgccagtgaacttgacctcaataggactaacattcttaccaatagacctgaagttctgaccaaccccttggcgtccggcgttgaccttctcagggtacacaccatccttggggtgcaaatactgaacctccccattggggaagaccctgtaaaactggtacttgatcttgtactttgacctgagcctagtcccaagagccaagcactgctccttcctcgccaacttgagaaggttgggaccctccctcatgatggcagcgccgccagtgggcatttaaagatctgttctttcggggagtcccatgtgatgacataaaactcctccacttgggccttgcgc

SEQ ID NO: 10366 - DNA, 285 bp, Glycine max; identical to SEQ ID NO: 10292
  Clone ID: jC-gmfl02220114f04d1

SEQ ID NO: 10367 - DNA, 491 bp, Glycine max
  Clone ID: jC-gmfl02220114f05a1
ctgcgagcttacatcaacaagagtgagttagagaagaagaagaaagagcaactcagtaacgacgatgctggagttggtgttgttgtacaagaacccattgctccacacatccctaaccctaatcctcgctttcaccttcgccttcttcaagatccccctcttcttcctccacggcctccagacctacatccaccccgactcccaaccccaatccaacaatggcctccgagccgccatccgccgccccggcagcatcgacagctaccaacccttgtcttccaaaaccgccgccgaactgaaaaagcggaacaagtccaacaacaagtccgatttcgatgaaaacaatgctcagatcttcagaatcacgctcgaccacgcccacctccagtcccgtctcttcatcgatcagtactgcgtcgctttcactctctccttcgctgccctttccacccttttcctccacaccttcctcgattcccccagaatcgtgg

SEQ ID NO: 10368 - DNA, 557 bp, Glycine max
  unsure (1)..(557): unsure at all n locations
  Clone ID: jC-gmfl02220114f05d1
ggaagagaaccttcttgcatttccttcataggaagtacaaagagaaattgtcttgtagtctaatgtttatttgatcagagggcaaacacatgaactgtttggtaaatgatgaattaacaaaatattcgttacaaacagcaacaattcaatataacaacaagcaacctatctttaaatgcaatacaagatttataatgaaaatgaagcaacctctatattcacaacaataatgaaataactggtaacatggagtcctatgtttttatataaatactctccggctatatatgaatctacactccaacagcaacctcatatgatacaatctcaggtggggatgagttcaagaccagtgcaacattctgatcaagttcatttttggattctagctccatgtcattntggtattcagaattgttaactgatggatcatggcattcttcattgtttcctgtgcctgcttttgcatcttggttgactttagtgggcttcacagaatccttttcagtttttctgattgcacttttctgagactgcaccttggcttgaattttttg

SEQ ID NO: 10369 - DNA, 479 bp, Glycine max
  Clone ID: jC-gmfl02220114f06a1
cgcgctatcactgattagaacctaattgaacaccaatattgtaggagttgtgtactaaagaccggttaaagaatatgtagttcaagacaatcaagtcactacatttttctcggatgaaagttcataaacactaggtataaggttcaaacccgaaaggttccttataccgaaatacaatatcacatgttctttctcttattttttatacaaattatctttcggaaaatatattttaaaattttaaattatgtgggggaatgttggtaaatatttgtgttttaatttaaaattgataaatatatattaattccatcttataaaataaaatatttatttgtagattcatcttaagatttggttttaatgagtgaaaataagttgttagatctgtatagacaactattagttagtttccaacggtcatattatgtttgttgcttaaggtgatctgtgcctatctatgatcagacattagtcct

SEQ ID NO: 10370 - DNA, 527 bp, Glycine max
  Clone ID: jC-gmfl02220114f06d1
aggaaataaacagtattggcagatgatcatacatgtttcacacagaaggatcagtgtttagttttaaatttttgtacaaaagtagttaaatcatgctgttcatcgagttaacaggttcacagtgtcatcccataaaaatttagtaaacaaaaccatttctaaattgcagcaagttcagaatcttcataactcctgactgtccatcatcggcatcgatgtcactcaactctggccatcaaggctccgctgggcaccggccccgccggtgccataggaagcgtcctcggcagcggactgccagacggactgccatgcctgggagggcggctggacataaaccccggtggcgggatcgacggcggggcggccaatcatcatcccggcaggctgtccaatgggcgggtagtagtaaggcaccccactggcggtggcccccacaagagcagcgtcgtccttgatctcgtcgcgggggacaatatcaacgaggaagtcgaaaatgtcggtgcgggtgatggcggcggcgatgt

SEQ ID NO: 10371 - DNA, 424 bp, Glycine max
  Clone ID: jC-gmfl02220114f07a1
gctttgtgattccaaaactcaagtgtctcgtgttccgcttttgacttccactcaggcctatgaaaagctaaaaacatttagagaaaatataaagggcaagcaacaattccttgccatgtattctagtatttttggtgggataacaacagacccagctgctatggttattcctatggatgaccacatggtccacagaggccacggtgtctttgatactgcagcaataatggatggatacctatatgagctagatcaacaccttgatcgctttttaaggtcagcatccatgtctaaaatagatcccccatttgatcgaggaagcataagaagaatactcatacaaactgtaagtgcttccaagtgtagaaaaggatcactaagatattggttctcggcaggacctggcgactttcagttatctccc

SEQ ID NO: 10372 - DNA, 565 bp, Glycine max
  Clone ID: jC-gmfl02220114f07d1
gaaaacttagctccatggaatagagtttcttataacactacaagctctaaaaaccattagacaatgaagttattaatagtcattcctccctgtagaagtaggggcatcacaactactgattaatcttcattacaaaatgaagagaaggaaataaagttgtgtcaataaggaacaggtatacgaacagtggagggacctgatttcatgtcctcaacaattagatttaagagagcctgcgttatagggccttctttgccatcaccaataacctgctcatcccattgcactacagggcaaacaagaactccgctgccaagaagcatcatttcatctgcttgcttaccttcctcgacagtcacagttttcacccttatccctttaagcttaccctcccttaacaagctctcagcaagggttaaaactctcttagctgtgcagccacttagaattttgtcaaagtgtggcattataagttccttatctttagtgacaaaggccacattcatattaggcccttcagcaacaaaaccttcaccatcaagccaaatgcctacaaaagcaccag

SEQ ID NO: 10373 - DNA, 236 bp, Glycine max
  Clone ID: jC-gmfl02220114f08a1
cagagatgctacaaccaatcaatagtcatcatcttcagaaaaaaaaaccacctttttttttctaaaaggaaaaaaaattccgagctcaacgagctacccaaagcgattttgattcgcgggcttttcatttctgtataaatcttcaatcttcgaggaaaataacgctaccccatctgtttataatcatatggggcacaagtgaacgaaaaagaaactgtcgagaaaattgagggttg

SEQ ID NO: 10374 - DNA, 528 bp, Glycine max
  Clone ID: jC-gmfl02220114f08d1
gttaagttgtacacctcagccatatcataactaatcagctgaacttattaagaataatgcccccggtcaggtttcttagagatgacaaatgaaatccttactttaataacaaaaatgttcaatgcaagctcttccaatataaccaattcgcgtagttcacccctccatggaactggactttgatcagcagaaccagcaactcatagaactctggtggcagcgaaaatatactgcaaaaaattatatatagtctgatctgatccttaaaggggttcaagagaagtgtgtctgagtggaactgcggaattacattgtgcttcattcataggggtaacttgattttctcagaccacttgaagatatcagaatacactttatcacctcctagatcttctcctttggctccagcagccactcttataacatcctcaatcaatgcaaagtttcccatgatgtcaacatgagcaccactttgtgtgccccttcccttagaggttggctggaggagaatgatcatattctctaacg

SEQ ID NO: 10375 - DNA, 425 bp, Glycine max
  Clone ID: jC-gmfl02220114f09a1
aaaaaaaaattgtgggaaattttttttaaagtaaaaatttggggccccctttaaccttggccctaaaatttgaaaaaagggttttttcacattaccccaggcccttcccgggttcccccggccccaatgggcccggcccgggggccccccgaatcaccctttttggggaaaattcgggcttgcaccgaccccccttttgttaaaacaaaaaaaaagggggccggccaattaaaacccccttgggttctttttttgaaaaaccggccctttccggggttcttaaaaaaagaccccggggggaggggtaaaaaaacccgaaagggggggacatccgaagggttttttttcctaaaccgggccccgaaaacccaaggaagcgcgggccctaaaaggccccctccccgggggtgggcccaggggccccc

SEQ ID NO: 10376 - DNA, 414 bp, Glycine max
  Clone ID: jC-gmfl02220114f09d1
aaaaccaggaagggcccaaaccggaaaaaaaaaacctaaggcccccgaaattacaccatccccaaaaccccaatatcgggaaccggaaaagcgcgtccgaacgcccaaaccgcccgcagggaaaaaggcccccccgggcccagagtccttcccaagggccccgaaaacccctaaaggggggcccccccgaggggcaaaagacccctttcagggcccggcaaacacggtaattttccccgccctttaattgggccccccccttttaccggccggggggttcccccccccaaaaaaatggcccaaaccgggcacccctggaaaaccggttggcgcccatgagaacctgggagcggggcccccctccggaaaaaccccgggggttctaaggggggcccccctttgaaaaaaccccgg

SEQ ID NO: 10377 - DNA, 538 bp, Glycine max
  Clone ID: jC-gmfl02220114f10a1
agcagcagcaagttgtcccttcataagatacggaaagaagaatgagtcaaatttttcactaacaactagcaagtctcaaaaaaaaagttcatgagaccacaaaaacatttgaaaactaagctccatggaatagagtttcttataacactacaagctctaaaaaccattagacaatgaagttattaatagtcattcctccctgtagaagtaggggcatcacaactactgattaatcttcattacaaaatgaagagaaggaaataaagttgtgtcaataaggaacaggtatacgaacagtggagggacctgatttcatgtcctcaacaattagatttaagagagcctgcgttatagggccttctttgccatcaccaataacctgctcatcccattgcactacagggcaaacaagaactccgctgccaagaagcatcatttcatctgcttgcttaccttcctcgacagtcacagttttcacccttatccctttaagcttaccctcccttaacaagctctcagcaagggttaaaactctctt

SEQ ID NO: 10378 - DNA, 315 bp, Glycine max
  Clone ID: jC-gmfl02220114f10d1
ataaattaactacataatttcaaggcttcgagtaattgagatcgaagccgaaaacaaatacattgatatagagtagcattcctgttataacatttccaaaaacaggttcgtttcctcattttttagggatgtccaaatatatacacaaaatgggattaatttatattacagaagttatttatccttcgtatcctcaggcaaagcagatactttgcagataggacataatttcttcatagatagccactttttaatgcagctcacatggtagtcatgtccacaagtttgaagtgttccaacactcgtccatatttc

SEQ ID NO: 10379 - DNA, 407 bp, Glycine max
  Clone ID: jC-gmfl02220114f11a1
aaaaaaaaatattcataaaataaattaatgacaataatttagaacacatggcttaaggtcaaacagaatgatagaatgatacaacttacagctgacctggaaagacaacaaagcaatgaatcgagagatccttaaaaacacagaaaaaagtcttccctaggtaatatataaagtgtctcaacatgtttagcagcgcatggtctctacattaaaattacatagagcacagattgcccttgtataaattcctacttctccatgtgggggctatattgcctacaggctaacgaaaccaataggaggaaaatttacgattttatataaaatcaaccagtataatatggcagaacacttgggcaagacaagaacacccgttgcaagttaagctttttacagtgatggtgatg

SEQ ID NO: 10380 - DNA, 346 bp, Glycine max
  Clone ID: jC-gmfl02220114f11d1
aaaaaaaaaataggggacacataatttttttttttttttgggggggggggaaaaaaaaaaacaacgggcttaaaaattgatgtctaatttaaaacgcgctcaaaaaaaaaaaaaaagaggaaagggtccccaagagggggcccctttttagagaaattaaaaaaattttttaaaagggggcccattttattttaaaccctcccctgttttgggggaaaatatacaaaccccccggggaatttctcttagaaaaaaaattcaagaacgacttttttttttgtgcaaaaaaaaaatcccttcttttgagtttttttataaagaggtcaccccccccctatttttttaa

SEQ ID NO: 10381 - DNA, 373 bp, Glycine max
  Clone ID: jC-gmfl02220114f12a1
aaacaaaaaggcggggatattaaaattacctcatagtcaaacccggggaaaaataaaaacccccccagttttcgacggaataatttattggggccaaaattatacccaaaacggggcttattttaaccttccccacaaatcctttttaaagttttccctatatcccccgggaaacccccctaccctttttttgaaattgatttgctttataggcaaaaaacatgagggggcccccccggttttccattaaaaactttagggcccttggcaagtaaaacatcctttgactttgggttaaacaaattaagcccatattttttgcaaattaacccctttatacaggaaagcgtttttggcaaggattcgggggctc

SEQ ID NO: 10382 - DNA, 347 bp, Glycine max
  Clone ID: jC-gmfl02220114f12d1
gggccggaaaaccaaaagggccccccggggcccccaaaaaagggccccaggggacccgaaatccaaaggggaacccaaaataattttttaaaaaaaaaaacacaaaaccccaagtggggggccggaagaggggaaggaaaaaaggggcccccaaaaaaccattgggggggccccggggcccctttgggcctgggaaaccctttaaaaggaaatttggcaaaaagcccaaagaaaagggcccctgggcccaacccagtaaaaatttttgggaagggaaaaaaaaagggggcccatttacaaaaaaaccttgccaagccctaaaccaaattctggggggcccccccttt

SEQ ID NO: 10383 - DNA, 582 bp, Glycine max
  unsure (1)..(582): unsure at all n locations
  Clone ID: jC-gmfl02220114g01a1
ctcattttccctccaatttccttctgggttttgcaatttggccaattgggtccccaaagctgtgaccttttcctctgatcaacgcgaagcggaagagaaacacccagagagagaagagaaaaagaaaagttgttgttttcttttgttctttgggggtgttggtttaaaacccggggttgaagcattgcagacatcacggctattcaaggagttcgccactctctttctcatgcccgttgtgtccgacgcaagggtagtgtgacggagagaaatccttcaacgcacggcgggcgtggcgctctgccttccgaaggtggcagcccctctgacctcctctttcttgccggcggtggttcttcttattaggattctgaagtagtattagccattaacataacaatagaagacagcaccttctaaagttctctattagggggttcttggtccttttttggtcttcttctttggtagntgttaggtttggtgagggctaacatgttgagcattaagagggtttctactgtggttttcaattatcaaaaagaagagacaggggaggctgctgctgccgtggatgtggtc

SEQ ID NO: 10384 - DNA, 359 bp, Glycine max
  Clone ID: jC-gmfl02220114g01d1
aggctcaaaaaaacagttattaaattggatttccacattgatcacgacggacaatcaaccacataattttttaaggccttaaaacatgcctataataaatacttcaaactccagtaactgaacccaggtactacagggtttaaaactgaaacgtaacataacacaatttttatccataatcactaccaatttggtcatcataaccttgttactggaaaacaaggcattcatgtgaaccagccaccatggcacgctgagtgcttgggctaacagcatcaacttcctcaagtaattgaggcttgacattcatttcaaccgatgcaatggcttgaaaaacaagagccgggactttttggaac

SEQ ID NO: 10385 - DNA, 309 bp, Glycine max
  Clone ID: jC-gmfl02220114g02a1
tttaattcttttctctcccgttatatatatagtatgggcttatatatatatatcctactcatgaggaactgtgattgcagttcctaatgcatattttaacgcggcgccaaggagcatttttgtgcttctggttgtctgtgctttttgtggtagtagacttttgctatggtgaccatagtacagtcgaggtagtagggttgggagaatgcgcagattgcaaggagaaaaacattcaaactagccaggctttctcaggtttacgtgtgacagtacactgcagggcaccaagtgaaaactttaaaaggagag

SEQ ID NO: 10386 - DNA, 570 bp, Glycine max
  Clone ID: jC-gmfl02220114g02d1
aaatgaactcttattctttgaagagatattagaaaacttaactatccaatcacaatgcatttgtatacacatgaaattaattaaaaataaatacaatgatctgggttgtctaacttgccccgatgatgatcttcattcgagaacaacaatattgatcacactcatacttcacatcactttaaacttcttaatcatatcgctctattttagtttaaattttatttatattctcaccccaggctcatcacatgccctatccttccaaggctttattagcaacaaatagacttcctcaatatacttgatcatacggaaagcacaaaaaagaagacagaaaaaatgcatgcatattttgcagacccaacaagagtaatcatctacctctgcaatattaatatataaagcctaaggatgagaggaagaaggtggtactgggaaccatttggggtgatggaaaaagtgctttggaggaagtctgggaagaggtggaagtggctcgagtggaggcaacttatggagtggaggaagaagtggaagtggcttcttgtagattggaactggatgaagtgt

SEQ ID NO: 10387 - DNA, 411 bp, Glycine max
  Clone ID: jC-gmfl02220114g03a1
gttaattaacttgttctcgttcattactactaaaaaatggtttccaagatacaaatattaccaatcttaggcgtgtgggccatgttacttctgatctcctcggaggtgttagccactggattacatggtgttggtgttggtattggtggtggattacctggtgttggtgttagcgctggattacctggtgttggtgctggattacatggtgttggtggcgctggattacctggtgttggtgctggattacatggtgttggtggcgctggattacctggtgttggcgctggattatctgccaacgctggattatctggtgctggtggcgctggattacctggtgttggcgctggtgctggtggcggccgtcgtggtcgtgctggcttccctttttatcatgccagtttccct

SEQ ID NO: 10388 - DNA, 525 bp, Glycine max
  unsure (1)..(525): unsure at all n locations
  Clone ID: jC-gmfl02220114g03d1
ggattaaaagtgaatctttatgtataatatatagactagtgtttcatctaatgacattcacttacaaaagtcataataaaagatggtacttaattaattatacaagtcaagatcgagggatgatgatagtggaagcaagatgaatgtcaaacataacttcatttttagaagtggaaaaacggattattccacccaacgcaagtgactccaatgtaggttgcatattattgtgagttgaaccaaaaaaaaaaaagattaaatttgaacctctaaaatgaagttcaaatcctataaaaacctaactttttagggcttttaattaatgggtttttgcaagacaagtctgttcattttgtgacctctaattacttctactgactatatatcttgaagaaatgggtaatctgtgtatccaagcacagggtcatgggtggaaaaggtggtggcatcgggttcgtttaactgagcatcgagctggaatcttgtggngagatctggatttgccagaaaaaggcgcccataagc

SEQ ID NO: 10389 - DNA, 527 bp, Glycine max
  unsure (1)..(527): unsure at all n locations
  Clone ID: jC-gmfl02220114g04a1
ctagcttggacgagtgaattagattcatcatcaagatgtcgtctctgatagcagaagatgtgaagagcagatcagaggtgtaccacggggacgaaatgtgccaagtgaagtccaaggagcttctcaaggaaatcgccctccccaacggccttcttcccctcaaggacatggaggagtgcggctacgacagacaaaccggcttcgtctggctcaaacaaaagaagagttacacccacaagttcgacaagatcggaaagcttgtctcctacgcgcccgaggtaactgctcatgtccaacaaggtaaaattaccaaactcaccggggttaagaccaaggagctcttgctctggatcacgctcagtgatatctatgttgatgaccctcccactggcaaaatcaccttcaagacccctgccggcctatttaggtcttttcctgtctccgctttcgagattcaggaggagcctgaggctaaggacactactnagcgcgtgccggataccgctgagcctgtgcaagtcaggaac

SEQ ID NO: 10390 - DNA, 537 bp, Glycine max
  Clone ID: jC-gmfl02220114g04d1
gaacatgaaatttttctgaaagccaaaatcaactaatttcagaattcaatctatcaaatgcaatatcaaactataactcgtccacaccatctcaaacatagctatgctcccagattctaatcaaagttcttaccattgaaaacaactttgccagtacatataggaaaactaacgataaagaaaaaagaaaagtaatagttaccaacttggttttgcaaacaaaataaagaacatcacaaaacaggtcctgctatgattgatactactagggggctagcattatcctccattacaaccgatgaatctcaaaattgaaatccctgacatccttgataaaaattaaactagtagaagaagcccaataccttaccaccaacatttttcctcctagcctcttcatgatccatgatgccagcagaggtagtcaatacaatatacccaaactgtcttgaggggagaagcctagcagtccaaccttcaatctctttgacgcccacatcaaaacggggactaataaccccacacttgttcagtcta

SEQ ID NO: 10391 - DNA, 480 bp, Glycine max
  Clone ID: jC-gmfl02220114g05a1
ccgcaaactcattctgggcggcgatagttttatcgttctctatctccaagatggtcggagaacacggtacgatgtcacttgcctccgatgatcagaaaacaccacttcttcccgtgcacgagccaatggaaggaacacgcaccagcgtctccttcagcatcaaaacaattctaacactggaaaacttgtacgtgattctgggacctatgctgtctcttttcatatgcctcttcgtgaagctcgacgcgccacccacaagccagaaaatgcttggtgtgattgcgtgggtcttcgcttggtgggtcacgcaggccgtgccacttcccgtgacttccatgtgtcctctgtttttgttcccaattttcgggatagcttcagctgatagtgtggcgcactcttacatggatgacgtcatcaccctcgttttgggaagcttcattctcgccctcgccgtcgaacgctacaacgttcaccggagat

SEQ ID NO: 10392 - DNA, 285 bp, Glycine max; identical to SEQ ID NO: 10292
  Clone ID: jC-gmfl02220114g05d1

SEQ ID NO: 10393 - DNA, 561 bp, Glycine max
  unsure (1)..(561): unsure at all n locations
  Clone ID: jC-gmfl02220114g06d1
agaaacgtgaaattaagatcgtaaaatccttaatccttctcagcctctaatggtaagtactagcgtgactcatttaaataggacaccaagtaacgttcctcagtggcagaacacaggcgggtacaaactgtaaaatgacaatacaacttacacactagcatccaatcatgaaaacccaaactaacaagataactgcagttctgagaaatctgaaaaagattcgaagtgaaagccataattgcttttaagttctaattgctagaacgcaactccggacgaacaaagtctgcatctggtggcacagaaatgtctactgtgggtctcagttcagcgcanactttaatggctccgtgcactgggtctgacaggaagttgctgattaagtccctgttacaggagttccattgtccacagccaccatggcctgctgggttaggatgtagtcaaatcgtggagcccatttcctcgaacccaacctagctgtggttgaacagttatcaaccatgaaagaaacaccacgagcatgcatgaaaggattcaaagagtcaactgcctcgatga

SEQ ID NO: 10394 - DNA, 585 bp, Glycine max
  Clone ID: jC-gmfl02220114g07a1
cgctacctagttggttcctgtcctgggacgaacaccagcactcgctcactcttttcttctaactgcgaccacatgcagacctgataagcactctcgcatttcccaactctctcacaccgccaaatttcctctctctctctctctctctctctctccatttgttttcgttttctttttcgtgtggaatttgcaatctcccagaaaccctatccactgattcttttcccatcaaactcgatactcaattcgattaaacggagttagggttttgattctccgcaaccgttgtcataatttgggttcctgcaccttcaatatcctctcctctgcaaccgaataagtgttcctgtttaggttttgatttgggactaacgcaaaggatgtatgctgatcgggtggagagtggaactcggagatcagtgaaggaacgccttgatgggaattttagcactgattctactcgccaacacagaattacgggaaagaggcagagggaagatgacaagtggaaacatgatctctatgaggatgatgaaccccagctctctaatcgcagggtcactgctcaagatcttcgtctgaagc

SEQ ID NO: 10395 - DNA, 541 bp, Glycine max
  Clone ID: jC-gmfl02220114g07d1
caaaaggaattatgattatattcacaggagcaatcactctattttaagatgcatcttcatcaaaccagctttcatgcttcttttttgtcttttaaatattaacagcttgttaggccacttccagcaatgcaagggaggagacaagattaaaaatggtaataaaagcaccaaaaggatttttagaaaattacaggcaaagcttgaccaagtgcaaagtataaacataagcctctaccaatatgtgttgggtattatagtaatacaagaccaaaatatcatcctttagactccaaggctaaaagtatcttctttcttggtcccattggtatacccatggccttgagatcctcatcagtcatatgattgagtgcagtcatatcaacttcttcagcctgaaaacctatgagatacttttcgagacccaatgactgcaaaaaatcatccagtgaagcgtcagcctttcgggacaactttttagtagctgatcttttgatatgtactgcaggctcaacatcaatacttttactgctagctctagcag

SEQ ID NO: 10396 - DNA, 459 bp, Glycine max
  Clone ID: jC-gmfl02220114g08a1
ctctgagaagacgtgtcggtagctgaagcattttataagcctccactttcctgaactagttttaacatacaatctttcaagtacacctccccagcttccatttaagaatggagatcactagaataggccaatggttaagtcttctgatatgtgtactactattactgcagacagaaggggttcctgtgggaatcacttttgttgaaaatgcagtggcaaaaggggctgtttgtttggatgggagtcctccagcttaccacttccacaggggatctggagcagggattaacaactggatagttcactttgagggaggagggatggtgcaacaacgttactacttgccttttccgtagggacactcgattaggttcatctaagaaaatggatacatcactttccttttctgggtttttcagtaacagtaaaaagttcaatccagatttctatgattggaac

SEQ ID NO: 10397 - DNA, 466 bp, Glycine max
  Clone ID: jC-gmfl02220114g08d1
attagaattacagatataccctttattgataataaaaatgttatgtttacatggtagacaattatcatcctttatcaggttgcctacccttacactttggaaccttttaaatcatcaatcacagcttgttttttgttgatgcaacaatcgaacccatactttgatggtttgagatctcaaaccacaaagccatgagtgcaagtgacacatctcgttcaataaaaactagataactaataaagtatagtttgtagtaataaataaatgagcatactcttttaaatgaatctatacgtctggacgctcattctgatcaaaaatacgattatggcaagtagggttgcaagggtaggcacaatctatctcacggaagggccttcgatcataaaaccaatcacccactgcctttgcaattgatgtcttggccaccactggggagtcatttctcagccatgtctcttgtatt

SEQ ID NO: 10398 - DNA, 496 bp, Glycine max
  Clone ID: jC-gmfl02220114g09a1
ctgaacattacaattgaagcaatttaatgccataatttacattcactgatgacagcaacagacattgactcaccaatattagaatttttagagggtaataacaaagtgcacattatatgcatacaaagcaccaatgaataagccccttaaccaaaaaaggcaagtctttcaaaacatcaaaacccccaacattctttttccaacttgacatgaatattcacatatactaagcctaaatttgccatcttcccacttactaatttattaaagaaatctgtttaggtctttttttttctagcacaattaatgcctggtggtggtgtctctacaaattaagttacaattagctagtgtctcacatctgataacatgaaacttaccccagcccaaatagaccaactttcttcccacaaacaatttgaagcaacaagaaggatcagcatttgggtgctgctgacaaacaaacgcataaccacaggaaagaatgtcaaaagtt

SEQ ID NO: 10399 - DNA, 524 bp, Glycine max
  Clone ID: jC-gmfl02220114g09d1
aaaccaaaattaaatttcaaataataaaaagtacaggatcatcacaacgttcttccaccgaaatttcccacaataataatccaaatgtcccccaaaaaatacaagcggcaataataacaaatccgtgtcttttaaaaaacaaaaagcggttcgatctatttcggatcgatttttatcaacgaaccgcgcatccgtgacgcgtgaacccgatccgcgaccggtccaaatcgaactcaaacaagtacccctgctgcatcagattcccaatcaccgaaaaccccgaatccggtcgaaccggctgaaccgcaagacacttaactccctccgccggttcaataaaataattacccaccggcggcgacagaaccgctttcccggcgagccggaatctcagccgcggcagcttcggcctcgccacgccggaaacattaacacaaaggtcgaaccccagcgcggcagcgctctccaccgccggaagcctcacgcgccgtcggaacgccgcgaggatcttcccgtaagccggc

SEQ ID NO: 10400 - DNA, 560 bp, Glycine max
  Clone ID: jC-gmfl02220114g10a1
gaacatgaaatttttctgaaagccaaaatcaactaatttcagaattcaatctatcaaatgcaatatcaaactataactcgtccacaccatctcaaacatagctatgctcccagattctaatcaaagttcttaccattgaaaacaactttgccagtacatataggaaaactaacgataaagaaaaaagaaaagtaatagttaccaacttggttttgcaaacaaaataaagaacatcacaaaacaggtcctgctatgattgatactactagggggctagcattatcctccattacaaccgatgaatctcaaaattgaaatccctgacatccttgataaaaattaaactagtagaagaagcccaataccttaccaccaacatttttcctcctagcctcttcatgatccatgatgccagcagaggtagtcaatacaatatacccaaactgtcttgaggggagaagcctagcagtccaaccttcaatctctttgacgcccacatcaacacggggactaataaccccacacttgttcagtctaccgttcaattcaaccacgatttt

SEQ ID NO: 10401 - DNA, 486 bp, Glycine max
  Clone ID: jC-gmfl02220114g10d1
aatactatattgtaaaataaatatattactgaaaacttgtcaccgttagcattgagatgcttattaaatcatcaaatgaattattcgagaggaactaataattattcagtgaatagtatgattcttaattgaaccatacaactctgcacagtgcacaaaatgcagaatttttacaaactgcaaacatcaaggttcaagtggcttatcgttttcttgcttgtagaaggtttcataagtctgcactcttggctttgattctggtaactccaactcttgcctaaagccatcagtcatcttgacgaaatcattcatgtgaacttgtttccattcctcaaaattccactctgcatataagttaggatcattggggtggctccaaacataagcgcaaacttgtaacttttcagacttgtccttcaaggaaacctcaacatcagttctagtatattcaacatcctcaaattcatctaaaatatctagttctac

SEQ ID NO: 10402 - DNA, 444 bp, Glycine max
  Clone ID: jC-gmfl02220114g11d1
aacacgacgataaataattaatttattcgcatcaagctcaccattcaaggaattatgttacaacaaaataaattaaatgccatctttcgatacaataatatcattcagttaagggcttaacatgggaataagcaacacaaagaacgttaatatttttccaattagcacagtaaaagctgaaaaaagatcctgggcaccccttggatatacagttccagtcttggtatccttcagtttgatgctggaagagcaattgtaatcaggccatccaatgctcatattggcaagatcatatttgaataatttggttgtcagcaccaaatctccgagaagaattagggcctttccatccttaatttgggccgaactttttttgccagcccatacaccacatgtcttccttttttgggcctgtgatttgactgctgtcagcctttttacttt

SEQ ID NO: 10403 - DNA, 395 bp, Glycine max
  Clone ID: jC-gmfl02220114g12a1
agaactcaatacatgttttattattattaactattttaacatgcttttgattgaatgggcctattaactcaatgttcacgcaagaattcccaagagaagaggagtagaggcttttcatagaaaacctgaccaacatttaatagactctcatgaggaacattgaagatcacacttttttccctgcatatcttcccgagaaatgcctatatataatcaacagctattttcttgtggaatcttgaatcccttcttgccctgacaactgggttttctaaaatgggaaccaccccagcattcctgcagttgtttaagaacttaacttcattgacctcggtgggggtgctaacatgacccgaggattgaatagtttcattaatgtgcaatggagatgagac

SEQ ID NO: 10404 - DNA, 482 bp, Glycine max
  Clone ID: jC-gmfl02220114g12d1
caaatgaaaatcctggtatacatataatcttaacacaatctaactacaagtagtatatcaactccaaattacgggatttcgttaaaaacagttttatcctaagcccgttacttaagccagggaagacctcagtttacccacaaggggtaagtttcttatttccagcaccacgtggattatcatccttccagtcatcccaagcccttgctttctcctgtgcagcatcatcatcttcatcatcatcggcttctcctagctttgacttcctatcattgtgccaagatgaattgacttcttccatgagtttgacatttctctcttgccatttgttcattatttccatttcttttagcccggcctcctcaatgctcatagctggcatcctatgactaggttggaagacctgagctgccattctttctctctcagttgctatgtttccatttacaaggctagctggtccaaatattaggggttgatgc

SEQ ID NO: 10405 - DNA, 593 bp, Glycine max
  unsure (1)..(593): unsure at all n locations
  Clone ID: jC-gmfl02220114h01a1
atcgagataactagaaacagtgtgatgaaaatgaaggtccttgttttcttcgttgctacaattttggtagcatggcaatgccatgcgtacgatatgttccctctccgaatgaacactggctatggtgcccgtactccggaggtgaaatgcgcaagttggaggcttgctgtggaagcacacaacatctttggctttgagaccattcctgaagagtgcgttgaagcaacaaaggaatacatccatggcgaacaatatagatcagactccaaaacagttaaccaacaagcttacttttatgccagagacctcgaagtccatcccaaggacacatttgtgttcagtatagatggcaccgtactctctaatattccatactacaaaaaacatggatatggggtggagaaatttaactcgaccttgtatgatgaatgggttaacaagggcaatgcaccggcactgcccgagactcttaagaattacaacaagcttggtgtctcttggcttcaagattatattcttgtcaggaagaacactggacanacaggccgtacagaagcaaacttaaagaaggcttgctaccacacatgggaaaa

SEQ ID NO: 10406 - DNA, 408 bp, Glycine max
  Clone ID: jC-gmfl02220114h01d1
gggaaaacaggggccaaaattttttaaaccccccaagaaaaaaccccccaaggggaacccctaaaaaacactgggcaccccccgcgaaaaaaccaaaaagggaaaccgggccccccttttaaaccccttttttaaccaaaaaaaagaaggggcccaccccaaatggggaaaggggaaagcccccccgaagggcaccccggggaattggaaacccaaagggccccttttcccccctggggccccccaggaaaacccccccttgggccccaaaaacccccaaaatgggggaccccccccctaaaaaaaacccttcccggggggattatgaaaaaaacccctttaggggggaaagaccctgggggcccccgagaaaaaaaatcccccccgggggggccccccccctcttta

SEQ ID NO: 10407 - DNA, 202 bp, Glycine max
  Clone ID: jC-gmfl02220114h02a1
cgcaacacaacaaaaaaagacaacccagagagcgcgtcttaataaacgctcttctctgaaaacccccatttcttttcttctttcttcttctctttcgcttcttcgatcttcgatcttcgtcgctgaaaatgagagagtgcatttcaatccacatcggccaggccgggattcaggttggaaacgcctgctgggagctttactg

SEQ ID NO: 10408 - DNA, 573 bp, Glycine max
  Clone ID: jC-gmfl02220114h02d1
aaaactctaaatttcaccaagcaatttcaaataaatgttttcaccacacttcacataaagctccaaaagtaccggaacaaggcaagttccacggaaagtacaacgatacacagagcacgagaagaaaaacaacacagaaagtaacataatagtgcaaacttctaatcataatcctctccttcatcaccatcttcagttgcctctgcaccaacttcctcataatccttctccagggcagcaagatcttcacgggcctcagagaactccccctcttccataccctcaccaacataccaatgaacgaacgccctcttggcatacatgaggtcaaatttgtggtcgatgcgagagaagacctcaacaacactggtggaattggagatcatgcacacggccctctgaaccttggcaagatcaccacctggaacaacagtcggaggctggtaattgattccacacttgaacccggtggggcaccagtcaacaaattgaatagtgcgcttggtcttgataattccaacagctgcattaacatctttaggcactacgtcacctctgtacatgagacagcac

SEQ ID NO: 10409 - DNA, 423 bp, Glycine max
  Clone ID: jC-gmfl02220114h03a1
caggaagaccactgtatcaacaggctgtaactgctaccaacttaaagcttgctggatactacaaatgggaaaagttaattaccaaggatacagataaatacaatggtaagacagcagttacatacaaatcaactgagaggcagaagctggaggaaaatggatacaacatcattggaaacattggagaccaatggagcgatatattaggaaccaacacaggccttaggacctttaagttgcctgatcccatgtactacattagttgaggtctctaggctcttatgaatgaaatgagatatgtagtaattaataatggagagacttaacctaggggcactcgttattgctatgtttcatatgtatgtgactttgtgtgagacagtagttacgtgagactgcacaagcacaacttaacgttgtttt

SEQ ID NO: 10410 - DNA, 464 bp, Glycine max
  Clone ID: jC-gmfl02220114h03d1
aaaacagaagcggaagttttggtttttggataatcacatatgcctacacaggggagtttgtacacatacaaaacaagttcttgagtctcaaaggactatttaaaaaaaatcaaggggaaattaataccaattgtaaagacagaattcataaccccaaaaaattcaaattttgatttactttaaatcatccagtttaacctcatactgttcagcagtagagagaattttgacaccaaccacacccctttgccatttaaaattccccactaacacaagccggtcagcatttaatcgggctgcacgtttaaaaacccatttaagggggttggtttccaaaaccaactcaacaatttgccctttttttttgaaaatgttagcgaccatagcagcacattcttgaagatctttgtccaaggcacacacaatgtcatttatttgcaagttaagctccggtaacagaccct

SEQ ID NO: 10411 - DNA, 512 bp, Glycine max
  unsure (1)..(512): unsure at all n locations
  Clone ID: jC-gmfl02220114h04a1
ctcacaattcatgagtgatgacaaattgaagaagcacttccgtgagtcttaattaaagagattaaagagacacaccattcattcgctcactcatttcatttcaaacaatgtcaatcgctgcttcagcttcttcacatgcttgtatttcctcaatccccacatgcatcccctcttcctcttccaaattctcttcttcgctgacactttcttcactccaaagaggctcaaataagagatcgggatgcagagccatggttcaacaagccgttcagggtgcccctgctgcgtatgccaaagaaatggaacgcctttctgccaaagaatcgcttcttcttgcttttaaagatgcagggggttttgaggccttggtctccgggaagactacggaatggcaaaagattgatgtgaatgaaaggataactggtcttgagaggctcaatccaacacctcgccccacaacgtcacccttcttggaggggcaatggaactntgagtggtttggttctggaagt

SEQ ID NO: 10412 - DNA, 543 bp, Glycine max
  Clone ID: jC-gmfl02220114h04d1
acataacaaagcagaatttcatttgattgaatgcacaatttcttcacattacaaaactctctaatttgtacaaaaagtcaatgaatcctgatttctgacaaatttagaacattgcagcttttaatcttcttcccaactcctttctcatcaattgcctatcaaaacctgatgcagccaaaagccctctattttcttcagcccttctcagaaggtaaggcataaccatatctaccggcccaaatggcatatacttgctaacttgaaaccctgcattgctcaaaccaaaggaaagtgcctctgacattccatacagttgtgcaaattctagcttgtggtttacctttccaacccccaattcatatgcttttgctgcagccaatttccctgattcaatattgtgagttgcaagaacaactgaaattgaaccgggtccattagcaatcttttcaagaagaaatgatgagcagccattgaagcaattgtgtgtttcttgaatggtattgtgaattggggatgcatacccaaatgactcagcccatttac

SEQ ID NO: 10413 - DNA, 419 bp, Glycine max
  Clone ID: jC-gmfl02220114h05a1
aagaactcgattttcgcttgttggtgaggtggatactggggccatcgaaaagagtgcaaaggttggtcttgctgtggccttgaaaccatagaccaagtcgttttgtgagtgatatatgggatgcttctcgtggtggaggataataagttgttgtagactttcactttcccaatgaacatctagtgcttcattttggagctatatcaatttcttcatatcttggtggacttgagtgtaaaatcaataagcacaaaaagaatttgaatttgtacttattcaacagatccacccgaaagccattgatttaggtgcatctttgagtaagctttttgagcatggaaggtgattgcccagcaatttggttgttttagggtgtatatcgaagctttgatttagatgcctagtaaatatttggtaat

SEQ ID NO: 10414 - DNA, 419 bp, Glycine max
  Clone ID: jC-gmfl02220114h05d1
attacctaatatttactaggcatctaaatcaaagcttcgatatacaccctaaaacaaccaaattgctgggcaatcaccttccatgctcaaaaagcttactcaaagatgcacctaaatcaatggctttcgggtggatctgttgaataagtacaaattcaaattctttttgtgcttattgattttacactcaagtccaccaagatatgaagaaattgatatagctccaaaatgaagcactagatgttcattgggaaagtgaaagtctacaacaacttattatcctccaccacgagaagcatcccatatatcactcacaaaacgacttggtctatggtttcaaggccacagcaagaccaacctttgcactcttttcgatggccccagtatccaccttaccaacaagcgaaaatcgagttctt

SEQ ID NO: 10415 - DNA, 556 bp, Glycine max
  unsure (1)..(556): unsure at all n locations
  Clone ID: jC-gmfl02220114h06a1
gaaataatattaatatcaatttaataagctggtaatgtaaaatactgctaatgttaatatgaagtttggatggtcttattggcagaagatgctaggcggtgttcatcaatattctgaaaggtaaaacgattttggtttttaatgataatataaccatgaatctaacatcagatattgaacgctacacatcaaaaataaatcgagccaacgcatttaattgtaagtgtcttcatattacctgtgttctgtcacatctttttgcataatattggcactaagtcttttttgatagaaattgtgaagatgtactgttatcattgtatcaactatattgtgcccttctttttttatttgatttggcaaacacggctacttttctccaaataagatggatcatttgtattgccggctttgtgcacaattatctacttgtaagaagtccaatttcgggcacaacgtttgtaatgcagaaataggtcattagcattgtaaatctncaggcgataaatggaatatcaaatggaagacgccgcatagcttctggtgtgacaatatc

SEQ ID NO: 10416 - DNA, 555 bp, Glycine max
  Clone ID: jC-gmfl02220114h06d1
ggttctaaaataattaataatatactgaataaagtgtcgaagaacaataattaaattaattcaaggaattaaattaaaacaataattatattgatcaactaaatctaccatatgaaaatttcattctttacttgtaaagagccgaaattatcttcaccttaataattgtagatgtagaagaataatcagaatcttcctaaatccacgtaatttcttcgaaaatgctttgcccaacacaatgatattgtcacaccagaagctatgcggcgtcttccatttgatattccatttatcgcctggagatttacaatgctaatgacctatttctgcattacaaacgttgttgcccgaaattggacttcttacaagtagataattgtgcacaaagccggcaatacaaatgatccatcttatttggagaaaagtagccgtgtttgccaaatcaaataaaaaaagaagggcacaatatagttgatacaatgataacagtacatcttcacaatttctttcaaaaagacttagtggccatattatgcaaaagatgtgacagacaca

SEQ ID NO: 10417 - DNA, 543 bp, Glycine max
  unsure (1)..(543): unsure at all n locations
  Clone ID: jC-gmfl02220114h07a1
cttttatgtgcctggattatgctgtgtggcctcttccaagttggcaataaccataattattgctctggagacaactttatttgcctttacatgaactctaccaattttcatcttaaatagggttattgctatttgtatgcacatttttgcttcattaacatatctttgctttgttcttgttggatttttaggtttcttaaccttcccaaggtttctgaattttgatatgtattaatttttgctgtagtttatttttctgcaaatagaaggcaatgttagccgcaaaagcctctcttcgaaatctctgaccccaaataaagctattttagctatataaaatattgtattcaacattctttgttaacttgaattccacctgttattttgtataattgaaggacccttacagaagaaagggcaaagctgatatatgattgtgtaagtatgtgatatctacacanattttcttgtatttattttctccagctcatgtatgaatgtgatggtatctggtctccttcataatatttttgtgcattggag

SEQ ID NO: 10418 - DNA, 304 bp, Glycine max
  Clone ID: jC-gmfl02220114h07d1
attgaaaattatttttttaatttttggaatccatgaaaaaccaaacgccaaagaacaaggcacaactggctgaacaaaacctaggggactaacgaaacatttagcaatcccacaaccacaagcaccaaagcacccaacccgctaaccaaaacaggcgggaggaaaaaccgggccaaaaaaccccaaaacagaaaaaaaaaaaaaaacggaaaccggggaaaagcccaacgggaaacgaccaaaaaagcaagcaacccacggggaacatagcaaaaaacttcaccggcacaggggcccgaaccag

SEQ ID NO: 10419 - DNA, 330 bp, Glycine max
  Clone ID: jC-gmfl02220114h08d1
agcctacacactggacattttctttaaagatgagaggggatgctaacaaacaaagtgtatgtgctaaccacttacattggtcttttataatgtgcagtatgaggcaacaagggctacatgaagtcatgcttggccacaacatagaggatattcaggaccatactcttgtgttaaaggtcacaacgacaacaacatctgccatgagcaacgggatcatcagggaagacaccaccatgactgtcactacaagttgaatgcaagtattactgactggcgaagagggttctcaacaagaccatgggaattggctgagacaacatcaacaccatc

SEQ ID NO: 10420 - DNA, 642 bp, Glycine max
  unsure (1)..(642): unsure at all n locations
  Clone ID: jC-gmfl02220114h09a1
caacggtccggctgtttgatggcacctcggtanaccnagcaataccgatctcatttcctttggcttcaggataggcctaataagaaaacaaataattccaattcatatatgaacatttttgcctccttatttcttgaaaatgtggaattggaattccccgaggaattccgatctcatttcctttggcttcaggataggcctaataagaaaacaaataattccaattcatatatgaacatttttgcctccttatttcttgaaaatgtggaattggaattccccgaggaattccgatctcatttcctttggcttcaggataggcctaataagaaaacaaataattccaattcatatatgaacatttttgcctccttatttcttgaaaatgtggaattggaattccccgaggaattccgatctcatttcctttggcttcaggataggcctaataagaaaacaaataattccaattcatatatgaacatttttgcctccttatttcttgaaaatgtggaattggaattccccgaggaattccgatctcatttcctttggcttcaggataggcctaataagaaaacaaataattccaattcatatatgaacatttttgccttcttatttcttgaaatgtggaattga

SEQ ID NO: 10421 - DNA, 443 bp, Glycine max
  Clone ID: jC-gmfl02220114h09d1
gggccaatcagaaatacatatcacacagagaaagaataaagatttaaaagtacatggggatgcgatatgacagtccagggaatcaacaaatggaaataacagcctgttctgaaattgccattgaaccatgacatgttagaagcagaaccctattgggatctcctaaaagaggattgctttaagctgatctcttaaagagcttatattcttccacccaggcataaatactaagacagcacccgggcgttccttccgacatatatggcataaaacagcctcaatgagattaaacccaatgcagtcaggggcccaaaatgctagtgattcacgtgccttggagctatatttctcaaagcttgatttagaaagagcattcttaacgagagcagcgatctgggttttcctcttccgaggtgctaggtgcttttgtgtcttccacaatt

SEQ ID NO: 10422 - DNA, 306 bp, Glycine max
  Clone ID: jC-gmfl02220114h10a1
gtggtgggttttacatttcttggaaaatatgtacattttatacccgtagtgagagcaaaaaaccacggaaacccaaaaaagacaaagccacagggagaacggagaaaccaaaaagcaaccaccccaccaagccaaaaaaaaaaaacaccaaccccaagaacaaaaaaagccaggagacagcggagacagaaaacaaagccaagaaaacaagaggggaagaaaaaaaaaaaacttaacccaagggaaggaaagggcaaggccaaggcccgacacaaacaaaatagaatcactggctacccaacctta

SEQ ID NO: 10423 - DNA, 452 bp, Glycine max
  Clone ID: jC-gmfl02220114h10d1
ggaaaaggaaggagactttcatatatatatttatgtgatattgatatagaaaatgaataggaaagggttgtacatcagtgaccacgcaagaaacatgagaaatgaactagagctaattaattaacccctcgtctcaatctcatgatggaacaattttggagctacgacgtggtggcactgatgatgatcgcagaagaaaaatctcttaactggagtaagggggtggcttaggcatatccttgacgattccgcagacaagctgggtctctgggaggttgtactcatccctaagggacctgttgggagacaagacactcacgtacaattgctgtcccaggtaacgattctttgccatctccgacctcaagttccacattccagcgttgtcaaaagtcaacatgattgcggcccaagactttgggaacacctggatggtgtgcctgctgacagca

SEQ ID NO: 10424 - DNA, 404 bp, Glycine max
  Clone ID: jC-gmfl02220114h11a1
atctatcaacctgtttcaatttaaatattttttcattcatttttattttaataaaataactttattttctatttttttttcaaattttttgtttacacttctgaccaaacacaatgttaagaattgcaaagaaatatccatgaactataattacaaacttcctagggtattatttacacgccccataggccataaatggctttatttgaattttatcttcccatatcttacagtttaaatactcactcaagaatctgttcactcccagacattcacaacaataaataacttgaataaaaagaacatatacgaacgaagttgtcgagcaggcagagacgagaattcacaatttcacaccatctggacccaaataccgtggcttggaacttcttgatggcccccaa

SEQ ID NO: 10425 - DNA, 561 bp, Glycine max
  Clone ID: jC-gmfl02220114h11d1
catagtaaatggctaaacaattcttttataccccaagcatatgaacacaacatccattcctaaataacctctaactactaaccctaatgtacatcccaaatgtaaaagcgctactagcatgtttggataatacataagaatcaattctaccccacaaaatcatggtgataccgataccatgaaaaagtagaagcaactatttgttgctttaccttcaccatgaaaaattaattgattattttttaccataaaactaatccaaacgcacttttatactagtaaatcactactgaagagacccctttatagtttatagtgattcaaggaaaccagtttttgagagtacatcattccttactttgctaagatccctacctttgagggttctcccagcaccttctaaaacagaaaatgaggaaatccgactccttgcaagccttctggcataaactcatgtggaggaagctgggaatcactctcatcattttcctctccatcctcatcactatccccaccataggtagcagcaccatcaccatcatattcatcatcaaaccttga

SEQ ID NO: 10426 - DNA, 526 bp, Glycine max
  Clone ID: jC-gmfl02220114h12a1
gaggcacgagataaccactttttaccatatatatatagagagagagaatacgaagcacactgatcacaggatgatgctctctttaagtagggaagcagatcttatcagtacacataggtaggttgaaattctagctctagcaatctagctagagaaggtagtacttgcacaacacacagcacatgataatttattttatacacaatctcattctcatggtgctcaagatgcatggactaattaagcaacaatgttggtctgataggcagtgtccacagataaattgggtacccataaaatggccttgcttccaaggaaatggcaaacagggttagttccaggatcaactcccataagttgatgaagcatttgatgattcattccagaagtatttgagtggcaaatagcaagtgcctgagttttggttccatcaccagccaccaatggaaccatgaaagctgttgtttcacggacttcatggcaggaaaatactgcagttctgaaatttagcctatgacacatcact

SEQ ID NO: 10427 - DNA, 556 bp, Glycine max
  Clone ID: jC-gmfl02220114h12d1
gtaagaacgcaacatttcaattttgaaatcaatgaataaagaatcgtctaaatgtgtaatgtcctacaaagcatgtgccctcgccctatacaattgtccctcatgcttaataatgaatcatcttatatactcatttgaggttaattacgctatatgttcccaagagtaacaaccgagcagggaacaaaagcaacacaaacaaatgcatatgttgggatgtaacaaccctactgaaccttttcagggattctctccctgtttgtatcacgccggagaagggtgactggcgttgacccacattgattgatatcatggacctcccagcaacaatgctggtatcaactccacgaggtaataaaagaggccaccacaccttgcgccgttgctctctcttggctttacggatctggttaagttcttggcggatcacagttctcacagattttaagtaggaattcatgtcatgatctctttgtacactttctccagatccataagcagatcggtcacttaatatctcaagtggatgaagtgagttcaagaagaccatctgagc

SEQ ID NO: 10428 - DNA, 576 bp, Glycine max
  unsure (1)..(576): unsure at all n locations
  Clone ID: jC-gmfl02220115a01a1
ctcgtggtagagccttgttgatgtccctctctagtcattgtcgttctcgccgttgccgatcacgttctctagttgctagagccaccaaaaaagggtgcagtaagcaacttggaggttcaggaagtaacaaccttgtagatactgctatattgcgttccgtatctgtgtgtctgagcgtgaaaggagcatgcagtgccacactcttcctctggagttgattcgagaaattcttcggagattgcgggtgaaatctctcttgcaattgaattgtgtgtaagactccttcgcaggtcaaatcctttttttgtcgaatccattgatgtagagaattccagtgcagtgaatttacctctccctcttccatcatccccacgcaattggggcaaatataagattattggaccagctcttagaattttgggttcatgcagagggctcatacttttgcacatcangacgaggttggagaactatctcattctgtggaatccatcaacaggtgtacacaaacggttatccaatttgaaatttgattcaacagagtattattttctatatgggtctgggtatgaccca

SEQ ID NO: 10429 - DNA, 586 bp, Glycine max
  unsure (1)..(586): unsure at all n locations
  Clone ID: jC-gmfl02220115a02a1
tgagaattgattttactgggaaagctgtatatactgcaatatggattgctgctgtgtcattgttcatgagttgctgggtttctccacacataagtagttgactgctggtggtttgggcacagtatcgatttcccttgcaggtcgcgaggtacagtatatgttctttgatagtgtctatgagaatgattaagtcatctttgtcatttgatttttttattcattgtccagtatattcgatttctcaaattttgtaagagtaactcttcaaggcatagccatagcgatagccattatcaatcaggtagactcttgtttgctgtcattctcacttcatttttgtgatgtattcagatatttacaaacttcctttcgagtataatgattcatgcaactcgcctatttgnnnaaaatgcgggtttccaaccaaattttggtggatatgaggctgctgaaaaagttgaggttcgtatctatcacctaacttactgaaaaggttgtttaggaggaacagaanactaatgttattcagtgtaagtgattcttaatataagtgatattntccccaagtatnatatctttaaaaatt

SEQ ID NO: 10430 - DNA, 308 bp, Glycine max
  Clone ID: jC-gmfl02220115a03a1
ctcaagcgcagctccatatctttctttgagattgagaaacatgaaactgctgtttctcgttggtccagagctagaactagagctgctaaggttggaaaaggtttattaaaagacgataaagctcaaaaacttgctttacagcactggcttgaagcgattgacccacgccatcgctatggacataatctacacttctattacgataggtggcttcagtgtcagagcagagaacccttcttctactggctagatataggagaaggaaaggaagtaaatcttgagaaatgccctggttccaaacttcaaca

SEQ ID NO: 10431 - DNA, 523 bp, Glycine max
  Clone ID: jC-gmfl02220115a04a1
cgtcaactttcgtttttctccctctcagtgaaaattgcatctaaagagacagaatgcaaggacctgggggtggcagggatcctttcttcgattttggtggttttggaggctttggttcctttgggcctcccaggagtttaatctcaagcttttttgggggtagggacccatttagtgaccctttcttcgcccaaccttttggagggatgtttgagtctagtccctttggtggtcctactggatttcctttccccactggtatgaatccatctgggttccttgagcatccagccccgggtttggatccatctgggttccttgagcatccgggtatgcatccatctgggttccttgcacggcaaaatcctgagcctagtagacaaaggaggggaccaatcattcaggaattggactctgatgaagaaaatgatgacaccgcggagaagaaagaaaatccgagaaagcatggtaagtcagatggtgaacactctgttgaacatccagatgatgaaattgaagggaa

SEQ ID NO: 10432 - DNA, 603 bp, Glycine max
  unsure (1)..(603): unsure at all n locations
  Clone ID: jC-gmfl02220115a05a1
cattattgcaatgactagcctagaggtaattgaggaatgcaatgcattctacatagcaggacaagaaaccacatcggttttactagtttggacaatggtgttattgagtagatatcctcattggcaagaacgtgcaagggaggaagtattgcatgtttttggtaaccaaaagccagactataatgggctaagtcaccttaaaattgtgaccatgattttatacgaggttcttaggttatacccacctttaatttattttgctcgagcgatcaagaatgatgtgaaacttggaaacctttccctacctgcgggagtgcaagtttccttaccaatactattgattcaccagaatcgtgatatttggggtgatgatgctacagagttcaacccagaaagatttgctgaaggagtagcaaaggcaacaaaaggccaagttgtgtttttcccatttggatgggggtctagagtgtgcttaggccaaaattttgctttattagaagcgaagttggttttgtcattactcttacaacgcttctcattngagctttctcctacctatgcacatgctccagtcactgtgctcactcttaatccaaaaattgg

SEQ ID NO: 10433 - DNA, 571 bp, Glycine max
  Clone ID: jC-gmfl02220115a06a1
ggccgaggagctctatgagaagaccgtcgaactccccgaccccaactccaccgacaacgccgagtttcagatcgtgcttaccatcatcagagatgggttgaagaccgatcccaccaggtaccgcaagatgaaggagcgtctcgttggggtttctgaggaaaccaccactggagttaagaggctctatcagatgcaggcgaatgggactcttctcttccctgctattaatgtcaatgactctgtcaccaagagcaagtttgacaacttgtatgggtgccgtcactctctccctgatggtctcatgagggctaccgatgttatgattgctggaaaggtggctgttgtggctggatatggtgatgttggcaagggttgtgctgctgcaatgaagcaggctggtgctcgtgtcatcgtgaccgagattgatcccatctgtgcccttcaggctctcatggaaggccttcaggttctgaccttggaggatgttgtttttgaggctgatatctttgtcaccaccaccggtaacaaggacatcatcatggttgaccacatgaggaaaatgaagaacaat

SEQ ID NO: 10434 - DNA, 277 bp, Glycine max
  Clone ID: jC-gmfl02220115a07a1
gaagaaagtctctggcttaaaaaaacctattcctaaacttcacccaaatctgataaagcacggtcttctacattttccaattcacaatacaattcctacaatttcaactccataagatgatttggccgtgtcctataaaattattgtacttagaacgttatcccattctatttccaatatagctacgtttgttctaaaacatcaacggggtttctgtagaaatcctatcgtactcttgtgcattgtattagaatatatgcagttcatttgcctcaat

SEQ ID NO: 10435 - DNA, 203 bp, Glycine max
  Clone ID: jC-gmfl02220115a08a1
ctgtttccaacttcctccattgggaaaacttccttctctaaagattctaggaataatgaagaataatcatgtagaatacctctacgaggagtcctataatggggaagtagttttcggagccctagaagttctgaccatacgtcatttgtcaaactttaaaaggttgtcaagggaggatgggaaaagcatgtttccccgagctt

SEQ ID NO: 10436 - DNA, 550 bp, Glycine max
  unsure (1)..(550): unsure at all n locations
  Clone ID: jC-gmfl02220115a09a1
gcgttcttcaatttattttctttctgcttctcatggatctctcctcactctcttcataccgcactgtcggagtaacaccttctgatcctcgaaaatcacttcctcaatggggtcttcatttcctctcctacactcacaggctcaaccagattaagaaaaggtcaagtggggtatatgcatcactatccgagagagagagaggagagtattattcccagagaccgccaactccgctactagacaccgtcaactatcctattcatatgaaaaatctctctaccaatatgaactgcgttctgatgttattttcagtgtttctagaactgggggccatttgggctcaagtcttggtgtggtggaactcacccgtgcactcactatgtctttaatgcccctcaggacaagatactctgngacgttggtcaccagtcttacccgcataagatactcaccggtaggagggacaagatgcataccatgaggcagacaaatggcttgtctggcttcacaaacgttcgagagtgaaattgattgttttggactggtcaca

SEQ ID NO: 10437 - DNA, 390 bp, Glycine max
  Clone ID: jC-gmfl02220115a09d1
acttcaaaatttcgggggattacattactttttcatattatattacacgtggggaatcatgttatgcattgtacatcgggtaaagggaaaaattgaaccccttaatatttttaaaacatgacctctagtgcctctcttgtttggcctaatatgttgaacactgttgctgctatgtgagatggtgtaagaccggctaaaaacaattggtcagcaggggatccatgggcgatataacgatccggaagaactattggcctccacttcaatttgccatctataaggccatcaagggccatgaactgagcaacatgagaaccaaatcctccaattgatcctttttcaactggaatcaaaacctcatgtgattttgccaggctgcgaataaaggaa

SEQ ID NO: 10438 - DNA, 563 bp, Glycine max
  Clone ID: jC-gmfl02220115a10a1
aaagaaacagtgtttcatcatttgggtttcgcagaagagagagaaacccatttctagagagagaaactcgcagtcgcagacatgtcttccttcgatgccttcgccgacgacttgaacgtcaactcttcttccactcgccagcacgacgatgacgaggacaacttctctggctacggcggctactcctccttcaccggaggattctccgccgacggagatgtcgccgtcgatcactccgccgccgcgtcgccggagatctacggcttcactgattcgaatcccgcttactctcagtctcccttcgaatcggccaccgtagagaacgaaaacggaaacggatacggcgacggcgacggtgtttttgtctccgacggtccggtgcttcctccgccgacggagatggagccggaggaaggttacgctcttcgcgagtggcgccgtcaaaatgccattcagctagaggagaaggagaaaagggaaaaagaaatgagattgaagattattgaagaagctgaggagtataaggtggctttctatgagaagaggggagctatgttgagact

SEQ ID NO: 10439 - DNA, 468 bp, Glycine max
  Clone ID: jC-gmfl02220115a10d1
aaacaactgaaaattattaaacattgtatttgtctatttgacaccggcagacagcaattattccaacatatactctgtctaaaaggatgtactatttaaacccatgatcattgaatctccacgtcataattgttaataatggatttaattcatacaaaaccttaaagttaataataataaaatgcaaccgataagcattagaaactaatagcagggcaaaaagattcattaaagactgcagggtggagaaaggggtggcagaagaaagattgagggggaaccaaagtatcatagacaaaatcatgcagcaggctgctcctcagtggcaggagcttctttctggggttcttctgtgaggccattagaggtggcatcctttggctgtgaatcaggtgcaccttctgctgcagatccagttgcttttgatgctgctttctcttttccatccttattatctttggcgtcttt

SEQ ID NO: 10440 - DNA, 547 bp, Glycine max
  Clone ID: jC-gmfl02220115a11a1
atcaaagaagaatatgttcaatgtaatgataaatcattggacctcagcaatgagaagattgggggtcctggatcccaagttatagaaaattcatgcacaaccacagctaatgtgggaaatggtggagttagaagtaagcctactggaaaggaacagcaggtttttaggcaaaagaatcttttgaaaactcggaaaaaatcactggtaaaacaagaggagaataccttgcaggatttctatgataattggtctccttcagcagcaccggcaaaacaatttcagaatcaattggcaccttctgttatacaatcttctccctcttcaattctggggcagccaaagcagatccaaggagctgaaaccctatatcagaatatcataaatccatatgcggcttcttctgtgtatgggaaccttactaatacatatcctgctatgccaatgctatcacagactcacccagcactttctgggtatgaagtgtctcctggtattgtgaatcctgtgaataatttagtggactcagtcaagctcaaatcatgacccc

SEQ ID NO: 10441 - DNA, 418 bp, Glycine max
  Clone ID: jC-gmfl02220115a11d1
ccggggaaacccaaaacatacttaaattcaaattaaaaatcgctagtttatgtctgaatctcaaataatgatagacataacatgaattttgatgaggggtaggtaggtatggcaaggggtccatttagaaatccaaccccaactttaaagcctggtctaagtcagtcaggcaaaaacttaaaatttgacatttgataactggctttgggagacacttttgttgtggttatgattaaaacaacatagccctcacaaccttaagtttgggcagatactgatatacatactctggcatgttttaaaacagccgaaaccctaataatactgataacatgcatgcataaaactggttcccaggattttacagggatagttgcgcttgcttatgatccgaatggagatttccggacaacctttt

SEQ ID NO: 10442 - DNA, 650 bp, Glycine max
  unsure (1)..(650): unsure at all n locations
  Clone ID: jC-gmfl02220115a12d1
aaacctatcaacaccatgccaaactccagattattccattaactggaacccaacccataaaaatgaagccatatatcctccatattctattatagtagcacaataacaataataataattataaatgtcttgctgatcaattcacaccatctctgcaaaaggaaagtggaatttcaagggaccaaaattacaggggagaaggggaaggtgctgatgcaataataatgtcctctgacacgccagaaacagggccaggggcagctccagagctcaccagctcaaccatggcacgacgagggttggtcttgtgcttctcacacagttctggcaaaaacacccctgcatcacatcaaagcatgcttagttattatctatgctaattagtaattatcgtaacaagaaaaatgtaaaatttgataactatgtactattgaaatggccattaaaatagttttataatataaaatttaattattatgctcactgcgtaaaataagtttttaatggtataaaatataatagttntatattgtaaaatacntttgtgataaaaatttaataattatagaccgataatataaaataattgtgtaatcacatatcgatgttggcataattattaactattattataaaatcaataaattatt

SEQ ID NO: 10443 - DNA, 580 bp, Glycine max
  unsure (1)..(580): unsure at all n locations
  Clone ID: jC-gmfl02220115b01a1
gcctccagtggcatgaacaacgccgtcaaactttagggtatggtgctgaattggctgtgatacttatccaatctgcaatatatgtgggagtaatagcaatgacgcgtttggcaaggccaagcttctcaaagctatgttataggcgctctgataagagcatcacccttgttcataacagcctcaaattagtagctttgtggtgcatccttgctgcttacgtaacaccattctttatcattcctcacacggttcaccctcttctgggttggatcctgtatttgcttgctacttttgcactttgctcaattgcaatcaatatctttatgctaccaatgttaccagttttggtaccatggcttggaattgttggggtccttatggtcatggcatttccttggtatcctgatggngtagtgagagcactgtttgtctttgcttatgccttctgctctgcaccatttttgtgggcctctatggtgaggatagttcaaggtcttcagttatctctagaaagggaaagctttctgccagcangaattggagagtctttcgcaaatcatggtttacaagtatatgagct

SEQ ID NO: 10444 - DNA, 447 bp, Glycine max
  Clone ID: jC-gmfl02220115b02a1
aagaactttgtgaagcttgtttcttggtacgacaacgagtggggatacagctcacgtgtcattgatcttcttgtattcgttgccaagaagtctctttaaggtgttacttcaaagtagcttgtcttcacattattaccgtatgtttatgtttagctgcgatttagtgtcttgctcgagcaaaaaatgagaggtctgaataaatcggtttctgaaaccagtggtgttacttgttggaggagcattagctcttttttggacttttgatgttttctcttgtggagggggatcgagtttttggatttttatatactcgctgatgtacttggcttgaatacttgctaatgtacttgttattgattgttatagtagatatttgtccgtcctttttttcatttgtggttctcgtatatttgatcctgtttgctttgaatcttggattcgtggttt

SEQ ID NO: 10445 - DNA, 398 bp, Glycine max
  Clone ID: jC-gmfl02220115b03a1
caaaataatggacaagaagcttggcatcacgtctcatgatcctgaagtgagaaaggggccatggacaatggaagaagacttaatcttgatcacctatattgccaatcacggggaaggggtttggaactctttggccaaggctgctggacttaaacgtaccggaaagagttgccggctccggtggctaaactacctccgtcctgatgttagaagagggaatattacacccgaggaacagcttttgatcatggaacttcatgcaaagtggggaaacaggtggtccaaaattgccaagcatctacccggaaggactgataatgagattaagaactactggaggacaaggatccagaagcacctcaagcaagctttcagcagctttcagcaacagagtagta

SEQ ID NO: 10446 - DNA, 329 bp, Glycine max
  Clone ID: jC-gmfl02220115b04a1
cgtagccgcaattgttcactcttccttcgcgaagaagaggtaacagcatccgacaccagcgccagttaccgttttccgcgcgcttccttccttctcgaaacgccgtcgttttgctaccacacctatatttagcatactccttcgaacctcctttttctcaccgacgcagcttccggttttaagagagcatgggaagggttcaggtgaataacagggaagaattttctcatagggagaacgatgatttcagtgattcacagttagttcgtcacttcagaggcgtgcttgttgcaccaacagctggtgatcgagagaattacgacgagctc

SEQ ID NO: 10447 - DNA, 538 bp, Glycine max
  Clone ID: jC-gmfl02220115b05a1
ctctcttcaacgattccaaggaattcgttagcaactcccttgccattctgtctcaggttgcatcggctctttcaacaatccaaacactagcacgcggcagccgttcgttgctgtctgagaacagcaactccccagttgcttctctagacaaagctgatggccttccttcttggatgaaccatgaggaccgaagggtattgaaggctatggataacaaacctgcacctaatgtcaccgtggctaaagatggcagcggagacttcaaaaccatctctgaatgtttaaatgctgtccctcaaaattttgaaggacgttatgtgatttttgttaaagaaggagtatacgatgagactgtgaccataacaaagaaaatgcaaaatataaccatgtatggggattggatcccaaaagagcatcatcactggcaacaaaaactttagggacgggtgtcaggactttcctaactgcaagttttgtggtagagggagatggattcataggcctagcaatgggattcagaaacactgcaggccctgat

SEQ ID NO: 10448 - DNA, 253 bp, Glycine max
  Clone ID: jC-gmfl02220115b06a1
aacaaagtcacaaacgagagatattatttttagatagatgctcctctccgttcgctccgaggctccttgaccttccctaacctcccactctagcctccagaatagaccaaacacttctaaccctcaagtttgaagcctcggacctccattcccaatcttaaaactcccaccctaaaatggcagcaaacaacaagcgtggcatcttgactgagatctgcggtccaacaagcccccgggggtcggcaccaaaaac

SEQ ID NO: 10449 - DNA, 547 bp, Glycine max
  Clone ID: jC-gmfl02220115b07a1
ctttgagagtgtcctaaagctacaagccaaggaccaagccaggatgcagtacctttctagcttggtggctaggaggtccattgtcccaattgcctcagggaggcaaatcacacaaagccctacttacatagtgaaggccaagattggtaccccagctcagaccctcctcttggccatggacactagcaatgatgcttcctgggtcccttgcactgcttgtgttggctgctcaacaaccactccctttgctccagctaagtccaccactttcaagaaagttggatgtggtgcttctcagtgcaaacaggtacggaaccccacttgcgacggaagcgcgtgtgcattcaacttcacttatggcacttcctcagtggcagctagcctggtccaagacacagtgaccctagccactgatcctgtcccagcctacgcctttgggtgcattcaaaaggtcacagggagctcagtgccaccacaagggctattgggcctgggccgaggcccattatcactcttgggcccaaacccaaagctctaccaatctaca

SEQ ID NO: 10450 - DNA, 550 bp, Glycine max
  unsure (1)..(550): unsure at all n locations
  Clone ID: jC-gmfl02220115b08a1
gacgccggcaatgtccgctgtgagagttcaagtttcggcgtgtgcggtttccgccaccgtcaaccaccttcgcctccgccaaaacgccgtcgtttccttcaggaagaagaagcctctcactctcagagtggtctcaatgtcttccgttcctccttcccaacccttcgaaatcgccgttaaagcttccgtcaccacacccaacaggctcggcgactgccctttttgccaaagggtgctgctgacactggaggaaaaacatctaccttatgaccccaagttggtggatttgaccaacaagccagaatggttccttaaagtcaaccctgatggtaaagttcctgtcataaagtttgatgagaagtgggttcctgattcagatgttattactcanacattggaaagagaagtatcccagcccaccattggtgaccccacctgaaagggccacagcggggtcaaagatcttttctacatttattggatttctcaagagcaaggatcccaatgatgggacagagcaagcattactaagtggactgagctctttcaa

SEQ ID NO: 10451 - DNA, 482 bp, Glycine max
  Clone ID: jC-gmfl02220115b09a1
caagcaagtcgcgcttccgccatactgactctgcctgctactgagttgtgacttgggcgaagacatgctgagaactctagttgtgaagcgcagccttggtcaccactggcactcgcattctcagcacctccgactccagcggcaattctcatcatccccggagcccaactcctccgtggatgcagaaacccgcaagtacgcgggctatgctgccctcctcctcttctgcggcggcgccacctactacacattccccctcccggacgacgccaagcacaagaaggcgcagatcttccggtacgctccgctgccggaggacctgcacacggtctccaactggagcgggacccacgaggtgcagacgcgcaacttcctccagccggagaacgcggagcagctggagcgagagctgagggaggcgcggagtcgtatccggccggtggggtccgggctttcgccgacggggatcggcctttccagga

SEQ ID NO: 10452 - DNA, 509 bp, Glycine max
  Clone ID: jC-gmfl02220115b09d1
gcaagcaataatctgaaagaatgcatttatgcataataatccggattgtgcaccagatattttgcaaacccaagttccaaagtcaacaacttagggttgaatatacagtaaacataaaaaatatggacaatatagacaaataaccaacacagaatttatatggtgtctgattgtgggaagagcttttccaacatgttattcgaaaggatcctattggggtccaattcctttcttgctttattgtatgcatccacaggaaaccgctttcttagcctttcttggagagctgcaagctccttcttgtcctttggaacctcaatcttagcccagtgttcatatgcggagtaacaatcccataattttgcctgagtcaaatgcctataatgaaagaattcttctgttatatctttcctctgccgagcatccatggtaggaaggtacatgattatacctacccaagaaaatatatcattctcagacggacttgaagcaggactcaaggaacttct

SEQ ID NO: 10453 - DNA, 533 bp, Glycine max
  unsure (1)..(533): unsure at all n locations
  Clone ID: jC-gmfl02220115b11a1
agaatctgattttgaagaacaaccaattgattggaccaattccttcaactttgtctcagattcctgatttgaagattctagacctggctcaaaataatcttagcggagaaataccaaggcttatatattggaacgaagttttgcaatatctaggcttgagagggaacaatttggttggttcactatcaccagacatgtgccagttaactgggctgtggtattttgatgtgagaaacaatagcctgacaggaagtattccagagaacataggcaattgtactgccttccaggtcttggatttatcctacaaccaactaactggagagataccattcaatattggattcttgcaagtagcaactttgtccttgcaaggcaataaactctctggacatattcaccggtgatcggtctcatgcaagcacttgctgtcctagacttgagctgcaacttgttaagtggatcgatccctcctatcttgggaaatttgacttacacagaaaaatngtacttgcatggaaacaagctgactg

SEQ ID NO: 10454 - DNA, 519 bp, Glycine max
  Clone ID: jC-gmfl02220115b11d1
acaagaattggatttacttcacctttcaaattgtgatgatgatgatacataatatctttctttttgttcaaatcaaccaacactaaaaaaaaaaactagtactaaaactttttataaacattttcattaactattacccctcatccattttttcgcttctcttttttggtttttaaataatatacatgattcttggacttgattttcatttcaaaatccccgctcactctttcactcactgttttgagagattacttctccaaacttgaggaagagttgagcatctgaggtgctcattgaggggcagttcaccaagtgtggagtcttgaggtttgcatactcatccacgtagcatggcactttggcagatggatttaagcaggtggtagtgcagctagttgctttggtggggtgtttgacagcacaaggcttccgatacacgtgtcacttcgtgcattgtcggcctatcagctggctgcctctttgtgcataatagagcaagctgataaacctttttta

SEQ ID NO: 10455 - DNA, 533 bp, Glycine max
  unsure (1)..(533): unsure at all n locations
  Clone ID: jC-gmfl02220115c01a1
cataaattaagaaatcaaagagactgaaagttgagagagaagtgttcacgtctttgagaaatgggtgcttcggcatcggtcacagaaaaatccatccatgaattcatggtcaaggatgctaagggcagagacgtgaacctcagcacctacaaagggaaggttcttcttgtagttaacgtcgcttcaaaatgtggatttacaaattccaattacacccagttaactgagctttacagcaaatataaagacagaggtatggtttttttaggtttacagagcagttggtgcacttgcatgttattggattccaaatttgtgccttttcagtgaccaaatacttttagttaaactgaaggattaaaagaaattattaaatctgatctcacttgagaatgttttgttggtctgatctcaggtcttgagatactggcatttccatgcaaccagtttctgaaacaagagcccgggagtagccaggaggcagaggaaattgcctgtacanggtaccaggctgagtatcccatttttgaaag

SEQ ID NO: 10456 - DNA, 575 bp, Glycine max
  unsure (1)..(575): unsure at all n locations
  Clone ID: jC-gmfl02220115c02a1
cttatgcttatattgtgaaggtcatgaaagagggtgctgcgccctcttccactgtgacacctgtttctgtgaaatctgcccacaagagccaagaacagcagggtattgctgcacctccaccatctagcatatcagagacaaatggttctattataaacactaatgaagttggaaacaatcaagaaactgaagccgagggctattctatttatgtgaaaggtctgccaccaactgctacgcctgccgtcttggagaatgagtttaagaagtttggacctattaagagtggtggtatccaagttaggagccaaaagggattttcctttggctttgcggagtttgaagtggcaagtgctgtgcaaagtgcacttgaggcttctccaattttgattaatggccgccaagttgttgttgaggaaaagagatcaactaatcgaggtaagggacgtttctcatctggcagggctcctagcttaagggtgaaggtgcaaagggcngtgaaattacggaatggccgaagcttggccgtggtgactttatggcagggagatatggtataggaatgggcatcggga

SEQ ID NO: 10457 - DNA, 500 bp, Glycine max
  Clone ID: jC-gmfl02220115c03a1
atttgttgctacaataaaataagatgagttcaactcaatccaaaccttcatccgtcaatgcccgtggcatggctctgccgtccgagcctcaccgccgtcgccgccacaaccacaaccacatctccacctttctccaatccaccgcctccaacttcgcctctctcttcaaccccccaaaccctccctccctgactctcccgcacccgcccacctccgtctccctccctctcttcttcgcgcctccgctctccggttcctccaccgtggactcagccacttccaagcccgcccatcccccagcaaagtcagtccgcatcgcgcggcttggtgccaatggaaaaggcggcggcgggccagtcttcttgggggaggtgttcagcttgtgcgacctctccggaacggggctcattgccgcttccaagcacttcggcattcccttcatttcggaaagaacccctgagtggctgaaaaaaatatttgcaccgatcaccaagagtgag

SEQ ID NO: 10458 - DNA, 471 bp, Glycine max
  unsure (1)..(471): unsure at all n locations
  Clone ID: jC-gmfl02220115c04a1
gaaagaggctcaagagggagcttccaggaaggatacacagcgaatgactggcattcaagttagcttagctatgatgaatgaagaggagtatagatggtcaacgtttttggtaagcaagcaagaatcacaaattggaaccatgtttctcaaatgttttggcttcggcgctcggggacagtatccaacggtgatagaagacggcgctcggagacagtatccaacggtgatagaagagttgtgccatcgattttctctcgcagatctaaggaaatcaaccaacaatttcgatcaaaacacagcaattgatcgtggtagagtatataaaggttgtctccaacacaatgaagatgcttctgagtatacagtcgctgtaaagcgatataatgcggtagaggaagaagaagggttcanngaagaatagagttactctgtcagcttcgtcacccttatttggtctctcttataggattc

SEQ ID NO: 10459 - DNA, 500 bp, Glycine max
  Clone ID: jC-gmfl02220115c05a1
ccggcggagaaaacggtcgtcgtggagttgaagaacgcggaattgcccaaaccgaaacagggtttgatgttgaaattgaattacgacgacgttcggaacgcttggtctgaccgcggaacaccgttctccgacgacagtcccctagccgacgtgccgggaaatgacgtcactgcgcggctgtcgcaaattgatttgttgtgggacaatggaggagtgagagaagctagcgtgctgcgctacaaggagaagcggcgaacgcgcctcttctcgaagaagatcaggtaccaggtcaggaaagtcaacgcagatcgacggcccagaatgaaggtacgagtcagttcacagttgagttgaggacacttgaagaaacttgatttatgtcagattaaaaaaaaaaagaaaaagaaaaagggaaatctgctttttgatttggtgatgataattggataatgaggtgggtgcgtgcgtcacagtttttttttttttttttgttatggata

SEQ ID NO: 10460 - DNA, 502 bp, Glycine max
  unsure (1)..(502): unsure at all n locations
  Clone ID: jC-gmfl02220115c06a1
caggtactgaatttgaatttgaatgtcaatggatgtcaaacaagatttttctgctgaacaaactactcagctacagtgtaatacttgtgtttcaggctcaggacaccagttgaaaattcattgagggatgcgaaactctcgtttaaggatcttgacgaagtcatccttgttggtggatcaacacgtatcccagctgttcaggagcttgtaaagaagttgactggcaaggacccaaatgtcactgtcaatccagatgaagtggntgccctttgagctgcagttcaggtgggatttagcttttatcaatgaggagaaggggataattataaagggggcgaatatctttttcttctctggatagtatattatttttgttgattaatgcttcttattgtaatttatgtttttaggctggtgtcttggctggagatgtcagtgatattgtgctgttggatgtcacttcattattcttgggtctggaaactctaggtggtgtgatgac

SEQ ID NO: 10461 - DNA, 333 bp, Glycine max
  Clone ID: jC-gmfl02220115c07a1
tcttaactcaacttctgctacccactctcttcttccaagtccaaccacgcttttctctacagtcatgggcaaggtcaagatcggaatcaacggatttggaagaattggccgtttggttgccagagtcgctctgcaaagagacgatgtggagctcgttgccgttaacgaccctttcattaccaccgattacatgacatacatgtttaaatacgacagtgttcacggacactggaagcatcacgatgtcaccgttaaggacgagaagacccttctcttcggtgacaagccagtcactgtttttggacacaggaaccctgaagagatcccatgggg

SEQ ID NO: 10462 - DNA, 524 bp, Glycine max
  Clone ID: jC-gmfl02220115c08a1
tttttctccaaagtttcggtgctgactgatagaacactacctattcagccgccatgcacactctcctccgatccactctcaggaccaagactgcttcatctttagcatatgctgtggtttccagaagtgctcacgaaaatctccttcaggctcccttattgtctagatcaaatagcactgaggcttcattggcaaaggataattcctctaatgatgtaaaaaatggtcaagggtacaaaggtcatagtatgcttgctcctttcacggctgggtggcagtcttctgatttgcaccctctgatcatagaaaagtcagagggaagctatgtatatgacattaatgggaagaaatatcttgatgcacttgctggtctatgggccacttctttaggggggaagtgagccacgccttgttgatgctgccgttgcacaactaaagaagttgccattttaccattccttttggaatcgaaccacattaccttctttggatctagcaaaggaactcctagaaatgttcacagc

SEQ ID NO: 10463 - DNA, 472 bp, Glycine max
  unsure (1)..(472): unsure at all n locations
  Clone ID: jC-gmfl02220115c09a1
ccctttgtgactccaaacaaagcccacacaccaacttcatttccattcacaatgtcaatttcctccacttccaactccctcattccccccaaatctttaatcccccaatcccaccccctcattcccaacatcaggcccgggctccggcccaagcctggcccatccccttccatcctcgccgtccacgccgccgagcccgccaaaaaccccgtcgtcaccgacaagcccaagccccaagcccaacaatctgcatccccggccgcggcccgtgcaaccaaatgggccgtggacagctggaagtccaagaaggccctgcagctgcccgaataccccaaccaggaggatctcgaggccgtcctccgcaccctcgacgccttccctcncatcgtcttcgccggcgaggcccggacactcgaggagcacctcgccgaggccgccatgggaaatgccttcctcctccagggcggagact

SEQ ID NO: 10464 - DNA, 517 bp, Glycine max
  unsure (1)..(517): unsure at all n locations
  Clone ID: jC-gmfl02220115c09d1
attatccatagaaggactcttgtccttgccagtccaaacgcattactaggtagtatacacatacaaacacaacacaaaatcaaagtgacaaccatcgattaataataaatatgtaggacaaaaaaaaaaaaagaacaaaaatatctttctcttgttggttttgaaggcacttttacactcctaaaggggcaagaggttgctgcgatctgatcctgctctttctcaaacgctcggggatgatgaaagcaagctcaagagattgggaagcattgagccttgggtcacagggtgtgtggtaacgtgagctcaagtcatcaaatgtgaccgtccttgacccaccaatgcactcggtcacattctgacccgtcatctttagatgaacccctcctgggtgggttacttcttgctcgtgcacatcaaagaatgctctcacttcagccctgatgaaatcgaaggggcgagttntaagaccacatggagccttaatggtgtttccatgcataggatcactgaccca

SEQ ID NO: 10465 - DNA, 408 bp, Glycine max
  Clone ID: jC-gmfl02220115c10a1
ggcggggtcggagacgccgtggcgcgtgtgagggagaacatctcctacttccagatgaactacgcgatcgtcgagctcatcgcgctgttcctgagtcttctatggcattcaatctcgctgatcgagttcgacgagctcatggcggcgtggctcttcctctacttactgcgagacgaaccgatataatcttcggaagactaattatcgaccgcgtcgcgcttatgagtatggcggtgctgaccgtcgtgctgatgcttctcaccggcgccatcggcaacatcctgtgggcgctgctcatcggagcggcgttgatagtggcgcacgcggcgttgaggaaagccgatgatttgttcttggacgaagaataggccactggattctgtccttccggggctcctctctctcgat

SEQ ID NO: 10466 - DNA, 445 bp, Glycine max
  Clone ID: jC-gmfl02220115c10d1
attgaagaacctttttctttttttagcattactaactcagtttagggaacaacatataggaaaatgaatttcctttttccaaccatgtttttttgcaaacacaaattgcaaatttcccctccttataagggcaaacccttcttaaccgaaagaaaccaacctgaacctaaaatcctttactacattgcccaaattacatcttcatatgaagaaacaaagaattgttttcagaatacacgagctccctggggaaaaaactcattggcctttttttcgcccacaaacaaattatgagtttttcttaacgcctccttcgccattttcaacaccgctcctgtgtgcccccccgacttgtttttctcgaccgccccggaaaaaagcgcaacctcaactgttataacctccataacaagtggccctacgctgcctctgattaatctttcca

SEQ ID NO: 10467 - DNA, 602 bp, Glycine max
  Clone ID: jC-gmfl02220115c11a1
cgaaagggtcatagggtactgttgtttttagttattcgaattttgattatcgaatcgcaaaattctgaatcaatcaatcagtaattagagccattaacgactgcaatggtctgcgagaagtgtgagaagaaattatcgaaggtgatagtaccagacaaatggaaagaaggggccagcaatactaccgagggtggtggccgcaagatcaacgagaacaagcttctctccaagaaaaacagatggaccccttacggaaacactaagtgcaccatttgcaagcagcaagtgcaccagaatgctaagtactgccacacctgtgcttactctaaaggagtttgtgcaatgtgtggaaagcaagttcttgataccaagttttacaaacaaagcaatgtgtagtggatacttgtgttgtattgcgtgctgtatcttcttttagatgcataatagcattacctttctttctatttgtctagatgatcctattgctaacaatgtaactgaagctgtataaagaagaaatacagtgagggattttctgttatctgtcttttgcaatgtactcttgcattgttattctagatcaaaacatatgccatggcgtg

SEQ ID NO: 10468 - DNA, 504 bp, Glycine max
  Clone ID: jC-gmfl02220115c12d1
gacgtggaaagttttggatattagacatattataagggcaacgctgaaaaaacttccagcatagagcagtggaatgaattacttaggccttctcccacttgaggggtttgaccacttcccatgtgaagtcagggtcttctcttccaaagtgtccataggcagcagtcttcaaaaacctgttatttccacccctcttgagatcaaggttgatggagatcataccaggcctgaaatcaaagttttccttcacaatgttgagaatctccttatcatggatcttcccagtgccataggtgtcaacaaacacagacaaaggctcaggcacaccaatggcataagacacttgcacaatgcaccttctggcaagtccacttgccacaatgctcttagcagcctgtctcacaatgtaagcaccactcctatcaaccttggtagggtccttcccggagaaagcaccaccaccatgagcaccccatcctccataagtatcgataatgatcttgc

SEQ ID NO: 10469 - DNA, 583 bp, Glycine max
  unsure (1)..(583): unsure at all n locations
  Clone ID: jC-gmfl02220115d01a1
aaccaactaaggaataccctttcaaaatggcttcttctgtgtcatccatggtttctaccaccctcctcctaattaccatctgcacactgtcctcacttctgtcagttgcatctgcagcaacagaggagggacgaacaaggccattcaaaagggtctatgcctttggagactctttcacagacactggcaacacccaaaatgcagaaggtccaagtggctttggccatgtttcaaactctccctatggaaccactttctttaaccactccaccaataggtactcagatggtaggcttgtgattgattttgtggctgaagcactttcactgccttacttgcccccctaccgtcatagcaaaggcaatgacacttttggtgttaactttgctggtgctggttccacagccataaaccatttgttctttgtcaagcacaacctctcccttgacatcactcctcagtccatccaaacccagatgatatggttcaacaggtacctggagagccaggactgccaagagtcaaagtgcaatgattntgatgacactctatttggtttggggagattgagtcaatgactatg

SEQ ID NO: 10470 - DNA, 574 bp, Glycine max
  Clone ID: jC-gmfl02220115d02a1
cagacacagagagagagaaagagaaagagtaactgagttgtattcaatattcacaatttctacctccaaagattaaaaagagagaaagaaaaaaaaagaagcctacacacctttctccctattccttctacttctggcgccatttgcaccttcaaaactccatcttttttctttctctccttccatttctggaaacaccctcatggaaccaacaacaacattgaacaacatcatcaacaacaacaacactgttcctgcagggtcaccaccaccaccaccaccaccctcagtgcctcagccaatgaacatgaatgtcaacatgaacatgaacgtgggaaacacagaaggaacaacaccagcagttccaacaccaacacccgcgccaacaccagcaccaacaacaatggttcctgcagtgccagctccaaccacaacaacaccgtggagtttggatttgtttgggaagaagaagagagggaggcccagaaagtatgatgcagatgggaacctgagagtgagtgcaacaccaccaccaccacctggtttcactttgtccacaccttcctctgagttc

SEQ ID NO: 10471 - DNA, 259 bp, Glycine max
  Clone ID: jC-gmfl02220115d03a1
agagaagcgaggaggagggaggtggtttgcggtcgagggtaactaaccaacgctaagcagttgttgagtttggttggtagtagatgagcgaagtgttgacgatggcggacgtcacggcgaacttgcaagcagcaaccaccgcatccaccccttacgcgctccccaccaatatgcctctactctccgctttcctctccttcgctctcgcacagttcctcaagatcttcacctcctgatattcatgtgtaacgaaaagaga

SEQ ID NO: 10472 - DNA, 330 bp, Glycine max
  Clone ID: jC-gmfl02220115d04a1
aagtgggagaaaacagagcctaagcaagaaaagaagctaaggtgtgagtgagcagagagaaacagggctatcaagagaatggccctgaacgattttttcgcgggggagatcgcgacggagcttctgaaaatgctgatcagcatctcccgcaagtccctcctctgccgcgccagcgccgaccagctcatcagctacatccacgacctcctccccttccttggaggaaatcaagtcctccggggtgaagcttcttgcactgggccaatcgaaactggaccgtttttcgaaaattttccgttccgcggtgaagctttccaacagggtcttttc

SEQ ID NO: 10473 - DNA, 552 bp, Glycine max
  unsure (1)..(552): unsure at all n locations
  Clone ID: jC-gmfl02220115d05a1
gtctatagcactactagatggggggtttgatgccttatccgtgaaaccatttatggagaatggggatcgttgttgaacatggatgggtgcgggaggatgcacttgaggtttgcactatgatatctgcggatgctctgtctgcggacattcctgcacttattaagagagatgaggacattcttgcatttgtctatagcctagtatatgaagaagaatcttatgagttcttggactggacagtgggaacatagaacatgaatgggtttcggttctgctctttgttcttcatatnggggtcgtgtagccagatgatatatataatggatctgacgcgctttttcaaagtgcagaagatacagcactagatatattggatgcatcaaatgagcttgctcttttcttagcacgagctgtgattgatgatgtattggctcctctgaatccagaggaaattagcggcccgttgcctgcaagatgcactggttgtgaaactggacggatggctagatcacttgttgctgctcgtcatgctggtgagagactatagagatg

SEQ ID NO: 10474 - DNA, 550 bp, Glycine max
  unsure (1)..(550): unsure at all n locations
  Clone ID: jC-gmfl02220115d06a1
cgagtggttccctccctcacgcgccctcggcgccctctccgccttccgccagacgcgccgcgccttcgccgccaacaagcattccgcgcccgacgacgcttacgctgcggagtccatcggcgacgatcccctggcggcgtccagcggccaggtcatcgtcggtgtcgagagccgctaccgcgtcgtgtaccgcctcgtgaacggcatttacgtgctcggcatcaccgtcgccgaccacgacaactcggtgaacgtgttcgagtgcatccacatcgtcaaccaggccgtgagcgtcgtggtgacggcgtgccgcggcgtcgacgtcacgccggagaagctcagccgcaagtacgccgagatctacatggccctcgacatcgtcctccgcggcgtcagcaacatccggctcgccgccatgctcgccaccatgcacggcgagaacatcgccaagatggtccactccgccatcgacaccgagaacaagatccgcggcgccgaaacctgggcctncgggaggtgcactccctcgagcaccaggccggaatcgacg

SEQ ID NO: 10475 - DNA, 271 bp, Glycine max
  Clone ID: jC-gmfl02220115d07a1
agaatttgaaggaagaggggatatgaatacaaggagctagttgtctatttgcgataacataacatcatcaagcaggatcatcgatccaaccttagtattcaacccagagagatttgtagtaataattactacaacaacttaaaacaatggcaggaggaggttatgtagattcgggaaatgcaaagcaatttgaagggaaggtcactgcattcgtattggttacatgctttgtggcagccatgggaggcttactcttcggttatgatcttgg

SEQ ID NO: 10476 - DNA, 467 bp, Glycine max
  Clone ID: jC-gmfl02220115d08a1
cttccattaagatgggggagttcaccgggagtggtgagtatgtgactcacggtgaattaccttcctccaggccaaatcattcaaggaaagttacagttcttcctcttgtgtttctcatcttctatgaggattcaggggggcctctcggggtggaggatactgtgcacgcagcacgttctctgttagccctcattggattcttgcttttcccattgatatggagtggtcctgaagctttgatcactgctgagatgggtaccatgttccctgaaaacagtggatatgggcgttgggtttcgtccgctttgggtccctattgggggtttcaacaaggcttgatgaaatggctgacgggggtgattgacaatgcattatacccagggctattccttgactatcagaaggcacgaatccctgctatatgtggcggattgcccagagttattgcaacatgggggcttactatg

SEQ ID NO: 10477 - DNA, 602 bp, Glycine max
  unsure (1)..(602): unsure at all n locations
  Clone ID: jC-gmfl02220115d09a1
gcgggactgtgagttcttggaagctgagaaaattatggattacagtcttttggttggcattcattttcgtgatgataatacgtgtgacaaaatgggattgtcaccttttcttttacgcactggcaatcgggatacttatcagaatgaaaagttgatgcgtggttatcgctttcttgaagcagagctacaggatagagatcgagttaaatctggaaggaaatcattaatcaggctaggagccaatatgcctgcaagagcagagcgagtggcccggaggagtgattttgatcaatacactactgctggaatcagccatttgaccccttatcgcagtggggagacttacgatgtcattctatactttgggattattgacattttgcaagattatgatatcagcaaaaagcttgagcatgcttacaagtccttgcaagttgactctacttcaatttctgctgttgatccaaagctatactcgaagaggtttcgtgattntgtagggagaatattcatttgagagaggtagcagatgggttaacaatgaggctggaatatttctctttctgaaggtgaagatgcctgattgctcataacatcccagg

SEQ ID NO: 10478 - DNA, 550 bp, Glycine max
  Clone ID: jC-gmfl02220115d09d1
aaagtagaaaaaaaaaattctttcaactatccatcctttgtataaacactgtacattcttttttttgtttatttcctacacttatccacgcattttgaatcaaagctcagggaaacaacactccacgttgttccctcttcctatctctcccaccaccatatattcaaattctatttagtagtaaccacaaaaatttcaacaagccccaccccatttcctaaaacaaaggaaagaaaaaacaaattccgaacttcatcccaatcttccatgtacaagttttcccatccttcagcacaccatcacaatggctgtgtttataaaattaagccataaaaaaccccaattccagggaacttcggtcagccatttgaccgtggcgaggcattttaaccagtcaactccaagacctttgacaagggtttcaaatttcacgcatttttttcctggatgttatgagcaatcaggcatcttcaccttcaggaagagaaatattccagcctcattgttaacccatctgctacctctcttcaatgaatattctccctacaaa

SEQ ID NO: 10479 - DNA, 554 bp, Glycine max
  Clone ID: jC-gmfl02220115d10a1
gttgttaccgttttgctttgttgaagattttttgaggttattcgcgttttcttcttttgcatgttcatttctccgtcgatcagtgaagtgtgaaacgacgccgtttcgttgctctcggctcgaactgatggagtgggtttctctgtgatctcgagggggagttcggcgatgtgtgagctaattcggtgcctggtgtttgattctgttttcggatttgcgcatttttttgctcgaattatatgaaatgtttgattggaacgacgaagagctagctaacataatatggggtgaaggaggtgagagtgttgatcatattgtgccatatccagaggtaaatgaagatgttagcaacataaaagagtggaatcaagaagctgctgcgactaagctcaccaagctgaagaggccagaggctaaaactgattttcatgaaagaaagctaggaagcagttccaaccttgataatagtggagaactactaacctcaggatatggaacaaatgcatggcctgacttgtctttatccacttcagctaacattgatcagggttccc

SEQ ID NO: 10480 - DNA, 449 bp, Glycine max
  Clone ID: jC-gmfl02220115d10d1
aaagcctggtctaagtgagtcaggcaaagacttaaatttgacatataagtggctttgcaagacacttttgttgttgttatgattaaaacaacatagatactgatatacattgtcatgttttaaaacagcagaaaaactaataatactgataacatgcatgcatgaaactgtttcccaggattctacagtgatagttgcacttgcttatgatccgaatggctgacaataaaataaaacatttgcattaccaggaaatccatatatattgaaagagggaagcataccaataagcatagatgtattaaggaaggatttacccttagatttcgggacaacctctttttttattgagaggcttcaagttcatgtgtgttggatgcatttctttgcatgtctatgcaagggttgtttttaatttgatccatagactgggcatcaacccaagggtt

SEQ ID NO: 10481 - DNA, 475 bp, Glycine max
  unsure (1)..(475): unsure at all n locations
  Clone ID: jC-gmfl02220115d11a1
tccaatcctttttttccattccctactattccctatcatctttctttgtgttctcatctttttccttttcccaagcaattgtactttttaggggcatacacgtaaagcagttggtttctggagtagttagagttacatgtgttttgcaggcacatggcaacacatgaaatggatcccgatgttgttcgctggggtcttcatctcctagatgtctgcacactttctcaccatggttcccctagtattgtaactcaatatgatcctgatttaagtcgagttgaatatgttaccgaaggcttttgtcagcatgagtacgtggataatgatgaggctgttgcacgagcatatcaagaagaattatcgcaacttgattccatgggagcttctgggatatccaattntgagaatgaaggaatgcaaggatctgtctatacacaagattggcctcaatcctcanatgggaaatataactttg

SEQ ID NO: 10482 - DNA, 630 bp, Glycine max
  Clone ID: jC-gmfl02220115d11d1
tttttttttttttttttttttttttttttttttttattttttttttttttttttttttttgtttttttttttttttttttttttttttttttataaaaaaacttaaaataaaaaaaaaattaaaaaaaaaaaaattacacataaaaaacaagcacatcttgatcacacagggagcgaaaaaaacaaaaaaaaaaaaaaaaaaaaacaaaaaaaaaaaaaaaaaaaaaaaaaaaaagaaaaaaaaaaaaaaaaaaagggccggagccttaattaaccaaacaacaaaaaaaaaaggatggaaaaaaaaaaaacggggggggaaaaaaaaaaaaggggggggaaagaagaaaaaaaccctcaaaaaaaaagaaagagaaaaagaacaaaaaaaaaaaaaaccattaatatttttttatgaaaaaaaaaggggggctctcctcaccaaaaaaaaaaaggtaaaaaaaaaaacccacaaaaaaaaaaaaaaaaaacccccccctacctcctttattgcgagaaaaaaaataaaaggcgagttccctcaaaaagaaaaataaaaaatatttgcccccccccctacttccccccgacaagataagaaaaaaaaccccccccccctctcgtgtttat

SEQ ID NO: 10483 - DNA, 557 bp, Glycine max
  Clone ID: jC-gmfl02220115d12d1
atatgactctggtgttatttttgattttgcaaattaaattacacaatcacagccgtacatcacacatgagttgggcctcttccaacttaaaagcagaggataacattggcccatgacgcgacacatgcaccacctaataatcataattttacatctttacatacaaaatacaaagactttaaattttaaaaagaagaaaagagataaacagatcatcttaatgaaatgaaaccaaaacccacaaacattggcttgatttttgttgttgttgttgttcccaacttgattaagcatgaaccgtttgattgaatcacttggacttgaagggaatggccctgattacgacctggtggtagagtgctgcaagagctgcaccgatgaatggtcccacccagaagatccagtgttcatcccaaccaaggtccttgttgaagatgatagcagcaccaagactacgagcagggttgataccagttccggtgatggggatggttgccaagtgaaccaagaacacagcgaacccaattggcagggtgccaaaatgggacgtgggagtc

SEQ ID NO: 10484 - DNA, 320 bp, Glycine max
  Clone ID: jC-gmfl02220115e01a1
atgcgagaaatgatatttgaatgaaaagtataattgtctatgctaacaaagataatgtatgtaatatccacttcccttcgtattatgtagcatgttttatcggtgatttttaactttctgttgtagtagtaggttagtagtttgaggttatagaggttcttactcttttgtagccacccggttgtgtagatatatatgacattgcaactggatcatcagggaagtcaccaccatggctttcttttcaacttgattcgatgtattactgactggggaagtgggttttcagagaccttaatgtatatatattttagtttctc

SEQ ID NO: 10485 - DNA, 493 bp, Glycine max
  Clone ID: jC-gmfl02220115e02a1
tgcaaactcactggaaaaagtcctgaaagaagagatgggttcagaggaaaccaattttccaagcaaaccttcaagaagggtctctcatcatgttcagtctgatgctacaagggaaacaacaactcatgcttggccacaacataggtcaccatcaccaccaccaccatgtgttaaaggtaacaacaacaacaactccaacaatgaaattgatgtgtccatgtcttcaggtgcacaatattgttactacatgttggaggctatgcctcagccagggccaacatggtccacaacaggaccttgtgtattggctgagccaacaccaacaccatccccatcagcactcattgaagattcttcatgtacttggtggctgggataccttgaaggcttagatggcaatttgaccactttgaaattggatcccccatttgtggaaaatgttgtgatggaaaatggtaaggcgccttggttatgaatccactcttgtggatgc

SEQ ID NO: 10486 - DNA, 481 bp, Glycine max
  unsure (1)..(481): unsure at all n locations
  Clone ID: jC-gmfl02220115e03a1
gggtgaagggaaaaatcaaatcaacatgctgagagtgggcgcaaagagggttttggaaacgacgttgtttggggttagggttccggcgaggctgtaccacgagagggttgtggatcactacgacaacccccggaacgttggatcgtttgacaagaacgacccgagcgtggggacgggtttggtgggggccccggcgtgcggcgatgtgatgaagctccagattaaggtcgacgacaaaaccggaaaaatcgtcgatgctcgattcaaaacttttcgctgtggctccgccattgctttttccttcgtcnctactganntgggtgaagggaangcacatggaggaaagttctgactataaaaaatactgaaattgcaaagcatctttcacttccaccagttaagctccactgcagcatgcttgctgaagatgctatcaaagcggccgttaaagactatgaagctaagcgtgcttaggcaactg

SEQ ID NO: 10487 - DNA, 519 bp, Glycine max
  unsure (1)..(519): unsure at all n locations
  Clone ID: jC-gmfl02220115e04a1
tgtgttcaaggaaagaatactgttttttactttgaagtgccaaaagggcatcatcttgctttggatcccctgttcatatgtgacactgtactttgtgtgatatatttaaaatgtctctgtagcaaaggacggaagaatattaggcatgatgagtgatgactggagtaggtaggatctgaattgttttttctttttcttttaaaggcatcctacatgccacatcatttcctttttgcttgagtttacaagttattagttctgctatcaatattcatttttgcgtgtttgtactgacatgtgatgctcttctaaaaatatgcagaaatggccttagggaacgacgcagaagcagaagttgattttgagagtttggtattgggtatctgtgattgttaagagaatagtgagattttgttaatttagtggtgctttgactgaagtatgagtctgttttgttgggcaaggccctgagtttctactcttggattggaatagttagtttattntatgtctcagctt

SEQ ID NO: 10488 - DNA, 421 bp, Glycine max
  Clone ID: jC-gmfl02220115e05a1
gaaaatgggtacttctttgtggactttgtgtttaattttggcttgactagcctcttttgcatgatgggcctttccacagacgccagtaggatgttccattccgcagaaactacgtacccacttgggcttttgatcacatctaatccttcagtggaggatctgaaattcaactttatctagacaagttcactggctctgacttccagactaaagggtcatactgatatggccacttaagaatgaacataaagatggtctctggcgaatcagctggcacagcacactgctatttatctatctacctacaatgcgagagcacgacgagatagaacttgagctgtagcggaacacaacacgacgaccttacattttgcaaacaaatgtgcataccgcatgcgcgggtgacagtgagcatagaatc

SEQ ID NO: 10489 - DNA, 585 bp, Glycine max
  Clone ID: jC-gmfl02220115e06a1
ggaatctttgcaaaaagatggcccctcctcttgtgacattactctctgcagaacctgagatacaatatgtagcattgcggaatatcaatcttatagttcaaagaagaccaacaatacttgctcatgaaattaaagtgttcttctgcaagtacaacgatcccatctatgtaaaaatggaaaagttagaaattatgataaaactagcttcagaccgaaatatagaccaggttctattggaatttaaggagtatgctactgaagttgatgtggatttcgtaagaaaggctgttcgagcaattggtcgttgtgccatcaaattggagagagcagctgaacgatgcattagtgttttgcttgagttgataaagataaaagtaaattacgtggttcaagaggcaatcattgttatcaaagatatatttagaagataccccaacacatatgagtccataattgcaacactttgcgagagcttagataccttggatgagccagaagctcaggcatcaatgatctggataattggcgaatatgcggaaagaattgacaatgctgatgaacttcttgaaagtttcttggaaaatt

SEQ ID NO: 10490 - DNA, 282 bp, Glycine max
  Clone ID: jC-gmfl02220115e07a1
cttgggattcggctcgagctcgtacaacgtgctagcgattacgtatgatgatcttgttcggagatcagggctccggacaatggagcgatgacttattcttgctcacctatattgccaatcacggtgaaagggcttggcacgtttgggccaatggtagggtacgctatcgggccgtagagaggtgaccagctgctggtctattctaccttggtcctgatggtagatgagggaataatactcccgatgaacaggttttgttcatcggactccatgcatggtggg

SEQ ID NO: 10491 - DNA, 257 bp, Glycine max
  Clone ID: jC-gmfl02220115e08a1
gcctggctctgtctctgtctttgtgtttgatgctgacgattccgaaccagcgaccttgttcgtttgtcgcaaagttcaagtgatcatgggtaaggacaagactcacatcaacattgccgtcattggacatgtcgactgtgggacgtcaactaccactgcacatttgacctactcgctgggaggtatcgccgcgcgagggactgagaggttcgaaattgcggctgctgagaagaacaagaggacattcaagaatgcct

SEQ ID NO: 10492 - DNA, 586 bp, Glycine max
  unsure (1)..(586): unsure at all n locations
  Clone ID: jC-gmfl02220115e10a1
gtactgtggaaatcattacatctgtttaactcattaggaagggagacaaggttggatcttctgaagctgcattgcttgccaagctaggcataaggcccttctcatatgggcttgtggttctctctgtttatgataatggttcagtgttcagccctgaggttcttgatcttactgaggatgacctcattgggaagtttgctgctggtgtctcaatggttacttcactttcattggctatttcatatccaacacttgctgcagcaccacacatgtttgtcaatgcctacaagaatgttcttgctgttgcggttgagacagattattctttcccggaggcagacaaggtcaaggagtatctgaaggacccaagtaaatttgccgttgccgccgttgctgctcctgctgctgcatctggagctccagcggctgcagccaaggaggaggaaaagaaggaagaaccagctgaagagtctgacgatgacatgggtttcagtctgttngactaaattgaatcaatacttttgttgagtttgctttgttagaaatgatgaagttgtctggcttttcatttaggtgctattttagt

SEQ ID NO: 10493 - DNA, 529 bp, Glycine max
  Clone ID: jC-gmfl02220115e10d1
aatgccattattttatcatatcatcacttttcccatcttcacagagaagacaataggtatcttgatttaaaaccataagagacaaaaatgttaaagctttaattaactatgggatttaaaaactagttgcaatgtaacatgaattgaaaagacagcaaactaaaatagcacctaaaatgaaagacaaacaacttcattaattctaacaaagcaaactcaacaaaagtattacttaatttagtcaaacagactgaaacccatgtcatcgtcagactcttcagctggttcttccttcttttcctcctccttggctgcagccgctggagcaccagatgcagcagtatgagcagcaacggcggcaacggcaaatttacttgggtccttcaaatactccttgaccttgtctgccttcgggaaagaataatctgtctcaaccgcaacagcaagaacatttttgtaggcattgacaaacatgtgtggtgctgcagcaagtgttggatatgaaatatcccatgaagtgaagtaacca

SEQ ID NO: 10494 - DNA, 599 bp, Glycine max
  unsure (1)..(599): unsure at all n locations
  Clone ID: jC-gmfl02220115e11a1
gttgccgccatgagattgctagaatgatcattatgcatgattacccccttcacatggttgagcatccgggttttgttgcatttgtccaaaatctgcagccccagttcaatatggtgacatttaacacaattcaaggagactgtgttgcaacttacctgatggaaaagcaatgtgttatgaagtattttgatggattacctggacgtgtgtgtctcacactggacgtttggacctcaagccaatctgtggggtatgtgtttattactggacattttgtcgatagtgattggaagttgcagaggagaattctgaatgttgtgatggaaccataccctaattctgactctgctctcagccacgctgtagctgtttgcatttctgattggaatttggagggcaagctgttttctatcacttgtggtcagtcactgagtgaagttgtccttgggaatctcagaccgttactctttgtgaagaatccacttatcctcaatggtcagttgctgattggaaatngcattgcccgaactttaagtaatggtgcaaatgatttgttgagctcggtgcatctcacagttaaaaaaatccgggatagccgt

SEQ ID NO: 10495 - DNA, 457 bp, Glycine max
  Clone ID: jC-gmfl02220115e11d1
ggtgaaacaaaaaaaggaaactagaatttaaaccttcggggccaaatttacacattaaatgtcaccaaagttgcctaacaaagaactgggaccttccagtaaaatacaagaacctccccacataacggggccccccccctaaaagaagtgccctgaataaaatttaaaactcccttttccccagcccattggaagctttgggtgctccatactggatccagttttttgcacatacaagggcccccactgtttttggccgcagggaacttttatactgaaccatttttttgacttttgtttcaaaaacagattctgggggaaaacttgaaaccggaacagacagttttttcccagccattttggaaagagaaggggccttgagtttgtttagcttccaccaacccaatacattaaagtttggaacacgtggcaacaaggatttttccaaaaactgggc

SEQ ID NO: 10496 - DNA, 536 bp, Glycine max
  Clone ID: jC-gmfl02220115e12d1
aaacaccaatccatttctttctttgaagacataatacaaaaaccaattactgaagtttattaattcaatgaggtcttcctcaaagaattaatccagagtaaaagccatgcaaatcacatgacacttctcagtacttgttagctgctggagattaatccccattctgcaatcaacacatatctttacatttcctcaaactcgttaatataaaactaaaactccactaccaatgaaacatattcatgaaccctttattcactcacgctgctttggcaacattgaactactatctgacacagcaacattaccttggttctccacatatggcctaatgaaggttctcctccaccacacctcaaatgccctttgaagattgggacagctatcaccagttttcaagaaactccccaaccatgaaagcaaaatgctttgttgatcctcaagaggcaaggtgagaatagtcctcccaattccttcctccacaagtttcctatcaaatgacctgcatccatgctgcagccagttgtagtcattca

SEQ ID NO: 10497 - DNA, 292 bp, Glycine max
  Clone ID: jC-gmfl02220115f01a1
gtccttgaaggatttgaagctcatggaagtgaagaatggaaggttggctatgttggcaatcttgggttactttgttcaagctcttgtcacaggtgttggcccataccaaaacctcctagatcatttggctgaccccgtgcacaacaacatcttgaccagtctcaagttccactgaatgtattatatgttattttacatattctttacgttgccaaaactcaactacctttctacctttctatatcatgtggacattttgttccttggtgtggcgctgtaagaaatgacatgt

SEQ ID NO: 10498 - DNA, 89 bp, Glycine max
  Clone ID: jC-gmfl02220115f02a1
ttcattacatagccagaggtttttttaccataacaaaatcatcaacaaacaggcgggaaaaaggtaaacctatcgaccgtgaccgcaga

SEQ ID NO: 10499 - DNA, 387 bp, Glycine max
  Clone ID: jC-gmfl02220115f03a1
tttgtccccaatttaactattggcgctccagttattgaaagtttgagaaagcacacaaagggatatttggattgtcaccttatggttacaaatcctcttgattatgttgagcccttggcaaaagctggtgcttctggttttacatttcatgtagagacatcaaaagataactgggaagaacttatccaaagaatcaagtcacatggcatgactcctggtgtagcattaaagcctgggacccccattgaagaggtttatcctctggtggaagccggaaatcctgtggaaatggttcttgtgatgactgtagaaccgggattcggaggacaaaaatttatgccagagatgatggataaagtcacgtatacttaggaagaagtatccatc

SEQ ID NO: 10500 - DNA, 471 bp, Glycine max
  unsure (1)..(471): unsure at all n locations
  Clone ID: jC-gmfl02220115f04a1
aacagctaccacacatanattactaacaagattaaagtacgcatatctgcacctacgcttcgcagcaaacgataagataaagttacaaatataatcttattttnnnntttgnnnnnaagggngatcgctggtaaccaagacgaannntgnnggcacacgcacgcgaacgtaaaattcgaattgagctcgaggcgaacttaaatatagacattttatgtttctcaaggatcactactcactctgttataccgcactgtcggagtaacaccttccgatcctcgaaaatcacttcctcaatgggggcttaatttcctctcctacactcacaggctcaaccagattaagaaaagggcaagtggggtatatgcatcactatccgagagagagagaggagagtattattcccagagaccgccaactccgctactagagaccggcaactatcctattcataagaaaaagctctctacc

SEQ ID NO: 10501 - DNA, 609 bp, Glycine max
  Clone ID: jC-gmfl02220115f05a1
ctctggaatgttcatttccaagaacaaggatcctattgttgctggtattgaggacaagatttcgtcatggacctttcttccaaaagaaaatggggaagatatacaagtattgagatatgagcatggccagaaatatgacccgcattatgattacttcactgataaagttaacattgctcggggtggacatcgcatcgcgactgttctcatgtatctcactgatgtagccaaaggcggtgaaactgtcttcccttctgcagaggaacctccacgtcgcagaggtgctgaaacaagcagtgatctttctgaatgtgccaagaaaggaatagcagtgaaaccacgtagaggggacgcacttcttttcttcagtcttcacacaaatgctaccccagacactagcagtctccatgctggatgccctgttatcgaaagtgagaaatggtccgcaacaaagtggattcatgtagactcgtttgataagactgtgggagctggaggtgattgttctgataatcatgtaagctgtgagagatgggcttcacttggagaatgcactaaaaatcctgagtatatggatggatccttagacattcccgggtattggtaggg

SEQ ID NO: 10502 - DNA, 471 bp, Glycine max
  Clone ID: jC-gmfl02220115f06a1
ctcatctgcttcccctagcaaccttcttcttacttctctccgcttcttatctccagattgctggggcggaagcacaaccgttgactagtctcaagcttaactctcatattcttcaggagtctactgctaaagagattaatgaaaatcccgaggcaggatgggaggctgctataaatcctcgtttctccaattatacagttgaacaatttaagcgccttcttggagtcaaaccaatgcctaagaaggaacttagaagtacacctgctatatctcacccaaagacgttgaaattgccaaagaattttgatgcgaggacagcttggtcgcagtgtagcactattggaagaattctagatcagggtcactgtggttcttgttgggcatttggtgctgttgaatcattgtcagatcgcttttgcattcattttgatgttaatatctctctctctggtaatgaccttcttgcatgct

SEQ ID NO: 10503 - DNA, 555 bp, Glycine max
  Clone ID: jC-gmfl02220115f07a1
ctcgagccggctcgagctctctctttcctcccttccttccctctcaacttcattttcctttcaaatagtaacactagagaacaaaagctctggctagaacttgtaatgtatatgcaagccatcatcattcagaacaattagtgcatcatcctccttcaactgaagaactttatttaatttgctcctaaaatattttgtcagaggatgtggtgcagtaatcctttgccattccttctttatttttaagcttacagcatctgcaatcatctcttattattacttcaaagtggcgatcacactatcattcattcagctgatcttgaagattttgtggcaggcataaaacctgcaatgagatggctttcttcccagcaaatttcatgctccaaacccctcaccatgatgatcaccatcatcatcaacctccaccttctctcacctcaattctaccaacgtgtgcacctcaagaatatcatgggggagtgaccattctaggaaagagatccatgtcattttcatcagggattgagcatggagaagagggccataatgctg

SEQ ID NO: 10504 - DNA, 420 bp, Glycine max
  Clone ID: jC-gmfl02220115f08a1
cacaaacacaacaacatatggaggtgctaagggtgcaaaccatagcttccaaatccaaagatgctgccatcccagccatgtttgttagggcagagacagagcaaccaggcatcacaaccgttcaaggggtgaaccttgaggtgccaattattgattttagtgacccagatgaagggaaagtggtgcatgagattttggaggcaagtagggactggggcatgttccaaattgtgaaccatgacatacctagtgatgttataagaaagttgcaaagtgttgggaaaatgttctttgagttgccacaagaggaaaaagagttgattgctaagcctgctgggtctgattctattgaagggtatggcacaaagcttcagaaagaggtgaatggcaagaaagggtgggtggatcatttgttccaca

SEQ ID NO: 10505 - DNA, 462 bp, Glycine max
  Clone ID: jC-gmfl02220115f08d1
aataacagaacagacaaactgtttcttgtcatctttatttacgtcaaaagcataagattaatccaacattagtcacagatcttatttaatctacttcccacaagtcacactttcattccataaattaaataacaaaacagagaaaccaacattagtcacagatcttatttaatctacttcccacaagtcacactttcattccataaattaaataacaaaacagagaaaccatgagctataattatctcgtagtgcccacttcattcattgagggatcttattgagcttacaataagcataatccttgtatttcttggttttgtattttggtggattggcttggttaaccaactttgggtgaggaccaacttcttgttcctttttgggttctatgaacacgggccacgacattcttgtctcatctttgttcactggtgttctgtgaaaaactgccttatattt

SEQ ID NO: 10506 - DNA, 534 bp, Glycine max
  Clone ID: jC-gmfl02220115f09a1
ctctcttcaacgattccaaggaattctttagtttctcccttgccattctgtctcaggtggcatcggctctttcaacaatccaaacactagcacgcggcagccgttcgttgctgtctgagaacagcaactccccagttgcttctctagacaaagctgatggccttccttcttggatgaaccatgaggaccgaagggtattgaaggctatggataacaaacctgcacctaatgtcaccgtggctaaagatggcagcggagacttcaaaaccatctctgaatgtttaaatgctgtccctcaaaattttgaaggacgttatgtgatttttgttaaagaaggagtatacgatgagactgtgaccataacaaagaaaatgcaaaatataaccatgtatggtgatggatcccaaaagagcatcatcactggcaacaaaaactttagggacggtgtcaggactttcctaactgcaagttttgtggtagagggagatggattcataggcctagcaatgggattagaaacactgcaggccctga

SEQ ID NO: 10507 - DNA, 618 bp, Glycine max
  unsure (1)..(618): unsure at all n locations
  Clone ID: jC-gmfl02220115f10a1
gagagagagagagagagagagagagagaatgggagggtgggctatcgcggtgcatggtggcgctggtgtcgaccctaatctcccactcgagcgccaagaagaagcgaaacaacttctcacgcgctgtctcaatcttggaatctctgctctaaattctaatcttcccgccatagatgtcgtcgaacttgtggtgagggaattggaaacggatccgctgttcaattcgggccgtggatctgccctgacagaaaaaggaacggtggagatggaggctagcatcatggatggtccaaaacgacgatgcggcgccgtttcgggtcttaccaccgttaagaacccgatctcgcttgctcgtttggttatggacaaatccccgcattcctacctcgccttctccggcgccgaagaatttgctaggcaacagggtgtggagggttgtggacaacgagtactttatcacacctgacaacgttggcatgctcaagctggcaaaggaagcaaacacaatcctgtttgattaccgaatccaacatcggngtacgagacgtgcggatccggtgtgagagtcactgcaatgaatgactcccaatagcgtgtacgcgccccgaaacccccccc

SEQ ID NO: 10508 - DNA, 525 bp, Glycine max
  Clone ID: jC-gmfl02220115f10d1
gttgagggtctaccacaagtctttatttaagagaaagacaacaaagttaccatattattatttcacatttttttctaattcttagaaacaaggttaccattttttatctaaatcgggcaccagcagaaagaccctacactacagtggaacatggtacagaaatccaaaagttgcatcgaaacaaccatgaaggaaaataatgaagctattcccagattccgacctccatgaagccattttcagtggcacagcccctaaacatgccattgcaattgaaaccataagccacttccccagcgttggacacagcaatgagaccagccatcccttcatcgagacggtgcttgatcacaaaatccacggcttcttgaagcttcaagcctttgtattccatcaccgctgccacctcacgcgccagcgtgccacgtatgatggcctcgccttcacccgtgcacgatacgccgcacacgtcgcacgcgtaggtcccggcgcctatcagcggcgaatcaccgatgcgcccggtca

SEQ ID NO: 10509 - DNA, 433 bp, Glycine max
  unsure (1)..(433): unsure at all n locations
  Clone ID: jC-gmfl02220115f11a1
aacaaagtcacaaagagagagagagagagagatagatgctcgtcggtgttcgttccgattctccttgaccttctttttcttcttcttcttcgcttcgttatcgttcccaacattccaaaccctaaatttgttgcctcggtcttccattcccaatctccgaactccgacgcggagtggcagcagagaacaagcatgtcgtcttggctgagatctgcggtccacaaagccgtcgaggtcggcaacaaaaacaacctcactcgaaccgtcaagaactacgccgacaccgtcgttcaacacgccggccaagccgtcgccgagggcgccaaaatccttcaggatcgcattagtgctcggaattacagaagtgttgcgcagaccattaaaaggttnggaagaagctgctgtttcgtataggggacctgagagagtgcag

SEQ ID NO: 10510 - DNA, 555 bp, Glycine max
  Clone ID: jC-gmfl02220115f11d1
acagaataaagaaatcatgcttggtaatgttcacaaattcaaaggaatctgatccaaattatagcttcatcaacagccgatctatatggcttacaaatttatatgatacttgcacttaatcataaaaatacaacagcaagcattaattactcagaaataagattcaacctaactacttgctcaattctctttcaagctcatcaaattcccaatcaccaatttcctcagttgaataatcctgactaaccttcccaaactcagattccagtttagctaattcagcttcatgatccaatatctggtctgtcttaactgaaggtgattttggcagctcatccgtttctggctttgaaagctcggcaccttgagttggagcagaaactgaaggagtagcatcagactttttctaaaaggtggtgtttcagcctttgcaggggtctctatttcaagaattggtctctctatagactcaattgagttcgtaacttttcaatggcttaaacagctctttaactctctcttcatctttcctggaaattctcccctgttgagcat

SEQ ID NO: 10511 - DNA, 448 bp, Glycine max
  Clone ID: jC-gmfl02220115f12d1
gggttattatagatgatggatagactattatacattagttagatagattctaaatacctccaattttgaaatatagtcgccagtgaagcgaggccacaatgtcattgtcccctacttcagcactggtgggttaaaggggtctttgaaattggccttctcactgagatcttggaattcatccacaagattttgaagccttgcaacaaactctattaaaagggaagcaaatgttgccaaagacagagagcttgcactttcatatactttggaatcttgctcaagtaacatgttatctccataaaatgagagacgtggccatgatattttgttggacaacaagctttgagaaatgtgcaattcaggaactgaaggctctatgtttatgttaagtcttgaatcaactcctgtttcactgagggaagagatcaatgagtgtttgtgttcatga

SEQ ID NO: 10512 - DNA, 544 bp, Glycine max
  unsure (1)..(544): unsure at all n locations
  Clone ID: jC-gmfl02220115g01a1
attaagatatatattcagcttcttgtcttttccgttacctttttcccctgaaatcactgatccacaacaagaggcattcagagagcatttgttgatttggatttggaaggttccactttggttatggaagcaacttagctcccttcctctctctttattttccacattgtacaaatgaattttcagggtacttgttggtagtggtggttgacaaagatattgaagatgggaattttgagcactatagcaagcttttttggatttggaatgggaacttcaattgggctagtcattggatactatttgttcatatacttccagtcaacagatgttaaggatccagtaattcaacctttgattgagcaagatgctaaaacattacaactgttgcttccagagatacccacttggattaaaaacccagactatgatcgtcttgactggcttaataaatntatcgagtatatgtggccttatctggacagggcatttgcangactgcaagagtatagcaaagcccattattgctgagcanattccgaag

SEQ ID NO: 10513 - DNA, 557 bp, Glycine max
  unsure (1)..(557): unsure at all n locations
  Clone ID: jC-gmfl02220115g02a1
caagatcgcaatgggtgctacaggaatgctaaatggaccgtggagattgtggagaattccaatattataaggttgaagagttgttatgggaaatacttaacagcctcaaatatgccattcatattgagaggtacaggaaaaaaagtgttgcaaacattgcctactaggttaaattcttcggtggaatgggaacctattagagaaggggttcaagtgaggctaaggacacgttatggtcaatatttgcgtggtaatggagggttgccaccttggaggaacaccattacccatgatgtcccacatagaacagcaacagctaattggatttatgggatgtggatattgtaaaattttcgcccaaaaccacaggtcttataaccaagaccagggcctatacctattcccccacccattcattttttgattccaactccaacaaatctttcaccttgctcttctccttcatcatcaccattaatttcaaagatggattccctggtcaagattgatctcaggtctaacacaacatctgagtccgaagattcantagaatgttt

SEQ ID NO: 10514 - DNA, 611 bp, Glycine max
  unsure (1)..(611): unsure at all n locations
  Clone ID: jC-gmfl02220115g03a1
cacagtttaaggttttctctattcatggcatccaaacatcgaattgcagggaccaacattcagagctccccaaagagggcaagaaccatggccacgtcatccacagccattgaacccgcattgaaggaggctntttccagatatactcagtgtctcaatgacctcaatgacaaacgtgaaagagtggtcaaagcaagtcgtgatgtaacaatgaatagtaagaaagtcatatttcaagtgcacaggatgagtaaatacaataaagtggaaatacttgagaaagctgaaaaggatttagcagctgtgacagatcagtacatgtcacgactagtcaaagaattgcagggaactgatttttggaagttaagacgagcatactcacctgggatacaggagtatgttgaagctgctacattctatggtttctgtaaaagtggaactcttttgaagcttgatgagataaacaaaacattgctaccacttagtgatccatctcttgatcctctgcagataaatatccttgactatatattaggggtngcagatttgactggagaagttgatgcgtttagcataggtaggatatcagatggtgaacttgagttttgctg

SEQ ID NO: 10515 - DNA, 334 bp, Glycine max
  Clone ID: jC-gmfl02220115g04a1
cccccttcattctctctatgtgtatctttatatatacatgtggatgtaggtgtctatgtgtcgcgagcgagcctgacacaagcaaacggaaacaatatcaacaaggtgaagtggattccttactacacatggagatccaggacacattctacatatgtcatggatcaccaactttgctcatagatgaatgcattcatgccaggaagatccttcagtcatggaagagggacgtgtttcctgagagaccctcttcaacttgtgtcatctctggccattggaaaaccgcagctcccacggtcaacgtctgtgactgcattaacgacagcatctacga

SEQ ID NO: 10516 - DNA, 466 bp, Glycine max
  Clone ID: jC-gmfl02220115g05a1
cgagataactagaaacagtgtgatgaaaatgaaggtccttgttttcttcgttgctacaattttggtagcatggcaatgccatgcgtacgatatgttccctctccgaatgaacactggctatggtgcccgtactccggaggtgaaatgcgcaagttggaggcttgctgtggaagcacacaacatctttggctttgagaccattcctgaagagtgcgttgaagcaacaaaggaatacatccatggcgaacaatatagatcagactccaaaacagttaaccaacaagcttacttttatgccagagacctcgaagtccatcccaaggacacatttgtgttcagtatagatggcaccgtactctctaatattccatactacaaaaaacatggatatggggtggagaaatttaactcgaccttgtatgatgaaatgggttaacaagggggcatgcaccgcactgcccgagac

SEQ ID NO: 10517 - DNA, 506 bp, Glycine max
  unsure (1)..(506): unsure at all n locations
  Clone ID: jC-gmfl02220115g06a1
cgaaagggtcatagggtactgttgtgtttagggattcgaattttgattatcgaatcgcaaaattctgaatcaatcaatcagtaattagagccattaacgactgcaatggtctgcgagaagtgtgagaagaaattatcgaaggtgatagtaccagacaaatggaaagaaggggccagcaatactaccgagggtggtggccgcaagatcaacgagaacaagcttctctccaagaaaaacagatggaccccttacggaaacactaagtgcaccatttgcaagcagcaagtgcaccagaatgctaagtactgccacacctgtgcttactctaaaggagtttgtgcaatgtgtggaaagcaagttcttgataccaagttttacaaacaaagcaatgtgtagtggatacttgtgttgtattgcgtgctgtatcttcttttagatgcataatagcattacctttctttctatttgtctagntgatcctattgctaaacaatgtactgaagctg

SEQ ID NO: 10518 - DNA, 501 bp, Glycine max
  unsure (1)..(501): unsure at all n locations
  Clone ID: jC-gmfl02220115g07a1
ataaccttttctctccggttaccagaaccgtaagttgctgaacatgaacccgcaatcgccggttcgggcggaaccggagcctccggttccgacgttctccccacggttcgcgctcacgtccggttcgcagcgganaatcgcgatcgcggtcgatctgagcgacgaaagcgcctacgcggtgcgctgggcggtgcagaactacctgcgaccgggcgacgccgtgatcctcctgcacgtgcgtcccacgagcgttctctacggcgcggactggggctccgtggatctgagcgcggcggaggacgccgatgacggcggaggaggcgacgaggagtcgcggcggaagctggaggacgacttcgacaacttcacgtcgacgaaagcgagcgacctggctcatccgctggtggaggcgcagataccgttcaagatccatattgtgaaggaccacgacatgaagganaggctgtgcttggaggtggagcggctcgggctcagcgccgt

SEQ ID NO: 10519 - DNA, 502 bp, Glycine max
  unsure (1)..(502): unsure at all n locations
  Clone ID: jC-gmfl02220115g08a1
cctgcatatccctcacactttcttcccttttccccctctcttcatcttttgcttccttcgtatagggataagagagcagcaagtaatgatggatgcgctgataaaggtgcagttcaacgcaccaaaaccataaaaagcgcttctttcgtcttatggcatgtctgaggaggaagaagcactgcgtcaaaggccaacatcgttgatttctttcccaccccatgacaattcttcgcttcttctgccccttctttatactcttcttcactccaatagcttctgtgcaagcgttcaccggaacctatggtataaattatggtaggattgcaaataatattccttcacccgatgaagttgttactcttctcagagcagcananataagaatgttagaatctacgatgctgatcacagtgttctcaaggcatttagtgggactgggctttgaangtagtgggggcttccaatgccagctgcaagacatgagttcgaatccagaccatgc

SEQ ID NO: 10520 - DNA, 478 bp, Glycine max
  Clone ID: jC-gmfl02220115g08d1
agtaaaaactgaaaaattctaatactcttcgaaggaaaatcggttctcaagtgaaataattacacatttgctgaaacatcaacatttctagatattgctttatgaaatatgacaatcaatggtataatttgatctatagtgagacatgaagtggagccaagtcaaactcatttcattgccaggaactggtttgccgagcaggctgatatcataaggatcactaactccagaaaatcagcggtgtcaaagaagataaaaagaataccatcatgtatgactgggacaacccttgagtattgatattcttaagagacaaaagagatgaatgtccagcattaagtccgtgaaagccaatgtcatatgatatactcccatcagccttgaacagtccatagttcttctcagatgaatgcccaagcttctcgttctcgttgaataatgcaaaaatgtatgccttcacaacatttttaggtctatg

SEQ ID NO: 10521 - DNA, 510 bp, Glycine max
  unsure (1)..(510): unsure at all n locations
  Clone ID: jC-gmfl02220115g09a1
gtttccttttttccatttcctccctttctcccacaccatctctttccgcattttcccaattaggatgtgtaattgagacagaagaagaagaagaagaagaagaagaagacgaagaagaagaagaaatttgagggggtgtgtgatcgggtcctcaggtgaagatctgaggctgttggtgtctcttttcttttctccgagttccaaagatgagcgcttctaggttcatcaagtgcgtcactgttggggatggtgctgtgggcaaaacctgcttgcttatttcctacaccagcaacactttccccaccgattatgtgccgactgtctttgacaatttcagtgcaaatgtggttgtcaatgggagcattgtgaatctgggtttgtgggatactgctggtaatgctgcgtgattattgtctctgtgatgttggagcttggaagttntctctggatttattggggtatttgtgggacaggacaagaggattancacagatttagacctttgagtta

SEQ ID NO: 10522 - DNA, 260 bp, Glycine max
  Clone ID: jC-gmfl02220115g09d1
attctccccattattattaaaaataataccatcactaatctcaacaccaaactttcccgtggcttcttacccacccccaacgcaaccatcccataaaaaaaggggctctccacatatttccaatcccaaaaaaaaacccccctaaatatatcaaaatcccaactgttccccctctttcctctcgacaaaaccttcttacttattctctacacccaccaccacattccccaccttttttatgcccccccccttcaacaaaa

SEQ ID NO: 10523 - DNA, 319 bp, Glycine max
  Clone ID: jC-gmfl02220115g10a1
ctccattcaaacagtggtaccttcatcactatggtgttgagattggtaggaagaagaagacagctgccaagaaggaaactgcagaggagggtgctgctgctgttgctgtggaagaagccaaaaagagtaatcatctgcagagaaaattggagaagcgccagaaagatcgtaagcttgatgctcacattgaggagcagtttggtggtgggcgtttgcttgcttgcatttcctctcggcctggtcaatgtggcagagctgacggctacattttggaaggtaggagttggagttttacatgaaaaactccagaaaaagaagg

SEQ ID NO: 10524 - DNA, 546 bp, Glycine max
  Clone ID: jC-gmfl02220115g10d1
agaggattgcattacattcaattaataaaaattgtaactcgtcggtggcaaaaaaacagttcaaaacaaaattaagatgtcaatttgcaaaggactaacaagatagtttgcactaaaagatgtcatgtggcacaaaacatcaccttaaattgtaccaacaacatataaaagcaactaaagccatataaaaatctgggaaacactaaaatcaagcagcaccctttcccttctttttctggagttttttcatgtaaaactccaactccttaccttccaaaatgtagccgtcagctctgccacattgaccaggccgagaggaaatgcaagcaagcaaacgcccaccaccaaactgctcctcaatgtgagcatcaagcttacgatctttctggcgcttctccaattttctctgcagatgattactctttttggcttcttccacagcaacagcagcagcaccctcctctgcagtttccttcttggcagctgtcttcttcttcctaccaatctcaacaccatagtgctgaaggtaccactgtttgaatggag

SEQ ID NO: 10525 - DNA, 248 bp, Glycine max
  Clone ID: jC-gmfl02220115g11a1
ggagaagagagaaagcaagctgaatggaggtgttgcagttgctggcttccgattttaccctccgccattccctttccaagcccaccgtctcccttcctcccactcactcactctccgtcgtcgtgttccggcggcggagatcaccctgcggcgggcggtggtgggctccgcgagcatgcgcggtggaggtgtcggagtcggagggagggaagatggtgatggagctggtgggagccttcacgagttga

SEQ ID NO: 10526 - DNA, 441 bp, Glycine max
  Clone ID: jC-gmfl02220115g11d1
agaaataagatattgcaaatttctttatctctggaatttctggcattaattaatttacatggaaattacatcacttacgcgtggctctagcttaatgatcatatcacaagtggagtaaattgagggggttttgttctgtcattcgtttcaaatggatgaagcactagctcgcaagcctgttgccgaactccttactataaacttgaattaaaccactctcatttgccatatgaagcttctcatccaataatttcttgtattgatcatctcggacctctaaattacgcaccaactcaacctgttcttggaacatatggaattcgtcagaactgagggagccatcactatttgagtcaaggagctgcatcatttctcgggcattttctcctggtgcaccaagctcctccatcacttttgtaagttcctcaatgctaattttac

SEQ ID NO: 10527 - DNA, 398 bp, Glycine max
  Clone ID: jC-gmfl02220115g12d1
catctcaattatttattttgttgtatttgatattatatttgcttccaacttgctgaggataactcttccgttcaccccggggggggggggggggggaacaaaatggcacaaaaaccacgggggggaaaaaaaggggaacaaacgagaccccggggcaaaaaaaaaagagggggcccaatgaaaaaaaagggggggcgcctttattgccccccccccggggggggggggccccccacctttttaaaaaaaaaaaaaaaaacaacccgaatcggggggcaaaaaaaaaaaaaaaaagtcccaaaaaaaaaaggggcccccaggagagggggttaaaaatggagggaaccacaaccccgggaaaaaaagaaaggggggtgttaatggccccccccccaaaa

SEQ ID NO: 10528 - DNA, 492 bp, Glycine max
  unsure (1)..(492): unsure at all n locations
  Clone ID: jC-gmfl02220115h01a1
aatgggttcatgaacgcttccagacaagagcgaacccatctgatttgacaaatctggagaatagtttgatgaatcattcattgaatacaacatcttcaaagtattcaaaaactgttgtctatgttggacgtgaaggagaaggcatcattggtgcgattgccatatctgacactgtgcgtgaagatgctgaatctactataacaaggctcaagcagaaggggattaaaacagtcctcttgtcaggagacagggaagaggcagttgcaactgtagcagatacagttggaattgaaaatgattttgtcaaagcatctttgtctccacaacagaaatctggatttatttcctctctgaaagctgctggacatcatgttgcaatggtaggtgatgggataaatgatgcaccctcttggctgtggctgatgctgggattgctctgcagaatgaagctcangagaatgctgcctcggatgcagcatctatcatacttct

SEQ ID NO: 10529 - DNA, 389 bp, Glycine max
  Clone ID: jC-gmfl02220115h02a1
atagcctccttttcttctctagcctgatctcgattaaattgaacatttattattgtttatatgataagatttgaaatgatatgaaatccaatccattacccactctattctatagataattgcttgagctgtgcaaaattgattttttgtacagaacgtttacttgaagctgcatcaattgaggagggattcttcatctttggattcgcttttggtgcctcggagtcagagctgcaaggaaagtggagatgctgggatgaaagctgaattttgtgggaaatggctactttagttgaaccccccaacagaattaagcctaaggggaagcattattatacaatatggcaaacattgtttgagattgatccgaagtacgttccaatcaagcc

SEQ ID NO: 10530 - DNA, 366 bp, Glycine max
  Clone ID: jC-gmfl02220115h03a1
cactatgggaatacaaacattgccttttcaccaacacgatctacatacacagggtcggggagctccaattgaaactccctcaggaccaacaaagctttaatcccacaatacgacgcggtgattacaaacattaaggaagaactccggcccaagcctggaccatccacatcaaacctcgccgaggacgcagaggagcacgacaaaaaccccgacgacaccgacaagggcaagcggcaagcagaacaaactgtatccccggccgcggccggtgcaaccaaatgggccgaggacagctggaagaccaaaaaagcgctgcagcggaccgaagaccccaaccaggaggagctagaggtcggtctccgcacc

SEQ ID NO: 10531 - DNA, 238 bp, Glycine max
  Clone ID: jC-gmfl02220115h04a1
ccctttgtgactccacacatttccttttaccaactcatttcattcacaaggtcaagttcttcacttccaactccctcattccccccaaatctttaataccacaataccaccccctcatttccaacatcaggccacggctccggcccaagcctggcccatccccttccatcctcgccggccacgccgcccagcccgccaaaaaccccgtagttaccctacaagcccaagcccgcagccc

SEQ ID NO: 10532 - DNA, 490 bp, Glycine max
  Clone ID: jC-gmfl02220115h05a1
ccgaaagcgaagaagaggaagaggaagctgaggaacaacaagaggagcggccaccagaaaccctagaagagcaacaggatccagaaaccctggcggctgcaaaccacgccgaagtgaacggcggcaatgaaggaaacaacgaagaagaggaagaggaggatctcactctcgaagaagagcccgtggagaagcttctggaaccgttcacaaaggagcagctccactctctcgtcacgcaggccgtggatatgtttcccgaattcgtcgatagcgtgcgccggcttgctgacgtggaccctgcgcacaggaaaatcttcgtccatggccttggctgggacgccactgccgatactctaaccgccgtgttcgggaaatacggcgagatcgaggattgcaaggccgtcaccgacaaggtctccgggaaatcaaagggttacgcctttatcctcttcaagcacagggacgatgctcgcaaggcgctgaaacaccc

SEQ ID NO: 10533 - DNA, 437 bp, Glycine max
  Clone ID: jC-gmfl02220115h06a1
aacttgaggtgttgagtaacggaaagtacaagagtgttctgcatagaagcttggtgaataaggaacgaaatcgcatgtcatgggcagtgtttgttgcgcctccacatcaggcagtgatagggcctcttccttctctcatcaatgatcagaacccacccaagttttcaacaaaaacctatgctgagtatcgttatcgcaaattcaataagctttcccaataagggaccaaaacatcatcacttgtgttgtcacggtgaaataaatttgtaagccatgatggaggataacaaagtaggagctaactctccattttggttaacaagtgtagctaatttctattatgcttttgaagtaaacagggctttgtccccttggcatttggtacatgccatattccttaagaatacaataaggctatattcctgttctacttcatt

SEQ ID NO: 10534 - DNA, 450 bp, Glycine max
  Clone ID: jC-gmfl02220115h07a1
aaatctttgttttgtaacaacaaacagatctataatgtaaagggaagggaggttcacattcacattacaagcaacaacttaacgcttaacaacagcactctccctaatccttctgtgtatgcaaaatgagaccatgcaaatgcaaatgcaatgttctctctgctctcattcttcttgtcacattcctttttattgcttcttccgtccactgtgaagacccatatcggtacctcacttggaaggtcacctatggtgacatctatcctcttggtgtcaagcaacaagggatcttaattaatgggcagtttccagggcctcaaatagatgctgttacaaatgacaacttgattatcaatgtctataactacctcagagaaccgttcctcatttcatggaatggcttacagcataggaggaactcatggcaggatggagtgtatggcacaaact

SEQ ID NO: 10535 - DNA, 384 bp, Glycine max
  Clone ID: jC-gmfl02220115h08a1
cattcaccaaacttcttcactggtgcaattctctgtttgatgagaactgaggttcatccgcaatgccacttttaaggagaaaacctttttccttggccgagcctcctgaggatttgaagccagatgagcctgtttaccaaattcgatttacaaaagaaatctttcaagattatcatgattatttgaagcgattgaatctataccgccagagggtttggatgtgtaaagtcactggaaaaactggcttgacatatgaagaggctttggtgtctgaacaacttgctaccgagaaagttcaacagtttcctaaagaattaatgactattgctttaaggattattcaatacaggatgctccctttgaaggatcttgctgattctattg

SEQ ID NO: 10536 - DNA, 576 bp, Glycine max
  unsure (1)..(576): unsure at all n locations
  Clone ID: jC-gmfl02220115h08d1
aaaacggcattcaatttttgcagtttcagatattattgatgaatggaataagtaatgtacaaaatttctgaaacaagcatacacgcatgcttgtccatcatccaaaaatggatcggaaaactgcttaatctctattacagtcaaggcaatgaatcaaactaagctcctttaaaagttccaagttccattcgtttgaaggtaactttactgaatttcccctagcaccacctattcttctttatgggacttgtttttatatctgaggcaagcatcggaggggttctgccctggttgagctctaacacgagtagacctacgaagaacagactcatctacaaacctgtgcatcaaatccttagatgttttctggagttctgagcatattgtactataatatttttctagctgctttcgcagtaccctttcccgctcacccttgcaattcagtgaactcatcaatgcatcaagctcttccttactgctgtagtatccccacttcttggagtcacagctttcaacaaatatcctcccataaacgacagaaccaccaataatattgtnatctctgtccttacc

SEQ ID NO: 10537 - DNA, 509 bp, Glycine max
  unsure (1)..(509): unsure at all n locations
  Clone ID: jC-gmfl02220115h09a1
cttcagctctccatgcagctgttaattttggacaatacccttatggtggttttatcctaaaccgtccaactcttagcaggagatggattccagaagaaggaactccagaatatgacgagatgacaaagaatcctcaaaaggcttatttgagaacaatcacgccaaagtttcaggctcttgttgatctttcagtgatagagatattgtcaagacatgcttctgatgaggtctaccttggacagagggacaatccaaattggacctctaatccaaaggcaatagaagcctttaaaaagtttggaaaaaagctagcagagattgagacaaaaatctcagaaagaaaccatgatccaaatcttagaaatcgaaccgggccggctcaattgccctacactgtgcttcttcctaccagtggaacagggttgactnttagaggaattcccacagcatctctatctaatgagtgtggctcaatcgtattgtacttttacttttgaatatctcatata

SEQ ID NO: 10538 - DNA, 118 bp, Glycine max
  Clone ID: jC-gmfl02220115h09d1
gctaaagagcttatttattaattagcattctgaacatcacccatgttactaaatcttaccctaaatacaatattactcaaacaaacacaattactaaacatcaccctaaaataaacat

SEQ ID NO: 10539 - DNA, 574 bp, Glycine max
  unsure (1)..(574): unsure at all n locations
  Clone ID: jC-gmfl02220115h10a1
gcagagaatgcatcgcttcatcgtcctcaccattctcctctccctcaccctcgcagatggaggttccattggagttaactacggtcgaatagcgaacaaccttccctccgcggttaaggtcgttcacctcctcaaatcgcaaggactgacacgtgtcaaagtctacgacaccgacccagcagtgctccgggcactatccggatccggaatcagagtgacggttgatcttccaaaccagcaactcttcgcagcagccaaagctccctcctttgcatcctcatgggtcgaaaggaacgtcgccgcatactacccacacacccaaatcgaagccattgcggtcggcaacgaggttttcgtggacccacacaacaccaccaagttcctcgtacccgccatgaagaacatccaaaaagccctcaccaaacacaacctcgacaaagacattaagggtttcctcccccattgcactttccgcactagcanactcttacccttccttcgccgggtcgttccgacccgaacttgntgaaacccgtttcaagcccatgctagacttnctncgcgaaaccgggtc

SEQ ID NO: 10540 - DNA, 480 bp, Glycine max
  Clone ID: jC-gmfl02220115h10d1
gggaagaaaaagggacttctctggggctattggcttaaaatatgacgaaacctgaagaacaactatgaccacttcaggaatcataaagataaagtctactgcaaagtaaaaaaaaaaaaaaaaacttaaatacaaattactttagtcccaaccggtaaattaatttagctaccccattcccagttcccaccaactggaagaaaagtcaacatttattaactaacataatccataaccccaaaaaattttaaaactaatataaccaccaagaaggaatttatcttctcttcctagtttcacacttccagacaccttataacatactttacacaaagcaaaatcagccagacgcatattctcatgcgggaatatctctgtcctcttcagcttttagtatccagtaggaaactcgcaggtaccatactttgggtcctgcgggacaacgtacgacgtacccccgaaataggagttaccaccctt

SEQ ID NO: 10541 - DNA, 452 bp, Glycine max
  Clone ID: jC-gmfl02220115h11d1
aagaaaaaaagtacctttcttattaaagatgttttaatacagactaaacccaaaaaactggctaataatgatagcaaatccgagggctattgcaataagggaggaaacccaagtgagtttctcagttatcctaggtactctatccttcagtgcctggctacacgaacctataaacacggtataacttcccattgcaattacagttccaattaagaacatgatgagaaacgcagcaccagccaaacgcgaaggcaaagcaagggcaggcaaaaccatcatcaatgcatctggttgcaggccatgaactatccctgttgcaaaagtagcaaaacctatcttctttttgcccactgttggattatcaagcgattcatacacgttgacatcacattcaccactttctaaagcaacaattggggcatgtacttctgatgcttctctaattcccatag

SEQ ID NO: 10542 - DNA, 552 bp, Glycine max
  Clone ID: jC-gmfl02220115h12d1
gaaaataaggatgtttgtattactaatgaaagaatgagtcgttgattgaagcaataacggaagacgcgtttgtgtggctatatgtcaatggatagaataaaaatgtttagtgaacaaaaagaaaaagaaagatgagaatttgatatcaagcctgttacaagaattaatcatcccagagctgatcttgtcatctcatatgccaagaagcatgctgcatttgcaggaacactacgggccattgcaggaccaaaacccttatacaagcctttgaatccttctgtagctcgaatctttctgaatgcatcaaatgaaccagaaaatttcgggtttctgtgatcatctacttgaatcacactcttaataacatcagttgggtaaaccaagaaccagaaggaagctccagccaagcctccagcaacaatcagagaacctctacttaggccagaagtatcagtacctcctgcaaacttttgctttaatgcttcatatacaccaaacattatagcatttccaggtatctcacgtcccatagtgggaaccaagcccttgaaa

SEQ ID NO: 10543 - DNA, 344 bp, Glycine max
  Clone ID: jC-gmfl02220125a02a1
gagatatatatacgtggtaccctagagtgccattctgtagtttatttctgctcaccaaggcttatcacatcacaatttgtgcattgcctcgtgtcctttttcttctttgcttgccaaaaatcttacacacacaggtatctagcaaatgggttctcaccagcaagaaccatggctattggagaatgggaaaccgagggtgttgaccaaggagaataggcatggccgttctgcacacagcatgtcctccacgtctttgcgcaagaagtctagccgaactcttgtctccaagcttccatgtgccacactcagaaacatccttttaaatttgcaagaggttattcttg

SEQ ID NO: 10544 - DNA, 340 bp, Glycine max
  Clone ID: jC-gmfl02220125a02d1
aaaaaggaacaagcattaatagaatttttatttctcacacaataaatacaagagattctgcaaactgaaaaagggatttcttactaaagcaaacttaaacaagaacaacttccactcatttggcatgtaccgtagtaaaacaggatcaaaagccattttttgatagaacacacgtatgtattatattgaacattttgcacagtggttcatttctcacagctattgcaacttaaaatacttgcaaagcttctgcaaattccaaactttcttttactcccttctttatggatcttacaaagtgatcagatcatgaaaccatgatcaatccattgaatttgaa

SEQ ID NO: 10545 - DNA, 386 bp, Glycine max
  Clone ID: jC-gmfl02220125a03a1
gtggggattctcgctatcgacatctacttccctcccacctgtattcagcaggaattgctggaggctcatgatggtgccagtaaagggaaatatactattggacttggtcaagattgcatggcgttttgtacagaagtagaagatgtcatctcgatgagtttgacagtagtttcttcccttcttgaaaagtatgcgattgatcctaaacaaattggtcgtctggaagtaggcagtgagactgtgattgacaaaagcaaatccatcaaaactttcatcatgcaaatctttgagaaatatggaaataccgatattgaggggcgttgattcaactaatgcatgctatggaggaactgctgctttgttcaattgtgtcattgggtggagag

SEQ ID NO: 10546 - DNA, 342 bp, Glycine max
  Clone ID: jC-gmfl02220125a03d1
ggtaacgggaaactgggacccccttcgttaacaaaataccgggtcctcaaacttataacgtccaatccttcacaggggtatacattttcaagagcttaattgcttgaaacaattcttgggggaactatttcaacctgaagagtttcgggaaatttttgaactaacaacccctggctcctacggatttcataattgttcgtttggcttcccttaagaagaaactaatccaaacgagaacaaggttttaaatgctaagcccagttgaatttcaggtttccaggtattacacgttttgtaagtcaaacgtctgtgaccattggtgacctggccattttcgctggg

SEQ ID NO: 10547 - DNA, 426 bp, Glycine max
  Clone ID: jC-gmfl02220125a04a1
ccaggcggcgccgtcagaatcgcttccggcgtcgagtttgggcgaattgcccgagagttgtgtcgctcagatcatgacctacatggatccgccccagatttgcaagctcgcaaccctcaatcgcgcttttcgcggcgcttcctccgccgatttcgtctgggagtccaagctgccgcccaattacgacgtccttctccgccgcatcttcgccgatttcccctcccatttgggcaagagagggatttacgccaggctttgcaggctcaattctctcgacgacggcaccaagaaagtttggctggatcgaggcatgggtaaactgtgtttgttgcgtttcggccaagggactctccataacagggattgatgataggagaaactggaaccatatccccactgacgaatctagatcagcagtgttgcata

SEQ ID NO: 10548 - DNA, 377 bp, Glycine max
  Clone ID: jC-gmfl02220125a04d1
cttcaaatatgatccacgtttccttgtcatcaaatggtctttatgggtccatctgccacaagcatataatatacttcaccatacaaggttatgatagaatgtcacagtcctccagactaatgaaacacatattcatacatcgactgcttgcttctacaaaattctaaaccttaaagaaccatattaaaaactcgattctctattcctcctgatgcggcctacgctctatacatataaatactagtatacattcatatgtcattcttagcaaaggttaacagtagtttaaaaatgctttaacctttctgaattcacttggatatatcagcacagaatctaaacagagaccccctttagtatgtgtgcaaacaatttga

SEQ ID NO: 10549 - DNA, 440 bp, Glycine max
  unsure (1)..(440): unsure at all n locations
  Clone ID: jC-gmfl02220125a05a1
cgccaaatcagtccatgatttcaccgttaaagatgccaagggaaatgatattaaccttggtgactacaaaggaaaggtccttatcattgtcaatgttgcctcacaatgtggcttgactaattcaaattacactgagctcagtcagttgtatgagaaatacaaacagaaaggtctggaaattctggcgttcccatgcaatcagtttggggcacaggagcctggatctaatgaacagatacaagagtttgtttgtactcgcttcaaggctgagtttcccgtttttgacaaggttgatgtgaatggtgacaaggctgctccactgtacaaatatctaaaatcaagcaaaggtggactccttgnggatggcatcaaatggaacttcgccaaagtccttgttgataaagaggggaactgtgcctgatcgctatgcacccacaact

SEQ ID NO: 10550 - DNA, 407 bp, Glycine max
  Clone ID: jC-gmfl02220125a05d1
aaaggaaccttaactttacattcccccaattataaggccccaattttaaggctctgaactcaaggtgaaagctccaaaaaccactggtcagggccaaataagggccccaggaaaatgccacaccattgggagaacattttttattcaaaggttatttatggggaactccaaacattcaaaacttaaggcatccaaaaacttcaacaaggccttttaaatgctcaaaggaaaagttgggggggcatagggataaaaaaaattcccctttttataaacaaggaacttggggaaattccgtttgaagccctccccaagggggccccctttggtggaatttagaaatttgccccggggacacaccttgtgccctttcaaattaaccttggtaaaaacgggaaacccaccct

SEQ ID NO: 10551 - DNA, 398 bp, Glycine max
  Clone ID: jC-gmfl02220125a06a1
acagaacagagcaacactgaacaatggcgcaaccttcctcctcctcgaagcctgttgtccctctcctgaaggacgagctggacatcgtgatcccgacaatccgaaacctcgacttcctcgagatgtggcggcccttcttcgaaccttaccacctcatcatcgtgcaggacggagaccccaacaggaccatcaatgtccccgaaggcttcgattatgaactctacaaccgcaacgacatcaatcgcatcctcggacccaaagcctcctgcatctcgtttaaggattcctgcgtgtcgctgctttggttacatggtctccaagaagaagtacatctacaccatcgatgacgactgcttcggtgtaaacgatccttctggaaaggatatcaatgcacttga

SEQ ID NO: 10552 - DNA, 330 bp, Glycine max
  Clone ID: jC-gmfl02220125a06d1
aaaaaaacccccccccggggccgggtaaaatttctaaaatccccatccccctgtggaaaaaaaatttcccgaaaaccctttttttgcaaaagggtttcatataaaagggaatcagggtcgccccaagctccaaaaatgggccctaaaaccggccctttaaaaaaaattggggacccaatagggtaatcagctaaaaccgcccagggagaaaccgccccaatggaaaacccaaagcccccacccaaaaggggacccttggcatcaacggccccctggggtgggcttaagggacccctttcaaagggggtgcagcaaaagcccccccaagct

SEQ ID NO: 10553 - DNA, 357 bp, Glycine max
  Clone ID: jC-gmfl02220125a07a1
cgaaggccagcattgttgatgcggcggtggaagctatgctcgcagcacattattccctttcctctctctgtcaaatattccatttcttcttcacgaaattaaaaagcctgaaaactgaccagatccttttcaaacactcttagtcctacgtcgtaccaaacacaaactgaaacaataaccaacgacaacaacgaaatctgcaatggcccacttaatcatacaaccggaatcctcctccgattcgttcttccccggtgggtctcttccttcaccctcacacgcttccttcatccttcgcttccttcattccttcagaccatgtaacagtatcatgttttttttggaggcccaaacaag

SEQ ID NO: 10554 - DNA, 527 bp, Glycine max
  Clone ID: jC-gmfl02220125a08a1
caataacaacaccatcaacaaccccttcaagccggcctaaaccccattatccaaaactttttcttttttctttccttcaacactctctattggatcatcacatattcaatttcattctcttcaaaaattccccttcaaaaaaatttacaattaaaaaaaagtgctctttttgcgaattttgagccatttgccaccgacagatttcgatcttctccgtgccaaagctgtaatcttttcgaattttggcgaggtgggtcgatctgatttcgctcgaataattgcgggttcgattttgatctgaaaaaggaaaagagaaaaaaagattgggttatttctgattcaagattttgtccttttttgaaatggtctatttccatagctcaatctctctctgcacgttcggtgatccatcatctttcatggcgaattcaatttgttctgcggatttcggttcgaaatcgagacagatcaatcacctttcagagaatcggagaacccctagttcatcatcatcatcatcatcatca

SEQ ID NO: 10555 - DNA, 524 bp, Glycine max
  Clone ID: jC-gmfl02220125a08d1
aaattaaaataaaaatgttctttttttatatttccaggtataaccaactaaactgtgtatggcccatagttccttacaacttattgccaaggggcttattcaaagacattctaatttcctactagatcaatgaacataggacaagaagtacaaattttctatttgatccaattaccatccctttccttaattccatccaataactcaaaagggtgtcctctcctgtgtcctactcggctcgaacaggattgctgctacttcttgttgatctttcgaagatgcttccttggtcctggaacctctaacctaccaacagaacatccacacctcgcccggagcacgagcacagcccttccatttggtggtgccatcttcttgagctcagcctccagctccctatggggatcacgaggcaattcaaagagacccttcttcgttccaccaccaccatctatcgctacattcgacgacgcagaagccatattcttcacacaatgctcagtctgcaactgaatgtcaaactc

SEQ ID NO: 10556 - DNA, 361 bp, Glycine max
  Clone ID: jC-gmfl02220125a09a1
gaaaatgggcaaacacgtattgaattcctttcgtcccccagcggttttcttgttattcttcattgtcttttccgttgtttcctgtgatgaagcttccaagaccttcatctttcgcgtggattcccaatccaagcccaccatcttccccacccattatcactggtacacctccgagttcgcccaagaaaccagcatcctccacgtatacgacaccgttttccacggcttctacgcggtgctcacgcaccaacaagtcgcgtccataagccagcacccctacgtcctcgccgtcttcgaagaccgtcggcgccagctccacaccacgcgcttcccgcagttcctcggccttcgcaccagcgcg

SEQ ID NO: 10557 - DNA, 664 bp, Glycine max
  unsure (1)..(664): unsure at all n locations
  Clone ID: jC-gmfl02220125a09d1
tgactagataagcctgngtatatcatatgccgagttattacgtgggacgcccagcttactaatctgcggattcggttcgagattttttttcaaatcaaacgtggttaaaatgaaataatgacggctgaacatggatggtacaaattacttctataatcttatcgagcttagatagaccactaacaagtctataaacacacggtgaagctaaattaaacccaagaagaagaaaaacttattaaaaaaagtacatcaacggattacacctccaaacttggtcacttaaacaaaaatctaaaaacgaaaaggcaagactaaatacaaaatatctgtgtctcagttgtcttttatactagccgtggcaacctacaggggtgccacccacttacgtcacgagtcacgagccgcatggatcaaaacgacatgaccgatgcctggctctatataacggatctatttgagtcaccacagtggggctccgaaccacgtgcttcccatccgtacacgtcagcgacccgaacaccgccccggacggacccatcttcagcatccgggtgtgccgcgccagcggcaccacatagctccgcttcttcaccggctccgagaacacgagcctagacggcttcaccgtcacgctgacaccactcgncgggcgccttcacgc

SEQ ID NO: 10558 - DNA, 553 bp, Glycine max
  unsure (1)..(553): unsure at all n locations
  Clone ID: jC-gmfl02220125a10a1
gcaattgcaaccaaacagtgtctcatgatactgtttgttctgatgccccaccgtcgaagccctcctccgccactcgccgccatcgtagctctcccttctcacaccgtggaatcaaatcacgatgtcgagcccagattctcgatcattcagttggcactacacggaactcgatgacagagacctcgagatccgaggtaggactctgttttttgtcatcgtactcttctccattattctcctcgtcactgttctcttcatctacacgcgctgggtttgccgctaccagggacgcctncccaccaccgcgttcaccgccgcagccgcccacgcgccgccgctcgcgcagcctcagggaatggacccagcttccatcaagaaattgcccataatcctccaccacgcgccgtcggaccgcgaggaaagcgcgtgggacgaaacggagtgctgcatctgcctcggcgagttcagagacggcgagaagtgaaggtttctccggcgtgtgaccactatttccactgtgattgtgttgacaagtggctcactcatcactcta

SEQ ID NO: 10559 - DNA, 531 bp, Glycine max
  Clone ID: jC-gmfl02220125a10d1
tgcaatgatagctgagtactcttgccgaattattacctgggacgaccatgctcactaatctgcggacgccctttgagattttttttttttttttttttttttttaatcgtaatatggaactccttccatattgatattttatagcaaaatatattaaagaagctgattgggcagtacctaaggcaacgagcaagcagctccgtaacttaagagcacccattatctttttgggggctcaatctctaataaaaaaaatcttgattaaatccaatcattgaacctaagaagcaggaccacatatccaatttgcagaccaaacacagggatgacccaaaagagctacggctttgaggacctttatccaacatgtggcgttgaggaaaattatatgacctttccgaaccccaagtcgtctatcattcaacgggggaaccttatataatgtaacactatcacgggcatactgcacattgtgtccctactttgccatgtgctactggctaaaaatattcttcacaacaacccaaacac

SEQ ID NO: 10560 - DNA, 415 bp, Glycine max
  Clone ID: jC-gmfl02220125a11a1
cacaggtggttatttgaagatgaagatgtcggtactgatggcgtggatggttcatatgaacacgctgtgattggattatggagtggcattgcttggttggttggagtgactgtgttcattgctgtgttgtctgaatatgtggtggatacactcgaggatgcatcagattcctggtgtttgtctgcgagcttcctcagcatctgcttgatggcgactgttggcaatgcctgctggcatgcaggggcaattatattcgccttcctgaacaggctggtcatgtcattggtgtgtctgcattctgttcagctactcatactgtcatgtcggtggtcccattatgtgtcatcgctgcttgtataatggctattcatatggacctgagcttcaacctcttatagacaggttccctcgcttt

SEQ ID NO: 10561 - DNA, 456 bp, Glycine max
  Clone ID: jC-gmfl02220125a11d1
ataaaattaaaatttataaaacttgtatttgccacgagacctagtacaatatataggaacacaattaatacaacagattccgcaaactgaaaaagggattcttactaaagcaaactcaaacatgaacaacttgcactcattgggcatctaccgtagtaacacaagatcaaaagcagcttctctgatagaacacacgtacgtatgactcaacatggttcacagtagtggatcatttgtaacagctagctattgcaacttaaaataattgcactgcttctgcaaagagctaactttttttcccccccttgtttatggatacgacaatgggatcagaatgaaacaataaccaatccattgaatgtgaatctgattgcgggtttggatcgataccaccattcttgatctcacgaaaggacaagaaatcgggcaatgcctactaattaagcgcttaaaact

SEQ ID NO: 10562 - DNA, 495 bp, Glycine max
  Clone ID: jC-gmfl02220125a12a1
cacagggagttatttgaagaagaagatgacggtaaagatggcgaggatggttcagaagaacaagctgtgattggattatggagtggcattgcttggttggttggaatgactgtattcattgctgtgttgtctgaatatgtggtggatacaattgaggatgcatcagattcatggggtttgtctgtgagcttcctaagcataatcttgctgccgatagttggcaatgcagctgaacatgcaggagcaattatatttgccttcaagaacaagctggacatctcattgggtgttgcattaggttcagcaactcagattgccatgtttgtggtcccattatgtgtaatcgttgcttggataatgggtatcaatatggacatgaacttcaacctcttagagacaggttcccttgctttggcaataatagtcacaggcttcactttacaggatggaacttctcactacatgaaaggccttgttctcctgctgtgctacatt

SEQ ID NO: 10563 - DNA, 396 bp, Glycine max
  Clone ID: jC-gmfl02220125a12d1
ataaaattaaaatttataaaaagtttatttcccacgaggcctagtacaatatatagtaacacagtatattcaagagattctgctgactgaaaaagggatgcttactaaagcacactcatacaagaacaacttgcactcatttggcatctaccgtagtaacacaagatcaaaagcagcttctctgatagaacacacgtacgtttgattcaacatctttgacagtagctggccatttctaacagctagctatggcaacttaaaactattgcaatgcttctgcaaagtgctaacttcactttccccccttcgttatggatatgacaatgtgagcataatgaaacaatcaccaattcagtgaatgagaatccgaatttgggtttggatcgataccaccat

SEQ ID NO: 10564 - DNA, 218 bp, Glycine max
  Clone ID: jC-gmfl02220125b01a1
cagagagagtgagagagaaagagcttagcttaggaatggaagcagagaagcatgaagcagcattggcagtggcctcagtctccctctctctccccagagttttgcccttcttccaacccaccacccctcagccaaccaagctcaaagtcccaacccaggcctcattcctcacacacctttctctctccactcctttcaaaaccttctttaaatccacc

SEQ ID NO: 10565 - DNA, 550 bp, Glycine max
  Clone ID: jC-gmfl02220125b01d1
cgagaaaattttgtaaagcttccatattgaaataatgtatctgtcagttacaacagaacttcagaaggggaaccaaatcttgttcatccagcaccctactgccatgactgcgtagggaaccaacccataccctgaaacaaacttccttatgcccactagaacttctagtttaagcaaatgcaccagcacatgcagtggctggagcagcttccagctgtttctttgcagtactgtatttttttgttataaacctaaagaagtccctccatagcaactcaaacatcaaccaatttgttccagttctggacgagccattaccaccatcattccggttggacgaagcagaaatgactctgccggcagtcttcttcagttcttcatacattgtgccaagggaaaggcatcccattgccaaccacggagaaatcttgcaggagaagttggcaccatatatactctgagttccatccttaaaccccttgtgtggctgagctgcacactcagctgcaaattttttaagcttctgcagtgcctcagtctccccttctac

SEQ ID NO: 10566 - DNA, 71 bp, Glycine max
  Clone ID: jC-gmfl02220125b02d1
ctactcgtcgggcgtcctttttttttttttttttatccacaattcaaatcatctatttcatataaaatggg

SEQ ID NO: 10567 - DNA, 351 bp, Glycine max
  Clone ID: jC-gmfl02220125b03a1
cacatcctctctttcacagcactatatatatttatatacatatttgcgtttttctgcgtttgcatagctgcattctgagctccttcactctgtttgggtttcgcttccattctccgctatctattcgagatgagcatgcttagtcctgaaggtgaactgaaaataagttttggctatcaatgcaatagtgatagagctatatcttgtaatgaaatccaaagaacaagcagtttctcttggctgtctggtgctgccttaagtgcaaatgctacacttgccaacacaaacatctgcaatggtgtaataggagaagaaatccttccaagtttggactctcctaaatcgtttcgt

SEQ ID NO: 10568 - DNA, 567 bp, Glycine max
  Clone ID: jC-gmfl02220125b03d1
caacataaaagctaaatttcattaatatattatatacaagcaaaacatttctataattcatgttccaacaaatagaaaaaatactgcaaaattttgaaataccaaaggaaccaaggattctaagttctatatgtcttatgtacactatgaatatcaaaacttcctaagaaataccacttgtccaaggtgtccattgaaaagcttcagatattgcaaattttctttggccagtctctagaggcaaattgatgcttttgaagtccgttgattcatcccaaggatgatcaccattacggtcacatcatcatggtacttcctcctactcccatccggaacattcatcaactcttccatgctgaagcctgcagaatcagctgctcttgcaactagttgctcaataagaaattttgctggatcaccaaaagggtttctcaagatataagactctacaagctgtactgcttcatcattgctgaagaagtcaaataagccatcactcccaactataacaaatggatcagaatctgagattttgtgcacattcaatgatggatcagttgaaacata

SEQ ID NO: 10569 - DNA, 430 bp, Glycine max
  Clone ID: jC-gmfl02220125b04a1
tgcaaagtgtgagagaaagacaatgccgaagtctcaatttcgaaccccatttctggtttctcttccccttttgttattcatcttcaacctcaccccttcgcacgcactctatggagcatcctcacccgtgcttcaactcactccctctaacttcaagtccaaggttctgaattcaaatggagttgttcttgttgaattctttgctccatggtgtggacactgtcaggctctgactcctatatgggagaaggcagctactgtgttgaagggtgttgttactgtggcagcaattgatgctgatgctcatccgtctttggctcacgaatatggaattagaggatttccaactataaaagtgtttgcacctggaaagccacctgttgattaccaaggagcaagagatgtcaaaccaattgctgaatttgcactt

SEQ ID NO: 10570 - DNA, 316 bp, Glycine max
  Clone ID: jC-gmfl02220125b04d1
acttattaaaacccaaagatttattcaaaagggcgaacaaaaagttcctttgatactaaggggcacccttgttcacgaacgcttattgagagggaaaagacaatacccaaacgttctaacatttcccggaaaattttcagaacggcccccccgatggacatattttaaaatccataagaaaaaccgctgatcactagacgggttttttaacttgtgacctggaaaaacatgatcctgatcaccattatcaggataaacaagttggctgtaacggaaaaaccggtggataaaactttgaacggggaaaaaatcctta

SEQ ID NO: 10571 - DNA, 431 bp, Glycine max
  Clone ID: jC-gmfl02220125b05a1
attggattctctctatatatttcccctcgttcctgtcgtctttttcacccttctcttctcttctcttctctcacaaattcgtcaatcaatctcccaccgagttcccaacatggctgaatcggtggagcttccgagtcgcttggcgattctcccctttcggaacaaggtcctcttgcccggcgccataatcagaatccgctgcacttcccccaccagtgtgaagttggtggaacaagagctttggcagcgagaagagaaggggttgattggcatcctgccgatgcgtgatgttgctgaaattaagccagtgggtcccactgtatctgaaggagctgattcaacaaatcagaactcaaaagttcaaggcggttcattggattctcgtaagcttgatacaaaaaagcagaatggatgttgttcattggcataac

SEQ ID NO: 10572 - DNA, 359 bp, Glycine max
  Clone ID: jC-gmfl02220125b05d1
ctaattgcatgattcaatcttttatttcttatatgatatctcaagagattgctcgacagagcctcacatctaacatgtcacatgtctaataaacccctacttgcctcctcgaggggagattaatggatctctgtaagcccaaatgttgcaggaataatactaactcctgcggtgacaacatatttcaaaactcggtcttactgactaaagactcaaacataacgaaaaggattgccatgctggaagaaggaaccacattcaagagcgaggaagccctctcttgtgacgatctatgcataatacatgatgaacatggatatatggggtgacaggggaaatcatttacaaacgtgcgaccc

SEQ ID NO: 10573 - DNA, 159 bp, Glycine max
  Clone ID: jC-gmfl02220125b06a1
cgtagactctttggatttcacgagctatggaaaaggtggtgcggtccctaacatcacgttcacgaattactgcgttcacatgaacaaccctacggaaacgtctcagagctacgctgacggaacggttgttggaacgcagagtatttccatctacataga

SEQ ID NO: 10574 - DNA, 375 bp, Glycine max
  Clone ID: jC-gmfl02220125b06d1
atatatataatatacttttattatttcgagccgtgtttactaatgaaagggactcacccttgatatatcagcctataaggacgagcccatcgaaaacgatcttttcttaaactccaataatgaaatcaatatggtagttgatattgggaaacactaaaacgtcgtaatgtgcccggaataaatggcccacaccccatgaggaatccaaccaacacttaaatgcaaacatacttgatcatactttcaaaactcccatgattaatgacccaatggagcgttcaattacaccaccgaaatgatgctcgcccaaaaacatcccagtggggggggacccaccctagggcatcccatttgctagacccttgaacctgctaa

SEQ ID NO: 10575 - DNA, 339 bp, Glycine max
  unsure (1)..(339): unsure at all n locations
  Clone ID: jC-gmfl02220125b07a1
ggcatctccgcagcaccaccacccaccaccctgcttagaccaggtcctctctctctctagagagaaagagaaaaaagaaaaaaaaaaacaactaacattaagcttttaatagtaagacatggctcaacccagttccaacggggatctgaataataaccagcagcagggtcaggttcagcaacaacagcagcagggtcagtgggcggcggcggcgcagccgcatcagtatcagcagcaatggatggctatgcagtacccggccaccgncatggccatgatgcagcaacagatgttgatgtacccgcagcattatatgccctatgctcaccctcattaccc

SEQ ID NO: 10576 - DNA, 426 bp, Glycine max
  Clone ID: jC-gmfl02220125b07d1
gcaagcagtaacagtggactgtaaagataagtatttaaataatcttagctgtctgctaccaatatgttttgagggtttaaaaaaaaaaaaaaaacaaaaatacccgaatcattttttatttgggcgggttcaatccaaaatttcaaacattttaattcaatcttaaaaacctggcttaccttaacccagcttcaaatttaaaaataatactacagtttaggggagagcaataaaatccatcctactttaacacacagttctgctaataagccccgttaggaagccccttgaattgcagcatcaggttgcatggctatatcctgattctaggtcacagcaaatccctggccaccataaccctgatgaccaccataatggcctccattggaatcagatctccaatgctaatttcctggactgcgaccc

SEQ ID NO: 10577 - DNA, 451 bp, Glycine max
  Clone ID: jC-gmfl02220125b08a1
ggagctgtctgtgcaaatttgcgttgttcttcgcggcacacctcactcactgaacggtaagtatggcggacaaggctgttacaatccgaacccgaaagttcatgaccaacaggcttctttccaggaagcagtttgtcgttgatgtccttcatccagggagggcaaatgtttccaaggctgaacttaaggagaagctggctaggatgtatgaagtgaaagaccctaatactgtatttgtcttcaaattccgaacacattttggaggtggcaaatccactggatttggtttgatttatgatacagtggagaatgccaagaagtatgagcccaaatacaggcttatcaggaacggccttgacaccaaggtagaaaagtcaaggaagcaaatgaaggagagaaagaatagagctaagagcattcgtggaggtaagagaccaaggctttcgatgct

SEQ ID NO: 10578 - DNA, 388 bp, Glycine max
  Clone ID: jC-gmfl02220125b08d1
caaagggccccaacccctaaggttttaagcgggggacccaaattaaaaacaggggccaaccctgggcccaaaacattcaattttaaaaatctggcaaaaaaaaaaaaaccttttacaaagccccaaaaccaagggcccctgggaattaaaccgggggggccaaaaacttattttttttccccagcctgggcaaattcggaagcccggggcttttttaccccacaaatttttttagccctattttttcccccctaaattggcctcctggacttttcaccccgggggaaaaggccctccctgaaaaacccgttttggggcccaaaccttgggggattctccccgggttcaaaaatcaacccaaatcccggggatttgccccccccaaaaa

SEQ ID NO: 10579 - DNA, 559 bp, Glycine max
  Clone ID: jC-gmfl02220125b09a1
ggagaagatgagggagtcgatgacgcagctgttaaggttgttgacattgttgatacattcagacttcaggagcaacccgcttttgataagaaacagtttgttaccttcatgaagaggtttatcaagaatttgactcccaagctcgatgcagagaaacaagagttgtttaagaagcacattgagggagcaactaaatacctgctctctaagattaaggatttccagttttttgttggggagagcatgaatgatgatgcttgcttggtctttgcatactacaaggatggtgctgctgatccaacattcttatactttgcatatgccttaaaggaggttaagtgctaagtgacctaatgtaccaagttatctactctcattttacctagtttttttttttaaggtctgttctaagttacctaaaacttcgacttggtattttgatttaatggtgagacaatttgtgcttcatcataatttcatcaaattaattatcgatgggtaggatttcattaattatgatttgggttgtgctgaaaggcttccggattctttttttgag

SEQ ID NO: 10580 - DNA, 573 bp, Glycine max
  Clone ID: jC-gmfl02220125b09d1
tttttgtttttttttttcttcaaaaaaagaatcctggaagcccttccagctcatccaaaatggtaaattaatgaaattctaacccatcgataattaaatttgatgggaattatgatgtagcacaaaatgtctcaccattaaaatcaaaataacaagtcgaagttttaagtaacttaggacagaacttaaaaaaaaaaactaggtaaaatgagagtagataactcggtacattatgtcacttagcacttaacctcctttaaggcatatgcatagtataagaatgttggatcatcaactccatccttgtagtatgcaaagaccaagcaagcatcatcattcatgctctccccaacaaaagactggaaatccttaatcttacagagcaggtatttagttgctccctcaatgtgctttttaaacaactcttgcttctctgcatcaagcttgggagtcaaattcttgataaacctcttcatgaaagtaacaaactgtgtcttatcaatagcagcatgctcctgaagtctgaatgtatcaacaatgtcaacaaccttaacagctgcgtcatcgactccc

SEQ ID NO: 10581 - DNA, 522 bp, Glycine max
  Clone ID: jC-gmfl02220125b10a1
cttgccttatttttggttttgagattgagctaaaggccaactcaaccatcgaattcgttggtgattgaaagagaaggaagaagaagcaggaaacggaagcagtgagagctggtcgagaaggagcaatatgtctaggtcaaggtgatggcgtagccaaggacagcactgagactgaactcaccaaaatccgtctcctcagggcaattgttgaaacccgtgatccctcttccaaggaagaggatgattttatgattagaagattcctgcgtgctcgtgatctagatgtagagaaggcttccgccatgctcctcaagtacttgaaatggagaaattcatttgttccaaatggctctgtatctgtgtcagatgttcctaacgaacttgcacaagataagggtgttcatgcaaggacacgacaagataagtcgacctatacttatggtcttcggtgggagacattttcagaacaggatggtcttgatgaattcagcgatctgtggttatgttctcgataagtatgtg

SEQ ID NO: 10582 - DNA, 618 bp, Glycine max
  Clone ID: jC-gmfl02220125b10d1
tgtgtctatctatctagttaagcatagtctatttattacgttgcatgccatgctcactaatctgcggacgccctttttgtttttttttttatgaaaaaaaaatcgtactgatttactactgaatattgatagctgatacaacagtgtaaagtaatcgggtaaaaagaaaacggcattgaaacacataaataagaaataacaatatttatttttaggcccggctctccttattatgtcagcggttacttaattaattagctatcttgaattgggactaatggcaagaagccaccgaatatctctgggacctgactttccttcatctcttctagcagtgttgatttcaccttatttttctgcacaaatactatctttctcttggtttcgttgtcaatgaatgggtaaacaatttggcacactttcataaagatgtatggtgcgttcacaataaacaacttgcccaatctatctgggtagtaatcctgcaaaatggatagagcactatgatatccacgcacgtcactgtttgagtattcccatcccttaagttctgctataccgacaaactattcttcccaggttgcatacttgcacatactttatcaagaacttaaacaa

SEQ ID NO: 10583 - DNA, 547 bp, Glycine max
  Clone ID: jC-gmfl02220125b11a1
ctagaagaagctgatcttgttggtattgacaaacccaaaaagcagcttagtgacttgcttttcaatgaagaagcaggtagggctgtgattcccgtttatgggatgggggggttggggaaaaccaccttggctaaacaagtctatgatgatccaaaagtgaagaagcgtttcaggattcatgcttggatcaatgtttctcagtcttttaaactagatgagctcctgaaagacctggttcaacagctccacactgtcataggcaaaccagctccggaagcagttggacaaatgaagagtgaccagctcaaagaggtgatcaagaacctgcttcagcgaagccggtacctggttgtgctggatgatgtgtggcaagtaaaggtatgggattctgtcaaacttgctttgcctaataacaaccgtggcagtagagtgatgcttaccacacgcaagaaagatatagctttgcattcctgtgctgaattgggtaagggattttgacctcgaattcttacccgaggaagaaagctggtatcttttctgcaagaaa

SEQ ID NO: 10584 - DNA, 490 bp, Glycine max
  Clone ID: jC-gmfl02220125b11d1
caaaagctaactatatttttattcagtaacctcggaattcatattcaagaaacaaattatgttccctgatttatttggttgaaacttgaagaaatttgcagtcaagactcaggtaactgcaaagaacaaaatactgcattcacttgcatactcacatatgtagtatgttaaaagaaagaaaataaaagttaaaccttccagagcgtacaaatttcaagacttctgattgcagtacccccactggaatcactctctctctctcctaatgtctctaatgagtagacatcccaacccctatccctccaataggagatataaactgctggaacttgttgcactctccaataatcctcacctccatttggacgcagtgctgtaataaattcttcaggcatatcaaaaagctctattgattctagttttgttaggtgctcaatgcctaatggtacctgcttaatgaatcacatcgctggatgatgagcttttaaga

SEQ ID NO: 10585 - DNA, 541 bp, Glycine max
  unsure (1)..(541): unsure at all n locations
  Clone ID: jC-gmfl02220125b12a1
ctagaagaagctgatcttgttggtattgacaaacccaaaaagcagcttagtgacttgcttttcaatgaagaagcaggtagggctgtgattcccgtttatgggatgggggggttggggaaaaccaccttggctaaacaagtctatgatgatccaaaagtgaagaagcgtttcaggattcatgcttggatcaatgtttctcagtcttttaaactagatgagctcctgaaagacctggttcaacagctccacactgtcataggcaaaccagctccggaagcagttggacaaatgaagagtgaccagctcaaagaggtgatcaagaacctgcttcagcgaagccggtacctggttgtgctggatgatgtgtggcaagtcaaggtatgggattctgtcaaacttgctttgcctaataacaaccgtggcagtagagtgatgcttaccacacgcaagaaagatatagctttgcattcctgtgcttgattgggtaagggcatttgacctcgaattcttacccgaggaagaagctnggtatcttttctgc

SEQ ID NO: 10586 - DNA, 483 bp, Glycine max
  Clone ID: jC-gmfl02220125b12d1
caaaagctaactatatttttattcagtaacctcggaattcatattcaagaaacaaattatgttccctgatttatttggttgaaacttgaagaaatttgcagtcaagactcaggtaactgcaaagaacaaaatactgcattcacttgcatactcacatatgtagtatgttaaaagaaagaaaataaaagttaaaccttccagagcgtacaaatttcaagacttctgattgcagtacccccactggaatcactctctctctctcctaatgtctctaatgagtagacatcccaacccctatccctccaataggagatataaactgctggaacttgttgcactctccaataatcctcacctccatttggacgcagtgctgtaataaattcttcaggcatatcaaaaagctctattgattttagttttgttaggtgctcaatgcctaatggtacctgcttcaatgaatcacagcgctggatgatgagc

SEQ ID NO: 10587 - DNA, 337 bp, Glycine max
  Clone ID: jC-gmfl02220125c01a1
aatcaatcaataaaaataacaattaaccacacgactcacgacccagtaaccgggttctgcaaatttcgccacttgcagatgaaaagttccaaactttccactccaatccccggttaaatcctaaccccttgttcctttcactgtaagcattcctcaatttgacaattttctcctctctccacaaaatgatgtgtgtgccactttctctctcctcaattggggtgtgaaagtttccacctttttctttctttctttctttctttctttccattatctatgttagttctgcattgtttgttgcttgggcttgccaccctgttgcatgctggtgttggtg

SEQ ID NO: 10588 - DNA, 510 bp, Glycine max
  unsure (1)..(510): unsure at all n locations
  Clone ID: jC-gmfl02220125c01d1
gagggatctagatgcaatttatttggattgctgttgaaccacacaaaaatgttcccctactcaataaggggcacatgctaaggcacagtagcatgaccttatttattttaaaatcatgtggaatatctccatctttaacctgcccccatacgcatcaatactttaggataaaagggcatattcatttttttttcagaagataaaaagaacaaattcccaaagctggatctgaaggcaaagaaggggggtcatcaccatgcacaatcttttgtaccacatatttacaggaaatctgtcaaattattagaatgtaaaaaattgacagcaaatagtactttttgttttttatgctagcaatggtgttttccctagcacaatgttactgagttacttacggtaactgactgaaaagtactttcaaggcaaaggttcttgtgaatctcccaaacgagacaaatggagatatgcatcagtgccatatccttccataaagattanttgaagatcacc

SEQ ID NO: 10589 - DNA, 294 bp, Glycine max
  Clone ID: jC-gmfl02220125c02a1
aatcaatcaatacaaagcactatctaccacacgactcacgacccagtaaccgggttctgcaaatttggccagcttgcagaggaaaaggtccagaactttccactccaatccccggataaatcctaaccccttgatgcttacactgtaagcatacctcaattagacagactttatgctctattcacaaaacgatgtgtgtgccactttctctctgctaattggggtgtgaaaggaaccaccttattctgcctggccttcaaacattctatccattctctatgggagacccgcatt

SEQ ID NO: 10590 - DNA, 427 bp, Glycine max
  Clone ID: jC-gmfl02220125c02d1
gattgatctatatgcaatttatttggattgctggggaaccacacaaaaatgttcccctactcaataaggggcacatgctaaggcacagtaacatgaccttatttatttttaaaatcatgtggaatatctccatctttaacctgcccccatacgcatcaatactttacgataaaagggcatattcatttttttttcagaagataaaaagaacaaattcccaaagctggatctgaaggcaaagaaggggggtcatcaccatgcacaatcttttgtaccacatatttacaggaaatctgtcaaattattagaatgtaaaaaattgacagcatatagtactttttgttttttatgctaacaatggtgtttcccctagcacaatgttactgagttacttacggtaacttactgaaaagtactttcaggcaaa

SEQ ID NO: 10591 - DNA, 391 bp, Glycine max
  Clone ID: jC-gmfl02220125c03a1
atcatttgatgaagacgagttttcaaacaagcccgttatagtcaataagcccactaaagtcaagaagaccgtaacagctcctacaaatgtaaaatcatattctatagctgacctgcagattgctactggatccttcagtgtggagcaacttcttggtgaggggtcttttggacgtgtataccgtgctcaatttgatgagggaaaggttcttgccgtgaagaagatagattcatctgtccttcccaatgatatgtctgatgattttgtagaactggtttcaaacatatcccaattgcatcatcccaatgtgaccgagcttgtaggttattgttcagagcatggacaacacctactagtctatgagtttcataaaaatggatcacttcatgac

SEQ ID NO: 10592 - DNA, 440 bp, Glycine max
  Clone ID: jC-gmfl02220125c03d1
gcgtcctttttttttttttttttttttttttttttttttttttagaccccaacgcatgggattttatttagactaatccaaaatattggacccatacaatcacaaattgccatgaaaaaggttgatctgagtcctagttattacaacaagattgcaaccatgaatcataacccaggttcaatttcagaacagggttaatttatcgaaatttatactcccaatatactaaatagggcataaccataccccttgaaattgtgtttagtttaaatagtccaaggggcatttctttaacttaaaacattagctggctgaagggggttctaaacaagttattgaaatgggagaaatttcatggcctttaaggccattttatcaacacaggcctttctggttgccatttacatggcttgcggatcttggacatcaccccctttgtt

SEQ ID NO: 10593 - DNA, 395 bp, Glycine max
  Clone ID: jC-gmfl02220125c04a1
cagcatctgacaagggcagattttttgcttttggtcgtgtattctctggcagagtttcaactggtttgaaggtgaggattatgggaccaaattatgtccctggggagaagaaggatttgtatgttaaaagtgttcaaagaactgtcatttggatgggaaaaagacaggaaactgtggaagatgtcccctgtggtaacactgttgctatggttggtttggatcagttcataacaaagaatgctactttgactaatgaaaaggaagttgatgcccatcccattcgagctatgaagttttctgtctcacctggtgttcgtgttgctgttcaatgtaaggttgcatcagatctttccaagcttgtgaaagtcttaagcggttggccaagtcagatctat

SEQ ID NO: 10594 - DNA, 485 bp, Glycine max
  Clone ID: jC-gmfl02220125c04d1
attgaaaatactactatcttatctttcaagcaaaattcccaaatagttcgaaccaacaccgatgcaaaatcctatggataaaaaatacaccgatgcaaggaccaaatcacagaagtacaacattcacggacaaaaccacaaacaaaactcgacaaaacttaaatctaaagtaacattggtcatatgagaaataaattcggctaagttcaaaagtaagttaaatagttcaaacaatttaaagcttgtcttcaaactcggagagaggagtcatctgctccttcaagcccttcctcttgcggatgtccgtgacaagctgtgcagcttgagatccagtctccaatgggtcagaagacatcatgtcccagtgatcaaagacacattgcgggaaagcctggcctgatgttgcagacctcaatgtgctcgagataccaaaggactcaatgacgggaggtctgctttgatgttgtaaagcggggtaccaggcc

SEQ ID NO: 10595 - DNA, 300 bp, Glycine max
  Clone ID: jC-gmfl02220125c05a1
caaggaacggctcacatggtttgtgatcatatggaattgtatggttcttaattacgtagtaataggaaaaaagtagttgccgccacttgcaacattcaggttcttccaatcattttggttgtttatgatttgcaactcaagtacgtttagcatgtctcagttatgatggttgggtaaccgtcgtgctggttatctatacctgagttttaggggaagcttgtggccctttttgttttagaatatgttatgctgaagtttgtaatagttggttgattataagattcctgatatttttatttt

SEQ ID NO: 10596 - DNA, 306 bp, Glycine max
  Clone ID: jC-gmfl02220125c05d1
gcactaaagtttctcggtgaaatgcattacttccactcgggtctactatgcatcaagtacaacgtatattgaaacaaaaagggccacaagcacctttcggccaagctgtatcatgacacggagagcatgctaccactgcttgagatcctaaagatgctcaacgttcttgagttgcccatcataaacaaccacaatgattggaagaacctgaatgttgcaagtggcggcaactacttttttcctattactacgtaattaagaaccatacaattccatatgatcacaaaccatgtgagccgttccttg

SEQ ID NO: 10597 - DNA, 373 bp, Glycine max
  Clone ID: jC-gmfl02220125c06a1
gtaggcaatagagatcatggcagttgaagagtcttatccattgcaagagacaaggagggccaaaggaagggtcatttacacaatcttctctttatcactttttgtgggcattttgttcatctgggtttacagagtgagtcacatacccagagaaggtgaagatgggaaatgggcttggattggtttgctttgtgctgaactatggtttggtctttattggctcctcagacaccctttcagatggaaccctgtgttcagggaacctttcagacacaaactctctcaaagatacgaggagatattgccaagagtagacatctttgtgtgcacggcagatccaaggattgagccagcagtgatggtggatgaacac

SEQ ID NO: 10598 - DNA, 501 bp, Glycine max
  unsure (1)..(501): unsure at all n locations
  Clone ID: jC-gmfl02220125c06d1
caaattcagatccttcatttaaattagttttgatatattctttgtaatacaatttttcagcacttgaataaataacatcaggatattggtgaattgagatgactaacattcacgttttctaaattacttcactaaaacagaaaaactttgcaaatgaagaacactttaaactaaaagtgagaatattaaacattttaacttatggcaataaagaggacacatgcacttagagccaatgttgttgatttaactgcaacagatattggtaatcttcccttgtcttttcttaggtcgaggccttggtacacaggtacattgataagaaccaaaactccacttagtagaacttgcaatgccattgtttcataaattctgagacccccttcacttatgaatacttgctttagtaacattccaagaagacaaaacaaattgagcaatgcaagtgctgcaagtaaagtgagcattgnggatgagtttccaaactccataacttctttt

SEQ ID NO: 10599 - DNA, 387 bp, Glycine max
  Clone ID: jC-gmfl02220125c07a1
cttcaatgctatggtgaatcagtgtactgcacatcttcaaacttgctgagcaaatgcaacaatgggcagagtccactggacaggttcacatcagtagtagcatggagcatatctaccacacgccccacatcttttggtgttgctccttataatcccactcttggagagacccaccatgtttccaagggcaatctcaacgtcctagttgagcaggtatcagtcaaccctccagtatctgccctccatgcaacagatgagaaggaaaacattgagatgatatggtcccagcaacctgttccaaagtttcggggtacatctattgaagctcaagtgcatggtaaacgtcagctgaagctcctaaatcatggagaaacatatgaaatgaat

SEQ ID NO: 10600 - DNA, 515 bp, Glycine max
  Clone ID: jC-gmfl02220125c07d1
aagaatcttcaaagcaagcccattttccttacttggcaggactaattatactgttggatttattcatcaaactatctcactatacattaaaaatttaaaataataacaaacttaggattaaatgaatttcatgagtacaacaatgaatctcccaatccctttggcgtccaaccagaaataagtgcgtttcaatttttgaacagcctaactgcgttttggctgcatttaaagacatcatagtacatagtacataacaataaattattgagctatgatgggggcctcagggacccatttatgagttggtgaacagtcccattcccacgtgtctttaccgtaggacaccctaaaattcttaggaaaccaagtttctcctttcatggctctgtctctcaacaccttcctgtgtctttcttccacatcttggtttgcttctcttgctctttcccaatctttgctcataatggcttggctcaactcactccatacaagggctgattcggttggccacacac

SEQ ID NO: 10601 - DNA, 487 bp, Glycine max
  Clone ID: jC-gmfl02220125c08a1
ccataatcatttagctattaagagaatatgtttttaatgaccaaattgtcctcaacctcaaatatacttgctcctcttcatgctgcaaacacaaccaacttcttcaaccacaaccacaaccactttgtgcattaaaacccccacccctctcagttccacacaatgtatcttatctttggtgtccttttttttttttgtttcccctctcatcactctgcaattctctgcctccaaacatgccattttctagtcttggatttgagttattataattataaatgttctgttatttattttgtgctaagtaagctggtttgccaaatttagacattgaaagtggcatatgctttcatttgattataaataaaagtagcatttctagttctctcatttccttcttagagaacttgtgcttacaacgtaaatgactaaatgtagagcctgatttgtgattgcttcattcctgagtacttacaatggaaatatg

SEQ ID NO: 10602 - DNA, 520 bp, Glycine max
  Clone ID: jC-gmfl02220125c08d1
gcaaatgccaattatttgacatcactctttataaacattattcatttccaaatgtacatttggccctaccgtgtcgttaaaggctaacatggttgatgctgagtacaattgagtaccaagctatatatgtggcttagatgatacaaggactaacatgttggtacctctcatgctaatatgctccttctttaggtagcaaatatgagaggagaatttcgttccacatatcaggaacaccggctaagcaccaatggctacaatcaggcacagatggcttgtcactccaagtgcccacgtgtccatcacttctatatgcagtcattggtgtaacatgcagaactgttactggagcactcatgtttttgacaactttgttgatcatatttgaaattgggtttctatccttgccgttagttctcttccaaggcctttgagtcactatgcaagaattgtggttctgtccactccaatgagatgattcataggtgcggaagaatattcttgtcctgtttggattaat

SEQ ID NO: 10603 - DNA, 395 bp, Glycine max
  Clone ID: jC-gmfl02220125c09a1
ggcgcttaccggattttctgcaatcggtgaaccttaagtacgtgaaattgggttaccattatctcataaaccatggcatatacttgttcaccatacccgttcttctcgtggtgtttagtgctgaggttgggagcctcagcaaagaggacctatggaagaagctttgggaagacgcgcgttacgaccttgctacggttcttgcttcctttggggtcttcgttttcaccttgtccgtctacttcatgtcgaggccacgtcccatttacctcattgattctgcatgttataaacccgatgacgaactcaaggtgtcaagggagcagttaatggatgtggcaaggaaatcaggcaagttcgacgaagcaagtctagagttccagaagaggatgctaatg

SEQ ID NO: 10604 - DNA, 553 bp, Glycine max
  Clone ID: jC-gmfl02220125c09d1
gactataggtaatagccatccatcaactttgatatcaatcatcctatgaagagactgagaaattaaacaaggaggcaaccatatgcctaatgaggaattaaaagtatagaatttcaagccaggaataataaaatgagaaagaaacagaaagcagctgtaacattttaaagaccaacttagaactacccttattgatcctaaccatagctttcacatgacctcactgatagattcataatactagtgccttagaattttgcttcagttgccgagaggtgcatgatatctgttgatgcaatcaagccaagggttcctagaaggcttggcaactcggcgcatggcgcgccaaaccacgctgttgcacttgatgcctgtgccaaatgcgagttgccaaacgcggtctcctcttctgacactctcttttgcttccatgttagccaactcataccaaatgctgctgctagaggtgttgccaaagcggtgcactgtcatcctagatgcttcgatgttcttgtcactcagttctaagttcctttgaagctcatcaagaatg

SEQ ID NO: 10605 - DNA, 557 bp, Glycine max
  unsure (1)..(557): unsure at all n locations
  Clone ID: jC-gmfl02220125c10a1
tccgaacagtgaaccctcacctaacaatcagaacccaggatttggtgaaacgatgaacagtgataggaaaattggggttgccttggacttttccaaaggaagcaaaatcgctctgaaatgggctattgacaatcttatcagcaacggtgacactctctacatcgtccacaccaagccttccggaggaagtgaatcaggaaatcttctctggtccaccactggttcacctctgattccattgtcggagtttcgtgaaaaggaggtgatgcgtcactatgaggtggatactgatgctgaggtgttggacttgcttgacaccgcttctaggcagaaacaggtgaatgtggtggcaaagctatactggggggatgcaagagagaaaattgtggaagccgttggggatttgaagcttgactctttggtcatgggtagcagaggcttgggtgccatacaaagggtattactgnggagtgtgactaattatgtcaccgcaaatgcgagttgccctataacgattgtgaaagactctgcccttctactatctgataagctactga

SEQ ID NO: 10606 - DNA, 542 bp, Glycine max
  Clone ID: jC-gmfl02220125c10d1
cataaaatatccagaaagcatcagattgataattatgtgacgcatcatgtttaagtatcaaacatttcacaccaccacatcatgtgttctagtaagtttgaaccagattcagcacaaagcttatttataagcacaattttgtggctataaccatgcgcttaaaagagactctgaaaatatacattatgcttgccaaatccttaatcattcaagtgtgttcataatcccaattaaacatgtgtaagaagtaagaacggagggaaacacactctggtcactgatgaagataaaaacaaccgattgcaaaggccaaccaaattcagtagcttatcagatagtagaaggggcagagtctttcacaatcgttatagggcaactcgcatttgcggtgacataattagtcacactccccagtaataccctttgtatggcacccaagcctctgctacccatgaccaaagagtcaagcttcaaatccccaacggcttccacaattttctctcttgcatctccccagtatagctttgcaccacattcacctg

SEQ ID NO: 10607 - DNA, 578 bp, Glycine max
  unsure (1)..(578): unsure at all n locations
  Clone ID: jC-gmfl02220125c11a1
attatggtctcatctataacattctcatccttaaccttcctctcggttctttccttttctctggtctgcttgctggcatactctatgatatggaggcaactacaacagagggaggaggcaacacatgtgttggaggtcattgttacaggctagtctttattgtcatgactggagcatgcattgttggattcttcttagacattctgttgtcaatcagaaccaagaatatttacaccaagatttccacgagcaagaagcccaagaaatccttaggaacatcaaataggcagtgattcagaatggtatgacattcctgggattgatgaactttatgctcaagtgatatctcagtatccgtcagcaaggtgacttgtcctatctgatagttaaaactcatttttccaataaaggagggccatttgtttttaattccatttaggcctccatgtactgggtatattagttntttttatgatgtgggatcagagagaattctttctgttccatatgaaaataagtgtatntagtatcgtgagaagtctttgatagattaaatatcacgctgtgttattatagct

SEQ ID NO: 10608 - DNA, 566 bp, Glycine max
  Clone ID: jC-gmfl02220125c11d1
ccatattgcatcaattgcatctactgccaccttcattgaacatattgccaatacaatacaacacataacacatggtacaatgtcaaagattgcaacattaggatggccacttgcaaactttggacagactagtgactatcgctattagccaaataacactgactggtacgaacaaacagctaataataacacagcgtgatattttaatctatcaaaaaactctcacgatactaaatacacttattttcatatggaacaaaaagaattctctctgatcccacatcataaaaaaaactaataataacagtacatggaggcctaaatggaattaaaaacaaatggccctcctttattggaaaaatgagttttaactatcagataggacaagtcaccttgctgacggatactgagatatcacttgagcataaagttcatcaatcccaggaatgtcataccattctgaatcactgcctatttgatgttcctaaggatttcttgggcttcttgctcgtggaaaatctggtgtaaatattcttggttctgattgacatcagaatgtctaagaa

SEQ ID NO: 10609 - DNA, 580 bp, Glycine max
  Clone ID: jC-gmfl02220125c12a1
tttttaaaatggaggtggttcaagagcagcagctacaaaatacagatggaagaaaattgcacaactcagacagaaactcaaatgtcacacagcaacttcaacatccaagattcagaaaatacaaatggtggctacgtgtgtccctctacataatctttcttcttgtaggccaatctgcagccactcttttgggaagattatactatgacaatggtggtaatagcaaatggatggcaacatttgttcaatcagctggattccctgtacttcttccactccttttttacttcccaagacaaacacatgccaagtttaataacaatcccagcaataatgattattcctacaaaacaaaaccaaaattctgcacccttgttttcctctatctagcttttggcctaattctcacaggggacaacttgatgtattcctatggacttttatatctgcctctttccacctattctctactatgtgccacccaattagtcttcacgcggtgttctctttcttcctcaattcccagagaatcacagcattcataatcaattctgtagtcctccttaccatatcagcttct

SEQ ID NO: 10610 - DNA, 227 bp, Glycine max
  Clone ID: jC-gmfl02220125c12d1
acacagggagccccataaaaaatagccacaaaaaagacccccactgggaaacccgggtcaaaccagagacaaacggggttaaacaaattactctgacggaaacgggcgaacacctacccataacaaaatgtgccccgccaggggaacacccccgggggaccattcttagtcggccagggttatatgggaacaaaaagaatgggctccgctccaaaacaaaaggcccc

SEQ ID NO: 10611 - DNA, 311 bp, Glycine max
  Clone ID: jC-gmfl02220125d01a1
ggcgcctccatccaatgccatagctcctcctggatactacttgctcttcgtcgtttaccgtggcttgcctgcagccaagggaatgtgggtgcacattcaatagagattttctaattcttcatttaatttgtatgctcaatcgaaattctaatttattagaaaagactttagtttctaattactatacattattattgcacgggtaatgctgcttattagtatgtgttttgaactaggttatattgcgtggccttcaaatattttatctgtacgtgtttggaaacccattaataacatgagaaatcgcattc

SEQ ID NO: 10612 - DNA, 379 bp, Glycine max
  Clone ID: jC-gmfl02220125d01d1
gggtgccaaacctgaaggtaataatggggttccaaaccccaaccaaaaaaaactttgagggccacacaaactaacccacttaaaaacccaacctaaaaagcaggattacccgggcaaaaataaacggaagaaatcaaaaaccaaaggctttccaaaaaaaataaaattccgattgggccaaccaagtaaatggaaaattaaaaaaactttactgaatggcccccccaaaacccttgggtgaaagccaacccccgtaaacgaccaaaacccaatcatatcccggaggagctatggccttggatggaggcccccctaagcccaaatccgaagttaccaacgcggatctgaaaccttatagccttttaataggggcccccaa

SEQ ID NO: 10613 - DNA, 312 bp, Glycine max
  Clone ID: jC-gmfl02220125d02a1
ggcgcctccatccaatgccatagctcctcctggatactacttgctcttcgtcgtttaccgtggcttgcctgcagccaagggaatgtgggtgcacattcaatagagattttctaattcttcatttaattttgtatgctcaatcgaaattctaatttattagaaaagactttagtttctaattactatacattattattgcacgggtaatgctgcttattagtatgtgttttgaactaggttatattgcgtggccttcaaatattttatctgtacgtgtttggaaacccattaattacatgagaaatcgcatcc

SEQ ID NO: 10614 - DNA, 335 bp, Glycine max
  Clone ID: jC-gmfl02220125d02d1
ggggggccagtactcatggtattaaaggggttccaaacccggacaaataaaatgtctaaacaggctcccaataaaacctaagtgaaaacacctccctataagcaagcttgccccaccaaaaaaaagggatagaaactaaaacctaaagtgttttacaatgaactacaatttcgcacgggcataccaaatcaacgaacaattccaaaaccacaaatgaatgggcacccccatatccaggggcgcaagcaacccctcgaaaacgaccaaaacccggttgtgcccgaagagggctttcaccttgaagtgggggcccctgtaacccaagttccggctta

SEQ ID NO: 10615 - DNA, 440 bp, Glycine max
  Clone ID: jC-gmfl02220125d03a1
gattttgcaatggatataagaactggtatctaattcgaataagtatcattcttttagggaatcttccaattgattgaccaatccaaataatatatggatatatatatatagatagatctatctatatatatatctaactaatataggaatcttagaaagataattagtctattcataagaggagatgagatcatatgaaaaatataaccgattctttcctttgtttgggctactggccatccgccggaagtttcgggtttaataccgatattttagcaacaaatctaataaatcttagtgtagtgttaagtgtatctggtttttttttggaaagggagtgttcaagtgatttattagataatcgaaaacagaaaatcttgagaactattcgaaactcagaagaattacgggaaggggccattgaacagctggaaaaagcc

SEQ ID NO: 10616 - DNA, 483 bp, Glycine max
  Clone ID: jC-gmfl02220125d03d1
cgctgactagtcgtcgggcgcccttttttttttttttttttttctattctcattcgaattcattgtatttatatgggaatattatattcaaatgaaataaagagatattaaaagatactaattataagaatttgaaagtgaaattataaagtgattaaatgatcaatcaatttgatgtctacctgtacctgtagtaaaaagagttgcatctgctcttgaatagcttccttcaaaaggacttctgtttccccagtgaatgtcttgctagaagatatgacttctttgacttgaggttcattcgagtgtaagtaagcacgtgactcaacacgaaatttgcttacctgtccaattcgtaatgaatcaagattaccattcgtaccagtataaataggtacaagctgttcatccacggaaagaggagctgattgggactgtataaacaactcgcgcaatcgatgacctgttgctaattgattttgagta

SEQ ID NO: 10617 - DNA, 360 bp, Glycine max
  Clone ID: jC-gmfl02220125d04a1
cacccttcttatctacacccaattaaggaagagtgtgttagtgtgagaaaaccctttagtggtgatagagtgaagagagatgaatggagtgaaggggcagtgtcaaccctccttgaggcttatgaggccaaatgggtgctaagaaacagagccaaactcaagggccatgattgggaggatgtggcacggcacgtgtcggcacgtgccaactgcaccaaatcaccaaagacttcaacgcagtgtccgaacaaggttgagtccctgaagaagagatacagatcagaatcagcagcaacagcagatcatgcatcatcatcatggcctcgttatccacggcttgatcttattcctatgggaact

SEQ ID NO: 10618 - DNA, 476 bp, Glycine max
  Clone ID: jC-gmfl02220125d04d1
attatattaatagcattatttgataactttatgtgcatatacaataataacatttttattaattatcttccataacctacccttaacttcttccaattcttagagatgaatcaacacctttattgttgacacttgcaaagatcctagcaatctctaactgtgtattggcaattatttcagttctcttaaggtccatttcccctcttttggcctcagcttcaactctcatcctctctatctccttcattgcgtccattcttgcttgttcagaccttatcatagcttctgtaagccatcttaagctttctgctatctccacacactctttccttcttcgccctgtgtcgtcaattgatttcttctatctcttgttgcatcttaacccgtccttcttgctataaagtgctggcgtgctgctatctgagtccaatggattcttgctagatacttgatcagatgacttaggtcctaaccca

SEQ ID NO: 10619 - DNA, 208 bp, Glycine max
  Clone ID: jC-gmfl02220125d05a1
aaaacaatggcgaagctgttagcgttgagttgctggcgaagcctctcgccgcgaccattaaatcagttatagctcgaatgtcccaagggcgagagtgtcgccaccgtccaagagctctctgagtccaccgctgttctctccgtcgtcggaatgagctgcgctgcctgcgccggatccgtggagaaggccgttaaacgcctccccggga

SEQ ID NO: 10620 - DNA, 402 bp, Glycine max
  Clone ID: jC-gmfl02220125d05d1
gtacactaaactaaaatcatcacaagacgacacttataaacatgattacatacaaaattggcttaaagcaaaaccatcaatcgtgatgcgtcatatatcactggatgactcaacccttatgccacgtatctcaaggttgtctagcttcctgggtctcctgtaatatttcaacaacagagaacagcaaacaacgctgacagaggaggcagccatagcagccccagcaatccagggtggcaatctgaaccttgtagaagggaaaagagctccagcagcaattgggatgccaagcaagttataacccaaagcccaaaagtaattcaggcgtatacgggaaaatgttcttctggaaaggtcaatggcagttatgacatcctccaagttgcttctcatgaggacatt

SEQ ID NO: 10621 - DNA, 360 bp, Glycine max
  Clone ID: jC-gmfl02220125d06a1
cattgactagaaatcccatattttccccccacattaactcacccaacccctctttctaaaaggcctcaaggatacactccggacttaattacgttattttgttagggtcaccgtttcgagatattctaaacttgtactgaaaaatatggagggaaaagaagaggacgtaagagttggagccaacaggtacggagagaggcagccaatagggaccgctgctcaggctaaagactacagagagccaccgtcggcgcctctcttcgaaccgggagagttgtcatcgcggtctttctataaggctggcatagcagagttttgtggccactttcttgttcctctacatcacagtgctgactgtga

SEQ ID NO: 10622 - DNA, 444 bp, Glycine max
  Clone ID: jC-gmfl02220125d06d1
tcggcggccgcccttttttttttttttttattgaacatcataacataattatacaatttactctagcaaatatagacctgcagtttctgctttgtgcagagaagctgttaaatagaaggacaaaaaaagaaataaacgatgcataccacacggtttgcgcaagttctaatgcgtctccaaatacatgagatttgaatagattaattatgcataaattaatagtagtagtagtagtaaatcattagcagaagtcataggaacatcttttacgtgggaatgctgtcttggactcaactagttactacttttatttttgaggcattattccttcaattcatcttcaatgttgcatcactttgacgagaaggggatggccctgatcactatctgatggtacaaagctgcaagtgctgccccatgaaaggcccacccaaaatatcaatg

SEQ ID NO: 10623 - DNA, 337 bp, Glycine max
  Clone ID: jC-gmfl02220125d07a1
ccataatcatttagctattaagagaatatgtctttaatgaccaaattgtgctcaacctcaaatatacttcctcctcttcatgctgcaaacacaaccaacttcttcaaccacaaccacaaccactttgtgcattaaaacccccacccctctcagttccacacaatctatcttatctttgatttccttttttctttttgcttcccctctcatcactctgcaattctctgactccaaacatgccattttctagacttggatttgagttattataatcataaatggtccgagctttatttcgagctaagtaagctggtttcccaaaattagacattgaaag

SEQ ID NO: 10624 - DNA, 492 bp, Glycine max
  Clone ID: jC-gmfl02220125d07d1
gcaaatgccaattatttgacatcactctttataaacattattgatttacaaatgtacatttggccctaccgtgtcgttaaaggctaacatggttgatgctgagtacaattgagtaccaagctatatatgtggcttagatgatacaaggactaacatgttggtacctctcatgctaatatgctccttctttaggtagcaaatatgagaggagaatttcgttccacatatcaggaacaccggctaagcaccaatggctacaatcaggcacagatggcttgtcactccaagtgcccacgtgtgcatcacttctatatgcagtcattggtgtaacatgcagaactgttactggagcactcatgtttttgacaactttgctgatcatatttgaaattgggtttctatccttgccgttagttctcttccaaggccttcgagtcactttgcaagaattgcggttactgccactccaatgagatgattcaaaggtgcgga

SEQ ID NO: 10625 - DNA, 435 bp, Glycine max
  Clone ID: jC-gmfl02220125d08a1
ccataatcatttagctattaagagaatatgtttttaatgaccaaattgtcctcaacctcaaatatacttcctcctcttcatgctgcaaacacaaccaacttcttcaaccacaaccacaaccactttgtgcattaaaacccccacccctctcagttccacacaatttatcttatctttgttatccttttttttttttgtttcccctctcatcactctgcaattctctgactccaaacatgccattttctagtcttggatttgagttattataatcataaatgttctgttgtttattttgtgttaagtaagctggtttcccaaatttagacattgaaagtggcatatgttttcatttttctataaataaaagtagcatttttttttctctcagatccttcttagagaacttgagcttacaacgtaaatgactcaatg

SEQ ID NO: 10626 - DNA, 490 bp, Glycine max
  Clone ID: jC-gmfl02220125d08d1
gcaaatgccaattatttgacatcactctttataaacattattgatttccaaatgtacatttggccctaccgtgtcgttaaaggctaacatggttgatgctgagtacaattgagtaccaagctatatatgtggcttagatgatacaaggactaacatgttggtacctctcatgctaatatgctccttctttaggtagcaaatatgagaggagaatttcgttccacatatcaggaacaccggctaagcaccaatggctacaatcaggcacagatggcttgtcactccaagtgcccacgtgtccatcacttctatatgcagtcattggtgtaacatgcagaactgttactggagcactcatgtttttgacaactttgttgatcatatttgaaattgggtttctatccttgccgttagttctcttccaggcctttgagtcactttgcaagaattgcggttctgtccactccaatgagatgattcaaaggtgcgg

SEQ ID NO: 10627 - DNA, 367 bp, Glycine max
  Clone ID: jC-gmfl02220125d09a1
gctgaaagagcactcggtgggtctaaactgtgggcgttgggattacattgtcaggtctgttaagaccttacaggctcacccagatcgcctcctaccagacagggttcaggttggcatgactcaacacttcatgaaaagctactctgatctcctcatcaggacgtgccacaggcgcggtgtgcatgctatgggaggaatggcagcacagattccaatcaatgatgacccagtggcaaatgatgcagcactggaactggtcatgaaggacaagcttagagaagtgaaggcatggcacgatggaacttgggctgcacaccctggtctcattccagcctgcatggagattttcaacaacaacatgggcaat

SEQ ID NO: 10628 - DNA, 617 bp, Glycine max
  Clone ID: jC-gmfl02220125d09d1
gtagtgattcttgtgtagtcgatgcagggtaagcatagtcgagctatgacgttgcatgcacagctcactaatctgcggacgccctttgagtttttttttttgacgaaaactaaattttgaatattttataagaacgaaaaatataggtttcttctttttattgaataacgataagtcgataatcactaagtcatagacacaatgacaccatcgtgcatttgtgattttctcacatcagcaactagaagtacacaagacagagtccaagtgatccaactattaggcaataaagaaccccttagttcaaagctttgacgggtccttccttggcgtgatgcacaactatgtaattataggcatccaaagtgagaaaatcatcaagagttggggacgtgcattggcgagtgaagatcttgcaagccgccttgtacattcccttgtagaacttctctgttcccacttccttttcaatcctagccatctgttgttcaaccactctatcaaaaaggtctttgttcactttctctccaagcccatcttcatctagctccactccatacttgagccactgccagttctgcaccctgctaatctcagcagtggcagcatcctccatg

SEQ ID NO: 10629 - DNA, 509 bp, Glycine max
  Clone ID: jC-gmfl02220125d10a1
tcgccgcgttcctgcctagtcccctagtagagcagctctgacgttacattcatcgcgtccgtacgctctcacttctcctcgagcgacctcacacacactcagggtactttcctatagagagagagagagcgagagagagagagagaatgccacgctgggctatcgcggtgcatggtggcgctggtgtcgaccctaaccttgcactcaagcgccatgaagaagctaaacagcttttcacgcgctgtctcaatcttggaatctctgcatctgcacttctaatactatccgccatagatgtcgtcgcacttgtgtaccacggaattggaaacggatccgttggtcaattcgggccgtgcatctgccctgacacaaaaaggaacggcggtgatgcttgctctcatcatggatggtccataacgactattcggcgcaggtcctgatcttaccaccgataagaacccgatctctcttgctcgtttggctatggacaactccacgcgttcctacct

SEQ ID NO: 10630 - DNA, 426 bp, Glycine max
  Clone ID: jC-gmfl02220125d10d1
taatctgcggacgccctttgagattttttttttgacgaaatttatttaagagatagacaacaaagttaccatagtatggtttcacatttttatctaatacctagaaacaaggtttccatatgttatctaaacagggccccagtagaaagaccctgcactactggggtacatggctcaaaaatcccaaagctgcgttgaaacaaccatgatggaaaataatgaagctattcccagattccaacctccatgaagccattttcagcggcacagacattaaacatgccattggaattgaaaccataagccacttcccgaacgttggacacagcattgagaccagccattcctgtatcgagacggggcttgatcacaaaatccacggtttgttgaagcttcaagcctttgcattccattaccggtgtcacc

SEQ ID NO: 10631 - DNA, 582 bp, Glycine max
  unsure (1)..(582): unsure at all n locations
  Clone ID: jC-gmfl02220125d11a1
tttttaaaatggaggtggttcaagagcagcagctacaaaatacagatggaagaaaattgcacaactcagacagaaactcaaatgtcacacagcaacttcaacatccaagattcagaaaatacaaatggtggctacgtgtgtccctctacataatctttcttcttgtaggccaatctgcagccactcttttgggaagattatactatgacaatggtggtaatagcaaatggatggcaacatttgttcaatcagctggattccctgtacttcttccactccttttttacttcccaagacaaacacatgccaagtttaataacaatcccagcaataatgattattcctacaaaacaaaaccaaaattctccacccttgttttcctctatctagctattggcctaattctcacaggggacaacttgatgtattcctatggacttttatatctccctctttgcacctattctctactatgtgccacccaattagtcttcacgcggtgttctctttcttcctcaattcccagaaattcacagcattcataatcaattctgtagtcctncttaccatatcagcttctct

SEQ ID NO: 10632 - DNA, 336 bp, Glycine max
  Clone ID: jC-gmfl02220125d11d1
gtgggaagggtgttattttatatttgtttgtttgttgttatatagggggccccccaaggaggccccacaaaaaagacccggtgggggcgcccgttttaaaacacaaaaaaagggggggaaaaaagtatgtgggcacaaaaggggggccaccagcccaagagaaaaatggcccccgcaggggggaaaccccagggggagaatttttttggggccgggggtttttgggaacaaaaaaaagggggaccccccaaaaaaatggggcccccaaggggaaaaccaggggggaaaattttccccccatgggcttggcaaggggagaaaccccggggggggggg

SEQ ID NO: 10633 - DNA, 589 bp, Glycine max
  unsure (1)..(589): unsure at all n locations
  Clone ID: jC-gmfl02220125d12a1
caacatccgaacgaaacaatcatggcagcgaacccacccgcgccttcagaatccgacccgaaccaaaacccgggttcggagtcctttccgtacttcgaagacatgaacgaactcgagacagtcttcaaccgcttcgacgccaacggcgacggcaagatctccgccgacgaactcgacagcgtgctccggtcgctcggatccggcgtctctcccgaggacctccgccgcttcatggaagacctcgacaccgaccgtgacggcttcatcagcctcacagagttcgccgccttctgccgctccgacgccttcgccgacggcggatccggcgagttccgcgacgccttcgatctctacgaccgcgacaaaaacggcctcatctccgccgcggagctccacctcgcgctcaaccgcctcggcntcaagtgctccgtcgacgaatgccgcgacatgatcaagtccgtcgacgccgacggcgatggctgcgtcaacttgaggagttcagacgatgatgacgacctccagaatcgtggcgcgccaccatggctcgtncatagctttcgcgcgatcgattctgacgcgttcgtgactg

SEQ ID NO: 10634 - DNA, 289 bp, Glycine max
  Clone ID: jC-gmfl02220125d12d1
attatgttgagtttttttctttttttcggttgctgaatccgttttcattgttccaaaacaagaaaaaacaccatattgcccacagccgaaatgcggaagcggccaagggatcaaaataggacacgagcacgaaaccgagaaccggaagaaaggctcccgggggagaagcgaagacccggaacgattgacggcacacccaggaagctagcacggcggcaccatcaaaataaccgaggggggggaaaccaggggtcggaccccttgggggccgccccaaaactctgggggg

SEQ ID NO: 10635 - DNA, 312 bp, Glycine max
  Clone ID: jC-gmfl02220125e01a1
gagcgagcgagcgagcagtttcaaagagaggatttgggattgggaaggcgagggattgcgctgcgtctcttcctcttctctttcgattcatccctcattcataatcttccaatccaacaacctcagcctcacactcacacatacacacatctgaacgcgtatcgtccctcccatggcttcaaagcgcatcctcaaggagctcaaggacttgcagaaagacccaccaacttcttgcagcgctggtccagtagctgaggacatgttccattggcaagcaacgattatgggtcctgctgatagtccttatgctgg

SEQ ID NO: 10636 - DNA, 457 bp, Glycine max
  Clone ID: jC-gmfl02220125e01d1
gacacaaataacatcttgttcatgcgttcgcatcatgataaaaacatcacagtggttgttgaacatagttatttttatcaaattaagacaccgcccttccctatcccctcataacaaacataatcttaccccagaaaaacaggaagagaaaagcaaacccacaaaagttttcatagatgccatccatttcaatatacattatctaaacacaaatcagcccatggcatacttctgggtccagctgcgtgcagtggcctcatacttggcccggtcagttttgtacatgtgagcgatttccggaacaagtggatcatcaggatttggatcagtcagcaatgagcagatagaaagcagtaccttagagatggtgagtgcagggctccactgctccttaaggatatcaagacaaatgctaccattgctgttgatgttcggatgaaacaccttagtcctaaag

SEQ ID NO: 10637 - DNA, 325 bp, Glycine max
  Clone ID: jC-gmfl02220125e02a1
cgaaagacaataagtacgtgtgatgtggtgagtggaacttggacatctagcccctcctcccaccattataactctttccttctttggcccatttgcttctagttctagccccttcctttgttaactctcttgtttattcagaagaatggcatcctggttattgggaaggtcgagtaggatcttgattcatcaacatcaccaccttcacaaaaagtacttgcctttcttgttaggaccatttcttaaccataataatagctcttgttcctcttttccatcaactgaaccatttaggtgccgtgatgcatttccgggtaagaactca

SEQ ID NO: 10638 - DNA, 548 bp, Glycine max
  unsure (1)..(548): unsure at all n locations
  Clone ID: jC-gmfl02220125e02d1
gattgtaagatttagtacaatttcttgtttgaattggcaatatctacaaaggaacatcagaagggtagtctttgggatgcttctcgatggtttttctaattagtctctcttgctcctgaaggtttgatggtatttggtcatagacatcattaaataagtcctgaagtggaggtttttgtgctttctctgccacctgaatcgcatgcattaactgcttcctgacactgcttctaagctccaattcatccttgtcactccaccaaccattcctttctacccatcttttgaacctattcactggattccttgccatcttccaatattcaatctcatcagttccccggtacttagttgaatcatcagatgtagagtgatgtccaactctataagtgagagcctcaattaaaactggccttttttcttttatagcgatttctctagcagtgtgaactgcactataaacagcaagagcatcatttccatctactctgatgctccagatgccatangctntacccttaactacaataccatcacttcgaaattgg

SEQ ID NO: 10639 - DNA, 421 bp, Glycine max
  Clone ID: jC-gmfl02220125e03a1
cttcaccccttccttttttgcgttcattctgttttcataggcttcttttttctcttgttgcagtgacgaacttctgaagaaatggcaaatcatcctttgacacactctcactctttccgcgagaggtttgatgaaactctcactggtcacaggaacgaaattttggcccttctgtcaaggcttgaagccaagggcaagggaatcctgcaacatcaccaagtggttgcagagtttgaagaaatccctgaggagagcagaaagaaactccaagatggtgtctttggagaagttttgagatccacacaggaagccatagtgctgccaccatttgtagctcttgctggtcgacaaggcctggtgtatgggaaatctgcgtgtgaatgtgcacatgcttgctgctgatgagcttcgtcctgctgag

SEQ ID NO: 10640 - DNA, 353 bp, Glycine max
  Clone ID: jC-gmfl02220125e03d1
ctcactcccttttttttttttccctttcctcggaaaaaggccctccctaaaacccccatggcggggcacaacccccccgttccaaaactgcccaccctccccccgactgcccccccccacaagcttttaaaaaaaaaaacccctccgtgccccctttttccccccaaccccagctccactctgacacccccccccccttttcctaagcccctttacaccccaagcccgaccccctcccaaaagcgagccagaacctacaacagccccgccagcacctgacccccccaaaccccgtgtgcccactaaaggcccccgaaaccagcaaaccccccttgcacaccaacggcccccac

SEQ ID NO: 10641 - DNA, 429 bp, Glycine max
  Clone ID: jC-gmfl02220125e04a1
gttagaatacacagaattatgagctgtgaactcttattattcatttaatgttcatatgatcatctgggtctttcttgattatggagtctactaccttctgtcgataatgggaacgaatctcagcactcccaaaactgagaagtcttctgatgatggtgaaaatgagcatcttagatatggtttatcatctatgcaaggctggcgtgcaacaatggaagatgcatatgctgcacatcttgatctggatgcatccacttccttttttggtgtttatgatggtcatggaggtaaaagtggttgcaaagttttgtgccaagtatcttcaccagcaggtgctcaagaatgaagcatacatagctggagatataggaacctctcttaagaatcatttttcagaatggacgacatgatgcgtggtccaaggggatg

SEQ ID NO: 10642 - DNA, 522 bp, Glycine max
  Clone ID: jC-gmfl02220125e04d1
cacataacaaggttatttgatgagatatactatatatatacacaatgttctaataagttggggccaatatccttgcagttgatagcaagtagctaaacatcacaaaatgcctgcagattgttgctaatagctataaaaactaacatttggagcctcttattgaacaagcaaaacagattctaggtgtgaaaataaacacagaaatttggaaacaaatgctagttgaagtgaaaatgatcatctagactcatgtgtctacatgtgtgtagtgttgctgctcaaaatttactaactttcactgctctctagtcttagttcagatgtagcttatttcatttgaagatgatagctcttatgttatgccggtgcacttgattgggccagttttttgaactgcaccaaaatcatggtcatgttatcacatccatcaccaacagtaattgttggtgccaaacattgatctagtactctttcgcaacggcagaagtttagtttccagagcagttgttgacgacaaaatct

SEQ ID NO: 10643 - DNA, 322 bp, Glycine max
  Clone ID: jC-gmfl02220125e05a1
ttctccctcactctcttttcagttagggtttgcagaacggtggtgaggttgtggattcccaaattttgaaggtaatttctcagaagcagaagaagtagttggcacttgatatggctcgaaggaagagtattgctagcagaaaattaactaagcgtcagatggtactggcagagaaagatcacaataaaggaaaagcttctaatagtcatccaatgaaacaacatactagacatctaggacagacgacttctgaaattccaccttgtgcttcatcacatgcaatatctcgtgccactgatccatttgctaggacatttgacgt

SEQ ID NO: 10644 - DNA, 577 bp, Glycine max
  Clone ID: jC-gmfl02220125e05d1
cttaattcatcaaaatcttgtctttttacccactccattgatgaagatgagccatgatagcaaggccttcctaccattccaagccccttctttctaactatagcatgccagacatctgactcacttggtggaggatttccttgcgcaaatgcacttttggtcaattgttccaatgttcgtgcaaattcctcattgacatgttgtgatctcctatccacctatagctgagtatatgggtcagttcggtccattttggtcttcaattaaatgaactacaccaagctgacccacattaaatggaccacatttttacctagactgcatccagcccacttatctcacaggctaatggactgatttgctggcccaataataaaaaaaaattgaaaattgaaaacactagtcaactttttgaaaaatgataaaaaaatttgaaatatctctaattctttacatcaataaactataaatattgaaatactaagaaagaaatcaacgtatactaatcaaatccaagtaataattattcaaatcactaataaactatacaatataaatatattcaaaaaagtatctg

SEQ ID NO: 10645 - DNA, 238 bp, Glycine max
  Clone ID: jC-gmfl02220125e06a1
tcgtatatgattggtcggtcatagcagcgcttgctcatccactccacccttgaaaggaaacaaaattcacacacagaagaatagaagggtagttaagcttgcttaagcaacgcagagagaaacaaaaggagcttttgtttatccaggccaaattgtaattaatcaaactttctgggatcttcttctttctcttgccatgggcgcgtcgccgtcgtctttcgccgcgggaaacatcatg

SEQ ID NO: 10646 - DNA, 429 bp, Glycine max
  Clone ID: jC-gmfl02220125e06d1
gcactagtaatgcttttatatttcctcttcggactggtgggagaatcccctcgtaaggtacaagtcaaacaaactatacatacaacgttgtattaagatcaactatgcacacaatccaatgatgacgcaaaccaacacaaaccataaagaaagaaaacagaaactacaaaagattcactcaatgcaaaggcttttataagataaagggctgaatctcatttattcaagagataatggcatcagaaagaatattctctttatcctacaagatgtatggatgaacactattgctgcttatagtagccactttggtgaggcggaggatatggagatggaatggtataaggaggccgaggaacagaaccaggttgctgtgcttgtgcattgtagtacggaccacgccatccgggatatgctgggtggccatac

SEQ ID NO: 10647 - DNA, 381 bp, Glycine max
  Clone ID: jC-gmfl02220125e07a1
gaacaatgccatgtacctcatattgttgccaatatttttacgggttttctatttggtccatctgttctgggacgttggaatgcttttatcaaaaacgcatttcctttcagtaacatgataccatttgaaaccgtgggagggatggtccttgtttactacgtgttctttgtaggtctagagatagacttgaaaccaataacgggatttcacaagaaggccatggttattgtcatttcctgcacaatcttcaccttaccaatagggtttggcttgtactacatgcttgtcaccgacatgtggcgcaaacctttgccccttgtcaatgctaggccaaagggtgcaatattatgggtgaattacccttttttgcagcagtgagtt

SEQ ID NO: 10648 - DNA, 534 bp, Glycine max
  unsure (1)..(534): unsure at all n locations
  Clone ID: jC-gmfl02220125e07d1
gataaaaaaatgttgttgattttgaagtattatgagtggcatgcatgacaaaatcacatgacaccaaggattaatttgtctggatggaaattaaatcattgaatgtgcacactccaacgagatcctagtccaattaagaggatctagatccatgagaaaacattcaagcataatgacttaaaagcattggaaacttggttgaatggcatagtagttgctgctccaccatggcatcaaagactttgtcataagcaacagacgaagcagacctgacatggttcccatgaacaagcggagcctgtctctggaaaatcaaaatagatgtttgagccgcagagttcaaatcggtcaaagcatcgccaagaggccccaacgcaggctcctccaacaccggatccagcgtctgcgccagcgacatcttcctcccatgccctctccccaccacatacaaatcaaaccctttattccctatcttatccaacaccttcaccgtctccttctcatccctcaccttcttctncaaatacctaaccc

SEQ ID NO: 10649 - DNA, 464 bp, Glycine max
  Clone ID: jC-gmfl02220125e08a1
catttttaaaaggacaaaacttagatacaagttcattgggtattgtttgtattgttctccaattagaaatggagtttcaccttggtaatttgtgtaatcctttaatatagacctttattacacggattacttggtaaaatttcaattctaattggagagcaacctaaggaactatcttggtttggtcctttttcaaaaccctggttctgttctgtgatagatatgtttgctagttagctatttatctttcaaatttttgttaccacagtttcatttgcaattcttcatgcttcatggatacagttattgtattggaatttggatctatgtgtttcttttagttatggtctaaatctatggagaactttgtgcattgacagaggcaggattctttagcactgctttccagattatggaccccacttagccggtacctttgagatgtaatgctttgccgtggcaat

SEQ ID NO: 10650 - DNA, 500 bp, Glycine max
  Clone ID: jC-gmfl02220125e08d1
agataacaagatattggaatttataaacttgtaaatattatataaaccgatgaacagaaaagatatatcatcaaccataagagcctgattttctggatcaatattctctagaaaaacccttatgtgcaattttttctgctctacttgaggatttttggccaaaaccttgcgcatataagctataatactattaatcttgttaacatccaagtgactgatagcaaggtgagtcttgatgccccaatgagatttcttactaagattcctcacaacatttacactcaaattgtgattaggaatatgaactgcttcacaatcagaaactctcactattgttggtgaccaccagcttacatgctatacaaaatataaaatttgattacaatgaaaatttttaaagatatatacttggggaaaatatcacttataataaaaatcacttacactgaataacattatgttttctgttccttctaacaaccttttcagtaagtaggtga

SEQ ID NO: 10651 - DNA, 449 bp, Glycine max
  unsure (1)..(449): unsure at all n locations
  Clone ID: jC-gmfl02220125e09a1
gaaatttccgtgaagaaagagtaaatacctaaagtagtaaacgttcacaattacatgaataatcaattgatcgattccccttgatcgctctgttttactgtccgtttcaaatccgacagcagcccagcccggcccggcccaatcatgactcccaaactccaaaccgcggcctccgtggtggccaccgcgatgctcctccgttccctcgcccgcgactacgtcccggcggagctccaccactacctccgctgcaaactgtcgaaactcctctcctcattctcctccgaactgactctggtcatcgatgagtttcacgggctgacgccaaatcccctcttcagcgccgcgcagcttaccttcaaaccccacgccgtccccgatacaaaacgcttccgcgccaccctgcccccgaaatcgcgccacgtttccctnctcgtggagcgcaacgg

SEQ ID NO: 10652 - DNA, 343 bp, Glycine max
  Clone ID: jC-gmfl02220125e09d1
ggggcaaccccttaaagatatggggttaaaacccctaaaaattcgattttttaaccacaaacggggatccgaaaaaaccccccaattaaaaaaaatgctggggcgtaaaagccttcaaggggaaaacacacttttgctttattcaagggctccccccctactttaaaggggccccaaaaaactgttaaaagaaaattccggggatacatattaaaaaaacaggctccccccctcatggggaaacaacattggccagggacaaatacgaagagcttgaaaaaaaaaaggaggccacttgctcccaaatgaagaaaaaacaccattttataacccccaagggggg

SEQ ID NO: 10653 - DNA, 572 bp, Glycine max
  unsure (1)..(572): unsure at all n locations
  Clone ID: jC-gmfl02220125e10a1
gttgtgttgtgttgaagtagcaagctagcaaagatgtttggcatcttaggaggcaataaggggcacaagatcaagggtactgtggtgttgatgagcaagaatgtgttggacttcaacgaaatagtgtccactactcagggtggtttggttggtgctgccaccggcatcttcggtgctgccaccggtattgttggtggagttgtcgatggtgctactgccatcttcagtcgcaacattgccatccagttgatcagtgccaccaagactgatggacttggaaatgggaaagttggaaagcaaacctatttggagaaacatcttccttcgttaccaaccttgggagacaggcaagatgcattcagcgtttattttgaatgggataatgattttggaattccaggagcattttacatcaaaaattttatgcaatctgaatttttcctcgtgagtgtcactcttgaagacattccaaatcatggaaccattcactttgtttgcaactcatgggtttacaatgcanaaagttacaaagggatcgcattttctttgctaataagacatatctttcaaat

SEQ ID NO: 10654 - DNA, 513 bp, Glycine max
  Clone ID: jC-gmfl02220125e10d1
tttgtgattttttttttttttttttttttttttttttttttttttttttttttttattttttggtttttgacataaaaaaacttgatttgaccttcatagatcaaaatttcaaacttacatacgggggaacattacccgggggaacctgattggggcccaatcctttacctaaaaactggccccacccccttttagatttgaaaaacttggttccatccaattccaaaacttaagcattcctaagaaaattttgcccccctaaatttgcccgtttatttggcaatgaaaggtcccttggaaggaaaaaaaaccccaccccacacaccacacactttcattagaaagaaatgctggtgggaattcccctgaaagtaaggccttccccactggtgggaaaaaacccagggttaggcattttccccggtccattacgggtcctaagggttgaaatcttgctcctccctgaaattttgaccccaatttccttcaacttggttccaaacttcttaaag

SEQ ID NO: 10655 - DNA, 556 bp, Glycine max
  Clone ID: jC-gmfl02220125e11a1
cactaatccttctctgcttggaggcttttttttttttttttgatggatccggcaaagggattggaagcttcgggggagaagacccttcaagcagaagtgaaagcttttttcgattctgctcctcctttgcagaaaagtgatgagataactcagaagttgaatcagttcattcaacgcatttcttctccatcagcgaatgggaaagttaggagaattgtttgtgtgacttctggtggcaccaccgcgccattggaacaacgatgtgttcgctatgtggacaatttcagttcaggtcacagaggggccacatccactgagtatttcctgaaggctggatatggtgttatctttctgtaccggaagagaagtttccagccattttgtagatcccttcctgatgatcccttacttgaatgcttcaagcccaccgatgaggcgaacattcaagtttgcgaggcttattctgaagcagtgaagagggctatcgtggatcatcatactgcagtggcaggcggtctcttattgaaacttcctttcacaccatatttgagtatct

SEQ ID NO: 10656 - DNA, 347 bp, Glycine max
  Clone ID: jC-gmfl02220125e11d1
cccataaaagaaaataaaggttatttttaaccgaagtcgggcaaagggttgggtaaaaccggcgtctccggtacatttttttttttttttaaaccccgtttccatacgggctaattcatctcctttttattcaggaccatgactttttggcccaatgggtggggggggctaaaacgggaacgggaacggggggaagccaaaggcattccctagactcatttaccaaaatcctcaagggaagggggatgttcccccgaaagaagtttaatcggggggttctcaacatccttatcaaacggacttttttccccctgaacgggaaccttttgggccctggggacaacccc

SEQ ID NO: 10657 - DNA, 576 bp, Glycine max
  unsure (1)..(576): unsure at all n locations
  Clone ID: jC-gmfl02220125e12a1
ctcacacccaaacctcatggaaggctctgtcaacgaacgtcttgattttgggaagatgggatatgggtgcaatcattaccggagaagatgcaggattcgtgctccctgctgcaacgagatctactcatgccgtcactgtcataacgacgctgcgagcttgttgaagaatccctttgatcgccacgagctcgttcgccaagatgttaaacaagttgtttgttcagtttgtgacactgagcaacctgttgctcaagtttgcacaaactgtggcgtcaaaatgggagaatacttctgcaacatctgcaaattcttcgatgatgatgttgagaaagaacaatttcactgtgatgattgtgggatctgcagggttggtggtcgagataattttttccactgcaagaagtgtggatcttgttatgcaattggtctgcgtgataatcatctgtgtgtggagaactccatgcggcatcactgtcccatttgtgacgagtacccttttgattcattgaaagacaccattgntatgaaatgtggtcacacaatgcaccatgaatgttacgtagagatgataaaaat

SEQ ID NO: 10658 - DNA, 547 bp, Glycine max
  Clone ID: jC-gmfl02220125e12d1
agaatgatcaaaactaacgatcacagtgtattccaatgtgcgagaaaaactacaaggatcaaataatcccgaccaaattatagagaaccacaatggctgacaatgcaatcaatcacccagtatcaaatacatcactattaccagcaattcatgaccgggaaaaatgttttccctctgttacagtataaagatgttcataccagcccaataaccaagagacaacaatcccactccatatgttggaggaagaataacctaagaaaactatctaggacacaatacaccaatcacttttgatgctcaattaattcaatagccctctataataataacagggtgctaactttaattttctgctgacagttttcccttcttgaacccaagaatctggtcattggggaagaactggaggcgcaactgcacgagtattatatgatctgcagtgaccacatttttggccaagaatgtggaagtaaacttctgttgcgtcattgcagtcattacatagtatccaaaccttcctgtttcgataatcttcaggcatgac

SEQ ID NO: 10659 - DNA, 336 bp, Glycine max
  Clone ID: jC-gmfl02220125f01a1
cgaaagacaataagtacgtgtgatgtggtgagtggaacttggacatctagcccctcctcccaccattataactctttccttctttggcccatttgcttctagttctagccccttcctttgttaactcttttgtttattcagaagaatggcatcctggttattgggaaggtcgagtaggatcttgattcatcaacatcaccaccttcacaaaaagtacttgcctttcttgttaggaccatttcttaaccataataatagctcttgttcctcttttccatcaactgaaccatttaggtgccgcgatgcatttccgggtaagaactcatcacccaccct

SEQ ID NO: 10660 - DNA, 495 bp, Glycine max
  unsure (1)..(495): unsure at all n locations
  Clone ID: jC-gmfl02220125f01d1
gattgtaagatttagtacaatttcttgtttgaattggcaatatctacaaaggaacatcagaagggtagtctttgggatgcttctcgatggtttttctaattagtctctcttgctcctgaaggtttgatggtatttggtcatagacatcattaaataagtcctgaagtggaggtttttgtgctttctctgccacctgaatcgcatgcattaactgcttcctgacactgcttctaagctccaattcatccttgtcactccaccaaccattcctttctacccatcttttgaacctattcactggattccttgccatcttccaatattcaatctcatcagttccccggtacttagttgaatcatcagatgtagagtgatgtccaactctataagtgagagcctcaattaaaactggccttttttcttttatagcgatttctctagcagtgtgaactgcactatatacagcangagcatcatttccatctactctgatgc

SEQ ID NO: 10661 - DNA, 312 bp, Glycine max
  Clone ID: jC-gmfl02220125f02a1
agggtctacatagagcaagtgggaggagagacaagacaatagagagagatcaaagggcaaaatgagaaatacttgaactctcaacttcactgcccactcttgcccagaaccccataaaacatacataaggggcactgaggcaattgatgctttgccttttctattttctagtaactttgactcactaccattgtgtttctgcttgaggagatcactgtcttcaaccacagtaaccaagccaagagacacactttatcttccttcatgggaatatgagaatgaaactcactgtgccaccactcatatcaactt

SEQ ID NO: 10662 - DNA, 474 bp, Glycine max
  Clone ID: jC-gmfl02220125f02d1
gcaggaacaatgagacaatttatcctttaaaaccaaaaggtacacaggagagaagaggcaaatagaccaattagtctaaaaactcacttttgattcttgtttctcttttctgtctgggttgataaactgtgtataacaactaagtagaactacaaacataacatccaagctaaaaatcttcactttgaactttaatccagctaagattaacaattatacactaccctcctcacttctggccttcaaactcaagttatccatcacgggggaatttgaaacagccttgtagttatacaactctgcaattacgattataccacttcatctgtgcatgctttctctgggtaatgctccagctgtacaatgacttcaaattatatctgtaacaataaaggactaagagtctacactactacatatcaagggtaggaaatgaaattacagtgcctgggagtgttcctactacacattaac

SEQ ID NO: 10663 - DNA, 435 bp, Glycine max
  Clone ID: jC-gmfl02220125f03a1
agcgagggagagatggaggaaggtaaagaatggagcctgaataagcagaacgaaactacgacgcgaccatcccttaaatccgatgctccattcaacaaatatcaattatggaaacacaagctgaggaacaattgctacaaaagggtgcgagaggacagaactcgcttactctggaaatttagatgcagccaacaggaggaggatatcgtgaagtgtgcattccaggatattgtatctgatgaattcaacaaaatgaaacacacggatgagatgttatgggagtatgaaggtcctcccgatactacttaccagggtgaatgccaagacattttgttagaaatgcaaagaatcttttatcaagatctcaattcccaatcacctatacaagatttagaatgtgatattgaaacttgggaagatgaagtggattcagta

SEQ ID NO: 10664 - DNA, 548 bp, Glycine max
  Clone ID: jC-gmfl02220125f03d1
ataaaaatctaaagaaagatactttcatttctgtattcttaagagttctaggttcaacatattttttactacaagcacattacctttttcccatgcatattaaaatgaagcaaaacaagatagggaaaactctttgacatacgctaggcatcagatatctatataacaaataacaacgaaactgttaaattacaacctcaaatgtatcacaaccttcacgtgaaatgtacagtgcagttaaattaaactttgtcctcatgcaaaattggggttacaatctgcaacctttatcaaaatgctccgtgtggactttagccagccggaccagtaaaaagtccaaagtaagcttgctagctctgtgtaatcgaagttcacaacaagtgcagcatatgatattgtgattgactataagctctccttgcttacaaataggacaccaaatctctttcccatgggcctcatattcatttagctgcatatgctcacaaactgcacgagccaagtactgatccactgtatcttaccatgtttcaatatcacattctaaa

SEQ ID NO: 10665 - DNA, 422 bp, Glycine max
  Clone ID: jC-gmfl02220125f04a1
caacaaacccctgaggtgattttcacctttgaaacagagcttaaagtcaaaacagaggaattggaaaccaaggaggatatcttcccatggttttcctttccttctccatcaattggatcagaaaacgaggacaacatgttacccgagactatgtttgaaaaccatttcatggaaagcttctctccagtattcttatcaccagcgacttcagaatcaaaccctttctgtttgtcagcgtaccacttggacagcactggactattatgccaaaacatacaaacctcagaatctgatatcactgagatagtttcagccccaacttcagtcaccaagtccccaatcctggatttggatatcttgcttgataaaaggggattttgacacggatttccctttcaacattcctgaatttttctcttcat

SEQ ID NO: 10666 - DNA, 474 bp, Glycine max
  Clone ID: jC-gmfl02220125f04d1
cagaaattcctaccctgcttgaaccaaaagaagactaatgaaccaattacaaaagtaagaaaacggtagactacagcaacaaattatttacgcattacatcctaggtgaaggtacattacatacaggaaaactctccaaacttgcatgacagggatgtttcattgtcttgatttatcaacatgacttatgattacccttccatagtcaggatctacgactcaccagttaatccggaacagactatggctatgctgatcttagttcttactctctctttaactatctacgtggaactgcagggaagttcttatgaagagaaaaattcaggaatgttgaaagggaaatccgtgtcaaaatcccctttatcaagcaagatatccaaatccaggattggggacttggtgactgaagttggcgctgaaactatctcagtgatatcagattctgaggtttgcatgtttggcataatagtc

SEQ ID NO: 10667 - DNA, 291 bp, Glycine max
  Clone ID: jC-gmfl02220125f05a1
cttcttcaaacaaaaatctgaaatttgagctcaaacacaaaaaaaacaaaaatgaaacctacgatcaccattttgttctctctactacttttcatagcttcaccctccttggcaacccgacccgcatccaaccctgatcaagtcatgcactccaaggacaacaaaaacaacaacaaccaaggtgatggtggtgggttctttggccccggaggaaggttcagcatacccggttttggaaacgggtttggaaatggcatcataggaggaggatacggatccgggtatggaggt

SEQ ID NO: 10668 - DNA, 475 bp, Glycine max
  Clone ID: jC-gmfl02220125f05d1
gatgctactatatatagatggcttgaactcgttaagctaatattccacaaacttaaggctagttgatttaagtgcttgtgtttttcattaaattatcttaattattgaaataaatgtactattaaacactttccaaattttaaacatactgaaaggcttgtattttttataaagacatccattaatagaacgtttttgtatttattgttgggtgaggaatgagatctggagtttgcggctgaaggttcatatcacatcgacgacctaatctttgtctcttaccatccgcatccaataatacgagaatttcatgtcaaaactgcatctccagtgtaggcatatgatggcttatcaataagcgatgcacttctttttgcaatcaacggtgcatccaccgccaccgacaccggtgccgtagcccttgccggaacggcttaatgaggagacgcacttggcaggacacgtaaccttcttt

SEQ ID NO: 10669 - DNA, 288 bp, Glycine max
  Clone ID: jC-gmfl02220125f06a1
cttcttcaaacaaaaatctgaaatttgagctcaaacacaaaaaaaacaaaaatgaaacctacgatcaccattttgttctctctactacttttcatagcttcaccctccttggcaacccgacccgcatccaaccctgatcaagtcatgcactccaaggacaacaaaaacaacaacaaccaaggtgatggtggtgggttctttggccccggaggaaggttcagcatacccggctttggaaacgggtttggaaatggcatcataggaggaggatacggatccgggtatgga

SEQ ID NO: 10670 - DNA, 395 bp, Glycine max
  Clone ID: jC-gmfl02220125f06d1
gatgctactatatatagatggcttgaactcgttaagctaatattccacaaacttaaggctagttgatttaagtgcttgtgtttttcattaaattatcttaattattgaaataaatgtactattaaacactttccaaattttaaacatactgaaaggcttgtattttttataaagacatccattaatagaacgtttttgtatttattgttgggtgaggaatgagatctggagtttgtggctgaaggttcatatcacatctacgacctaatctttgtctgttaccatccgcatccaataatacgagaatttcatgtcaaaactgcatcttcagtgtaggcatattatggcttagctatatgcgatgcacttctttttgcaatcaacggtgcagtcac

SEQ ID NO: 10671 - DNA, 426 bp, Glycine max
  unsure (1)..(426): unsure at all n locations
  Clone ID: jC-gmfl02220125f07a1
attttatctattctctctctttcttttgtgttctaagcagctagaagcaatggagaggaaaagaagccatgcctctttcaccatgtttgcaatgcttgttggagtgatctctcagagccttgtcattcctgtagtatccaccactgttgaagatcagaagaactactacaccccagatccacatgctggaagtcccccctcaggctcacacagtagtactcctccatctcatggccatggaagctctccaccctcacatcatcacagtagtccaagtactccatcaacaccctcaggtggaaactgtnggatcatcacctccacaacatcatgatccaacaacaccctcaactccatcaacaccatcaaaccctccgtcaggtggatactatggaggtagccccccaacacctgtcactgtgagcc

SEQ ID NO: 10672 - DNA, 480 bp, Glycine max
  Clone ID: jC-gmfl02220125f07d1
caaaccaaaaccataaattttgcattaaatttcgaagaaattaacatgatatccatctcaatgcatattaatgaacatatcatgtgagagccttaaatgacacaaactaacagaaatcttaaatataaaatggtcttaactcaataaattggcacaccatactaattaactaattaagagtactactacttaatctgtatttcatcatggtctaggcttcattcttccttcgttggccatcttgaagagctgggcttgtgcttctgctgccttgttggagttgagtgaggccacaaacctgtccctgacttggttggctgcgtaagggaacttgttgttcaccatggagttgaggaaggaagctgtgccttctctgtagagtgctcctagcccatcagttcttgtgttggtacgtgctcgtggcaagctaaggccaggactgaaccctggaacagtagtacctgtcacaccaaatgcact

SEQ ID NO: 10673 - DNA, 362 bp, Glycine max
  Clone ID: jC-gmfl02220125f08a1
gaggatgcatacaagtcaccattgagtgtcatcattcttgatgacattgagagattattggagtatgtgcccattggtcctcgattttcaaacttgatttctcagacactgctggttctgctcaaacgggcttcctccaaaggggaaaaaactcatggatattggcacagcacgtgaactagatttcttggaatcaattggattttgcgataccttctctgttacttaccatattcctaccttgaacacaacggatgcaaagaaggtcctagaacagttgaatgtgtatactgatgaagatattgattctgctgcagaagcgttgcatgatatgcctatcaggaaactatacatgttgatcg

SEQ ID NO: 10674 - DNA, 586 bp, Glycine max
  Clone ID: jC-gmfl02220125f08d1
cagcacaacctaacaaacactgattcaaaaaaatctctgtaactgaaccgtaacaagcaatgtaatgaactgttaaaaaaagatttcaactcaataaggattatatgcactctaacttagaaagcgcttaatacaacaacttataacctaacaacatcctggaggcaatcatagaagtgagcgatactaatcttctctttgccagaaaagatggcttctgcagatccaccatgctccccttgcgctgccatctcgatcaacatgtatagtttcctgataggcatatcattcaacgcctctgcagcagaatcaatatcttcatcagtaaacacattcaactgttctaggaccttctttgcatccgttgtgttcaaggtaggaatatggtaagttacagagaaggtatcacaaaatccaattgattccaagaaatctagctcactcgctgtgccaataaccatgagctgtttcccctttggaggaagccgattgagcagaaccagcagtgtctgagaaatcaagtttgaaaatcgaggaccaatgggcacatactccaataatctctcaatgtcatcaaggatgatga

SEQ ID NO: 10675 - DNA, 356 bp, Glycine max
  Clone ID: jC-gmfl02220125f09a1
gttgcgttgtgttgaagtagcaagctagcaaagatgtttggcatcttaggaggcaataaggggcacaagatcaagggtactgtggtgttgatgagcaagaatgtgtcggacttcaacgaaatagtgtccactactcagggtggtttggttggagctgccaccggcatcttcggtgctgacaccggtattgctggtggagttgccgatggtgctactgccatcttcagtcgcaacattgccatccagttgatcagtgccaccaagactgatggacttggaaatgggaaagttggaaagcaaacctatctggagaaacatattccttcgttaccaaccttgcgagacatgcaagatgc

SEQ ID NO: 10676 - DNA, 371 bp, Glycine max
  Clone ID: jC-gmfl02220125f09d1
gttactgttgtgggttgacccaaatactctcacattgtcattgagggaccgacgtttttcactttccttctggggaccttgatacgggtcacctcggaaggatccccatacggagcctaaaggcggacccaacacccttattgctttgaaaaacccggtgtgggccgattcctaaacttgagcgtacataaaaaaattttgcccgcactaggttcgccgtgtctttggacatgacaggtgcccagggagggaagatagccgccacctggaaaccacaaagtctatcttcataggaagcccgccggggaaccccctgaaaggaagggcccccccaccggtcggaagaatcacccggtaggggacccgaaccg

SEQ ID NO: 10677 - DNA, 514 bp, Glycine max
  Clone ID: jC-gmfl02220125f10a1
ggagtatgttccagagtccatgtatagagtcttaaagcactatagcaatgctaatcaaagaatgccaatcatctacgtaaaactttatatgtaccagattttcagggggttggcttacatccacactggtcccaaagtttgccacagagatttgaagcctcaaaatatactggtggatcctcttacacaccaagtgaagctatgtgattttggaagtgcaaaagttctagtcgaaggtgaagctaatatatcatacatatgttcacgattctatcgagcaccagaacttatatttggggccacagagtataccagttcgattgatatttggtcagctggctgtgttcttgctgaacttcttttgggccagccattattccctggcgaaaatgcagtagaccagcttgtacatattataaaggtgcttggcacacccacccgagaggaagtacgctgtatgaatcccaaatacaatgactttaggtttccacagataaaagcacacccatggcac

SEQ ID NO: 10678 - DNA, 537 bp, Glycine max
  unsure (1)..(537): unsure at all n locations
  Clone ID: jC-gmfl02220125f10d1
ctccctttttttttttttttgaagaaaaacagatagataccacattacatttcacaaggaaaggaactggtgtgcattgcgcatcattgcaaatgaggcacatattaacaagaggaaacaaaagccatccatcaaaccctaccatcaaaaaaactcttctcgaccctaccctgcttacagccaaggctttagttttccccaaacagaagcattctgagttctgatctgcgtgaccatttcaggtcaaatattactatgacattgtagacgtttacaataaacaaggctatatatgcctggggaaataaagatccaccagttagcacaagggaatcaaaaggtacatatactgacggatcaactgcggccatccggcatcgcgaatctcagtctcggttcagcttgaaactacattcgccaggtcacagaacatggtattaagacaaaaaataatggtgccacttttttttaacttatcagctagtatacactatgtcccctaagcttatcgtcacgatcctnccagatgcataaact

SEQ ID NO: 10679 - DNA, 598 bp, Glycine max
  Clone ID: jC-gmfl02220125f11a1
ctcacacccaaacctcatggaaggctctgtcaacgaacgtcttgattttgggaagatgggatatgggtgcaatcattaccggagaagatgcaggattcgtgctccctgctgcaacgagatctactcatgccgtcactgtcataacgacgctgcgagcttgttgaagaatccctttgatcgccacgagctcgttcgccaagatgttaaacaagttgtttgttcagtttgtgacactgagcaacctgttgctcaagtttgcacaaactgtggcgtcaaaatgggagaatacttctgcaacatctgcaaattcttcgatgatgatgttgagaaagaacaatttcactgtgatgattgtgggatctgcagggttggtggtcgagataattatttccactgcaagaagtgtggatcttgttatgcaattggtctgcgtgataatcatttgtgtgtggagaactccatgcggcatcactgtcccatttgttacgagtacctttttgattcattgaaagacaccattgatatgaaatgtggtcacacaatgcaccatgaatgctacgtagagatgataaaaatgccaatattgtgtgcatatgct

SEQ ID NO: 10680 - DNA, 617 bp, Glycine max
  Clone ID: jC-gmfl02220125f11d1
ataatgatcaaaactaacgatcacagtttattgcaatgtgcgagaaaaactacaaggatcaaataatcccgaccaaattatagagaaccacaatggctgacaatgcaatcaatcacccagtatcaaatacatcactattaccagcaattcatgaccgggaaaaatgttttccctctgttacagtataaagatgttcataccagcccaataaccaagagacaacaatcccactccatatgttggaggaagaataacctaagaaaactatctaggacacaatacaccaatcacttttgatgctcaattaattcaatagccctctataataataacagggtgctaactttaattttctgctgacagttttcccttcttgaacccaagaatctggtcattggggaagaactggaggcgcaactgcacgagtattatatgatctgcagtgaccacatttttggccaagaatgtggaagtaaacttctgttgtgtcattgcagtcattacatagtatccaaaccttcctgtttcgataatcttcaggcatgacagttgcttcaatctcttcatcaattctcttcacgtcttagacatgtcaatcactgacttggagcatatgg

SEQ ID NO: 10681 - DNA, 531 bp, Glycine max
  unsure (1)..(531): unsure at all n locations
  Clone ID: jC-gmfl02220125f12a1
acttgacaaatcccaagaatcaaaagcccaaaacatctatgcattcaaactcagcatttcaagtagagtctgagaaggttagtccattagcggtggttcgatcaatggtcactgtttgtctattagggcgagtacccttctcaccgattgattcttccaccgtgtcaaggaaattggaaaatgatcagatggtgacaccaacagagaaggcagcacttcaggaacttggaggggattcgggggcaacacttgcagtggagatagctttaagggcaatggcagatgataatggtggtgttgaagtggaggagtttgtgctgagtggcaaggcaagaattatggttttaaatgtagaccggactcggcttctgagagaattgccagaaagtgtgcagtatcagcaacttgaatcaagttctggagatgggaatgcgaatcaaaatcaagttcagcatatcactcatagtggttctaatgtgaatggtagtttgcctgngatgggaaggctagttccgaggccaatgtctgata

SEQ ID NO: 10682 - DNA, 462 bp, Glycine max
  Clone ID: jC-gmfl02220125f12d1
aacaaaattgatgcttcaacattaaagaaaaatgtaatcaagtacaactagaatgagactattacacaattatttaatttacaaagcatcctgtattcttttcccagataccttgtcactctaatctttttttaaaaaaagaaaaaaaaaagaaaagaaatgtgaaagagtacaaaataacaatggtacaaaggtcaaaatgctggtttccctttagctttatcaaggcattgctcctaccaatcatgatcaaaagtggaaacttagccaatgtccacatcaatggccattgatttctcctctgaaacaaagttactttctggagcggctgcaggctccgcaaactgcgccgaagtggactctgattctgtggctgcaaatggactcctcgtgtgaggagcaatactagtgtctacttccatagcagaagctctgggaggtgatagtggctgcacctccaca

SEQ ID NO: 10683 - DNA, 364 bp, Glycine max
  Clone ID: jC-gmfl02220125g01a1
gattggaactttagatggggccaatgttgaaataagggaagaggttggtgcagacaactttttcctcttcggtgccacggctcatgaaattgctgggctgaggaacgaaagagcagacggaaagtttgtccctgatccaagattcgaagaagttcaagaatttgccagaagtggtgttttcggatcttacaactatgacgaattgatggggtccttagaaggaaatgaaggttttggtcgagcagattatttccttgcgggccaggactttcccagctacatataatgcccagagaaagctgatgaagcataccggaaccaaactcaatggacgagaatgtcgatattgaacacagcaagctca

SEQ ID NO: 10684 - DNA, 267 bp, Glycine max
  Clone ID: jC-gmfl02220125g01d1
cattacaacatgtatttagattcacatttgcgacgaagaccctacattgatacactttaacatattacctgatgagattttaaaataactccagaatgaatttttaattaagagcatgttacaaaaatatactcatacctatagtcagccaaaagccggaatgcacaacatagcctagctccaattatataacaggggacgtaatcaccccgaaaacattggcatttttatcagacgtcacaccccaaaaggccttgttaagagaaa

SEQ ID NO: 10685 - DNA, 337 bp, Glycine max
  Clone ID: jC-gmfl02220125g02a1
ggcatcttgtgttgtgtccctcttttaagctatttccttctcttaacacaattggttgtgccaattgccatagtcaccaaccaattaacaaaggtatatatatcatcatatcatcaccaaatgaaaaatattgggttgttttttcttgtggtggtggctacttttgtggtggcagccacagctggtagcttttaccaagactttgaaataacgtggggtggtgagcgtgccaaaatctatgagaatggaaaccttctcacactctcccttgacagagcctctggctctggctttcgttccaaaaaagagtacttgttcggaaaaattgacatgcagc

SEQ ID NO: 10686 - DNA, 374 bp, Glycine max
  Clone ID: jC-gmfl02220125g02d1
ggaataagaactccaacaattttattaatgaaaatgctttacaatttcggtacatttaccctggcatgaatttaactttgcacgctttaaataactttaggcacaaacaatggattaggggtcaacaaagctacaatcccgcattggtaaccgtttgagttgcgattaattgacccaagaaaggaaattaacggccatgggaacacctgtgtgtcccgtatatggggatcattttataatgatactgcagcatctgaattaaattgtttattgcctgggagcttttttgaggaaagccttgagggaaacgtgtgatattagcggccttattgtaaatcctgtaatgcttatgcccccaacggatgcttgcctgc

SEQ ID NO: 10687 - DNA, 307 bp, Glycine max
  Clone ID: jC-gmfl02220125g03a1
ctcagtcttcatctccaacaagcgttactgtgaccatggcatccaccactctatccgctacaaccccttctcagctatgctcaggaaagagtgggattgtcagtccctcacaggcacttcttgtgaagccagtgaagaggcacatgatggggaagagcacgggaatgagaattgcatgccaagccaccagcattcctgctgatagagtccctgacatgggcaaaagacagctcatgaatctgcttcttcttggtgccatctcactcccctgtgctggaatgcttattccctacacctacttttttgt

SEQ ID NO: 10688 - DNA, 432 bp, Glycine max
  Clone ID: jC-gmfl02220125g03d1
acacggtaaaaagtgacccgttcaggttcctttccatgttagcttcagttcacaaaatatcaatgtgattacaaaatatatttatgcattaatacaaaacagaatgtctggatttcatgtctaaatatacatgacatcagagggacggctttaaggagtctaagcccaccatggagcatcacctgttctgaaatctgtttcaacccaaggaacaaacaccaccgtcccatcatctatatcacaatgtgctaatgccagagacaagggagcaggtcctctcacaactcttgcttggtcattgaactgagatccatggcaagggcagatgaactcgttctctgcttgattccatgggacgacgcatccaatgtgagtgcacacggtattaattgcgtatgttcgcagggttctggctttcttcacaacatgata

SEQ ID NO: 10689 - DNA, 406 bp, Glycine max
  Clone ID: jC-gmfl02220125g04a1
ctccttctcccgccgcaactcacactgtcttccttctctagggcttttagctactccaaatgcttcgcccaacatggttcttcaaaatgatattgatttgctaaatcccccggctgagcttgagaagaggaaacacaagctcaagcgtcttgttcagtcaccaaactctttcttcatggatgttaagtgccagggttgcttcaacataaccactgtctttagccactctcagactgatgctgcatgcggaaattgccagaccgtcttgtgccagccgacaggcggccgggcaaggctaaccgagggatgctcctttaggaagaagggagactgagtggcgtgccatctttatttgtctgtgattggagagtttcagtaatgccttcttttggtctggttatggtat

SEQ ID NO: 10690 - DNA, 337 bp, Glycine max
  Clone ID: jC-gmfl02220125g04d1
atcaaaaaaaacttcttctgcaaaaactaaaaatgccttttcccataccaggccctctgattttaaagtatacatttacctgggccccctggaccggatggaaggaatgaaaaacccccaaggagggggaaatgatccctaatgtcttggaaaacatggaacactcacgactttccaattgtagaaatttcggtgtccttatgccaaacacaagagggcttttcctaaaacttcccttccctggccaaagaactgggctccccgctaagggccccttatctctaaaggggcctcgctccggtagcctttcccggcccgctgattgctggcccaataa

SEQ ID NO: 10691 - DNA, 352 bp, Glycine max
  Clone ID: jC-gmfl02220125g05a1
gttgggggccataagtggggtggggcttgtgaaggctttgcagaagagctactacaacaggtacaaaggttcgtgaacatgctcgctgatggttacagcaaaggaaccggtttgggcgctgagattattggcacctttattcttgtctacaccgtcttctctgctaccgatcccaagagagtagcaagagactcccatgttcccgtgttggcaccacttccaattgggtttgcggtgttcatggttcacttggccaccatccctatcaccggcactggcattaacccagctagaagccttgggcctgctgtcatattcaacaacgagaaagcttgggatgacccagtggatc

SEQ ID NO: 10692 - DNA, 544 bp, Glycine max
  Clone ID: jC-gmfl02220125g05d1
aataaaacgacatggtattggcaagaaaacgcgaaaaccacgaccacaggatactaacgcacatgtacgtaacacttaaaaatacatacacaaattaacatgggcatgtctgttgagatggacgtcaccacaaatatagtaaacataaattaaataaacatagtgacgaggatatacagattattccaatccaccatgtataagcaaattaattaagaacacaattaaatgaagcatgtctctcgtagctcaaatagcttggccagaattacaggtttgaggagctcctgaaagaccctagagcctttgctgcttgggccctcaacacggactggtggtagaatgcagcaagagcagcaccgatgaagggtccaacccagaagatccactggtcatcccaagccttctcgttgctgaatatgacagcaggcccaaggcttctagctgggttgatgccagtgccggtgatagggatggtggccaagtgaaccatgaacaccgcatacccaaatggaagtgggtgcaacacgggaacatgggagtc

SEQ ID NO: 10693 - DNA, 361 bp, Glycine max
  Clone ID: jC-gmfl02220125g06a1
gggatgagagagccatggaagaagctgctgccatccccatccttggctggcaaggccgtgaagctgggcccatcagccccagaagtgggaagggtgagcatgaggaagaccgtcaccaagcaggtctcctcaggaagcccatggtacggcccagaccgagtcaagtacttgggcccattctctggcgagcccccgtcctacctaaccggtgagttcccaggcgactacggctgggacactgctgggcttttcgcagacccagaaaccttcgtcaagaaccgtgaactcgaagtgatccactccaggtgggccatgctccgagccttgagctgcgtcttcccggagttgctgttccgcacgg

SEQ ID NO: 10694 - DNA, 500 bp, Glycine max
  Clone ID: jC-gmfl02220125g06d1
gtaaaaagcaagtaacattaagttggattcggatacacaagataattcacattatctgaagtacttcaccaaacacaaatctaaaaactctcaaaagtcatttcgttctttgacgctcactttccggggacgaagttggtggcataggcccaggcgttgctgttgacagggtcagcacggtgatcggcgaggttctccaatggaccctttccggtgacaatggcctgaacaaagaagccaaacatagagaacatggccaatcgtccgttcttgagttccttcaccttaagctcagcaaaagcctctgggtcatcagcaaggcccaatgggtcgaagctgccacctgggtagattgggtcagtgacctcaccgagggggccaccagcaatacggtaacctttaacggcacccattaggataacttgtgtggcccatatggcgaagatgctctgggcgtggatcacgcttgggttgcccagtagtcgagcccaccctcgctg

SEQ ID NO: 10695 - DNA, 508 bp, Glycine max
  unsure (1)..(508): unsure at all n locations
  Clone ID: jC-gmfl02220125g07a1
ggaaattcggcaaaagagggccgcggagagattgagtaaaacctcttcgggaccagatctcacgcaggttcccagcacctccgagattgcgggaatgagcaagtccgagagcgcaaataagctctctgagacagatcttagtgctctattgtctcaattgaaaggactgcaaaagaagaacacggagttggaggaagaaaacacaaagattagtttaaagcttcaaacgatggaaattgataatgagacaatgcacaagcaattaaatgatgtggaacaaaatacagtgccatctctaaggaaagctctgagggatgtcgcaatggagaaagatgctgcagnctgttgcacgggaggacctttcagcacagctttcgtaccctgaagaaacgtctcaagggaagcagaagatgagcaatatcgtgccgaggaagatgcagcagcattgagagcagaattgaactcaattcagcaacagcaatgactaatacagttagcacaatttcat

SEQ ID NO: 10696 - DNA, 348 bp, Glycine max
  Clone ID: jC-gmfl02220125g07d1
gttattatcaaaatcatactccataaaaggggtgggcttgtttacaaattaattttagtataaagaatgaccagttttacaaattcacgtttgggtttaacaaggggttcttatgccgaggttttccccaaaacaaaacagcttaagaatgaagaaccttttccaccattttctgggccattttgttccaatttttccaaactaattacctcaaaggggtaaaaacaattctgggggccttggaaaagccttcaaagaagggcttcacaatttcaaccggaatttcatcatgaaactgggcatttccattattggacagcccacgaggtggcttgcttcatttttatg

SEQ ID NO: 10697 - DNA, 472 bp, Glycine max
  Clone ID: jC-gmfl02220125g08a1
ggaaattcggcacaagagggccgtggagagattgagtaacacctcttcgggaccagatctcacgcaagttcccagcacctgcgagattgcgggaatgagcaagtccgagagcgcaaataagctctctgagacagatcttagagctctattgtctcaattgaaaggactgcaaaagaagaacacggagttggaggaagaaaacacaaagattagtttaaagcttcaaacgatggaaattgataatgagacaatgcacaagcacttaaatgatgtggaacacaatacagtgccatctctaaggaaagctctgagggatgtcgcaatggagaaagatgctgcagctgttgcacgggaggacctttcagcacagcttcgtaccctgaagaaacgtctcaagggaagcacaagatgagcagtatcgtgccgaagaagatgcagcagcattgcgagccgaattggactcaattcagca

SEQ ID NO: 10698 - DNA, 489 bp, Glycine max
  Clone ID: jC-gmfl02220125g08d1
tttgtgcttattcatgaagaggatcatgatctggacgaaggtgcatggaatattgcaatggcaggtggtacatgccttggtttagatgcccgtactgttggagatgatattgtgccgctggtaatgcccttcattgaggagaatatcacataaccagattggaggcaaagggaggcagcctcttatgcttttggatctatcttggaggggccttcacctgacaaattagctcctcttgttaaccatgccttaccatttatgcttagtgctttagtgaaggacccaaacaaccatgtgaaagacaccactgcttggactgtgggacgaatgttcgaatttcttcacagctcaattggtggtacaccaatcattaatgagggaaattgccaacagattattacagttctacttcaaagcatgaaggatgttcccaatgttgctgagaaggcctgtggtgctctgtattttctttgccagggttatgaagat

SEQ ID NO: 10699 - DNA, 600 bp, Glycine max
  unsure (1)..(600): unsure at all n locations
  Clone ID: jC-gmfl02220125g09a1
gctcgatgcatgcttggagcaggaccctgacagcaaggttgcctgtgaaacctgcaccaagaccaacatggtgatggttttcggagagatcacaaccaaggccaacgtggactatgagaagattgtgcgtgacacatgcaggaacattggttttgtctctgatgatgttggtcttgatgctgacaactgcaaggtcctcgtcaacattgagcaacagagtcctgatattgctcaaggtgtgcacggccacctcacaaagaggcctgaggagattggtgctggtgaccaaggtcatatgttcggctatgccactgacgagactcccgagctcatgcccttgagccatgtccttgccacgaagctcggtgccaagctcaccgaggttcggaagaacgggacatgcccttggctgagacctgatggcaagacccaagtcactgttgagtactacaatgacaagggtgccatggttccaaaacgcgtccacactgtgctcatcttcacacagcatgatgagactgtcacanatgatgagattgcagctgatcttaaagacacgtgattaagcctgtgattcctgagaagtaccttgatgagaag

SEQ ID NO: 10700 - DNA, 435 bp, Glycine max
  Clone ID: jC-gmfl02220125g09d1
ctcaaacaagaagaggatcaggatctggacgaaggtgcatggaatattgcaatggcaggtggtacatgccttggttcagttgcccgtactgttggtgatgatatcgtgccgctggtgatgcccttcattgaggagtatatcacaaaagcagactggcggctacgggaagcagactggtatgcttttagaaaaataccgaaaaaaaaaaacacaattgagtaagagggccggtgcccatgcctagattgcatgggctgattcggctcatgcccttacttgcggcaatggccctgttcaaaagtggtggcaccccttttaacgaaacgggtgccttcttccccttgtggggcttgaccacttcccatgtgagagtaggggcatttcttccaaagtgtccatttgcaccattcttcaagaacctggcatttccacccc

SEQ ID NO: 10701 - DNA, 103 bp, Glycine max
  Clone ID: jC-gmfl02220125g10a1
gctgctcagaggaagcttatcagagaaacttatgccaaggccttgaggacatcttggccataggtcttggctttagttcctgtgattagttttctctgagtgg

SEQ ID NO: 10702 - DNA, 468 bp, Glycine max
  Clone ID: jC-gmfl02220125g10d1
aagaagcgaaccaaacttagttgtctctgtatatatatttaacttcagaaaagtgaccctaaagtcactagtgatttacaaaatctgaaccacatatatattgcaggattccatttatgtttgacactcaatcaattctaggggcttcaaaaacccaccaaagtgtgccaaagtggttcattttattcaacaaaggaagacaataatggccagaaaacacaacaacatggaaccacatagcagtacactgcacactatatagtaactctgccacaagtacacacacacaaacacaaaggagtatgtcaagcatcatcatgtcctaaaagcgccacaagcattttctcatagtcaccggtggtgtccttaacaatagcacgttcaagagggacactgctcctcctttgatactcatctgctatggttttcaaatcaacctcagtccttgtggccaccactcttgtaagg

SEQ ID NO: 10703 - DNA, 486 bp, Glycine max
  unsure (1)..(486): unsure at all n locations
  Clone ID: jC-gmfl02220125g11a1
atcagtctctgaaaagagcaaagccggacaggatccccattttgtgaatcaagagggtgatatagagagattcagtgctccatctaagaggcatcacctctccccaaatgaggtatctgttacctcatgtgcgcaggcttcaacaagagcatatcttttgcatgatcaacgcccatcttctgggtctggcaaacacgtaaaccatatatccgttacgaagaggacatgaattacatggagattcaaagccaccagcccaagataacagacattataattaacctacataccgggaaaggcatggcccaaacttgcattatgagtatcaccctgttggctcatatgatgatggcaaatcacacatctttgcacgacctaaaactggtaatcatggcggcggcagatttagggacagaggtccaactcactcacgcttaagcgcggggaactcttatggactccgngtggatttgaagcttttgatta

SEQ ID NO: 10704 - DNA, 402 bp, Glycine max
  Clone ID: jC-gmfl02220125g11d1
acttggaacgcacaagcattatattaggggtgctgggtatccctagcaattgacacctttaaacatgtgcagcacggcattctgacttttagtaacacaatgccatcaaattactgaacaggaacttgatacactagcaagagaacaatcgaccgaaaggaactttcctaccaacaactcacaaaatcggggactccatatttgtcatcccctgccctactgaactcattgtgatcccactgacagtgacaggagcaccgatgagggaaggatggtattccaacggaagacacactgaaccgtcgcaaggaagtctattggtacggagagactcggctgttactcaaggagtataaaaccacccggcgatgctaatattctgccacaacgtaaggctagtgg

SEQ ID NO: 10705 - DNA, 313 bp, Glycine max
  Clone ID: jC-gmfl02220125g12a1
gttcgaacccacgctgatggctcgctagctatacggacgactgactcaaagagctgcactcatacctataatctatgggccagttacttactacaccatattaccaagactagctgcgcacgattcaacagcgtgcaagggaccttgctaagctcgaacaggcagtaaccgatcgacactctaaagcagacgatatgcacgctgaagatgcacatatctatcctgatcaccatgcttaaggcactccataggatgggtcccgtggacaactgtcaacgaccacgcgatatgtacgctgccatagctatagtct

SEQ ID NO: 10706 - DNA, 458 bp, Glycine max
  Clone ID: jC-gmfl02220125g12d1
gtgactgtagttatggtcaataatttgaaattagttttcctcagttttaaaacaatctgattctcagttaaactggcttacttgaacactgatgtcagttcgaactgtgaaattcaaaggcttttcttttctgaaaatgctaagaaagaatcttggctgacactatggagaattaatggcttcaagctgccttctaagatcttccagggcgtcattgtcaactacggcagcgttaatagttgccttatgaaactcgtcagcatgcgtaagtgcatgtgtgtgaccttccggcagaacatcttatcttatgggatccggaccaaccaggtgaacatgatcgacagcactgatattccattcattatcttcgagaagcggcacttcctcagttgatggcgcttcagctctcattgtcgctttggctgcagaatcccttgctggttttgaaacaggaactg

SEQ ID NO: 10707 - DNA, 313 bp, Glycine max
  Clone ID: jC-gmfl02220125h01a1
ggacgaggaagatagtggagatcttggggagcagggctttgagggatttcaagtttagcaactggttcggggagcgagactttaggttcattggccttgctttgccacttcaccagaccgacttccctagtatgtcgtatttctattgctggacagtgagctccatatggcactaccatggaggctgccactatgatgagcatttttacttcagggtcgaggatggagaggacgacagtagcgatgccagggtcaaaacaattttgattagcacaatcccttttttttatcgagtgctttcttgacttgtcag

SEQ ID NO: 10708 - DNA, 512 bp, Glycine max
  Clone ID: jC-gmfl02220125h01d1
caccaccatgaagttttcgtaatattttattataaggagttagctcttctaacttaaagatgttttataaagtaagaaagtaagtttgcaagatactttaattcaaatcatcaaatgaaatataataacaaagtttgaagaaagccaaccttcaagtcagacaagaataagaattttcatcctttgaaactggctcgcaccaccaagttcatatcttccagtgtggtcctatccttccatccaccagcctcattcaacgccaaaattctccatactccatccaccagcctcattcagcgccaaaattctccatactcccgcagttcctcgtgtatttacaagagtacaaaagaaattggcttaatcttttgttttcataaaagagctagcttccactattgcacaaaaatccatgttttttttcaaaaaattaaggaaaatggaactattggatctcgattttttaaattgtccaagtgaaaatatttgtcatgcatattacttgtgaaatc

SEQ ID NO: 10709 - DNA, 365 bp, Glycine max
  Clone ID: jC-gmfl02220125h02a1
tgggaagccccacaccgttccgtgcaaggttaccgggaagtgtgggtccgttaccgttaggatggttcccgcgcctaggggttccgggattgtggcggctagggttcccaagaaggtgctgcagtttgctggtattgatgatgttttcacctcctccaggggatccaccaagacccttggcaacttcgttaaggctacttttgattgcttgatgaaaacctatggattcctgacaccagaattctggaaggagactcgcttcttcaaatctccattccaagagtacacagatctattggcaaaaccaacagggaagactctaatcttggaggaggaaagggtggatgcttgatttgctagttttg

SEQ ID NO: 10710 - DNA, 503 bp, Glycine max
  Clone ID: jC-gmfl02220125h02d1
attcaaaactacagtcaattaaattaaaacttgaaacaatcaaaatccatacagagacataccaccgtctatcaaaaccaaaagtgaagcacagaaccaacaaaggtaaataacaatgtctctaaaacatccataaaaccaaaactagcaaatcaagcatccaccctttcctcctccaagattagagtcttccctgttggctttgccaatagatctgcgtactcttggaatggagatttggagaagcgagtctccttccagaattctggtgtcaggaatccataggttttcatcaagcaatcaaaagtagccttaacgaagttgccaagggtcttggaggatcccctggaggaggtgaaaacatcatcaataccagcaaactgcagcaccttcttgggaaccctagccgtcacaatcccggaacccctaggcgcgggaaccatgctaacggtaacggacccacactatccggtaccttgcacggaacggtgtggggctttcca

SEQ ID NO: 10711 - DNA, 316 bp, Glycine max
  Clone ID: jC-gmfl02220125h03a1
ctctgtcttgatcagaaactaacgctatcgtgaccatgtcttccatcggtctacacggtacctcacatgctcaacaatactcaggaaggagcgggaggagcggtctctgacaggaccgaactagggaacagacacgacgaggcggaggatgacgaatagtacgggaacgacgattgcatgcccggaagcgccccggcagcatgatcagagccacgagagggcaagacactgttaatgagactggatggtgaagttgccatctcacttcactgtggcggaataggtatacattacacgtaatcagtgggacgctcaa

SEQ ID NO: 10712 - DNA, 410 bp, Glycine max
  Clone ID: jC-gmfl02220125h03d1
acactgtaataattgaccacgtcaagtgatgcttaaatacagggtactttcacacaatttcattaactgtacagaaactaccaatgctttgatccaaaacatactgactgggtttgaaggctaggtatccatgacactcccagggactgttttaaggagtctaaaccctccatggcgcctggaacgacctgaaaatcgtttgaccacacagaacgaagacggccttatcattatttataccacagagtgctaatgccaaccacatcggggcagggcctctcacgaccctgccttggtcattgaaccgagatccacaggatgggcaccttgactcgaagaacgctcggttttatggccccatgcatccctgctgagtgcacgcagtccttgtcgggtaggtcgcaagggat

SEQ ID NO: 10713 - DNA, 394 bp, Glycine max
  Clone ID: jC-gmfl02220125h04a1
aacatgtttaccatgtggcagggagcaaaactaaagcaaaggaattggagcttttgttagcaatattgccagacaataatgggtctctctatggtgatctcaagcgaatttgtgaaactgaccttggcttaatttcacaatgctgtctgacaaagcatgtcttcaaaatcactaaacagtacctggctaatgtgtctctgaagatcaatgtgaagatgggaggtagaaacactgtacttcttgatgctgtaagctgcagaataccattggttagtgacataccaaccataatttttggagcagatgtaacccacccagaaaatggagaagactcgagcccttcaatagcagctgtagtagcatcccaagactggcccgaagtgacaaaatatgc

SEQ ID NO: 10714 - DNA, 583 bp, Glycine max
  Clone ID: jC-gmfl02220125h04d1
ctgtaaaggccttatggcaaaattttctacaaagattgacatagaatattttttacaatgctaaatttgacatctatatagaatctaatagtacttgtaggaattcattctaagctatgcctcaagaactgtaatcatggatttatcacaggaaacctacacgactaatgtacaaagtaatgtgagctgaacattgcattccatgattgttttcacttacctaccatgttgatgcttgccctatatatctatcattccaccaaggccaagtcactagcagtctaacagtaaaacatgaccctcttcacattttctttcaagtctggcaatggcttgacactataatcaccagctgctcgtattgctttggcaccataaccattgccatcacctgcagagccattgtcttgcatatctggctccatatagaaacgtgctcgaaacgctgctaaatgtgcataatatgctggaggaacaactgatactgagcgcgtacacctggcatatgtataacaaagattgtttgtcagagactgaattccatctgctgtgaaagttgtttcatccacaggacatgataatg

SEQ ID NO: 10715 - DNA, 423 bp, Glycine max
  Clone ID: jC-gmfl02220125h05a1
gtcttcgtctattcccaattccaaattcaagaaattttttaaacttgacatatctgctatcaccttttgcgtttcttgcgattcgacgatggccgatcaaaagctttcagaaccggcgcttaaacgtgagcagcttgatgaattcgtgtctatattttgaacaacgaattcttgaactccgacttcttcaagacctcgagaacaatgatgaatgtaggaaaaatgggagcctgaaaaggttaaatgaccagagtgatgtctggggattaagaagctgcttcaaaaatcattatgattcgcttccgaatcagaggtgcttggagaatcgagaagaagtgattcacgagacgatggaaagtggagttggaaaatatgatggaactgggcacccttaatggccagaaaacatattctttaagaatg

SEQ ID NO: 10716 - DNA, 494 bp, Glycine max
  Clone ID: jC-gmfl02220125h05d1
gccaagaaaatataaaaatgtgaaattaaaagttacaacaattataattgtccaaaacacacgccttggattattttagcataaaagtttggtaccaaatacacactgtagtagactgagaagtaaaatcgaacagcattacctcagagcactgccctgaaagtagaacacctattaattactgacaaactaaaacagaaacactagcaatcgggaaagtgcatgttagacagcaagagtgaaacgcattggtttaattttgggagcttcacttccttggtcattaccctgtatttggcagctgcttttccttgagcagagatgccacaccatcagaaggattccgaatattggaaggcatagtgtagtgagtgattgagaagatctgacaagcagccaaataccccaaaataaaagaatggcactcaccaaacgagaaaatggtgcaccaataacaatcattgctgcaacagcccaaacaaacaccatgaaac

SEQ ID NO: 10717 - DNA, 370 bp, Glycine max
  Clone ID: jC-gmfl02220125h06a1
cttaaagcaaagaggggccttccatggacccccaacaacctcctctaaaacattggatgctgctgggagactgagttcagtggagtctactgaagacaaaagtgagctgtttgttgtgagtactgaagatccagaaaatggtaatgataggaatgatggctctgatcctgctgagggaatgcctggatttcagaatgtcttgaaagatatgattcctggggtaaaggtgaaggtattcaaggtgataactccagagaaagtagacaaggatctatctaatgtgattgagaagataattgaggaccaagaccgagacgaagacgaagatgaagagatggaaaatgatgcataaagtctagaactggaagag

SEQ ID NO: 10718 - DNA, 435 bp, Glycine max
  Clone ID: jC-gmfl02220125h06d1
gatgaaaatttcatcataacagaaagaacgatgatatcatgaattttatgatacatgggaatttttcttataaattaggaacaatgtacaaagttgatgaagataccctgaacactacacctccataaaatgtcgaatgaagagactagtacattgtgctttagtgctgatattatgaatccctcttcaatctatagttagtcaagctacagctaccaagcttaagatacctcggtcatttgagttctagacaagcagccaaatgctcaacctatgctactcggcagaaagctagtagtgaagatcttttaaagctcaaatggaaaccctgtattgattggtgatatcttccattgaagcacaatttagcattcaacaaaacctagaacgctgagaatctgaagaaagaattacaagtctctgatattatgaaca

SEQ ID NO: 10719 - DNA, 454 bp, Glycine max
  unsure (1)..(454): unsure at all n locations
  Clone ID: jC-gmfl02220125h07a1
cccctgttaacttcattaatgcactgattttatgactcaacaaattaagtatttagatctgcctcataacacaggtctaagctatgttttgtgtaaacaacttgcgattatacatgtatttggtatttctagctatacatattatctgctggaaagtggatagtagttgaaagatgggccgggaaaggaatgcctcaattcaatatgtaaatcttgttgatgcttccttgggtgaaattcatttgctcgaacccaaaaatatgcttaatatcttttaattgtaattgataaaatgcttcctctttttttcttgttccttttgggtaggagcctaggaggtaacttgtgagctgaaagctgttagacatgggaaaaatatgtttcttcaactcactgctcttagttcacaaggaaantcatatgttgtgtatacatctgctgggtcttaaaacat

SEQ ID NO: 10720 - DNA, 497 bp, Glycine max
  Clone ID: jC-gmfl02220125h07d1
aaagtaaaatgccttaagtcttatatagtgagatgtattgtacatttaagagtggagaagagcataaagatgattgatttacagagttggagccctctcagcggagccagcaatcacagtgagcaagttgttaccaaaagggtcactgagatgttttgctaagttctcaactggaccttctccagtgacatatgcttggaagtagaaaccaagcattgcaaacatagctagtctaccattcttaatttccttcacctttagaagtgcagcttggtctggatcctttgctagtcccaatgggtcgaatggaccacccggatgaagcttgtcttccaagtccaggccattaataattctgtagtactcagcaccacccacaagaactatctcagcatcaacagcaagaataagattgatggggataggtttcccgaagtagttcaatgtacccccattaagagcaaagctccagtctgcattgattccatgaagagctc

SEQ ID NO: 10721 - DNA, 544 bp, Glycine max
  unsure (1)..(544): unsure at all n locations
  Clone ID: jC-gmfl02220125h08a1
cccctgttaacttcattaatgcactgattttatgactcaacaaattaagtatttagatctgcctcataacacaggtctaagctatgttttgtgtaaacaacttgcgattatacatgtatttggtatttctagctatacatattatctgctggaaagtggatagtagttgaaagatgggccgggaaaggaatgcctcaattcaatatgtaaatcttgttgatgcttccttgggtgaaattcatttgctcgaacccaaaaatatgcttaatatcttttaattgtaattgataaaatgcttcctctttttttcttgttccttttgggtaggagcctaggaggtaattgctgagtgaaagctgttagacatgggaaaaatatgtttcttcaactcactgctcttagttcacaaggaaatcatattgttgtgtataaatttgcatgggtcttaaaaacattttccaaacttcaccttgccttaacaaactgtaaaatttgaaaaagtntctgatgcttagctacagcctgctaggagcacttctgtgat

SEQ ID NO: 10722 - DNA, 532 bp, Glycine max
  Clone ID: jC-gmfl02220125h08d1
tttttgtttttttttaaagtaaaatgccttaagtcttatatagtgagatgtattgtacatttaagagtggagaagagcataaagatgattgatttacagagttggagccctctcagcggagccagcaatcacagtgagcaagttgttaccaaaagggtcactgagatgttttgctaagttctcaactggaccttctccagtgacatatgcttggaagtagaaaccaagcattgcaaacatagctagtctaccattcttaatttccttcacctttagaagtgcagcttggtctggatcctttgctagtcccaatgggtcgaatggaccacccggatgaagctcgtcttccaagtccaggccattaataattctgtagtactcagcaccacccacaagaactatctcagcaacaactgctagaataagattgatggggataggtttcccgaagtagttcaatgtacccccatcaagaagcaaagctccagtctgcattgattccatgaagagctcaatggtaacaatacaattc

SEQ ID NO: 10723 - DNA, 596 bp, Glycine max
  unsure (1)..(596): unsure at all n locations
  Clone ID: jC-gmfl02220125h09a1
gctatgcccacataacaacaccaaaaaaaatggcacttgtgagccacgtttgtgtgagatgtgtagccacacccacttccccagagtccccaaattcggcacccttgccagacccaaggcaaaccaaggttctccttccgaagaagaagcctcagaaatggtccaccggggtggctcccggggagtacggtggccctcccaccaccaccaaactccgcaaatactggggcggcgatgacgaagaccctttggcctctgatgactatatgtggaacatggagtttatgggtcgcttccaaaagttgattgaggaacccaatgctcaaccccctcctgcaaaggaagagccttcagggtttctaagcttaaatagagtcatgagcctggacagttgngaagttgatttgagcaaagaactcgcagctcctgtaaatcataatgcacacctgcaaattgatgcagaactaatgtgacaggaagcatagggtaagatataaatcagcaccacacgtcgtgagcaagaaaatgggatagagctaccaaggccgcaactggaggcagtgatgtgatgttccgggaaaataggcagtctcgtg

SEQ ID NO: 10724 - DNA, 499 bp, Glycine max
  Clone ID: jC-gmfl02220125h09d1
tttttgctttttcttaagaccaaatatgtggatatcataagcacttatccaaatgtggaaaaacataaatccaaccatatgttcaatatgcgggatagaaaaacccaaatataatgacatggcatccttccactgcacccctaatattcttcaggtctttcttgcagctacagggattgcctcctttatagctggagcaaaaggtgcaatcctgtatgtgaaaaaacctactatcatgggtatcaagcctaagcgcatatacccaaagcctggaaccaggatcgcattccaccggttatagaccatgaccaaaacaccaggaaccagttatcttggctgcccaactgctcccttgacaaatccctttgcaccatcaatgcttagcgagtacacgctacttcccagcatacgaatatactccaaagaaccaagaaagccagcaccaaagctcgctgcaatctcaggggaactagacacatgtgctgaaaccagaccaaca

SEQ ID NO: 10725 - DNA, 520 bp, Glycine max
  Clone ID: jC-gmfl02220125h10a1
gctatgcccacataacaacacccatgaaaatggcacttgtgagccacgtctgagtgagatgtgtaaccacacgcacttccccagagtccccaaattcggcacccttgccagacccaatgcaaactcaagatctccttccgaagaagaagcctcataaatggtccaccagagtggctcccggagagtacggcggccctgccaccaccaccaaactccgcacatactggtgcggcgacgacgaagacccttagggctctgatgactatatgtgcaacatggagtgtatgggtcgcttgcaaaagtagattgaagaacccaatgctcaacccactactgccaaggaagatccttcaagggctctaagcttaaatagactcatgagcctggacagatcggaagctgaattgagcccagaacttgcagcttcctgtaatcatactgcacacctgccaactgatgcaatactaatgtgacaagaagcatagggtaagatctaaatcagcaccaacacgtcgtgagc

SEQ ID NO: 10726 - DNA, 381 bp, Glycine max
  Clone ID: jC-gmfl02220125h10d1
aagaccaaatatctggatattataatcaataatccaagtgtggaaaatcataaatacaattatatgttcaatatgtgggagagaaaaacccaaatataatgacatggcatcctgccactccacccctaatattcttcaagcctttcttgtcgctacagcaattgcctcctctatagcttgagcaaaagttgcaatcttgtatgtgaaaaaacctactagcattggtatcaattctaagcgcattgatccaaattgtggaaccataatcgtatcccagcggatatagaccatgacccaaacatgtggatccaggaatcttggctgcccaatagctcccttgacaaatgcctttgcaccatcaggccttagccagttcacgct

SEQ ID NO: 10727 - DNA, 534 bp, Glycine max
  Clone ID: jC-gmfl02220125h11a1
cgaaacattgcttgcaaaaacaattcacgatcacagactttgagcgaccttgttcatggcaagttctctgctagaaaagaaaaagactagttagttaggctttcatgcaaagaacagagttctcccaaacacttcaatcaaacatggctttaccagccaatgaaacctccatggcagaaaggtctcagtgggtgctcaatgctcctgctcccccatccacgtggcacaacctcatggcttctgtgaggaacacaatttcatcgtaccaaaaaatgtgtacttatataagaggccaacctggacccaaagttgtgctttccttcttgcggagcatttttcctattcttcattggggtcgtaattattcaccaaccaaattcagaaacgacttacttgcaagtcttaccattgcaagtctctgcattcctcagagcattgggtatgccactttagcaaagcttgatcctgaatatggactctatacgagtgtggtgccacctcttatctatgctctaatgggaacttcatgagaaa

SEQ ID NO: 10728 - DNA, 540 bp, Glycine max
  Clone ID: jC-gmfl02220125h11d1
cacacaaaccatatagttcttttattacatcataggcgcaaaccaatagagtaaataacacaaattccactttgtgagtggctaaacaggaatgcgaagacttattgctctgtcccagaactatattgcacatgaagtactccggggcaggaaatctaaacacacaaaagaagcatcatacatgagtaaaattttacaacattccaattcaaaccagccatgaaaagctaagattttatttccacacacgagttctattaacaaagacagaggtacaacactcggttcaatccgtagcaattcagaaatccagcttgcagtcaatagcttctccaatagtcaagaagacccttcctccaattcttgtgacaaagttggtcgcctttagcttataaatcacttgccaacgaggattggcaattgctagatgcttcccacttgagaccaaactcttgtgcagttcctcaagagaagcaattcctgaggtgtcaatgctcaccaaattagaggtgtcaaggattacgagctgaattatgcttc

SEQ ID NO: 10729 - DNA, 468 bp, Glycine max
  Clone ID: jC-gmfl02220125h12a1
aacggttcaaagtccaactcaagcacaaagttgccgtttaatgcatccttccctcgcccaactctgaacaagtccattggaaatggcgtcgagttcctcaaccgccacctttcggccaagctcttccatgacaaggagagcatgcagccactgcttgagttcctcaggcttcacagttataagggaaagaccatgatgttgaatgacaaagttcaaagcctggattctctccaacatgttttgagaaaagcagaagagtatctgatttcagttgctcctgaaacaccctactcggaattcgagaacagattccgggagattggtctggagagggggctggggtgacactgccgagcgtgtcctcgagatgatccagcttctgctggaccttcttgaggcacctgacccttgcaccctcgagacattccttggaagagtccctatggtcttcaatgctgttatcctttc

SEQ ID NO: 10730 - DNA, 392 bp, Glycine max
  Clone ID: jC-gmfl02220125h12d1
gaatggaaaaaggcatatctttaaattgaattgatggggtggaaaacccgaatttaaagatttccaatcattcccaattttgcaacaaccaaaagaattttaaaaaaaaaagactttctttttttactttttttacccaaaaccttagcaaaatattaaaaccaacgacacttttttttaaactctttaaatccaaaagctgatcacaatcaaaatcaatggccttatttatgaaagccccataagacttcaaacgaccaaaagccggtttctccattgatggtctcttcaaacctgaatttacccttcaatagcaaggggcccagactcaaccaatttgcggtacttgagagcatagaacatctccaggtaacgtttgctctcacggcgtt

SEQ ID NO: 10731 - DNA, 478 bp, Glycine max
  unsure (1)..(478): unsure at all n locations
  Clone ID: jC-gmfl02220126a01a1
ctcaaacaagaagaggatcaggatctggacgaaggtgcatggaatattgcaatggcaggtggtacatgccttggtttagttgcccgtactgttggagatgatattgtgccgctggtaatgcccttcattgaggagaatatcacaaaaccagattggaggcaaagggaggcagcctcttatgcttttggatctatcttggaggggccttcacctgacaaattagctcctcttgttaaccatgccttaccatttatgcttagtgctttagtgaaggacccaaacaaccatgtgaaagacaccactgcttggactttgggacgaatgttcgaatttcttcacagttcaattggttggtacaccaatcattaatgagggaaattgccaacagattattacagttctccttcaaagcatgaaggatgtntccaatgttgctgagaaggcctgtggtgctctgtattttcttgccagggttatg

SEQ ID NO: 10732 - DNA, 688 bp, Glycine max
  unsure (1)..(688): unsure at all n locations
  Clone ID: jC-gmfl02220126a01d1
agccttagatgactccgatagcaaaaccnnnnnttnnnnnttanannncnnnnnnnnnnnnnnnnnnnnnnnnnnnnnnnnnnnnnnnnnnnnnnnnnnnnnnnnnntttnnnntnnnnnnnnnnnnnnnnnnnnnnnggggnngggggnnnnnnnnnnnnnnnnnnnnnnngnngngnggnngcgaagaaaatatacaggaaacatgacaaaattcacaaacttttacttagacaagagaaagataacaccaataataagctaaactcagacgactccttccaacaattgaaacaacaatccaccacactaaagttcttttggtatcatcacagtatatggcaagtttcttctgtatccccaggaatagccaatatatgatttacatatgcatttcaaaacaaaggaatttaacggttgatgattttcatgaatgcatgatgatttttgacctacgaaaccaactgacatgtaaaaaaatgcataatgctaggatgtaatctttcccatcctgggtcaacaatcacaatcgatccccagcctagaaaagcaagtatggagaaaaaaaattatatggatgaccaacagcctaggagcaattatacacaataggatgatcaaaacaatgattttgatgcaggttaaaagtcagaagaagaaaaaaaggaagagattcactctaaataaa

SEQ ID NO: 10733 - DNA, 463 bp, Glycine max
  unsure (1)..(463): unsure at all n locations
  Clone ID: jC-gmfl02220126a02a1
ctcaaacaagaagaggatcaggatctggacgaaggtgcatggaatattgcaatggcaggtggtacatgccttggtttagttgcccgtactgttggagatgatattgtgccgctggtaatgcccttcattgaggagaatatcacaaaaccagattggaggcaaagggaggcagcctcttatgcttttggatctatcttggaggggccttcacctgacaaattagctcctcttgttaaccatgccttaccatttatgcttagtgctttagtgaaggacccaaacaaccatgtgaaagacaccactgcttggactttgggacgaatgttcgaatttcttcacagttcaattgttggtacaccaatcattaatgagggaaattgccaacagattattacagttctccttcaaagcatgaangatgttcccaatgttgctgagaaagcctgtggtgctctgtattttc

SEQ ID NO: 10734 - DNA, 598 bp, Glycine max
  unsure (1)..(598): unsure at all n locations
  Clone ID: jC-gmfl02220126a02d1
gccaaacaactgcgcgggtgctgcttcctcngnataccangnncnnnnnttnnnnnnnnnnncnnnnnnnnnnnnnnnnnnnnngnnnnnnnnnnnnnnnnnnnnnnnnnnnnttttnnnnnnnnntnnnnnnnnnnnnnnnnnnnnnnnngggnnnnngnntnttttttttttttttctntntgattgattcacgtttcctaataaaatatacaggaaacatgacaaaattcacaaacttttacttagacaagagaaagataacaccaataataagctaaactcagacgactccttccaacaattgaaacaacaatccaccacactaaagttcttttggtatcatcacagtatatggcaagtttcttctgtatccccaggaatagccaatatatgatttacatatgcatttcaaaacaaaggaatttaacggttgatgattttcatgaatgcatgatgatttttgacctacgaaaccaactgacatgtaaaaaaatgcataatgctaggatgtaatctttcccatcctgggtcaacaatcacaatcgatccccagcctataaaagcaagtatggagaaaaaaaattatatggatgac

SEQ ID NO: 10735 - DNA, 564 bp, Glycine max
  Clone ID: jC-gmfl02220126a03a1
gcaattgattgtggaaaaccactagatgaagcactggcagacctggatgatgttattggttgttttaactactatgccgagcttgcagaaggattggacgcaaagcaaaatgctcctgtatcccttcctatggaaaccttcaagagttatgttctcaaggagcccatcggagttgttgcattaattactccatggaactatcctctattgatggctacatggaaagttgctcctgctctagctgctggttgtacagcaatattgaagccatctgaattggcatctgtgacctgtttggagctggctgaaatatgcagagaagttggccttcctcaggggtattaaacattgttactggattaggcaatgaagctggtgctcctttgtcatctcatcctgacgtagacaagatttcctttactggaagctctgcaactggaagcaggattatgacagctgcagcacagctaacgaagcctgtttctctagagcttggtggaaaaagcccaatcattgcttctgaggattgtgaccttgataagactgctgaatggaccatctttg

SEQ ID NO: 10736 - DNA, 573 bp, Glycine max
  unsure (1)..(573): unsure at all n locations
  Clone ID: jC-gmfl02220126a03d1
nacaaccaatgccgcgaatccgaatnnngannncnagtncnaggattnngggttaaaancaaanaccgaaaatngagaaaaagggtaaatgaaaaaaaaaaagaaaaaaagtttttttttttttaataanaatgatatatttaatcgggggggggggtttttttatatttatattttttataaccctcccatcctctttttatgaacaaatttttttggaagcctcatttcccatgatatgataaaattccaacaaaaattctgataaacataactgggcaaaaatgaaggaatgccctttgaccaaaaaccataaccttatgtcggtttttcaggggaggacattccacctgataagtccaaattgccaccccaagatgtattccaaccctttgggactatagctcttctatctccaattcaaatttttaactcttctgaccagggtggaatgggcttttaaatgcaaaattcttttcccaaacttttagtgaggctgccccaggggcctcggtagcattgttgaacaaaaacaacctaccacctccatagattgcctttgttggaaaaacc

SEQ ID NO: 10737 - DNA, 79 bp, Glycine max
  Clone ID: jC-gmfl02220126a04a1
agaacccgggacccacaccacattttgattgccagtggctaacatctcaatcgtggtcctccgagtcctccgtgctttc

SEQ ID NO: 10738 - DNA, 322 bp, Glycine max
  unsure (1)..(322): unsure at all n locations
  Clone ID: jC-gmfl02220126a04d1
acgccatccgttgcctannnttgatnnctcatgnccaaggatttgngtngtaagagccaaagaccgagtagntggaattaaggtgaccatgaccnaattctctcccccccattttttctttcttcttcatcctcttttcctttgggggggggttattttcctctcccctctcttgcccctccccctgctgcctaattactcctttttttctcaaatcaaactcaaccggcaaagttatacccctgaatctttcctcgcaacatctacttctgaacctacccttgcaacagggtttgccgagacccatgcttctctatcccac

SEQ ID NO: 10739 - DNA, 88 bp, Glycine max
  Clone ID: jC-gmfl02220126a05a1
agaaccctcatctctcctcacgcttggactgtgtaagccgttcatggcaatctttgtggaccgaggtctcagtcctttcccagagcga

SEQ ID NO: 10740 - DNA, 470 bp, Glycine max
  unsure (1)..(470): unsure at all n locations
  Clone ID: jC-gmfl02220126a05d1
gaacaaaagatggggggggccttcnnntcgatggcgagnncnngggtaaaatntccggcaagacccagctactaataggaggccgggctcacccttcnatttcgcatttttattttttgtaacttcttataaaactaagaggagggggtattttatcctaccctttaaaagtcccaccaaattttgaaaaaacacctcgttgctttacacatgaaaataaaattgcaaacttaaacaccaaaatatttcgtttaaggatgcaatgctgcccattccctccacaacggttccgcggtgacccaatgtccacatcccactgaacaagccataaagctgcattcaccaccatgaagagagtgttcaacttctgcccccgttttttctatccctgcttatataagttagtgaaacagggaatggttaattgattcctgcaccgaaaacacttgcaggaacaaaacttgagcgct

SEQ ID NO: 10741 - DNA, 92 bp, Glycine max
  Clone ID: jC-gmfl02220126a06a1
agaaccctgatcaccccagacatacggaccgttccagccgtgcatggcaatcagtgggcacagaggcgtctgtcctctccaagagctgtttg

SEQ ID NO: 10742 - DNA, 455 bp, Glycine max
  unsure (1)..(455): unsure at all n locations
  Clone ID: jC-gmfl02220126a06d1
gaaaangaggggctccattatctatncnaggcncgttaaaatataagagcaagacaggcaagtaatcaaggtccagggcaaacctaccctaccccactttttttttttcagacttcctaaacatccttggggaaggggtcctttatccaaccctttccaatccccacctacttctgaaaaaacaccttttttcttcacacatcaaaataaacctgcaaacttaaacaccaaaatcttccctttcagaattaactgctgcccattccctccaatacgggtccccgtgtaacccactgatcactatcccacatgaacaactccataaaactttcattcaccaccatgacgagcgtagttcaaagctctgccctcatcttttctatccctgcttctatcaccatgtgaaacagggaatggctcatcgattccatgaccaaaaacactcacagcctcaa

SEQ ID NO: 10743 - DNA, 285 bp, Glycine max
  Clone ID: jC-gmfl02220126a07a1
agaaccctgatcactccatacatattgaatgttcgagccgtgcatgtcagccagtgggcacagaggtgtctgtccagtccatcagctgttgggtaaggacgtggatgatgaaacacctcgttcgctcgtaaccctggcactggacttgcctactgatgaagattcaagaacggttgctgctaagatcctgaactgtcacgcgccgcccaaactatgatatcaagcttcccatgctcattactagattgctaaggctgatttggctctaggtcttacagacggact

SEQ ID NO: 10744 - DNA, 270 bp, Glycine max
  unsure (1)..(270): unsure at all n locations
  Clone ID: jC-gmfl02220126a07d1
gaaaaagtgcgggtatcgattcgtagcaggcaagatangttaaatccaaagcccaaatgatttctggttttaacctttccacctccaaatttttttatttagctacactcacttccctcatggggggggtggatttttatctataaatgcctaccccctcttgctaaaacaatcttttctttgtcaaatgaaactaaaccggcaaagtaaaacaataaaatcttccccttgcaaaattttattctgaacatacctttgaaaacggggttg

SEQ ID NO: 10745 - DNA, 340 bp, Glycine max
  Clone ID: jC-gmfl02220126a08a1
gggtcaaccgtgacgcctcaatcgctcttgcgcgtttcaatctccttcgacttctttgcaacgggatcaggtgctcgtccttcacgatggcgggaactgaagcataaaaaactgaatccaaaaaacctgccgctaagcaatccggtgggaagaagaaggaggtgaagaaggagactggcttaggtctcacgcatcggaaggcggagaacttcggagagtggtattccgaggttgttgttaatgccgaaatgattgaatactatgatatttccggttgctatattctgaggccttggtcaatggcaatatgggaagaacatgcaagagtttttcgatcccg

SEQ ID NO: 10746 - DNA, 468 bp, Glycine max
  Clone ID: jC-gmfl02220126a09a1
gcaagaataagaaagtctggacaaaagcgtgccaggcttgagaccattgttggccctgctattgataagggtgtggctcatgagtctgttggagtaaaaccagccaccttggttccaaaggaaatccctgtgataaaaaagaaccatgtcttaaagataaacattgttcccaaagcaacagtgaaagaacataaagatgatgacacaacacatgagttacatgagccagaaaaagatgttccggatcctaacaaatttttgactccagatgaattggagagaggaaagttgcctcctgaggaaatcttatcccttccaatgtttaagaactatacagctggaaatcctgctcctgtgttgtatattaagaatttggcaaagatgtgattgctgatgatttctattttatatttggctcctttgttggaagaattgatgctgctaagtctggtctttaagtcaaactga

SEQ ID NO: 10747 - DNA, 489 bp, Glycine max
  Clone ID: jC-gmfl02220126a10a1
aaaaatgaaaacccaaagtgcttctctcctctgtctttttctctctcttgctatccttttggctagtggcactgctgcaagtgcaactccaagaagcgcagtgccaagccaccatgtttcaacattcaacagaagcctttttccttccacttttctctttggaattggttcttctgcttaccaggcagaaggagcagcaagtgtagatgggagaggaccaagcatatgggacacctacactagacagcatactgaaaagatttgggatcatagcaccggtgacatgggagctgatttttatcatcgatacaagggtgacataaaaatagcgaaagaaattgggctggactctttcagattctctatctcatggtcaagaatattcccaaagggcaagggagcagttaacccccttggggttaaattctacaacaatgtcatcgatgagatcctagcaaatggtttaaaacttttgtcactcttttcatt

SEQ ID NO: 10748 - DNA, 195 bp, Glycine max
  unsure (1)..(195): unsure at all n locations
  Clone ID: jC-gmfl02220126a10d1
gattaatgagagtaaatcagttatgaccattttggtgggatcaaagaatcacactcatttcttaaactacaaccaactcttctttgaattgatgctcaggttatagaagaccttataggactaaccgagacagncctcatacttgaaaacattgacaggatcaacaatacatgcacatacttaacctttattccc

SEQ ID NO: 10749 - DNA, 467 bp, Glycine max
  Clone ID: jC-gmfl02220126a11a1
ggatctcttccatttcttttcggatcctggaatccaataggatcggggatttgaatgctactaaccttgttgacctagaattagcacctgccgacccctttgtattatctcaactactacgtgggcttacaatgcagattagcatgaacaaccacctccgtgcgagttatgcatccaacgtaccttgctctgctgtgaggaagccctcatcttctgggtttgactaatcctctgatgtggcaactgcaacgacgaattccaggtccatcgcttttgcaaagcgaagccaaagcttcatcgatcgtggagctgctgcaacccaccaccatattggtgggatgtctgactcctccaacccttcctgcttggtgtactctacccttccatggtggagttcccctaccggaaaaccggattgtggacgcaatggacatgaactgaacaagctgatgaaatctgctatcttt

SEQ ID NO: 10750 - DNA, 371 bp, Glycine max
  Clone ID: jC-gmfl02220126a11d1
gaagagaaaaacaaacacctttgctcaatttaaactcttcaggcttttgctcccaccaccttgaccttgggtacataatcagatgagcaggttcctgtgcagcaaaccaatcaaaatatgctccaagcttctaattctaaagcttgctggcaaaatactagggaaaatagctatgatacaaaatctacatccttctggtatccttcctaaacatatgcaagcagccccaaagagagagagacatatgcgccaaatgttaacatgaacggcgaaggatcccggctaagcaactcagcatctaatataaagaggaatttggatccaagcttgcagaaaggcccgccttaggaggactcccagcaaaatctctt

SEQ ID NO: 10751 - DNA, 385 bp, Glycine max
  Clone ID: jC-gmfl02220126a12a1
ggtaaataactatgaagcctacctttctattatccctttccttcctgcctttttttgcttttctggctctttgggaagatgctgtactagtcgtggtcatgcgtggcaacctcattttccctggtgggacatattacattatgccgttaacatggggcgctgtgggtggcggactgaaactacgccggacaggaaactcatactgtgcagctactgtttttcaagattactgaaaaatctttcgtggcacaccacccaaagacagcatacctgtgataagccctggaatcatctttacaggtactggacttgaaatcctgttcgcagaggaagcttattgtgctgaatccttcaaatgggtggcgtttgtggacattgaaattca

SEQ ID NO: 10752 - DNA, 305 bp, Glycine max
  unsure (1)..(305): unsure at all n locations
  Clone ID: jC-gmfl02220126a12d1
aggagctggggagccccgnanagaanncnnntnnnnggttagacgagctactatgtcggcggccagcccttttttttttttttttttttttgtattttatttcttactcccttggtttttttataggtttggagagaaaaccgcaaccacgacgccgacctttttttcatagtttcatcagcaggggccttggcagcaacccaaacgaaaacccctccaggctttcaaaacaagaccctggtggcaaagaactaaggaaaagagctgtgctgccccaggggcacacttgaggggatctcactaga

SEQ ID NO: 10753 - DNA, 477 bp, Glycine max
  unsure (1)..(477): unsure at all n locations
  Clone ID: jC-gmfl02220126b01a1
ctcaaacaagaagaggatcaggatctggacgaaggtgcatggaatattgcaatggcaggtggtacatgccttggtttagttgcccgtactgttggagatgatattgtgccgctggtaatgcccttcattgaggagaatatcacaaaaccagattggaggcaaagggaggcagcctcttatgcttttggatctatcttggaggggccttcacctgacaaattagctcctcttgttaaccatgccttaccatttatgcttagtgctttagtgaaggacccaaacaaccatgtgaaagacaccactgcttggactttgggacgaatgttcgaatttcttcacagttcaattgttggtacaccaatcattaatgagggaaattgccaacagattattacagttctccttcaaagcatgaaggatgtntccaatgttgctgagaaggcctgtggtgctctgtattttcttgcccaggttatg

SEQ ID NO: 10754 - DNA, 565 bp, Glycine max
  unsure (1)..(565): unsure at all n locations
  Clone ID: jC-gmfl02220126b01d1
tgcacgatcgaattgatacgaaancnnntttnnngtnnnnnnnngnnnnctnnnnngnggnncggggnnnngnnnnnntnnnnnnnggggttgttaaactggcaatgaaagtggccaaacaacgtgatacaattttatcttagtaacaaaaagaaagattcacgtcaccaaataaaatatacaggaaacatgacaaaattcacaaacttttacttagacaagagaaagataacaccaataataagctaaactcagacgactccttccaacaattgaaacaacaatccaccacactaaagttcttttggtatcatcacagtatatggcaagtttcttctgtatccccaggaatagccaatatatgatttacatatgcatttcaaaacaaaggaatttaacggttgatgattttcatgaatgcatgatgatttttgacctacgaaaccaactgacatgtaaaaaaatgcataatgctaggatgtaatctttcccatcctgggtcaacaatcacaatcgatccccagcctagaaaagcaagtatggagaaaaaaaattatatggatga

SEQ ID NO: 10755 - DNA, 561 bp, Glycine max
  unsure (1)..(561): unsure at all n locations
  Clone ID: jC-gmfl02220126b02a1
ttcggctcgagctcaaacaagaagaggatcaggatctggacgaaggtgcatggaatattgcaatggcaggtggtacatgccttggtttagttgcccgtactgttggagatgatattgtgccgctggtaatgcccttcattgaggagaatatcacaaaaccagattggaggcaaagggaggcagcctcttatgcttttggatctatcttggaggggccttcacctgacaaattagctcctcttgttaaccatgccttaccatttatgcttagtgctttagtgaaggacccaaacaaccatgtgaaagacaccactgcttggactttgggacgaatgttcgaatttcttcacagttcaattgttggtacaccaatcattaatgagggaaactgccatcagattattacagttcttcttcaagcatgaaggatgttnccaaatgtgctgagaagcctgtggtgctctgtattttcttgccagggtactgagattgtggacaacatcnntcgtactccntgtttcaggaaatgttcaatccttctactgtaccacagagagatgc

SEQ ID NO: 10756 - DNA, 652 bp, Glycine max
  unsure (1)..(652): unsure at all n locations
  Clone ID: jC-gmfl02220126b02d1
atgccggtcgatccgaatcngctnagcnaanncnnnnnntnnnntntnnnnnnccnnnnnccnnnnnnnnnnnnnnnnnnnnnnnnnnnnnnnnnnnnnnnnnnnnttttnntttttntnnnnnntnnttntttggggggggttttttttttttttttttttnttttttttttgtttgttttttttattttcaggaaacatgacaaaattcacaaacttttacttagacaagagaaagataacaccaataataagctaaactcagacgactccttccaacaattgaaacaacaatccaccacactaaagttcttttggtatcatcacagtatatggcaagtttcttctgtatccccaggaatagccaatatatgatttacatatgcatttcaaaacaaaggaatttaacggttgatgattttcatgaatgcatgatgatttttgacctacgaaaccaactgacatgtaaaaaaatgcataatgctaggatgtaatctttcccatcctgggtcaacaatcacaatcgatccccagcctagaaaagcaagtatggagaaaaaaaattatatggatgaccaacagcctaggagcaattatacacaataggatgatcaaaacaatgattttgatgcaggtttaaagtcagaagaag

SEQ ID NO: 10757 - DNA, 269 bp, Glycine max
  Clone ID: jC-gmfl02220126b03a1
agaaccctgaacacactagacatacagactgtgagagactaacatgttaaccattaggcacagatatgtctgtgctgtccaagagctgatcgatatagaagaacgatgatgaaataacacgttcagccgaagacgagacactggatgagcctaataccgaagaagtaagaaaggctgctgttaagaacgtgagcgaacatgagccgcgcaaggcttgtgatcaggcgaccgatgctgaagcctagattgctcaggatgattcggctcta

SEQ ID NO: 10758 - DNA, 410 bp, Glycine max
  unsure (1)..(410): unsure at all n locations
  Clone ID: jC-gmfl02220126b03d1
agcaacaatggcgttctatacgntcgttccaaagcaagataaaaataaaaaccaatacccacccacgtatacactactccctaaacttcactctaactcttacattttaaattttatctatccaacactctctccacactgggggaggggggttcatattcacctaccacccccctccctcttaacttaattaaccaccacttaatctcttttccaaaaataaaaaacaaccgtaaacccctacgcatgtattaattctcaaaacactcacccctccccaagaaaaaaaaaccaaaaaagcctaaacttcctaaacctgggaaacaaaccaactcccaaaacccaaataatcaaacttccaaattgagccacggccaagacccatcttatccaaaacttcaactttaccc

SEQ ID NO: 10759 - DNA, 112 bp, Glycine max
  Clone ID: jC-gmfl02220126b04a1
agaaccctgttccctccacacatttggacccttttagccgttcatgtcaatctgtgggcaccgtggcttctgtgctatccatatgctgatgggtatagacgtggatgacgaa

SEQ ID NO: 10760 - DNA, 88 bp, Glycine max
  Clone ID: jC-gmfl02220126b05a1
agaaccctctccacaccccaccctcagacctgatctagcgaccgtcgcaaccattggggacagagccctcggacccctccctgcgcga

SEQ ID NO: 10761 - DNA, 281 bp, Glycine max
  unsure (1)..(281): unsure at all n locations
  Clone ID: jC-gmfl02220126b05d1
atgcaacggtctgttctcgttagcgagcccngnantnantttttataagccttnatccatttatataattatctttggccttggtttactctttttctctctcttttttctttcttcctttctcacctatccctccggggggtggggatctttccttccccctacccactcctcttctcctttcgctaaaacttttttttttttctcaactcaaacttaacctgcaaactttttcgactgaatctttccttgcagaaataaattctccccctacccttcca

SEQ ID NO: 10762 - DNA, 272 bp, Glycine max
  Clone ID: jC-gmfl02220126b06a1
agaaccctgatccccccccacatacggaccgttccagccttgcatggcaatctttgggcaccgagctgtctgtgctctccaagagcgttttgctctggacggtcatgaccaaacatcacggttcgccgaagccatggcactcgacgtgcctgctaccgaggaagccagcagggttgccgtttagatcgcgaacgatcccgccccacgcaaagcatgagatcaagcgccccaagctcatgcctagattgctcaggctgatccggctctggctc

SEQ ID NO: 10763 - DNA, 402 bp, Glycine max
  unsure (1)..(402): unsure at all n locations
  Clone ID: jC-gmfl02220126b06d1
aaaaaaaatgggggcgttccgattttcgtatncnagnncnnggnttaanattnnnngggcaangaccaggntgactantacgaagggacggccttcanatnnnctctcgcacctttttttttattttaacatcactcattaccccagggggaaggggaaaattacccaacccctaaaaatccctaccacctgctgaaaaaacacaccctctcttcgcaaaacaaactaaaacggcaaagttataccacagaagctcccctcgaaaaaataaaatctgaacatacccttgcaacaggagtagctcagacccatgattcataccccactgactaacccatgaacctttattcagcatctttaagatcttttacaaattccagacctagtactttcatacctgca

SEQ ID NO: 10764 - DNA, 291 bp, Glycine max
  Clone ID: jC-gmfl02220126b07a1
agaaccctgatcacgccccacatacggaccgttacagccgttcatgtcaatctgtgggcacagaggtgtctgtgctttccaagagctgtttgctatggacgtgcatgatagaacaccacgttcagccgaagccgtggcactcgacgggcctgctaccgaggaagcaagaaaggttgccgttcagaacctcagcgatcccgccccgcgcaaagcatgggaactagcgccccatgctcattactagatgtctcaggctgattaggctctggatctacagacggtgctggactg

SEQ ID NO: 10765 - DNA, 457 bp, Glycine max
  Clone ID: jC-gmfl02220126b08a1
ctcgagccgcatttttcatctcgtttactgagtggggggttctgctgcttcagctgctactgggtccaatcgttctctactctatgtttgtgtacttgaggtgcatgtggttgatactccatggaaactgtggttggaattgaggacaatgacgatggaaggtttgaagacagtggggttgatagaagcagttcggctttgtcttcaccgaagcaaatttccaacccaattgtatacaagcttgttcgggttgaaggtgatgggaagttagtgcctgcaacggatgatgaagtaatggaggtgggggattttcttgagtatgaaaatagtgaaatgcatgttggcacatacactggacaaagtttggaatgcatatcaattgagagatcatcttctgggaagcttcgattggagcgtttggaaggaactgcataggcagatttggggaaactaaatg

SEQ ID NO: 10766 - DNA, 419 bp, Glycine max
  Clone ID: jC-gmfl02220126b09a1
tggacgcaggcaacgtgcattttcccattcgaaggacaccatcacgccgttttcgcgtccccgtcgtttcggatccatcgtcatcgtttttgtcttcttcttccattagtttagttgagaatcaatcccatgacaccgagctggagcctccgcccgccaccgtcgctgcctccaacggtcagatccggtaccgatcgccgtcctccgccgagctcttcgacggcagcagcaactctccgccctcgcacgccgccgaccagcactcgccggagttcgagtccagcaaaatgctgaagcgccccggccgtcaggagtccctcgccgacaagatctatccggtttcgcgggacactgctccgtcgtcggcgatcccgctcctcctcatcacatttcgtctctacgtcatgccgtccagcacc

SEQ ID NO: 10767 - DNA, 335 bp, Glycine max
  Clone ID: jC-gmfl02220126b09d1
ttttttttttttttttttttttttttctttttttttttgtttgttttttttttttttttttgtggtttctttgttttggggcagcccacagcgggacccatttaattttccctggaaaaaaaggggccccatcccctggggggatcccttaggctgtggagcccccttgtgctgggcatgcggggcccacactggaaaagcccatctcggccacagcgggggaccccaatgcccattatctggacccccccccccaacaggacccgcaacagcaggggtgcccgtttgtgctccagcacccggaagagggcctcctggaagacgaccccagctgg

SEQ ID NO: 10768 - DNA, 513 bp, Glycine max
  Clone ID: jC-gmfl02220126b10a1
gacgcaggcaacgtgcattttcccatacgaaggacaccatcacgccgttttcgcgtccccgtcgtttcggatccatcgtcatcgtttttgtcttcttcttccattagtttagttgagaatcaatcccaagacaccgagctggagcctccgcccgccaccgccgctgcctccaacggtcagatccggtaccgatcgccgtcctccgccgagctcttcgacggcagcagcaactctccgccctcgcacgccgccgaccagcactcgccggagttcgagtccagcaaaatgctgaagcgccccggccgccaggagtccctcgccgacaagatctaccggtttcgcgggacactgctccgtcgtcgcgatcccgctcctcctcatcactattcgtctctacgtcatgccgtccagcacctcaacgagtccgtcggagactacgccctcgttaaccggaaaatgtcccccgaaagaaatccgtcggctcctacgccgtcatcttcgacgccggcagct

SEQ ID NO: 10769 - DNA, 312 bp, Glycine max
  Clone ID: jC-gmfl02220126b10d1
cttcaacatgccatttggcattatttatttgataaaaagatctcttgattacatccaacacaagtgatatacgatgaaatctaaggagataaacaagaaaaacactagacatggcaaaggaacactaaattcagatcacttgaaaaggaacttttgcaaccaaaaggcagagaacccggggtgtcttttcaagtttgacttgaattccacatatatgagcccgattcgaactgtgtaaccagcctcccattcaaaactgaacgaaaacgaccatgccttagagaccttaaaaataacaccttgcttgatcgg

SEQ ID NO: 10770 - DNA, 273 bp, Glycine max
  Clone ID: jC-gmfl02220126b11a1
aaaagacctatgctacatgcacatggattggctagcctatacatgcgcacgcaacatgtagcggtatacaccaccggggccttgcgatttaccccacagatgaaactagacgtatatcactccaatgatgcccaagaagcatgctgagcagcaccgcagcctgacggaccttcttccatttcgcaccatctgttcactatagggattgccgttaccgatatctcgcatatccatccatcttgctctggcatgcacaacgaccgtgcctctccc

SEQ ID NO: 10771 - DNA, 287 bp, Glycine max
  Clone ID: jC-gmfl02220126b11d1
ggcttaatattttttattttatatagaattgtgctagcttaatcaaaggcaaatactttgaggtccacttgctagagaaaatacatgcatccacccgcagagaaagggggggaattaattattcttttatacactaaaatttgataaaattctgcatcctgcttcgagcaaggtgtctccaaggcttccctgacctacaagtaggaactctccggtcaaacctctggattaacctgaactttgatgttgtggatatcatatctgatcctatgcctaactataatatt

SEQ ID NO: 10772 - DNA, 453 bp, Glycine max
  unsure (1)..(453): unsure at all n locations
  Clone ID: jC-gmfl02220126b12a1
aggaaaaatgggggggattgagtccgatncgaanncnnnntnnnngtnnnnnnccnnnnncnnnnnnnnnnnnnngngggnnnnnnnnnnngnnnnnnnngnttttggnattcntttgctttctggctttgtttgctactctggctctttcccaggatgtagcacaagccgagcacattagtggctaccccatactcccaggtggtacaaatcacattatgccatccactcgcggcgctgccagtggtggattgaaactacctcggtcaggagactggaactgctcatctactgggttggacgaatactcagatgtgttacctggcacaccaaacaaaatgagcatacctgggataaagcctggactcatctttacaggtactgcacttgaaagcgcccaccaacagaaacctgatggggctgaatcctccaaccgtgtgtggatggtggaca

SEQ ID NO: 10773 - DNA, 187 bp, Glycine max
  Clone ID: jC-gmfl02220126b12d1
gataaattggcttttttttttttatttttttaagaagtgtgctagcaagactcaagggcaaacaccctgaggtcccctctctatagagaatacgggcttgcacccccagagaaaaggggggactaaatgattctatcacccactaaaataaaataaaactcaacccccttctttgttcaaccgcccc

SEQ ID NO: 10774 - DNA, 262 bp, Glycine max
  Clone ID: jC-gmfl02220126c01a1
attacccgaatggctcttcacagatggacggtgactctctatcatctcaaccgttatggtcatagctgagagtgctatgccagagacgattgttttaggcgtgcatgatggccaaacactttcagccgaagatcagtgactgaacgtgtatattatggacgatctaaccttggaagctgttataaccctgagcgaactgtagacacacagtacatgtaaacctgcttctattaataaggccttgatgcgtacggatgattga

SEQ ID NO: 10775 - DNA, 267 bp, Glycine max
  unsure (1)..(267): unsure at all n locations
  Clone ID: jC-gmfl02220126c01d1
aganaaaaggggctacctgtctctatgcgaggccnagattanggtattagccaaaacctagacagtatccgggcttaattgtatataacccaccccatttttttttttccctcatacctcaataaataggggggggggactttttatcttattttactccaccaactccccctataacaaattttcttcacgcaaattaaacttaaccgccaaagaaatacaactcatttcaaccttgcacaaataaattattcacctacccttgaa

SEQ ID NO: 10776 - DNA, 228 bp, Glycine max
  Clone ID: jC-gmfl02220126c02a1
agaaccctcaacacgcaacacatacagaccgtgacagacgatcatggcaaccattagccacagagctgtctgtgctgtccaagagctgatcgataaggtcggtcatgatggactagcacgttcagccgaagacgagacactggatgaggctaataccgaggatgcaagaaaggctgccgttaagaacgtgagcgaacatgagccacgcaaagcatgagatcaggcgag

SEQ ID NO: 10777 - DNA, 558 bp, Glycine max
  unsure (1)..(558): unsure at all n locations
  Clone ID: jC-gmfl02220126c03d1
atgacactggtacttgatttacgcatancagagancnnagataannggttncnggncaaagacccccggacggggatacaatgcttttttctnctttaattccatcccctcttttctttttttaatccccactctcacccctcggggcagggggtgtatttttttattcttttccccatattttccctcccggttccggccttaaatttttaggtaccaaatccagaatcggaaaaaaattttgcgtgaaccatttttctaaataacaaattcttaccaaaaaatgccaggaggcctaaaccttaaacaaaagggctttaaacctctctttaaaaaaaaattagcgtaccaaaccttatgtcaattacaactgcgcaggaaaaaactaccccaaccgaaaactaaaacccccgcccaataaagggtctctttgggccacaaacccctttggttggctgtgaagaacctctttaaaaaggttcttggtttaccaaaaccccaccttttatccaacttaccctgggcttatttttgttttgaagaggaggtataaccccc

SEQ ID NO: 10778 - DNA, 111 bp, Glycine max
  Clone ID: jC-gmfl02220126c04a1
agaactctgatccccctccacccacgtaccgcctgaacctttcctctcaatcaatagggaccgaggcctctgtcctctactcagagctgttggatcgagacggtcatgaca

SEQ ID NO: 10779 - DNA, 181 bp, Glycine max
  Clone ID: jC-gmfl02220126c05a1
agaaccctgatcaccccccacattctgaccgttactgccgttcatctcaaccgttgggcaccgggccctctgagctgtccccgccctaatgggccgagaagttcgatcaccgcacctcaccttcttccagaaccgaggcacttgccgtgccatctgccgaagaaagcaccaaggttgccgt

SEQ ID NO: 10780 - DNA, 263 bp, Glycine max
  Clone ID: jC-gmfl02220126c06a1
agaaccctgatcacaccagacattcggaccgttccagccgttcatgtcaatcattgggcacagagccgtctgtgctctccaagagctgattggtatggacgtacgatgacagaacacctcgttcagccgaaaacgaggcactggacgggttttctacccaagaaggcagcaaggctgccgttcagaacctgagcgatctcgccccaggcaaagcatgggaagaggcgaccgatagctaagcccagactgctaaggccgattgg

SEQ ID NO: 10781 - DNA, 226 bp, Glycine max
  Clone ID: jC-gmfl02220126c07a1
agaaccctgatccccccagacatacggaccgttccagccgggcatggcaatcgttggggacagagacgtctgtgctctcccaccgctaattggtctagacggtcatgacaaaacatcatcgtcagccgaaaaccaggcactggacgggcctgatacccaagaaggcagcaaggcagccgtttagatcgtgagcgatcctgcgccgggcaaagcatgggaacaggcg

SEQ ID NO: 10782 - DNA, 344 bp, Glycine max
  unsure (1)..(344): unsure at all n locations
  Clone ID: jC-gmfl02220126c07d1
gaccaaatggttgtcgatccgtagcaancnnnttaattaaatccttatagcatattttattggttttttacacacttttaatccttttttttttttctcctttctctctttctcgggcgcgtgtatctttctctaactcctcacttcaaactactgataaaaacaaacttttcctggtatatccaagggaacctgaatggttattctaaaaacactatcctccgaacaagcatgatttatccctccatgggaacactggtaagaacaacggtctcaacggttacacccggcccagacacgaatattacccccccctctaacccttctccagcggaactctgccc

SEQ ID NO: 10783 - DNA, 454 bp, Glycine max
  Clone ID: jC-gmfl02220126c08a1
ctcacactttcaaccccatccaatcctcacatgcatgctgtctctgccaaagtgccgagtcacataacatttccattgttaccattctttctttccatcacaaccacttattaagcctctgatcctcactttctctcacacaaaaacacactcaccatggatcatcgcaaaccattgctacccacttcctctgatgctgctccaaatccacacactcgcaaggaccttcttctagttatttgcggcttgctattactctcttcccttgttgcctttggaggggacagggcctccaacgcgccgcatgccgacgtggcatcggcaacatcgaacgatgagcaacgtagtccgacatcggtgccttctccgaaattggacccggtttcgcgaggtgtttcttccggggtgtcagagaagtcatcaagcatgttgtttgcggttaaagatggagctt

SEQ ID NO: 10784 - DNA, 510 bp, Glycine max
  unsure (1)..(510): unsure at all n locations
  Clone ID: jC-gmfl02220126c08d1
gcaccaaatgatcaatcattctgtangcattncaagatannagttaaaaccaaaaccgaaaaaaaatatttgtgaaaaanaaacaaacacacaaaaattttttttttaaagaaacaaaacccaaccaagggggaagggttttatttctataaccccacacctcccaactcacaataaataacaaactttccctgttatctccaagggaaccttattgatcactcttaaaacactaaccaccgaatcaacataattaatccctccatgggaacactgtgaaaaacaacggtctcaacggataaacccggcccaaatccaaatatcaccccccactctaacccttctccaatggaactctacccttcctccttagacttcttcctcatttcatccataatgaacaaaacacactcgcttgacatgtttccgtactcactcatcacatgccgggtggactgtaatttctccggcttgagccgaagcttctcctcaacttgatcgaggatcgcg

SEQ ID NO: 10785 - DNA, 570 bp, Glycine max
  Clone ID: jC-gmfl02220126c09a1
atcggattagaggaagagagagagagaggatggagaaaacagaggaaaaggtggcggtgggcgtgcctgtgcaattgtattacggtggagaaaatgaatatcaaaggggaatgatccctcctaacacggtgtttggagatccaaagggcatccccatccagcagaccatttacagggacactcctgctcctttcaactgcccttactgcggtgacaccgctctcactaccgtcagtatgtggcgtcaagggattatgatctagtcatggcgtatttaaaagagattggatattggcttgatttggaatgaaaggaaaaatgtacccacaaatatccataggtaaaatctattaacaagggtctagtttatgcttgagttcaattccttcctatgaataaaaaaaagaagtaaggggattgtttgtatcacatattaatgggcagcgggtagaaaccagcaagggactcattggtgaatatcccaatctgaaatgattcaaatggtcttacaaaccaataaattgttttaatacttacaggcgtctgcgaattcatttttagttaaatatt

SEQ ID NO: 10786 - DNA, 101 bp, Glycine max
  unsure (1)..(101): unsure at all n locations
  Clone ID: jC-gmfl02220126c09d1
nnttgacgccgaaccttcagcagagatcccgannnggagagaattngcagggtcgaccatgctcactagatcggcaggccatgccctttttttgttttttt

SEQ ID NO: 10787 - DNA, 581 bp, Glycine max
  unsure (1)..(581): unsure at all n locations
  Clone ID: jC-gmfl02220126c10a1
atcggattagaggaagagagagagagaggatggagaaaacagaggaaaaggtggcggtgggcgtgccagtgcaattgtattacggtggagaaaatgaatatcaaaggggaatgatccctcctaacacggtgtttggagatccaaagggcatccccatccagcagaccatttacagggacactcctgctcctttcaactgcccttactgcggtgacaccgctctcactaccgtcagtatgtggcgtcaagggattatgatctagtcatggcgtatttaaaagagattggatattggcttgatttggaatgaaaggaaaaatgtacccacaaatatccataggtaaaatctattaacaagggtctagtttatgcttgagttcaattccttcctatgaataaaaaaaagaagtaagtggactgttttgtatcacatattaatgggcggcgggtagaaaccagcaaggtactcattggtgaatatcccaatctgaaatgattcaaatgttcttaccaaccanaaaattgtttaaatacttacaagcgtcagcgaattcatttttagcttaaatatatattcaaat

SEQ ID NO: 10788 - DNA, 319 bp, Glycine max
  Clone ID: jC-gmfl02220126c10d1
aaagattaactatgatcacgaacgaaacctttaatagaaacaaaaatgatatggggttagtatcaccattttgttcgtctctgaagacaacatatatagaacatatatagatgcccttaatgaatcgaatgaatcttccaaaatcgcaaattagatgtgcgggaattaattacatatgaaaaataatgaagctataatctcccattatttgtgaatcacagacccatatccaatctcaggtcagcctgaaagttaatctctgatcatcatgaatgacagcatttcaccacaaaatcccggggatgaaactcatgtgccc

SEQ ID NO: 10789 - DNA, 575 bp, Glycine max
  unsure (1)..(575): unsure at all n locations
  Clone ID: jC-gmfl02220126c11a1
gaaatatccaagacttgttgatatgggcttaacacatctcaaagactcaagttacttagaaaattccatcgattgggtaccaggcatcaaagaaattcgattaaaggacttgcctagcttcatgagaaccacaaacccacaagatctcatgatgatggatttcatatatagccagtgtgagagagctcaaaaagcttcagcaatcattgtgaacacgtttgatgcattagagcatgacgttttggatgcattctcatccatattgttgcctcctatctattccattggccccttaaacctactcttgaacaatgatgtcaccaacaacgaggagttgaaaacaatntgggtccaacctttggaaggaagagccaaagtgtctagaatggcttaactcaaaagaaccaatttcagtggtttatgtgaactttgggagcattatggtcatgactagtgaccaattgccagagttagcttggggacctgcanatagtaacaaaaactntttgtgggtcattaggcccgatcttgtggcagggggaattaatttggcgttacccaatgaattgtgaaag

SEQ ID NO: 10790 - DNA, 466 bp, Glycine max
  unsure (1)..(466): unsure at all n locations
  Clone ID: jC-gmfl02220126c11d1
cagtggagggagcccatcggcgagatcncaganaggcaataattnccagggtcgacgatgctcatctatgtcggaggccgccctttttttttttttttttttttttccaagcatttccttgcatcatacgttctttcatgttatacaggacaaattacagttataggcgttttttaaatatccagccagggggaagccagcacaaacaggtggatcgaagatggaattcaataatgggaacataaccacagaaagaggcggatcctccggagtttttatcccttcaaagatgggcaattagcccattttgaataggcttggctggcaggccattctcttgggcatccaaaccactttgggtggggggaacatcaacagcaggcgagcaattgaaaaacccatgcgagataagcatgaaaccagaggggnccacgggcataacaagccagacttccaatctaggaat

SEQ ID NO: 10791 - DNA, 545 bp, Glycine max
  unsure (1)..(545): unsure at all n locations
  Clone ID: jC-gmfl02220126c12a1
tgcgttcgccatgcnnccgctngcgannncnnnntnnnngtnnncnnccnnnnccnnnnnnnnnnnnnngngnnnnnnnnnnnnctncnngnnngntnttgcntttgngaacacttttactgagagctgggtgacagagaagttattctatgccttagactctggtgcagttcctatctattttggtgcaccaaatgtcatggattttgtccctccacattcaataatagatggtagaaaattcaactcattggaagagttggcttcgcacgtgaaggctgtagctaatgatccagtagcctatgcagaataccatgcatggagaaggtgtggtgtacttggtaactatggaaaaactcgagctgtgagccttgacacgttgccatgccgattatgtgaggctgttagcagaaaaggtggaagaaatgcgggaagctaggttgagttttttgctaaatttgtagctctgcatgatagagattgacgcattgaatttaggtttgcaacctgtatagagattgcttggttctctgagctaatgtaca

SEQ ID NO: 10792 - DNA, 432 bp, Glycine max
  unsure (1)..(432): unsure at all n locations
  Clone ID: jC-gmfl02220126c12d1
gaatgaagagtgatgtttgcatgatttgacatatcaaggtgacatatgcacgtggttttctaaaaaatcatacatcaacaaaaacactttatctatagtgctacctatgtggagatagcatcaaccactttctaccagaaaaggggggcaataaaaaataaaatttcacatgagctaagcctttcttggccaaaggtacattagctcagagaaacaagcaatctctatacaggttgcaaaccttaattcaaagcgtcaatctctatcatagcagaactacaaattnagcaaaaaactcaacctagcttcccgcatttgttccaccttttctgctaacagcctcacataatcgggatggcaacgtgtgaaggctcacagctcgaggttttccatagntaccaagtacaccacaccttctccatgcatggtatt

SEQ ID NO: 10793 - DNA, 154 bp, Glycine max
  Clone ID: jC-gmfl02220126d01a1
aggaccctgatcacacttcagacacggactgagactgaccttcttggcggtcaatgtccaccgagatgtccgtggtctcgccgtgattgttgaatgaggagtctatcaagtacaccctctagcagcagaatccgagaccctggtgaaggatact

SEQ ID NO: 10794 - DNA, 281 bp, Glycine max
  unsure (1)..(281): unsure at all n locations
  Clone ID: jC-gmfl02220126d01d1
catccgatctgcatgaccttcgctnaccagaggcaaagatttaatttatttaccagctccctagtctgagtccaacgccctcccctcctttctctcgcctgccttttcccttcgcccctcttttcctcccccgggggcgggggacctatccccccccatgccccaccacctcccgctaaaattttttttccgttctcacatcaaactaaaccggcaaacttatacaccacaatccacccttgcacaaataaactatgcacctacccttgcaaccagatttg

SEQ ID NO: 10795 - DNA, 242 bp, Glycine max
  Clone ID: jC-gmfl02220126d02a1
agaaccctgaacacactacacatacagaccgcgacagccgaacatggcaaccattggccacagatatgtctgtgctgtccaagagcttatcgatacagatcgtcatgatcacaccacacgttcagccgaagacgagacactggacgaggctactaccgaagaagccagaaaggctgccgttaagaacgtgagcgatcatgagccgcgcaaagcatgggatcaggcgaccgatagctaagact

SEQ ID NO: 10796 - DNA, 254 bp, Glycine max
  unsure (1)..(254): unsure at all n locations
  Clone ID: jC-gmfl02220126d04d1
ctgggcgcttaagtctatactcgcatcncagctatcacgttgcatgcatcgcgtccgtaagcctctcaataatctggggccgccctctaatcttttctctcccctttaatctttccaaacatcctcccccctcccggggaaagggtgttttattcaactcctataataccctttcccctcccgattgaaccatactgtcctcttcagaagaatcacaaactttaacttaaaccaaagaaatctaaccccaaaaa

SEQ ID NO: 10797 - DNA, 93 bp, Glycine max
  Clone ID: jC-gmfl02220126d05a1
agaaccctcatccctccccacatttggactgttacagcctttcatgtcaatcgttaggcaccgagctgtctgtgctctccgaagagctaattg

SEQ ID NO: 10798 - DNA, 464 bp, Glycine max
  unsure (1)..(464): unsure at all n locations
  Clone ID: jC-gmfl02220126d05d1
acaaaacaaattgggggctgacctanatcnttctantngcaagaccccngtttnanagtnaaaagaccaaaaacaaacgatggaaaatatatatatatttccaccccaaccacactctaactttttttttttccaccccttcccattaccccctacttgggtaggggtaaatttacaacttcactccctcccaaatcttctctcccatctaaacttccttctctcctcacatcaaacacaaacgacaaacttaaccacaaaaatctaaccccacaaaaaaactaaattcaaataacctccaaacacaattgaaacaaccctacacctcactaaaaacctactaacaccataacaattatatccacaacttaaataatatccacaaaataacgcaacatatgatttacatactccttccataacctaagaacacaacgcatgattattttcatgcaagcacctaa

SEQ ID NO: 10799 - DNA, 348 bp, Glycine max
  Clone ID: jC-gmfl02220126d06a1
agaaccctgatccccctcgacatttataccctttacagataccttcgttgccattaggcaccgggctttctgtgctctctccgagctctatccaaacccttcactattacaaatcccgaaacttcttcagactactattctctccctcttatagttgtaccgaccatctgcctccaagatgccgttaagatggtgagcgccccggtcccacacaaagcataacaactagcgtccgctgctgattcgccaaagatatcatgttgataccgctcagggtgacacagccggtttttgacttgacataacgacggggcgacctggatatacttagccagccaacaggccctg

SEQ ID NO: 10800 - DNA, 292 bp, Glycine max
  Clone ID: jC-gmfl02220126d07a1
agaaccctgatcccaccccacattctgaccgttacagactttcatgttaatcgttgggcaccgagctttctgtgctctccccacgctcatcgctacagaagtacatgacaaaacacctcgttctgccgaaaccgagacactggccgagcctaataccgaagaagccagcaaggatgccgtttagatcctgagcgctccggccccaaacaaagcatgagatcaggcttcccatgctgaggcctagattgctcatgccgataccgctcttgctcttacacacggtgcttgactg

SEQ ID NO: 10801 - DNA, 582 bp, Glycine max
  unsure (1)..(582): unsure at all n locations
  Clone ID: jC-gmfl02220126d07d1
ggccaaatacctgtccgagcatgcgacttcccgatagcgnagancnnngnntnnnntttnnannnnccnnntnnnnnnnnnnnnnnnnnnnngnggnnnnnnnnnnnnnnnnnnnnnnnnnnnnnttttttnnttttttnnntnntnttnttttttttttgggggtggggtgttttttttttttnttctttnnttttcccctttttnntttttttgaattttcttttttaccttttaaaaaaaaagttcttacgggaagatcctcctccccaataagataaaatcaactccccccgttttttacaaggccctggaaccatttcagtgttttccctttgcccctttttttctcgaattaagatcctcctccccaattaatgtcccccccaactttttcttgcccgatttttaaaccgcatttcttttccccgctttgaaggcgactgatcccccccccccggttcatcagatttgtccttgggcacttgcttcccacttaaatagttctcgagtccccattctccttgttcaccaccaaaacccctacgtttaacccctccccattgagaatgaatgaagctt

SEQ ID NO: 10802 - DNA, 78 bp, Glycine max
  Clone ID: jC-gmfl02220126d08a1
cgaaaaaaaagtagcttgtctagacattatgtgctggcgtctaactgcgatttattcatacttctcatttctgcctag

SEQ ID NO: 10803 - DNA, 417 bp, Glycine max
  Clone ID: jC-gmfl02220126d09a1
cgaacactatgtaccccgtctaaacctcacatgctggcggctagctgcaatgtatccatacttctatttctgcattgtttccatgctttctttccatcacaaccacattattaatgcctgttgatcctcacttatctgtcacacaaaaacacactcaccatggatcatggcataccattgctacccacttcctctgatgctgatccaaatccacactctcgcaaggaccttcttctaattatttgcggcttgctattactctcttcccttgttgcctttggagggtacagggcctccaacgcgccgtatgccgacgtggcattcggcaacatcgaacgatgagcaacgtattccgacatcggtgccttctacgaaatggtatcccgcgttatcgcgaggttgttttcttccgggggt

SEQ ID NO: 10804 - DNA, 395 bp, Glycine max
  unsure (1)..(395): unsure at all n locations
  Clone ID: jC-gmfl02220126d09d1
ctccttaagtatgatattaacaaagcatgggtttattacagttatgcaacaaaccgtgttttaaaccgcagttgacttttacttcaaatacaggagccggaatggagtccctttctcatgtttacagcttattcttaaacaatttagaaaatgcaaagaccaaatggcagnaaaagaattatcatcctatccagacaatgcaaagctctcctgagtccagagggggggatccatcacagcacagggatctgatttctcaaagtcagcaaccttttcttgacatttaggacaggagggatttttatgccaaaggcaatcctttgaagggcaaagaaagcaaactccaagcatcatcgggacaaagcatccaacaaaagcttgtaaactgggctttg

SEQ ID NO: 10805 - DNA, 376 bp, Glycine max
  Clone ID: jC-gmfl02220126d10a1
atcggattagaggaacatagagagatacgatggacaacacagaggaaaaggtggcggcgggcgtgccagtgcacttgtattacggtggagaaaatgaatatcataggggaatgatccctcctaacacagagtctggagatgcaaagtgcatccccatccagcagtccatttacagggacactcctgctcctttcaactgcccttactgaggtgtcaccggtctcactaccgtctgtatgttgcgtcacgggattatgatcttgtcatggcgtattttacagagattggctattggctcgatttggaatgaaaggaataatgtacccacacttatgcataggtgaaacacttttacaaggggtctagtctatgcttg

SEQ ID NO: 10806 - DNA, 65 bp, Glycine max
  Clone ID: jC-gmfl02220126d10d1
gctccttaagtctaatattaacaaagcatgagttttttactggtttgcaacaaaccgtgtttaag

SEQ ID NO: 10807 - DNA, 450 bp, Glycine max
  Clone ID: jC-gmfl02220126d11a1
cacccttcttctctccacccaattaaggaagagtgtgttagtgtgagaaaaccctttagtggtgatagagtgaagagagatgaatggagtgaaggggcagtgtcaaccctccttgaggcttatgaggccaaatgggtgctaagaaacagagccaaactcaagggccatgattgggaggatgtggcacggcacgtgtcggcacgtgccaactgcaccaaatcaccaaagacttcaacgcagtgtaagaacaaggttgagtccatgaagaagagatacagatcagaatcagcagcaacagcagatcatgcatcatcatcatggcctctttattcacggcttgatcttcttcttaggggaactggacccgtgtttgtcgtcgccgccgccgtcgccaccggcgatgatgccggcggcattgccggttctgtttccggtggagccgtcgcaacc

SEQ ID NO: 10808 - DNA, 415 bp, Glycine max
  unsure (1)..(415): unsure at all n locations
  Clone ID: jC-gmfl02220126d11d1
aaaaactaaattgatattattcctttatttcaatagatttagaatagttttaaaatcattacactactacatgaacgaattcatgccattgagcattgtaataatccaaacacttctttgnagcaattgtggtcataagaacttgacgaaccacgttgtccatgttctcatacgaagacccatgtggactcgaagcagcctcgagtgccaatttcttgcactccaaagctcttgccttcatctccttacccttttccccttccatcaactccctcacaagtgcttcaactttctccctcttaacatcctctatctgcaacccaatcccccactccttgcaacaaaatcgacaataggttagtttgctccgaaagagaagagccaacacaacattggaaccccttcacacacactc

SEQ ID NO: 10809 - DNA, 634 bp, Glycine max
  unsure (1)..(634): unsure at all n locations
  Clone ID: jC-gmfl02220126d12a1
gccaaagagcggggattgagttgatggcagncnnnntnnnnttnnnncnnnnnnnnnnnnnnnnnnnnnnnnnnnnnnnnnnnnnnnnnnttttnnnnnnnnnnnnnnnnnnnnnnnnnnncgggggngggtncatcgattgggtgccaggcatcaaagaaattcgattaaaggacttgcctagcttcatgagaaccacaaacccacaagatctcatgatgatggatttcatatatagccagtgtgagagagctcaaaaagcttcagcaatcattgtgaacacgtttgatgcattagagcatgacgttttggatgcattctcatccatattgttgcctcctatctattccattggccccttaaacctactcttgaacaatgatgtcaccaacaacgaggagttgaaaacaattgggtccaacctttggaaggaagagccaaagtgtctagaatggcttaactcaaaagaaccaaattcagtggtttatgtgaactttgggagcattatggtcatgactagtgaccaattgacagagttagcttggggactngcaaatagtaacaaaaactttttgtgggtcattaggcccgatctcgtggcagggggaattaattgtgcgttacccaatgaatt

SEQ ID NO: 10810 - DNA, 412 bp, Glycine max
  Clone ID: jC-gmfl02220126d12d1
aaaatctaatttgatattatacctttatttcaatagatttagaataggtttaaaatcattacactactacatgaacgaattcatgccattgagcattgtaataatctaaacacttctttggagcaattgtggtcataagaacttgacgaaccacgttgtccatgttcacaaacgaagacccatgtggactcgaagcagcctcgtgtgccaatttgttgcactccaaagctcttgccttcatctccttacccttttccccttccatcaactccctcacaagtgcttcaactttctccctcttaacatcctatatctgcaacccaatcccccactccttgcaacaaaatcgacaataggtttgttgctccgcaaatgaagagccaacacaacataggaaccccttcacacacac

SEQ ID NO: 10811 - DNA, 501 bp, Glycine max
  Clone ID: jC-gmfl02220126e01a1
caactcctgtttgcacaagccactcatgctcgacaagactgtgctggtaaccggcggagccggttacatcggcacccacaccgttcttcagctcttgctcggaggttgcagaaccgtcgtcgtcgacaatctcgacaattcctccgaggtttctatccaccgagtcagggagcttgccggcgaatttgggaacaacctctcctttcacaaggtggacctacgggacagggatgcactagagcaaatttttgtttccacacaatttgatgctgtcatacactttgctggactgaaagcagtaggagaaagtgtgcaaaaacctttactatactataacaacaacttgactgggacaatcactctattggaagtcatggctgcccatggatgcaagatgctcgtgttctcttcttcagcaactgtatatggttggccataggaagttccatgcacagaagaggttccctctgtcagcaatgaacccatatggacgaactaagc

SEQ ID NO: 10812 - DNA, 573 bp, Glycine max
  unsure (1)..(573): unsure at all n locations
  Clone ID: jC-gmfl02220126e01d1
gaacaaggatggggtgaataaagtctgattgcaggncaagattnnagttaaaaaccaannccgaaaanagaaaaaaggggaaaattaaaanaaaaaaaaaaattttaattaaaaataaagttttttatttttgggtgaggggtaattttttttgtggtacatgatagtattcgaatctaataatcaataacctgtaagaaggaacctatagaacctttaaattaaattacagtgcagtaaaccactacttatttaccatgtaactatgaatcataataatacaagtacttgtcaccttgacctacggactaaagaaaagcttttgagaaaactaaattcacaagacctacggactacggtgtgggggagttcggaaaagaacccaaagagaacactatatatatatatagttaaacggtggaatcctcctgatctccatagccataagggtttttgctagcccaattccattgatcgcggcacatttcatcaatgccatattttgccttccatttaagctctctttccgctttctttgttgatgcataaacaatttcagcatcaccaggtcta

SEQ ID NO: 10813 - DNA, 228 bp, Glycine max
  Clone ID: jC-gmfl02220126e02a1
agaaccctgaacacactacacatacagactgttacagactatcatggtaaccattagccacagatatgtctgtgctgtccaagagctattcgatagagacggtcatgatagacaaacacgttcagccgaagacgagacactggacgagcttaataccgaagaagcaagaaaggctgccgttaagaacgtgaacgaacaggagccaggcaaggcatggcatcaggcgac

SEQ ID NO: 10814 - DNA, 603 bp, Glycine max
  unsure (1)..(603): unsure at all n locations
  Clone ID: jC-gmfl02220126e03d1
agcccccaatcatgagaagcagggctaagcnntccccatnntgnagngncnncagnnnnnaggattnccgnnganaaannnncnnngnngggnggngngngnnnnnnnaataggggannaaataaaannaaaaaaaannataaaaaattttaaanaaangaacaaagaaaaaaaaaagagggggggaaaatttttaatttttatgcccattaaaaacaaaatatccgataaatcctatgttagctatataaatgacaaacataggcagagtaactaaaagactaaaaccaacagaaagagacgtgacaaaaattacttgagcacggtaactgaagatgcccacataaataaagagccgccatccaccaaatctctgatcacacactcacttcttggatttcttcaatgcttgagctggctgggatgctgttgcaggtgtacaagtttgtgctgctgatggcctctctcctggaccttgggccaagcgctcctccctccgagcatttttcctctccctgctagccttgttcttggcacgcttcgcctcaaactggtcaaacaatgtcttttctcttgccttttcaggcgtggacttgtgtatgc

SEQ ID NO: 10815 - DNA, 229 bp, Glycine max
  Clone ID: jC-gmfl02220126e05a1
agaaccctgatcacactccacatttttactgttccagccgttcatgtcaaccattgggcacagagccgtctgtcctctcccagagctctttgctttagtcgtcgatgaccgagcaccgcgttcagccgaagacgagactctggccgtggctggtgcccaggaaggcacataggctgccgtttagatcctgaacgacccgcccccaggcaggccatgcgaactggcgacc

SEQ ID NO: 10816 - DNA, 484 bp, Glycine max
  Clone ID: jC-gmfl02220126e08a1
acagaacagagcaacactgaacaatggcgcaacctacctcctcctggaagcctgttgtccctctcctgaaggacgagctggacatcgtgatcccgacaatccgaatcctcgacttcctcgagatgtggcaggcccttcttcgaaccttaccaccttatcatcgtgcaggacggagaccccaacaggaccatcaatgtccccgaaggcttcgattatgaactctacaaccgcaacgacatcaatcgcattctcggacccaaagcctcctgcatctcgtttaaggattctgcgtgtcgctgctttggttacatggtctccaagaagaagtacatctacaccatcgatgacgactgcttcgttgctaaggatccttctggaaaggaatatcaatgcacttgagcagcacataaagattctgctttgtgcatccactccattttttttcaacaccctttatgacccttacagagaaggtgctgttttc

SEQ ID NO: 10817 - DNA, 560 bp, Glycine max
  Clone ID: jC-gmfl02220126e09a1
gccacaggccttatgcgatgtgtgattgatgtccactactacaatctctattatgatatattcgaagacatgaatgcgcaagagaacattgatttcatctacaaagtccgttcatcacagttggataatattacaaccgtagatggtcctctcactttcgtgggtgaatggactgctgagtggaaggttgaaggggctaccaaaaaggattatcaaagatttgtcaaggctgaattagatgtttttgggcgagcaacatttgggtggtgttattggacactcaagaacgtcaataatcattggagtttggaatggatgatcaagaatggctacatttaagttttaaaaaaattcctcttgccgtgtgcaccctctatttcctatcatattatgcccttttaatatttctcaatatcaattatgatattgatatcataattaatgtctacgtatagatctttaacgttcttcacttccggaaaggcagaaatatcaaagttgtagaccctttctttagtgaaaacggtcaaaaaaatgaaaggctctctctgtttttacat

SEQ ID NO: 10818 - DNA, 229 bp, Glycine max
  Clone ID: jC-gmfl02220126e09d1
gttgccctcttggagattttgctaccctcaaatatggtagcagtagcagcccaaggagagcaaaaacaggcgaccccaagcataaccaaacacgggatgaaaaaccgccacaaaaaatgggaaaaaacgggccgggccacaaaaagaggaaaccccaccaagcccgaaccctcccccagggggggcccccccggggcgggcacccccagtaacaaacccccctggcccc

SEQ ID NO: 10819 - DNA, 604 bp, Glycine max
  Clone ID: jC-gmfl02220126e10a1
cgccatgtctcactacaagtttgttcttgcaattgagaacacttttactgagagctacgtgacagagaagttattctatgccttagactctggtgcagttcctatctattttggtgcaccaaatgtcatggattttgtccctccacattcaataatagatggtagaaaattcaactcattggaagagttggcttcgcacgtgaaggctgtagctaatgatccagtagcctatgcagaataccatgcatggagaaggtgtggtgtacttggtaactatggaaaaactcgagctgtgagccttgacacgttgccatgccgattatgtgaggctgttagcagaaaaggtggaagaaatgcgggaagctaggttgagttttttgcttaatttgtagttctgcatgatagagattgacgcattgaatttaggtttgcaaccctgatagagaatgcttgtttctctgagctaatgtacatttgaccaagaaaggcttagctcatgtgatattttattttttattgccccccttttctggtagatagtggctgatgctatctccacatagggtacactataagtgagtggttttgctgatgatgattttga

SEQ ID NO: 10820 - DNA, 252 bp, Glycine max
  Clone ID: jC-gmfl02220126e10d1
ctcctccttagagctaattttaacaaagcaggagttttttgcagttttgccacttaacgcgtttatgaagacaacttatttttaccttatattgatgagctggatgattggcccttgctcatgtgaacagcttattcttaagcagtgtattaattgcataggccaaatggcggcgattttattttcaccctttccagacaaagcaaagctttcctgaggccaggggggggggcccatcccagcacagggatc

SEQ ID NO: 10821 - DNA, 351 bp, Glycine max
  Clone ID: jC-gmfl02220126e11a1
cccatataagactcataaccgatcgttggttcgtgcgttccccacttgcttcccatttttgttgtccctttgcgctaacctcaaagagagtgcaggatttatacaaaccaaagttgttgcttttgttatctctgggttgcgaataggaatggccgggatcagctgcggagttggtggagaagccgacgagacttgttctcccatggaacccacctcacgcccttacggacgccggagtttggacctttcgccgttgaaatacatagctgctgacgcgtcagtcccgccgctggagaacagccggaagcgccagaggctggataggcgcgcttctgcggcatgggagtgcga

SEQ ID NO: 10822 - DNA, 395 bp, Glycine max
  Clone ID: jC-gmfl02220126e11d1
atattaatagcattatttgataactttatgtgcatatacaataataacatttttattaattatcttccataacctacccttaacttcttccaattcttagagatgaatcaacacctttattggtgacacttgcaaagatcctagcaatctctaactgtgtattggcaattatttcagttctcttaagggccatttcccctctttaggcctcagcttcaactctcatcctctctatctccttcattgagtccattcttgcttgttcagaccttatcatagcttctgtaagccatcttaagctttctgctatctccacacactctttccttcttcgccctgagttgacaataggtttcttcttcctctaggtgcatcttaacccgtccttcttgcta

SEQ ID NO: 10823 - DNA, 556 bp, Glycine max
  unsure (1)..(556): unsure at all n locations
  Clone ID: jC-gmfl02220126e12a1
ggaaaaagaagggggcgatcggagcccgatngcaanncnnnntnnntttcncnnncnnnncctnnnnnnnnnnntngnggntngncnnngnnnngnngnnngngcggnttttgctttnnctgatcaatcccaagaccttggtttaccttgccacacaaaaaaatatataaaaaggcaaaataataataaaaaaaagagaaggcttggagccaagaaaataaacacaaagcacaagtcatggaaagaataatggttggaagtgcaacaaaggttgctttcaacctcttggtcactttcgccattgtcattccatgccttgaggctggcattgctgagtttgatgactttctcaaagcccaagctgatgaagcacaaaaaattgctcttgaggcctatgtcccagtgccagaagatgtcaccgacgaactcaatttccatgttcatttgtcattagaaaactccacaaggagggaactaaggcaaaggaagggtagatcacgaaaaaaatgtgttgccagcaaccctattgacactagctggagatgcaacaaaaact

SEQ ID NO: 10824 - DNA, 380 bp, Glycine max
  unsure (1)..(380): unsure at all n locations
  Clone ID: jC-gmfl02220126e12d1
agagccagccctttttttttttttttttttttttttttttttttttgtttttttttttttttttttttggttttgtttcttttttgggtgtaccaaaaaagggggaactttatctctctttaagtgatcccaagggaagaagatgctttttttcctgtttttttaagggccacagaggttctttggaaaaaaaaacaaatttcgcccacgagaccaaaaattttcggggagatatggccgggggcaggcccttgcccatttctaaaagagggggggggaaaaaaagaaccccgaggcgctccccaaaaagggaccctatggggggtaagggggcctccacttttgggggtttggggaccgggattncgagggaagccacc

SEQ ID NO: 10825 - DNA, 571 bp, Glycine max
  unsure (1)..(571): unsure at all n locations
  Clone ID: jC-gmfl02220126f01a1
caactcctctttgcacaagccactcatgcgcgacaagactgtgctggtaaccggcggagccggttacatcggcacccacaccgttcttcagctcttgctcggaggttgcagaaccgtcgtcgtcgacaatctcgacaattcctccgaggtttctatccaccgagtcagggagcttgccggcgaatttgggaacaacctctcctttcacaaggtggacctacgggacagggatgcactagagcaaatttttgtttccacacaatttgatgctgtcatacactttgctggactgaaagcagtaggagataagtgtgcaaaaacctttactatactataacaacaacttgactgggacaatcactctattggaagtcatggctgcccatggatgcaagatgctcgtgttctcttcttcagcaactgtatatggttggccaagggaagttccatgcacagaagagttccctctgtcagcaatgaacccatatggacgaactaagcttatcattgaagaaattngtcgtgatgtccaccgtgcagagccagattgggaaataatatnggtaagata

SEQ ID NO: 10826 - DNA, 575 bp, Glycine max
  unsure (1)..(575): unsure at all n locations
  Clone ID: jC-gmfl02220126f01d1
agaaaaaatatgcgttaggaatttcagngtnngcnagnncnagntnnnnttnangggcaannncnnnnnngnnnnnnnnncnnnnnnnnnnnnnnnnnnnnnnnntttttntttttacnaacatgngattaatatttagggaaggggatgcttctcatgtggaacatgagagtattcgaatctaataatcaataacctgtaagaaggaacctatagaacctttaaattaaattacagtgcagtaaaccactacttatttaccatgtaactatgaatcataataatacaagtacttgtcaccttgacctacggactaaagaaaagcttttgagaaaactaaattcacaagacctacggactacggtgtgggggagttcggaaaagaacccaaagagaacactatatatatatatagttaaacgggggaatcctcctgatctccatagccataagggtttttgctagcccaattccattgatcgcggcacatctcatcaatgccatattttgccttccatttaagctctctttccgctttctttgttgatgcataaacaatttcagcatcaccaggt

SEQ ID NO: 10827 - DNA, 313 bp, Glycine max
  Clone ID: jC-gmfl02220126f02a1
ataaccctcatcacactagacacacagaccgtcacagactatcatggtaatcatgggccacagatctgtctgtgctgtccaagagctaatcgatatagacggtcatgatacacaaacacgttcagccgaagacgatgacactggacgagcttaataccgatgaagccagaaaggctgccgttaagaacgtgaacgatcaggagacaggcaaagcatctcatcaggcgaccgatgctgaagactagactgctcaggctgataaggctctagaatatgacaaccgatgctgaactgaagaccacaaacgaagcaa

SEQ ID NO: 10828 - DNA, 531 bp, Glycine max
  unsure (1)..(531): unsure at all n locations
  Clone ID: jC-gmfl02220126f02d1
gaaaaaagatgggggagatcgagtngttagcagaccnggntnnntnnnnncnnnccnnnnnntnnnnnnnnnnnnnnnnnnntnnnnnnnnnnnnnttnntttttttnnnnttntttttttttttggggtggggtgatacacattcaaatggccctgagactggaccaagttccacaatagtggagattaacaagagggggtatacagctacatattcactgaagaaacagtgggggtgaaagtttgaaaatgttggttaccacctctggcaggtcaactgacagaaatagaataagattccggcaatgaccaccaggtgcacattaaatggtaataataagtaaatcgaaaccggaaagactaagagagggctgaaatcagcaaagctggcaggcagagagagggcatatgatggaaatctctgcacaatcccatgcatgggaagggaaggaaacaattctatcgcgggtgtggcaacaccggttgaatgtagaggcagaacaaggctacagctactgcaaatctaaatt

SEQ ID NO: 10829 - DNA, 618 bp, Glycine max
  unsure (1)..(618): unsure at all n locations
  Clone ID: jC-gmfl02220126f03d1
cgcacaanagagaggggcggatcccgtngtcggatnnngnaggncncggnntnnnnttnntnggnaatnnncnnnnnnnnnnntnnnnnnnnnnnnncnnnnnnnnnnnnnnnnnnntttnnttttttnnnnttntttttntttttatgggttgggggatatttttttttgtattgcatatcataaaaaaaatatccgataaattctatgccatctatttaaatgacaaacataggcagagtatctaaaagactaaaaccaacagaaagagacgtgacaaaaattacttgagcacggtaactgaatatgcccacataaataaagagccgccatccaccaaatatctgatcacacactcactttttggatttcttcaatgcttgagctggctgggatgctgttgcaggagaaatattttgtgctgctgatggcctctttactggaccttgggccaagcgctcctccctccgagcatttttcctcttcctgctaaccttgttcttggcacgcttcacctaaaaccgnngganacgatttcttttctcttgccttctcagccttggacttgcctatgctctccataaaactctcttggcttgaaaacattaccttttacct

SEQ ID NO: 10830 - DNA, 477 bp, Glycine max
  Clone ID: jC-gmfl02220126f05a1
agaagatggtgtccttgaagctttagaagcgcctcgccgctagcgttctaaaatgcggcaagggcatggtctggcttgatccaaatgaagtcaatgagatctccatggccaattctcgacaaaacataaagaagttggtctaggatgggtttattatcaggaagccgactaagattcactctcgctcccgtgctcgtcgaatgaaggaggccaagagaaaggggcgtccctctggttatggtaagcgtaacggtacaagggaggcaaggcttcccaccaaaatcctttggatgaggaggatgcgtgtcctcatgcgcttgcttcgcacgtacagggaatcaaagatgattgacatgcacatgtaccatgacatgtacatgaaggtgaaaggtaatgttgtccagaacaagagagtctcgatagagagcattcacaagttcaaagcttggaaagccagaagaaagacattgtcttgcc

SEQ ID NO: 10831 - DNA, 387 bp, Glycine max
  unsure (1)..(387): unsure at all n locations
  Clone ID: jC-gmfl02220126f05d1
gaaaaaaaggggctacctgcntcgtancgagctcagataaatttcgggaagacagcgaggaaactggggacagggcncaanaccnnanaaacctttttttttttacccccccacctcatacccggagggggggggtattttacaattccatccaaatccttcccaatgctgataaaatatcatgtctctagggaaaagaaaatcaacccgcaaagttaaacaatagaaggtatcaaatcaaaatcaatggatgaatatgccctggaaacaggggttgaagagaccgatgcttccctacccaccgactaacacgcatagattgagtgagcatctcgaagattgtatacaaaaccatgcgctgcgacccctatcacggcgccatgccgc

SEQ ID NO: 10832 - DNA, 508 bp, Glycine max
  Clone ID: jC-gmfl02220126f06a1
agaagatggtgtccttgaagctccattagcgcctcgccactagcgtcctaaagtgcggcatgggcaaggtctggcttgatccaaatgaagtcaatgaaatctccatggccaattctcgacaaaacataaggaagtcggtcaaggatgggtttattatcaggaagccgactaagattcactctcgctcccgtgctcgtcgaatgaaggaggccacgagaaaggggcgtcactctggttatggtaagcgtaagggtacaagggtggcaaggcttcccaccaaaatcctttggatgaggaggatgcgtgtcctcaggcgcttgcttcgcaagtacagggaatcaaagaagattgacaagcacatgtaccatgacatgtacatgaaggtgaaaggtaatgttttcaagaacaagagagtcttgatggagagcatacacaagtccaatgcttagaaggcaagagaaaagacattgcctgaccaggttgaagcgaagcgtgccaagaacaaagc

SEQ ID NO: 10833 - DNA, 453 bp, Glycine max
  Clone ID: jC-gmfl02220126f07d1
gacaaagcttgggtcctgctgatctcgataccgaaaccgtgatgagtgttaagatccattttcctatatattatcttatcccttgtaacatcctctttaccaaatttttttccttttttgcccctattccctccctcacctctgggcgggggtgtccttttccttccatgcccctcctccttccgcttaaacacttttttctttctcacctcaaactcaaccggcaaagttattccccttaatcttccctcccagcattatcttctccacctccccttgcaacaggggtcgctgagccccattcttcctatcccactggcctactcatgaccttttattccgcctcttaacatcttctaccacacccccgccgccggtgctctctctccctgcacctatccccttctcacacagggtttttcttttcgcttccagtacctaaggccctaccat

SEQ ID NO: 10834 - DNA, 543 bp, Glycine max
  Clone ID: jC-gmfl02220126f08a1
gtctttctattactatctcttctctctcacatcgctttcacttcctcaaaccccaacaccatcactctcccactctcccctctcctcatcaaaccccattcctcagactcagatccattccactctctcaaatttgcagcttccgcttccctaacccgggcccaccacctcaaacaccgcaacaacaattccccctccgtagccacaaccccagcataccccaaatcctacggtggctactccatagatctcaacctcggaaccccacctcaaacctcccccttcgttctcgacacaggtagcagcctcgtttggttcccctgcacctcccgctacctctgctcccactgcaacttccccaacatcgacaccaccaaaatcccaaccttcattcccaaaaactcctgcaccgccaaactcctcggttgcagaaaccccaaatgtggctacatcttcggctccgacgttcaatttcgctgcccccaatgcaaaccagaatcccaaaactgttccctaacatgccccgcctacataatccaatac

SEQ ID NO: 10835 - DNA, 255 bp, Glycine max
  Clone ID: jC-gmfl02220126f09a1
gaaatacaattctcatttatatcccaagtacttgtacaccagctagtgaggtgccggtgtctctcagggattgacgcatatagtaggcctaaaagcctacgtactcaattcattgatatcaaatctggggtgagctgtctgcaagtaccttaatcaaaggttgaatgggacagtatatgcacatatgtgatccatagcactggctaagaccctttaaaaaaaaaagcaaatagggcggccggcacattgtgagct

SEQ ID NO: 10836 - DNA, 358 bp, Glycine max
  Clone ID: jC-gmfl02220126f09d1
atgctaaaaactgagaagagactttcatttttttgaaccgttttcagttatgaatgggtctacaactttgatatttctgcctttccggatgtgacaaacgttccagatctatacgtacacattgattatgataccaatatcataattgattttgagaaattttaaaagggcattatttgtgaggaattgatggtgcacccggcacaaagaactctcttaaaacttaaaggtgaccagtctgagatctccatgccaaactcgattgatgattgagggtcttatgtgtcccattacaccaccctaaagatgttcgcccagaaagatatgtttaaaacttgacaaatggtagatgatgctt

SEQ ID NO: 10837 - DNA, 350 bp, Glycine max
  Clone ID: jC-gmfl02220126f10d1
gaatgaacagagatgtttgcatgaattgacatatcaagtggacatatgcacgtgtctttctcaaaaatcatacatcaacaaaatcacttcaactatagtgtaacctatgcggagatagcatcaaccactttctaccagaaacggggggcattaaaaaataaaatatcacatgagctaagcctttcttgggcaaatgtacattagctcagagaaacaagcagtctctatacaggttgcaaacctaaattcaatgcggaaatctctatcatgcagaacttcaaatttagcaaaaaactcaacctagcttcccgcatttcttccaccttttctgataacagcctcacataatc

SEQ ID NO: 10838 - DNA, 549 bp, Glycine max
  Clone ID: jC-gmfl02220126f11a1
taactcaactggatatggtgatgagcttttatgggcagctagttggctctatcatgctacgggtgatgattcttaccttcagtttgtgactggccaagatggagaagactatgctcaatggggaagcccaacctggttcagttgggataacaagcttgctggaactcaggttttgttatctagattaagcttttttaaggcaaaggacatttcgaattcatatagctctgggctccatagttacaggaaaactgctgaggctgtaatgtgtggtcttcttgcggattctccaacagccacaaaaagcagaacagatgatggtcttatatgggtgagccaatggaactctttgcatcatcctgttgcatccgcattcttagctgctgtttacagtgactatatgctaacatcgcagacaccaaactaagatgtggatcagattcctttacccaatcagatcttcgagactttgccaaatctcatgctgattacctattgagcaagactcctatgcatatgagtcttctggtgggctatagagataaatac

SEQ ID NO: 10839 - DNA, 138 bp, Glycine max
  Clone ID: jC-gmfl02220126f11d1
aggggcgggttcaataatatcagtagtagtaattgtctggcatgacctacccttagacggcaccagggggtagagatggatctacacgttcatgggcgacacgtgcaagggggctaggggggggtaaccgcgcctggg

SEQ ID NO: 10840 - DNA, 464 bp, Glycine max
  unsure (1)..(464): unsure at all n locations
  Clone ID: jC-gmfl02220126f12a1
ggaaaagaggggggatcgagtccgtnngcaanncnnnnntnnnngtnnncnnccnnnnnctnnnnntnnnnntngngcnnnnnnctnnntnnnnnncnnnnntntgntacatctggtgctgggtaaaacgggtggggagcgatccttcttgagtgagggaaacaggagccaagcccttctggcctctgctattgggggcaaaatggctgctggtggctctgaaactcccacaagactcatggcggtgactgctgcggcaccaaacaagacatggctccctgttgttagaggtggaggcaactctcgactacccacaatggcttgatggatcgctaccacatgactatgggattgatccactaggccttgggaaggacccatcattcctcatatggatcagataagctgagctcattcatggtaggtggtcaatggctgcaccctaggaatctttgtcgggcacg

SEQ ID NO: 10841 - DNA, 592 bp, Glycine max
  Clone ID: jC-gmfl02220126g01a1
attttagtttcaaaaaaatcaattaactcaagcatggtcaaagctggtaaccggcggagccggttacatcggcacccacaccgttcttcagctcttgctcggaggttgcagaaccgtcgtcgtcgacaatctcgacaattcctccgaggtttctatccaccgagtcagggagcttgccggcgaatttgggaacaacctctcctttcacaaggcggacctacgggacagggatgcactagagcaaatttttgtttccacacaatttgatgctgtcatacactttgctggactgaaagcagtaggagaaagcgtgcaaaaacctttactatactataacaacaacttgactgggacaatcactctattggaagtcatggctgcccatggatgcaagaagctcgtgttctcttcttcagcaactgtatatggttggccaaaggaagttccatgcacagaagagttccctctgtcagcaatgaacccatatggacgaactaagcttatcattgaagaaatttgtcgtgatgtccaccgtgcagagccagattggaaataatattgcaaagatactcaacccagtcggtgacaccct

SEQ ID NO: 10842 - DNA, 546 bp, Glycine max
  Clone ID: jC-gmfl02220126g01d1
catgcgacatccgcatcgatagcaggcaagataaagtttaaggcagatcctaatagaaagccgcccgtatcgatctttactcctctctcttttttttttttacttctttggaaactaaaattggggaacggaagcctgctcaaagggcacatgaaatcatcccaatctaataattaataacctgaaagaaggaacctatcgaacctttaaattaaattacagtgcagtaaaccactacttatttaccatgtaactatgaatcataataatacaagtccttgtcaccttgacctacggactaaagaaaagcttttgagaaaactaaattcacaagacctacggactacggtgtgggggagttcggaaaagaacccaaagagaacactttatatatatatagttaaacgggggaaaccttctgaactccatagccataagggttttttgctagcccaaatccattgatcgtggtacatctaataaatgccatattttgccttccatttaagcttttttttcgctttctttgttgtgcctaaacaaatt

SEQ ID NO: 10843 - DNA, 245 bp, Glycine max
  Clone ID: jC-gmfl02220126g02a1
agaacactcaccacacaagacattcagacaggcatagacaaacatggtaaccagtggccaccgatatgtctgtgctgtccaagagctaatggatctggaagtcgatgacacactagcacgatcagccgaagccgagacactcgacgaggctggtaccgatgaagccagcaaggctgccgttaagaacgcgaacgaactggagacggacaaggcatacgcatctggctagcgatgctcaagactag

SEQ ID NO: 10844 - DNA, 446 bp, Glycine max
  unsure (1)..(446): unsure at all n locations
  Clone ID: jC-gmfl02220126g02d1
agaaaaaaatggggggatcggtccgtatcnaggcnngnnttnnntnagggcannncnnnnnnnnnnnnnnnnnnnnnnnnnnnnnnnnnnnntttttnttttttnnnnttnnnntttntntntggggggggggttcttttttttctttttccctggcctcacaatatagccaccggaaatatcatagtattcaatcatttcggcattaacaacaacctcggaataccactctccgaagttctccgccttccgatgcgtgagacctaagccagtctccttcttcacctccttcttcttcccaccggattgcttagcggcaggttttttggattcagttttttttgcttcagttcccgccatcgtgaaggacgagcacctgatcccgttgcaaagaagtcgaaggcgattgaaacgcgcaagagcgattgtggcgtcacggttgaccc

SEQ ID NO: 10845 - DNA, 561 bp, Glycine max
  Clone ID: jC-gmfl02220126g04a1
tgcccaattctttcccctccacccaccctgcatatttagatattcctatttaatagcaccccatagattaccttgtgtgaccaactactttgactcctttaccataccattacaataattatcaaacctaaccagaaaaaatggatgaccggggaggaaatccgcaacgctcatcgttcccatggacccgccaccatcttggccttcggcaccgtcacgccgtccaactgcgtataccaagccgattaccctgactactacttccgcattaccaacatcgaacacatgacctgatctcaaagaaaagttcaagcgcatgtgtgaaaagtccatgaaaaagaagcgatacatgcacctgacggaggagtttctgaaagagaacccgaacatgtgcgtatacatggcgccttcgcttgacgttgagacaaagacgtaatggtgatggagagtgccgaagctgggaaaacaagcctgaacgaaagcgaataaagagtggggtcaacccaagccaatgatcacacacctggagtttctgcaccacttttagggttggacatgccc

SEQ ID NO: 10846 - DNA, 368 bp, Glycine max
  Clone ID: jC-gmfl02220126g05a1
cgaagatggtgcccttgcaacttcccaagctccttgcctatagctatctaaaatgcggcatgggccaggctttgcttgacaccaaatgaagtcaactaaatctccatggccaattctcgtcaaaacctaacgaagatactcctggctgggtctattatcacgaagccgactaagattcactgtagctcccatgctcttggacttaaggacggccagagaatggggcgtcactttagttatggtaagcgctaagtgccaatggaggcaaggctccccaccaaaatccttgatatgaggaagatgcacgagctcatgcgcttgctttgcatgatcaaggaatcaaagatgatcggccaagacatgttcca

SEQ ID NO: 10847 - DNA, 482 bp, Glycine max
  Clone ID: jC-gmfl02220126g05d1
tccacacacttttcttcttttttgtctaacaaatcttatttttccattgatgggaccggggaaaattccatccaccatgcatatcataaaaaaaatatccggaaaattccatgttcgctatataaacgacaaacataggcagagtaactaaaagactaaaaccaaccgaaagagacgtgacaaaaattacttgagcacggaaactgaagatgcccacatagataaagagccgccatccaccaaatctctgatcacacactcacttcttggatttcttcaatgcttgaactggctgggatgctgccgcaggtgtactcctttgtgctgctgatggcctctctcctggaccttgggccaagcgctcctccctacgagcatttttcctctccctgctagccttgttcttggcacgcttcacctcaaactggtcagacaatgtcttttctcttgccttctcagccatggacttgtgtatgctctcc

SEQ ID NO: 10848 - DNA, 379 bp, Glycine max
  Clone ID: jC-gmfl02220126g06a1
cgaagatggtgtcctttaagcttcttatgcgcctcgccactaacttccttaagtgctgcatgggccaggtcttgcttgatccaaatgaagtcaccgaaatctgcatggccactactggactaaacataaagaagatggctatggatgggtttattatcaagatgccgtctatgattcactctcgctcccgtgctcttctaatgaaggatgccaagagaacggggcgtctctctggttatggtatgcgcaaggggactagggaggcaaggctccccaccaaaatactttggatgatgcggatgcttgtcctcaagcgcttgcctcgcatgtacagggaatcatagacgattgcctagcacatgtgccatgacatgtacat

SEQ ID NO: 10849 - DNA, 219 bp, Glycine max
  unsure (1)..(219): unsure at all n locations
  Clone ID: jC-gmfl02220126g06d1
agccactgggcctgcttgcttcatgagncccgaaaagttaaggcaagccaagggtcattggccttgaantcctcccccccaccttttttttttcccatcctcctccccctcgggcggggggtctttatactctctctggccgtcctcctgttgctcaaacaatccctcttttctcaaatcaaactcaaccggcatagttattctattgaatcttccctt

SEQ ID NO: 10850 - DNA, 150 bp, Glycine max
  Clone ID: jC-gmfl02220126g07a1
ctagttgagtgtggagtagtatatagtgagatgtaaagtagactggtatgatggaaggtgaaggttagatgtaagacgatagtttagatatttagttagtggaagaagtgaggtgggtgttgatcctgttacctatagacgagctatgac

SEQ ID NO: 10851 - DNA, 136 bp, Glycine max
  Clone ID: jC-gmfl02220126g08a1
aggtttcggttgatctagaggaaaaaagaatggggaatgtaggggaggcgagagtggattgagtaaaaatgatatggtatataagagagagggagatgaggagctgatccgttacggatagccagctatgacgtta

SEQ ID NO: 10852 - DNA, 102 bp, Glycine max
  Clone ID: jC-gmfl02220126g08d1
ccctccaaagttctgaaaattaccctccaagggaactatgctggagttcgttgggctagcccctaggctaaacctcatttactgttctgctctgatagcgaa

SEQ ID NO: 10853 - DNA, 581 bp, Glycine max
  unsure (1)..(581): unsure at all n locations
  Clone ID: jC-gmfl02220126g09a1
cattgaagctaattttttctctctttctattttccttctctcaatcattctctgctccttttcactctctggggtcagggccaatcatcgccaagctcatgctctgcaccctttctctccctctaaagattctccatttttctctgcttccatcacaaacactgcatcaacacactctcttgttttcttcacttttttttttttcttgcaacacgtttctctccaatttgttgcaaacccttttggttttaggtgccaaaggaccaaaacgtccttgaagcctgaagcccctcctctctctcttagggttttctcaccctttttcagaagggtgatgcaatgaggcagtcttttgatccttcatctttgggtccttccaagattccatctataaaaatacctggaaaagcagggaatggtgcatgggaggctttgtctggatctgattcctaccatgcttcgtcggatgctagcctcttttatagctcattacctgttcttccgcatgaaaaattgaactngaatgaaactgcaaatgcttatcaatctattgacgacatctcatccggctttaagaagct

SEQ ID NO: 10854 - DNA, 212 bp, Glycine max
  Clone ID: jC-gmfl02220126g09d1
agggtctatgcatgtgctatgaaccaaatatgaacatctacaattgtttttttcaaagttttggacacacggaagcttttcaccccagaatcgaatgaaatgtattgtatccgtcctcgatgtgcaaggatatttacaataatgactgtaagacagcggcatttaatttgttgacgtcaaaatgtttttgagctgatgggataggatgcttc

SEQ ID NO: 10855 - DNA, 547 bp, Glycine max
  Clone ID: jC-gmfl02220126g10a1
atcgaccatatcactttcgtcaccttcacagatacattcgttgcaatcatccatctcacttccacaaattcctccaaattctaaccaaacccttcactactccaaattccaaaacttcttcacactccttcttttccctcttctgttgcccgatcttctgcctccaagattttggtatttgggattgatcacctggagttggaaatggttaaaagttatggagtgttctgatttgcaaaagatatcatgttgcggtgcttagagggacttaagcctttatttgcttccatattacgatgttgtgacctggatatatataaccagccaagaggccttgaagatcctgaacttcttgctagagagactgggttcagtgtaagcgaaatagaagcactttacgagctcttaaaaagattagcagtgctgtaatcgacgatgggttgattaacaagaagagtttcagttggcattgttcaagacaaataaaaagaaagtctgttgctgatcgggtatttgatttatttgacacaaagcacaatgggatact

SEQ ID NO: 10856 - DNA, 357 bp, Glycine max
  Clone ID: jC-gmfl02220126g10d1
cttatagaaaactaggatctaggagctgattttaggcctaatcggtcaatacggagtgggattctactctgcttttcttgttgctgagagggttgttgggggtacaaagagcccaacttctgatatgctttatgagtgggacgctgaaactgactggggcccttatgtgatttaagaagatactgaccctgtataggttctgcgtcggggggctcagattacactccttttaagagaggaagccaagaatcaattccctacgccaagcaagccccttggattgttgtggcaaaagccacagagaggaggctttggggtgtgcccatgggaacaaatgaaaggtgcttttgaggggaa

SEQ ID NO: 10857 - DNA, 527 bp, Glycine max
  unsure (1)..(527): unsure at all n locations
  Clone ID: jC-gmfl02220126g11a1
gttctagatcgcgatctagaactagaacggagtttggttttataggaaccctcctattcatccatttatcgatccacgtccatccccatctttcttctcctattctctctgttttcttttcttcttctaaaaagtgagagaagaaaaaagggaattgaaggaagaagattgagaaaaaagggggaatgcccagataattaattcggtgaaatttcggattttcgtaagtgggtgtttctcttttcgtgtttttaccttcagtggtggaaggagggggtttggtttggtgagttgatggacttgatgagcgttgagtngtgtgtcatcctcggacggcatggatgagggatgagatccacgccaaccatcatcactctgagttttcttccacaaagcctcgcaatggaggcactagtaacatcaattctgtgggccccacggaattgctccggcacccagcgtcatgaattgctggaatgtcctgtttgtactaatcaatgtaccctccaatcatcagtgtcacaatg

SEQ ID NO: 10858 - DNA, 87 bp, Glycine max
  Clone ID: jC-gmfl02220126g11d1
gccaacgcaaaccactcccggacatggtcaggagacacctacccataccggaggggtcacactcatacactgatgggtctcggtaca

SEQ ID NO: 10859 - DNA, 633 bp, Glycine max
  unsure (1)..(633): unsure at all n locations
  Clone ID: jC-gmfl02220126g12a1
atgccgtctgactcactcccgtancnaanncnnnnnttnnnnntnnnnnnnccnnnnnnnnnnnnnnnnnnnnnnnnccnnnnnnnnnnnnnnnnccanngttggnggntgcngnggcggcnagcgggcgagggcggcgcgaaccgccgaggaggaagaagagcagcagaaccagctgtcgctggtggcgcttctgttggcggccatcagaaaatcgatggtgtcgtgcagggtggacccacccgacgatgtaatctccaccgtccatcacatggagatcggatggccaaccaacgtccagcacatcactcatgtcaccttcgaccgcttcaacggcttcctcggtctcccctatgagttccaagttgagatccctgctagggttcccagtgctagtgtaagcgtgtttggggtctcagcagaatctatgcagtgttcttatgatccaaaaggaaacagtgtccccactattctcttgctaatgcaggaccgtctatactcacagggaggcttaaaggctgaaggtatatttcgtattaaccctgaaaatagtcaagaggagcatgtgagggaccagttgaataggggcattgtgccggatgacatngatgtccactggttggctggactgat

SEQ ID NO: 10860 - DNA, 360 bp, Glycine max
  unsure (1)..(360): unsure at all n locations
  Clone ID: jC-gmfl02220126g12d1
ctgaaccattcaaattttgatcatactcaacaagagacatagaaagcatccatgtcatgtcaggctaagctaaatcaatctccccattccggaaggtcatcgatgtcacagcacttacctgaaatttgaagaggaggctacacctttttagcccattcccatttgtcatggttagaattgtctagtacaagaacatacagaaccaggtcaaattcagccctaaactgaacaaaacctgtccacagatacacaagaaggaaacgagncctactccatgtattaatttacacaagcaaacctagtgctgcttgtagagacaaaatctgaaaaacatggnactaaaaaactacaaagaaaacc

SEQ ID NO: 10861 - DNA, 563 bp, Glycine max
  unsure (1)..(563): unsure at all n locations
  Clone ID: jC-gmfl02220126h01a1
aggttagagggcataaaatcaattcactcaagcatgctcaaatctttccaaggcttcgtcaattctccttccaaagcttccaaatgcttcgctccaatggctttaggctccttcgatcgctgcccgaaaaactcctccgccacgccaacgaacccatatatgatggagtgtgccaaaggggttataggacattgagttctggtctttgtaatccatccagagttattgggaatttttctccaaatgttggaaatggtgttaatttgaagaacttgttgctttttggagccgcggatacatattgggggacatctagatccgttcatgggtcagcatcattggcaagggactattacgaagtgctcggtgtgagtaagaatgctagttcttctgaaataaagaaagcatactatgggcttgcaaagaagctccatccagacacaaacaaagatgatcctaacgctgnaaagaagtttcaagaagtttcaatggcatatgaggctctgaaagatgacgaaaaacgtcatcagtatgatcagggtggccatgatgtgtatgtaaac

SEQ ID NO: 10862 - DNA, 677 bp, Glycine max
  unsure (1)..(677): unsure at all n locations
  Clone ID: jC-gmfl02220126h01d1
gacaaaaaaatggccgttagctttgactntntgatanccataatccntganttnnnngttaannnncnntnnccgnnnnnnntnnncnttgtgtttcgttttntntttttttctttgtttttttttttattttgtttttgctttttttgggggctaggggcaaattataatatagtttacccatggtccaatgataaaggctcctcctttatgtgacgtgatagtaggaaaaagaatcacattgagtgacttgcgccctttcttatgttataaggaaactatatacagcactgactagaattctagcctagaggagcatgaggggattgccttctaagttctaacaaaaaaaattttgaattgtgatcatcccttgggacgagaaataaatattacatacactcgaaaaagtggaaggaattaagaaaagaattaccaatccttaatcctacaaaacttcaacaaccgcctagttgagcatatgattttgataataactcttgcaatgttttcaaccagaagcagatgcaactctctgtttatcaaaatctccttgctcttccttggcaaactcttcaatcaattcccgctgtctctctgtcagattggttggaatgctgacgttaaaatgaacatattgatccccaaatgtgtaagaatttatagtcttgatccct

SEQ ID NO: 10863 - DNA, 426 bp, Glycine max
  Clone ID: jC-gmfl02220126h02a1
atcatagtttccacaaaaaacattcactcatgcatgcccaaacctattaatcagcagccatcagattactctgtgctctccaactactttgagtccttgaccatcccttatccaataatcatcatacctaaccagcgagacatggtgaccgtggaggacatacgaaacgcatcaacgttcccagggacccggcaacatctagggcttcagcaccggcacgccatccaagctgcgtctgccaagacgatataccgtgactactgcttccgcattaccatctgcgaacacatgactgatcgtagacaaaagcgtaagcacatgtgcaacctgtccatgataaagaagcgatcatgcaccggatggatgagttcctgacagagtacccgaacatgcgcgaatgcatggagccatcgctagacgagagac

SEQ ID NO: 10864 - DNA, 575 bp, Glycine max
  unsure (1)..(575): unsure at all n locations
  Clone ID: jC-gmfl02220126h02d1
agaaaaagtgccgggctcgccttcgtagcaagncnngnttnnnttntnnncctnnncnnnnnntnnnnnnnnnnnnnnnnnnnnnnnnnnnnnnnnntttttttttttttntnnttnttnnttttttttggggggggggtttattttnctaacggtttcttgttacatgttattttcaacagaaaattgacctaaacaacacagcgttagcattctgcagatgcacgtattataatattggaatactagcagaagctaaggccaaagactcggtaataacatgatacaacgcataaatgagcatagcttttggtacaatattaagcatcttgctctcattattgggcatcataacaatgatattactagtgcatacaacaacattcatggtaattactatgcacaatacaattcttggctgatttctccagcattctcaggcttgcgcaaatatataaacttcatcatatcctttcccagccttcccacaataagttggactgtaattgtaaatgagattgtctagcaactcttgagcaactggtctgtttaaggatttcctagcttcactgacc

SEQ ID NO: 10865 - DNA, 79 bp, Glycine max
  Clone ID: jC-gmfl02220126h03a1
atatctctatcccctccaaacaaacttatcgtcttagacgcacacgttaatcatcggggacccaggtctcggtgctatc

SEQ ID NO: 10866 - DNA, 381 bp, Glycine max
  unsure (1)..(381): unsure at all n locations
  Clone ID: jC-gmfl02220126h03d1
gaaaaaaatgggtaaagtacccgtncgagctccggtagataagggcaanccgaatggaaccttatctggaaaaacacaacacacctttctttttccaacccctaccttattagggcggggtatttttacatcctttcaccccccccccctttgaaaaaaaacaacttttcattcaaattaaacttaaccggcaaatttaaacacaaaaatctatcttaaaaaaattaatctcaccataccctaccaacaggagtacataaacccatgattacatcccactgaccaaccaaaaaatttcaccagcaccttaacgaggattacaaagtccagccctagtttttccatccctgcacctatcaactaaacaaacaaggaatttct

SEQ ID NO: 10867 - DNA, 230 bp, Glycine max
  Clone ID: jC-gmfl02220126h04a1
atatctctggacaccccccacatttctattgtgcgatccaaacatcttagtcattggccaccgaggcttctgtcctgtccgatcgctgatgggtacagacgatcatcatataaaaccacgtttcatcaaaacctatgcacttgctggtgatatattgccgaagaatgctccttggctgccgcttataatttcagctatcatttgccaggcaagccttgggagaaggcgac

SEQ ID NO: 10868 - DNA, 583 bp, Glycine max
  unsure (1)..(583): unsure at all n locations
  Clone ID: jC-gmfl02220126h04d1
gaaaaaaagggccgaatttagcgtncgnagncnagntaagatacngggaaaaaccagcagagtaganagaggactggggnaanaaanannanaaaaaatttatctttcaagaggggaaataaaaaattagggtgggggaacattttgctacgataaacccacaagtcaaactagtaataataacaaactttccctggtatttccgagggttccttattgatcactcttaaatcactagtcaccgcatcagcatgatttatccctccaagggaacactgtgaagaacaacggtctcaacggttagacccggcccgaatccgaatagcaccccccactctaacccttctccagtggtactcttcccttcctccttagacttcttcctcatttcatccagaatgaacaaaacacacgcgcttgacatgtttccggactcactcagcacatgccgggtggactggagtttctccggcttgagccggagcttctcctcgacttgatcgaggatcgcgggaccaccgggatgtgcgatccagacgatagagttccagtcgctgatcccgatgggctcaaaagcttaaac

SEQ ID NO: 10869 - DNA, 265 bp, Glycine max
  Clone ID: jC-gmfl02220126h05a1
agaaccctggacaccccacatattttgattgttagttccgaacatgtcaatcattgggcacagatgcttctgtgctctccttgcgctgatgggtatagcaagatgatgatgacgtatcgcgttccataaaaaccatgacacttgatgggaataatgcagaagaagaaacaatggctgctgcttacaacctcagctatcacgagccatgcaaaccttgggagaaggcgaactatgtttagtccaagattggaaaggctgattcggc

SEQ ID NO: 10870 - DNA, 451 bp, Glycine max
  unsure (1)..(451): unsure at all n locations
  Clone ID: jC-gmfl02220126h05d1
gaaaaatgagggtgcgatcgacatcccgatagcgagccccnnntantattaanngcnannaccannntactaanaaatggacgggcgntaanaatttaattaattttttactttataaagtttttatttcaaccaaggggcgggggccattttcctccgtcttgcctaccattaaacctatatccaataaaacccatgtccggtttttaccagacgaacctaagcagacactctaaaaaaccaaaaccccccgaaagagacgtgaccccctccactggaacacggtaactgaaaacgcccacatcgataaaaagccgccatccaccaaatatctgatcacacactcactctttggatttcttccgtgcttgagctgcctgagactctgttgccagtgcacccatatgggccgctgatggcccccctcacataccttgggccaaactctcct

SEQ ID NO: 10871 - DNA, 563 bp, Glycine max
  unsure (1)..(563): unsure at all n locations
  Clone ID: jC-gmfl02220126h06a1
ctcctaaaaccaaaatacttaacaaacattctccctctttgccattctcatcatcaccgctgttaacaaccatggttatgcgggagaaaaccaaattggggttttctcaatgggaataacaacagcaaaaacccaagaggaacataagctcttcctgcctccatggttttgtcggcactatttgggtgcaaatcagttcatatcagacagcaatcacaaacatatcaattttgtgcgatagcggtttggtgggtgtgcgatgggatcgtcaggatttggtgggtgcacgacgagggtcgttggggcttgatggggtgtgtgactgaaacaccatttggtgggtgaggtgatgggcttgtcggtgacaaagtcaatgtgaaaagagtgaaaaaaattgaaatgccactgctggcaatcgcctccggcgatgacacatgtgtgtcagcggcgagggaggctgaaatgtcccagatctatataagcatatccacccagatctntcagatgtacacagtagatctagattgaccttgttgattgttgttgcttcatcatggatggga

SEQ ID NO: 10872 - DNA, 386 bp, Glycine max
  unsure (1)..(386): unsure at all n locations
  Clone ID: jC-gmfl02220126h06d1
gaacaatcagcggcagatcggattctgtnagcnagccaagatanntttaaaacaatacccaataatttccttctattttcccctctccccccccttttctttttattctctccctttccccacttgggctgggttccccttctcctcccactccccacctcctcttgcttaaacacaacctcttctctcaaattaaacttaaccggcaaacttattcaataaaatctacccttgcaaaattaaattctccaccttcccttgaaacaagtttagctaagccccattctccctatccccctgaccaactcctaaaattttatcccccctcctacccattctttccaaatccagcccctgttctttccatacctgcccctttaccttac

SEQ ID NO: 10873 - DNA, 388 bp, Glycine max
  Clone ID: jC-gmfl02220126h07a1
gaaacgcaccctaagagagagacagagagagagacacagataggctctgctgttgattgcaagctcctttaccatcgcatttcgggatctcgaatcttcaatctagagaggtattgaagatcctgatattgttgcaaatacaaagggctcatccgggttcagaaattatatgtatcctggagagcatcctctacttcctcctaaatgtccgtttcctagtgtttcccaagcatatgctgattatgtccctaatcctgctgttgatttaaaggctggtcacagacctaaagatggaatcacacaccaccagcgtacttcatctgagagccctcgtatagaggagcagccctcatggcttgatgatctacttaacgaaccagagacacct

SEQ ID NO: 10874 - DNA, 336 bp, Glycine max
  Clone ID: jC-gmfl02220126h08a1
ctgcattttaaactggaaaaggaagtgggtccaatcaatatagaatctgagggacagaaggtaaacgcatgtactctgagaggaacattaaagccgtgtatggatgaggggcactgagacatacacacccaaaagggatagttaagaaaaagcttacacattcatactctatctactagaacggggtcagggactacaaagatggtatctgatgataatgttggtggagtcacaaagttcagagtcaatagcaagatgtacaccaaggaggattcttggatggagataccacctaccccaaaacgggccaagcctcgagctataggcaaaattcct

SEQ ID NO: 10875 - DNA, 531 bp, Glycine max
  Clone ID: jC-gmfl02220126h09a1
catcatataaaaaccctaatttgttacacctacaccttcttctctcattgtctcatcatcaccaatcaacaacaacatggctaatttgcaaggagggcctgactttgacaaaatcttccacttcctctccatttgcatccttgctttcatcaatgaaggctctccctccctctcaagagcattcatgaacgagccatggtcatggggcataagcattcccattagtttgcacgtgaaatttgcacttgagatccacactcaccttggaatctgtgttggggtaggagtaccctctttggtctatcggggtgccacacgttgtgccattgattggtactgggaagcagcattgcagttcaaccatgagatctatagaacatgccttttcaatgttgttattgggttgctacacttgttggtgtcaaagcttgctcattacatcattgagtgggtgagggatcacaagccgatgaacaacaacggtttggtgtctgatcagctaatgcttgcaaacttggactttgaagcact

SEQ ID NO: 10876 - DNA, 246 bp, Glycine max
  Clone ID: jC-gmfl02220126h09d1
caaagagttcgacaaataattcatatttttaataatagactataacctccacatcgtcgtggatgtcatgtgaatcgattagggtgttaattaattttcaactactaaaactaagctgcccttgtgcaacttcgaggaccaaatccgaacctctcattctccaaatcatattcaatgtaaaaattctgctgctagaaataccccaagataatggccggaccggtagtcttgggcggaccggcacct

SEQ ID NO: 10877 - DNA, 349 bp, Glycine max
  unsure (1)..(349): unsure at all n locations
  Clone ID: jC-gmfl02220126h10d1
acatgcggtagacaagttttgaccataaagaatttcaaaatattctgaggtcatgacatactcataatttaaaacaaactctacacaaccttggaatcttgcttttgaaatttgaaaaatgggaaccaaacgtgtcttgtagtttgaagaaaaaatgaaagtaaaatcccagcaaaagaatccacaaaacaaaatacattattcaaagatataacaaatgtaagagtaaaagcaagagctgtctgccatgcccttttttgtacaaaagaggccatgcagcccaaaagaagaagccatgggagaaattatcttcaaggatcgnctacttgtgaatgaaatacaaagctcg

SEQ ID NO: 10878 - DNA, 353 bp, Glycine max
  Clone ID: jC-gmfl02220126h11d1
ggagggaaaaaaaccctggtttttccccccgttttgaattctgaaaatttcagacccccctttgggcctttatcgtttcccccctgcccaaaggggggccctttttttcgcaaaagaggggccgaaccccctgttaaaattcccttgaaataacatggcaccccccgaatttgggcatgcccccccccacatttgaattctggccttcccatttttgtcctgggactctgagcttaagcccctttctttcccccccagaaaaaaatcggggcctttttctttgaataatgagcccctcatgggtttcccttacctttcggggactttaacaaacccttggggggggccccccc

SEQ ID NO: 10879 - DNA, 661 bp, Glycine max
  unsure (1)..(661): unsure at all n locations
  Clone ID: jC-gmfl02220126h12a1
atgccagnatgctgcttcctcccganncccantncnnnnnntnnnnnnnnnnnncnnnnnnnnnnnnnnnnnnnnnnnnnnnnnnnnnnnnnnnnnnnnnnnnnnnnnntttnnnnnnnnnnnnnnnnnnnnnnnnnnnggggngnggttgntngntccacgtccatccccatctttcttctcctattctctctgttttcttttcttcttctaaaaagtgagagaagaaaacagggaattgaaggaagaagattgagaaaaaagggggaatgcccagataattaattcggtgaaatttcggattttcgtaagtgggtgtttctcttttcgtgtttttaccttcagtggtggaaggaagggggtttggtttggtgagttgatggacttgatgagcgctgagtgtgtgtcatcctcggacggcatggatgaggatgagatccacgccaaccatcatcactctgagttttcttccacaaagcctcgcaatggaggcactagtaacatcaattctgtgggccccaacggaattgctccggcaaccagcgtccatgagttgctggaatgtcctgtttgtactaattcactgtaccctcccattcatcagtgtcacaatggccacacactgtgttccacatgtaaaactagggtgcacaaccgatgt

SEQ ID NO: 10880 - DNA, 378 bp, Glycine max
  Clone ID: jC-gmfl02220126h12d1
gggaggaaaaaaatcttgttttttccccagcttttgtaatctgtatttttctatgccccctttgggcctttttgttttaccacttgccccatggggggccccatttttttcaaaagaggggcattaccccctgttgaatttcctttcaaattacatgggaacccccgtgttttgggttgccccccccatcttctgaattctgggctttccattttgttcctgggactctgagattaagcccctttttttcccccccaaaaaataatggggccttttctttttgaataatggacccctcatgggtttcccttacctttcggggtctttcacaaactcttggggggggacccccccaaatgagtttccttccattggccc

SEQ ID NO: 10881 - DNA, 347 bp, Glycine max
  Clone ID: jC-gmfl02220127a01a1
actcactagccttattttaggttttgagattgagctaaaggccaactcaaccatcgaatttgttggagttagaaagagttggaagaagatgctggttatggaagctgagagagctggtcgagaaggagcaataagtctaagtcaaggagaaggcgtagcctaagacagcactgtgactgaactcaccaaaatccgtctcctcatggcaattgttgaaacccgagatccctcttccaaggatgaggatgattttatgattagaagattcctgcgagctcgtgatttagaagtagagaaagcttcggcaatgctcctcaagtacttgaaatggagaaattcatttgttc

SEQ ID NO: 10882 - DNA, 330 bp, Glycine max
  unsure (1)..(330): unsure at all n locations
  Clone ID: jC-gmfl02220127a02a1
cttaaagaaaacaaagatctaagagcagataatggtctgattggtcaatttggagtaggattctactcggcttttcttgtagctgagagggttgttgtttctacaaagagcccatgatcagataagcaatatgtgtgggaagcagaagctgacagtagctcttatgtgataaaagaagaaactgatcctgaaaaggttctgcgtcgaggtacacagattacactctatttaagagaggatgacaagtatgaattctcagagccaagcaagattcaaggttaggagaagaattactcacagnttgtttccttccccatctacacatggcaa

SEQ ID NO: 10883 - DNA, 417 bp, Glycine max
  Clone ID: jC-gmfl02220127a03a1
aggtagagcctcctcatccaccaaaaccaccgaagaaaccaccaagcccaccaaaagtagagcctccacttccaccaaaaccaccaaagaatcctcctcctcttccaccaaaaccaccaaaggagccaccacttcatccagttccaatctacaagaagccacttccacctcttcctccactccctaagtttccaccacttcatccagttccaatctacaagaagccacttccacctcttcctccactccctaagtttccaccacttcatccagttccaatctacaagaagccacttccacctcttcctccactccctaagttgcctccactcaagccacttccacctcttcccaaacttcctccaaagcactttttccatcaccccaaaaggttcccagtaccaccttcttcctctc

SEQ ID NO: 10884 - DNA, 431 bp, Glycine max
  Clone ID: jC-gmfl02220127a03d1
attaaaaaacttaagtatccaatgacaatgcatttgtatacacatgaaattaattaaaaataaattccatgatctgggttgtctaacttgccccgatgatgatctttattcgagaacaacaattttgatcacactcatacttcacattactttaaacttcttaatcatatcgctctattttagtttaaattttatttatattttcaccccaggcttatcacatgccctattctttcaagggtttattagcaacaaatagacttcctcaatatacttgatcatacggaaagcccaaaaaagaagaccgaaaaaatgcatgcatattttgcagacccaacaagagtaatcatctacctctgcaatattaatatataaagcctaaggatgaaaggaaaaaggtggttctgggaaccatttggggtgatggaaaa

SEQ ID NO: 10885 - DNA, 381 bp, Glycine max
  Clone ID: jC-gmfl02220127a04a1
cttcagcaaacgcagcgttgccgtcgattccctctgcgttttggagcttcgtgttgtcgtttaacagatcggagttttcctcgccatgaccgaaaccgaagctttggaggatgcgaaagaagaggaggagttggaggaagaagagtgcgcggtgaaaatggtgtacatgtggggataccttcccggagcctcgccggagaagtctccgatactgtctccggcgccggagaatctctccgatcgttcactcgccggagattcgaggaaagacgagagcggcggaggttgcggattcgccatggccatctcagagaaagggaatgctataacgaggggttctgcggacgatgaaaggcagagctactttatatcggggaagca

SEQ ID NO: 10886 - DNA, 278 bp, Glycine max
  Clone ID: jC-gmfl02220127a05a1
attagaccctagcggatattctatgtaaggaatagaagggggagcaatatccaccatccatgtcactcctgaagatggtttcagttacgcaagtttcgaagctgttggttatgactttgatgagatggctctatgagaacttgaggaaagagttttagcatgctttcgtccagcagagttttctgttgctttgcacattgacatgcatggcgaaaaacttaacaaatttccctaggacatcaatggatactactgaggagagaggagctatgaagagc

SEQ ID NO: 10887 - DNA, 441 bp, Glycine max
  Clone ID: jC-gmfl02220127a05d1
gtatggcaaaaacaagaaggggtcccccataccaagaaccctttaccttaaaatcaccacaaacccttatcccccctcaattcacagaataccccccgggcccacgcctctattaaaactcccccctatgagatggaggcccaaacaaaaaaaaccttcgcaaaaccccccaaaacaagggaaggccgaaaggtcattgctggtttgatccatgccctgacaactttaagcttcccttccaagaccatgatgaacctcgcttaataaatgaaatggactacaacatattcctaaattttgaactggcctcgatcagtacataactacatattccgtggcttttcgtgccaaaccctaaaggctgcctacagtaaagccttgcgccccaaagtctcttgccactggaaaggaaaagacagccaatgtttttaaggtccccag

SEQ ID NO: 10888 - DNA, 361 bp, Glycine max
  unsure (1)..(361): unsure at all n locations
  Clone ID: jC-gmfl02220127a06a1
ggagagcacgcacgcgtacattgggcgcgtgagagatcgctacgggggtcgttggatatgtggcctctgttcggaggctgagaaggaagagagggagtgagagaagatagagatatcaacggacgaagctctgaagcgacacatggggttctgccaacagttcaagtcttctggtcctccagataacaccaacgaggacttcattctggcagcgaagcagatcctgtttcgcactttggattctccgaggaaagaccgtttcacttgtcgaccacttgggagatctcacagntgnttctcaaccatgcaaggaactcccacacaagcggagacagaatgatccctctttgaataagattat

SEQ ID NO: 10889 - DNA, 557 bp, Glycine max
  Clone ID: jC-gmfl02220127a06d1
acatagaagtaattagatgcattgatatcccattttgagtagcataatcatatcaataatgaatggtaagattgatgatttcaacataatttttagctactaaacaaaacattttgtacagaaaagaaagaaacaagaaaacttggaagaatatttaaaagctgaatttgggccaaccatagaaattccgaaattccattactagtaaacaaaagtgacatttagattgaagtcaaggaaggaagactcctgtcaacaatcatccactcaatcccaaatgtcaaacaaaaacaatcaacaactcaacaccataactcaaccattcctgcctgactaaccacaacacaacaaaaacaagacacacaactgagcttagtaactcaaccttgactcacagatacgatgcttgtgaatcatgactatacattgtttattattattattattattattattattattatcaattattaatcaataagtctccattttagttgcattctaatatttatcctacaatacttcaatataactcctgaagtgtttttagtattata

SEQ ID NO: 10890 - DNA, 324 bp, Glycine max
  Clone ID: jC-gmfl02220127a07a1
caaacactcacactctctctttctttcttcctagctagctacaatatggagcctctctcttccaccaaacacaacaacaatctctccaagccttcctccctccacacggagagctccgccgccggagagccagtcccctccggaagatcatggaggaggcctccatcgccgccggggtgcaattcgggagggccctacagctctctctacttaccccttacgtccaactgctggggattccccacacttgggccgccttcatcaggctctgcagcccaatctccggcatgctcagccagcccatcgagggataccacagcgacc

SEQ ID NO: 10891 - DNA, 568 bp, Glycine max
  Clone ID: jC-gmfl02220127a07d1
gccaccgcacccaccacgaacgctggtaagttaccacctccaaatagagcatcccatggtccacttatcacagacaccaccatctgtggtatgacaattgcaagattgagcactcccagagacaaaccttggcctgcccctgaggtgctggagaatattgatgctagagcaaagggtatgctgtaagtaatcgcgagtgggattccgaggagagagaagagagccaacgcgccggctttgacggcggcgggaggaggcaggggttcctggtgggcgttggggagtagggtgtattgtcgagaatgttggaccatcttagtaaccaaaaccgtcatggccaaacaaaccgcgagcaagaagttaacaattccccacagcctcttgacgcccccaaccccacgcgccagcactttcactcccaacgacgtcgcaccaagcacaacagagttcaaaattagccccacgcacccgacggacacccttatccgacgccttcccttccctactgtccctccgtcacctgacgcccatccagtcggtgtcgaataagcaaaagggaaccggcgat

SEQ ID NO: 10892 - DNA, 330 bp, Glycine max
  Clone ID: jC-gmfl02220127a08a1
ggctgggacactgcgagaattgatcaggctcatccagttggagtcacttcggtgtcatgggcaccatcgatggcacccggagcccttgtcggagcagggctgcttgatcctgtacagaagctgtgctctggaggttgagataatactgagaaggtatggaagctaaacaatggactctggaagatggactgcttccctgctcttcagatgcacacggattgggttcgagaagttgcttgggcacccaatttaaggctccctaaatctaccattgctagcgcatcacaggacggtaaagagattatatggaccgaggcgaaagatggggat

SEQ ID NO: 10893 - DNA, 579 bp, Glycine max
  Clone ID: jC-gmfl02220127a08d1
aaaacaactcaaactaatcaacttcattcttccaagcacaaaatactcaatggatcacaaacctcaaggaacttagtgcattatgaagcacaattaatcaactgtataatatgcaaagaaacaagatgtcaactatatttcaaaacgaaaattctaaccattttcaaaaggaaaaatatcacattctaaggctccactgttgtcacctgttgccattccccatcaactgcttccttccacaatgtcacattgttgttcccatcagccacagccaatatgtttcctgtcaatgaccatgagaccctccaaacaggggtgttgaaatcattcaaaaccttgccttcccactgatccccctctttcgccacggtccatataatcactttaccgtcctgtgatgcgctagcaatggtagatttagggagccctaaattgggtgcccaagcaacatctcgaacccaatccgtgtgcatctgaagagcagggaagcagtccatcttccagagtccattgtttagcttccataccttcacagtattatcacaaccaccagagcacagcttctgtacaggatcaagc

SEQ ID NO: 10894 - DNA, 367 bp, Glycine max
  Clone ID: jC-gmfl02220127a09a1
cacgagcaaagcaaattaatatccatttggcgtttcatattcaagaggatcttctattagactattgaatgatgaagatgagttccaaaagcgagaaaataaaaccaaagactgattttgaactcgttctaaattattctaatcaaggtatttggaaagatgactcgggtgcaagtgcaaatgcagcttgtcgaatagacaagacattttctgccactgaccccctatctgaaatagttaggtctccagataatgataaaccaacagatgacgtttttgtagaacctatagctagaatatgctcaaagagagatgtttcctccacagatactcctgctaggcatccaacaagtgattattgatacag

SEQ ID NO: 10895 - DNA, 533 bp, Glycine max
  Clone ID: jC-gmfl02220127a09d1
atggaacttaaggttaagcatgatgagaaaagtattcattacacttgcttccaaggaaaagaaggaagaggaaataaagagtatgacaacaatacatatagacaacgaggtgcttccaagttccaattctcctatatgtatttatatttttatgagatcatagattatttcctgtaacctttggtaaatcacaagttagtgaccccttgtcccataaaacaagcaagccatttttacctatgtgaagtagactattctgtatgttggaattgtttgatggcacctaatctccttgcaaacatggacaccattggccctgaatctctaaatcctgggaaaggtgtaaaggaattgaacttatgcagctttgctgtgtgatattgatttcccttatcatccttaaggacagtggaatcctctttattgataccacagttatgtaaattttgagcctcagcgagcagttggtcatcagtagattgttctctggcctcttcaatcttgcagcttttcagagaaatgtgtttatggga

SEQ ID NO: 10896 - DNA, 378 bp, Glycine max
  Clone ID: jC-gmfl02220127a10a1
ctcgagccgaatcggctcgagctcgtgccgaatcggctcgtgctcgcccccgctagttttctcggaactcagagctgcttcagatccagcttcagtaacgtacactgaaagcaattgtagatatctccgagttgcaaacgcgctttctgaatgcggcaatggcttctcacagcgacgccaattccttgagggactttaggatcccgggccacgttctcgggccggattccgaggttgaaggaagcaacatcgatatcgaaagacctaagagtccggagctcgttttcggtaactcatggagtggaggccagctaggatgagaactcttgaaaacagaccgagcgcttgttaacgaaaaccatggtttcgacttggggg

SEQ ID NO: 10897 - DNA, 495 bp, Glycine max
  Clone ID: jC-gmfl02220127a10d1
ggatctcaattcttatgtattggaacagcacaaacgtttatatcaaaggaattattgcatctcaattcttaattactattcacatgttcacagacataacgctgctagaatagatcaaatcggggatacaattgataaaggcaactaacaaatatttataaaaatcctactaacagctaagcagacaatgttggcaactgcataactttaaagaatggctttcacaatgaaagatctaactaagatgagcaaggtctacctcatctgggattttaaatgtatttgccgcaccaaacttccggtattcatctgctttagcttcttcatcatcactatcatcttcctcgacatcattatggggtggagatgacggatcattctcacttttggacttggaatcatgagtggcgagcatgttaacctggccatggtgagaaatttccaccaaaacagtattatcgtcaactgggaggggttgctttcaaggttccccat

SEQ ID NO: 10898 - DNA, 376 bp, Glycine max
  Clone ID: jC-gmfl02220127a11a1
ccatagttacccacttcctctgacgatgctccaaatccacgcactcggaaggaccttgttctaatgattagcggtttagtttttgctctcttcccttgttgcctttggagggtacagggcctccaacgcgccacatgctgacgtgtcatcgccagcatcgaacgatgaacaacctagtcccacatcggagccttctccgaaaaggtacccggtttcacggagtgtttcttctggggtgtcagataagtcatcaagcatgttgtttgcggttaaagatggagcttcggaagcatttccttgggacaatagcatgctgtcgaggcagagaactgcttttcatttccaaccagagaaaaactggatgaacgatcctaac

SEQ ID NO: 10899 - DNA, 476 bp, Glycine max
  Clone ID: jC-gmfl02220127a11d1
gaaaaacagattctcttgtaagaatcattaaacatgatatgataaaattatgataaacattctcataaacataaatgagcaaaaaatgaaggaatgggctttgagcaagaacccataactttattgggggtttatgggaaggtaaacaatcgatgagttcaaattgccaccccaagatgttttccgatcctttgtgactacaagtcttttatatccaatttaattatttattttaattcttctgatcagggtggaatgggcgtataaatgcagaattcatttgccaaacattgagtgaggctgtcacagtggcctcagtagcattgttgaacaagaacaacctagcagctccatagattgcctttgttggataaacccgagatgtcacaaccggccttccaccttgagcaaagctttcaacaatagaatggtccaccagtatccgcaaggaaaacttttcattataagtactggaa

SEQ ID NO: 10900 - DNA, 344 bp, Glycine max
  Clone ID: jC-gmfl02220127a12a1
tagtgaaccaaagagtacttaagaatgcaccttgcactgaggctgtgcttgtagatcgaggatatggacatgggcctcagaatttgggcctatataccactgtgacccaacatgtttgagtttagttcttaggagggcccgacgatcgagaagccttggagtagggggatagaatatctaaccatccagcggttaaagtgactgtagagaggttcattcacaaagatgtgttggaaggtaacgacatgtcacactcttcaccaagcaaaactaatgggaaaagttacaatttagccatatctaaagtgtaccctccaaatgaaaatgagcttgatgatgcaaca

SEQ ID NO: 10901 - DNA, 414 bp, Glycine max
  unsure (1)..(414): unsure at all n locations
  Clone ID: jC-gmfl02220127a12d1
ggggnntnttgcgaggtacgtcgcgtactatagacaaattgacggtcacgcgctcctcgtagctgggcgtcctgttctaggaatatgtcaatttttgtgataaatcttaaacgagccctgacccatgccttactgctggggacccaccttgctgacagggagcttctgcttctcgcaagggtcattccgaaccatctgcagctctgtgtcgagaaatcccttcacacagaagaaaccacctcttgctctgtcgttgctgagcctcatacttatcggcttaattcctagaactgtctgtttaccaaatgtggcaacaaacatggctaaaataggccttctcgaacatgtctataaaacacaaatccttactccgcccttgcagggagacctttagcatcatatttcgcacctcct

SEQ ID NO: 10902 - DNA, 313 bp, Glycine max
  Clone ID: jC-gmfl02220127b01a1
taccaaaccacccaagagcacttaaaactccccaccagaaaaaaaaaagaattattctcttgccctagccctaagcctaatcctcatttcttgttctcctttgctagcaaacgctagaggccaccatcatgcaagaggccatcatctaaggttaggagggcaaatctgcacggaactcatccaaaaccagacgacttgcacggaccttagaaaggcagcagatcctaaaattgcacaggcaaagacattccaagagcttgcacaggcagagctagaatttgccgtgaacaagggaatagagggccaaaccttc

SEQ ID NO: 10903 - DNA, 170 bp, Glycine max
  unsure (1)..(170): unsure at all n locations
  Clone ID: jC-gmfl02220127b01d1
gatgacgaatcttgacctgantcgttatngcgcgctagcggatagctggcgcggaatgacacgcgcgcgtagagcagcgaactaggctggaagccgtcctgcaacaaaacaataataagaccacacactgactcacatacatagcttaccgttcaacaccatcctaacga

SEQ ID NO: 10904 - DNA, 178 bp, Glycine max
  Clone ID: jC-gmfl02220127b02a1
aaagagatagaagcagcgagctaaagaagcaaagtagtttcccgcattcttcgaatacttaaggtaatttagctatctttagctttagctttggagtttttttttttaatcaaccttgacttctgttaagcttactcaatttggtttacaatacctatcagaacaaaagatagataac

SEQ ID NO: 10905 - DNA, 307 bp, Glycine max
  Clone ID: jC-gmfl02220127b02d1
ttatgaccgtgttcctagagtcagactacttatatacgagctccgacgtagcatgcatctcgtgcgtagagcagcgaactaggctggaggcgccctgtttcatatcaatttttttacgacaccctcactcacatacatatctctcgtgcagcaccatcctacctagctcctcactctgaaacaccaagaggcgttagagcggccgccgcagacgtcaccatcagtgtcgacggatacaagactcaagcaacttctctggactctacttctattccagttgatgcatgaccaacctcaccctacattc

SEQ ID NO: 10906 - DNA, 429 bp, Glycine max
  unsure (1)..(429): unsure at all n locations
  Clone ID: jC-gmfl02220127b03a1
agatttagagggttgtctttgagttgttcaatttctctgagactaagagcacaaggagtagttggagttaacgggaactttcacaatccgtttctttagggggctaatagattttactatgttgatccttgcaatgagcgccatttcaagccaagggggccaaggcattggtttcagaattctagacatatttttgttgctgagatggttggtagggttttaatcactgagttttttgggaacttggaaacagttccttacaccaagcgaacccatttgattctgttgtcaaaagccatggagatgaagctaggggagtgccagntagaacaaatcaaagctgattttgaagggaaaatattgcctcctatacatcccgaaagtgtgagggtgacaatgatagctaatgaaataattgatgcattgctg

SEQ ID NO: 10907 - DNA, 546 bp, Glycine max
  Clone ID: jC-gmfl02220127b03d1
ttttttttttttttttttttttttttttttttttttttttttttttttttttatttgggttttttgggtttatttctaacagggactcccattttatctctggatgttatatacatctaaaaaaccaacacaaacgcacacaacaaaacaccaacccacgcccaacaaaaaaaaaaaaccaaattttaaaaaaaaaccaccccccccacaaacatcctttcaccaaaaaaaaaggggaaagggggttccccaaaaaaaaaaaaaacaccccccggggggaaggggcccccccccaaaaaaaaaaataccccccccccccggcgcaaaaaaaaaaaaaaaaaaaaaaagcgccctaacccaaaaaaaaaccccccccaaaaaaaatcccttctgggggccaaaaagagggacaaaaaaaaaccccccgccagggaaaaccacgcaaaaagttccccccccacaacaaccaaatggggccccacccgagaaaaaaacaccggggaaaaaaaaacaccccccaacaaaacccccttccccccccccccc

SEQ ID NO: 10908 - DNA, 335 bp, Glycine max
  unsure (1)..(335): unsure at all n locations
  Clone ID: jC-gmfl02220127b04a1
cgccattctcatttctctttccagaagataaaaaacccttttatatttttatatttttatcactagaaaaatcaaacaaataaaattttcattttcattttcttttcttttctcgctcttgttttttcggggaaattgatttcaccgtaataggagccaagaaaaacaaaacagaaaaattccgaacccgagaactcttttacctgctacaaatgcatttctctctcttttctcacactttttctctgctaaactcgcaaacacgaacactgtttctctctctctgaagagaagnaatgaagcttcatcttcagatctcgagctgaatcaccgat

SEQ ID NO: 10909 - DNA, 558 bp, Glycine max
  Clone ID: jC-gmfl02220127b04d1
agcgtaactcatatcaaactgtgcagagcgtatgagtcagagactgaaggcagaaccttcttccctctgaaatcccatacagtatcactgttcaatctcaataaatatgggaggtgaaaaaactttgttccttcaccctgtaattctacatctcccaataaatttattagagatatttacgtatctactccataaacttcgaacctctgggaaaccaatttcaagccatggctttgcagggccactgaaatgaataacagctgcagcttctaatttctctttgctaatttctgctgattgatggcgataacctaaatcagtcacaagcattgatgaacttataggatgcacttgaccctcaaatgtcatcaaggcaggtggaagcactcctggattccacattgtcatcccggacttgaggttaagtttcaaccattgatggtaggtctccgtaatgtttgttctcctccaaagttcaagatcaataatattcatgccatagagccatgcacactgatcaccgtcaaagtttgatgcaacaagagatgtgaaaagttc

SEQ ID NO: 10910 - DNA, 407 bp, Glycine max
  unsure (1)..(407): unsure at all n locations
  Clone ID: jC-gmfl02220127b05a1
cagcaaccagtctgagtgcaattctgagatcaaatagctatcacaagaaagggcatgaagctccttgcaaatatgggggcaatctgtatatggcactgtttggacttgttcagattagaatgtcattcataccggatctccataacatggcatgggtttcagttgttgccgcacttatgtcctttacatactcattcattggactaggacttggcatagcaacagtcataaaaaatggaagaattatggggagcttgacaggaataccaactgataaaattgctgacaaatttaggntggtcttccaagcactaggagacattgcctttgcctatccatactccattctccttcttgagatccaggacactctagagnctcctccaccagaaaatcaaacaatgaaa

SEQ ID NO: 10911 - DNA, 533 bp, Glycine max
  Clone ID: jC-gmfl02220127b05d1
cttcatcaaacaaaacttgtattattccaatggcactggcagtaccactttattcactttctgaaatcccccacaattgcttgtactctatcttactctcaataacactagcattcagctttaaacttttttatatgaaacattatataaccatcaatctacaaactcaaatagagtaagcattactaaggggagtggcataaacaacctttcaggctttcagctattttaatttggcacttactattccttcaagtgagccaaccaagcccattacagtgaccagaaagcaagcaaagctgaatgttctaagaacaatccatttgctactccaagctgcaattttctgctgtacaaagtacatctctactgggaaatatatagccaatggccagaagtttatggctcctaacactcctaagatttggttgaagtaagggaaaaagattgcaagaccaatggttgagatcacataggttgttcaaagcagaacctgaaaagatttagctgaaaaccaggaagcaaggaagttt

SEQ ID NO: 10912 - DNA, 334 bp, Glycine max
  Clone ID: jC-gmfl02220127b06a1
agataaacttaagaattcaattattagaaattgaataagtaaacaatttaattggattggtcgaatggtatcaaatatatggagtactaactcccatttcttatttattattgaattaaccgatcaacttgctttggtatcgaacatttctttttgatttcaaaaattttccggaaaaaatttgaatctatttttatatgcgaatcaatcctactacttctggtcctgaggtttctgcgctcgaaaaaaaaaatctgggacgtatcgcccaaataataggtccggtacttgatgtatcttttcccccatgtaagatgcctaatatttacaacgc

SEQ ID NO: 10913 - DNA, 471 bp, Glycine max
  Clone ID: jC-gmfl02220127b06d1
tgttgtgggtttttttggtttttttttttctgttttttttttttcccctttttttttttaaaggaaaaccaaaaggggggcccaaaaaatggaagaaaaacaaatgggggggcccaaacggggggccaaaccggggaaaaaaagaaaagggcccaaaagggggggcctgggccccccccccaaaaaaaaaaagccttgggtaaaaaaaaaagggggggggcttttgggggaaaaaaggaaaaacccttttcgggggaattaaaaaaaacgggggcccaaaaaggggtgatcgaaaaaaaaccccccaaaaaagaccaggaaaacaagggggcttaaaaaaaaaaattcttaaaaaaccctataataccggggggggaaaaagggccaagaatgggaaaaaccccaaaaggccccctaaaagagaaaaaaagaaattccttttttgggaacccaaaaaaaatgggggggggg

SEQ ID NO: 10914 - DNA, 304 bp, Glycine max
  Clone ID: jC-gmfl02220127b07a1
agaacttagcttctctctctcttctacgtctccttcctctcaaacggattacaaccagcaacagcagatttgaagggagtacgcaattagatggatggatattctggtaaaagagccattgatggggaggtagtccctagaaaggggatgggccttgcatttagagatactgctaatgctagagatcgaaatggtcaagtgtgcagccgcattacttgcagcagctgattcaatactcctaaaggcactcaaataggttcttgagaaaaaggtaaatctttgaaaccttcaatccaatcttctt

SEQ ID NO: 10915 - DNA, 554 bp, Glycine max
  Clone ID: jC-gmfl02220127b07d1
atcaagaagttccagtctatatcaggccaatggcttggattattgtataatgggaatgaaaatattggctatgtacaaatgaccaataaaaataagtgaggagcaactgtattttgtacaaaagtgatgaagaaaaaaatgaacagcaagaggggtacaaagaaatcagtctccctcgtctggcctaacattgcaattgatgggatcattaggatggtgatgaatttgactgtgccactgatgctttgcaaatagggcaccagttctttagctgtagccactgctgtatgcaagccacatgatacatgtgctcgcattgcaaactccccacttcttctgcagccacatattcctcctggcaaatgctgcattttgtatcatccttaggttcattgcaactctcagcttcattgtcagagggtgaggactggtagacacttttctttaagcattctgaaagtgttttctctgttagagctgtgctcacagtacccatcctctttttcaaagccagcaattgctcatatgacatgttatcaatgtccaatcgcatg

SEQ ID NO: 10916 - DNA, 185 bp, Glycine max
  Clone ID: jC-gmfl02220127b08a1
caaattagttcattctctttgcagcagttccctacctctcctttcaagaagcagatcttcgtcaagaccctcaccggaaagaccatcacccttgagagaggaaagctctagacaccatcgacaacgtcaaggccaagatccaggacaaggaaggaattcccccggatcagcaacgtctcatcttc

SEQ ID NO: 10917 - DNA, 517 bp, Glycine max
  Clone ID: jC-gmfl02220127b08d1
caacacaaaccaaactttatttgcaaaggtcattacagacccattacacatcacatttttttttaaaatgtttgggaaaatccaacatcgaacatcacacagaaaatagtttcagcttaaaaccccccacgaagacgcaacaccaagtgcagagttgactccttctggatgttgtagtcagcgagggtccttccatcctctagctgtttgccagcaaaaataaccctctgctggtccggtgggattccttccttgtcctggatcttcgccttcacattgtcaatggtgtcggagctctccacctcgagggtaatagtcttacccgtaagggtcttgacgaaaatttgtataccaccacgaagacgcaacaccaagtggagagttgactccttctggatgttgtagtcagcaagggtacgtccgtccttgagctgcttgccgagaaaaatcagcctctgttggtctggggggataccctccttggtctggaacttaaccttgaccttgtcatggtgtc

SEQ ID NO: 10918 - DNA, 372 bp, Glycine max
  Clone ID: jC-gmfl02220127b09a1
cttacaatcaccacgagtgaaagagaaggaaaaagaaaaagaaagactttctcttaatcatcatgaccatgaaagactccatagttctatattcagctttgggaagaggacaccttgtttcaaaggaggaactaggtaaactcatactaagccaccacccttcactttccatcaccattcttttcctaaccccaccccccaaccatgacacccccacctcccccaccgccttcacctgcgacgccaccgccaaatacatcgccgccgtcaccggctccaccccctccatcaccttccaccgcatcccccagatctccgtccccaccgttctcccttccatggccctcaccttcgagctctgccgcgccaccg

SEQ ID NO: 10919 - DNA, 494 bp, Glycine max
  unsure (1)..(494): unsure at all n locations
  Clone ID: jC-gmfl02220127b09d1
ataatgaatcacacttttttctgaacttaataatattctatcgatctctaattctatactactagtgctccctccatagttccactaacttattcaaagccatgattgaagatccacctttcgccattgcttccgtggcactgattttcattttaaaaatcctctgtctaatctccttccctttgtccgagtccatgagttccatcactcggtcccccaactcggtggaactcactaacccgtctttgttctgcttcaccgccaaacccaccttcatttcctccaccaagatcaccttattcagcttctgctctgcgtagagaggccacgccaccattggcacaccttcacacaccgncttcaacaccgagttccacccgcagtgagtcacgaacccacccaccgagtcatgactcagtatcgccgcctgtggggcccagtccctcaccactaaccccttntcctttgtcctctccaaaaacccctttggcaac

SEQ ID NO: 10920 - DNA, 122 bp, Glycine max
  Clone ID: jC-gmfl02220127b10a1
tgctaaacctctcttcttctgatagattcacttctcgatttttctagttttggtttacattttcggtttccgatctaatatcgatgcgattcgccattagccggataatagagtccttcggc

SEQ ID NO: 10921 - DNA, 495 bp, Glycine max
  Clone ID: jC-gmfl02220127b10d1
gtagggattaaagcctgttcgacgagtcttaagctttccttggccaagccctatggttaacagtccctcgttattttctacaaatggcaggtttttctgcattgcttcataattagaactgcattttttgctgacaggatcttcgtctttgtcatctatgttttgcttgttattattggcgttgtccatttgctgattcttattcttcaaagcatgaggaggtgaaaagctttgaggcaacacctctctggagaatagagcctgaaaggccagactcccctcttcagagacctttttccaagaatcagtaagattgctaacacttctacgacgattactaaagtgaatggctaattggttagcatcagggggttcaggctcttccttccctttgtcatccttctatagtgccatagttttcacatcgttgctagaggccgggtgggaaccacatgaggaaccgtcaaccgggtttttgtcctttgttttgctgga

SEQ ID NO: 10922 - DNA, 231 bp, Glycine max
  Clone ID: jC-gmfl02220127b11a1
aaattcgaagagtacagagactccataaaagccaagagccacaaagctctccaagaagcaccctcgttgcatagcagacggcaacgagcttctcaagttccactgcacctccttcaattgctccctgggcctaaacggttcctccaacttgagcaactcgataccacagtgtaacgtgtgcagcataatcaagcacgggttcaaggtcaccggatgagccggtatcttgac

SEQ ID NO: 10923 - DNA, 536 bp, Glycine max
  unsure (1)..(536): unsure at all n locations
  Clone ID: jC-gmfl02220127b11d1
ggggnncctggtaggtacgattgtatacatagaacaaatttgccgggtcgacgccctcactagtcggtgggcgcccttctttagttttttttttttttttttttttaacagctaaatctacagtcacataaatagggttattgtgtggttaataattgctgtagtactagaagtaatatacagtggttgattaagtctgccatggattggagaggtaagtgatacccaccaacatttccacaaatgatctgagaccgatcaaatactcatatccttaacacaagaagatgctacaacttttaaaagagctaattcacaaaacaaaggaaacgaaattaattcaactcacagcacatttcaaaagcctctatagattacaacaaagcaaggcaatatagctttagggttgaacacaagcaactcatccaaattagaataagctacaacagcaccggcgacaacaacagaatcatactcctccatgccaccttgtgcattcttcttcaccctgcctgctatcactctacaaaccagca

SEQ ID NO: 10924 - DNA, 391 bp, Glycine max
  Clone ID: jC-gmfl02220127b12a1
gaagctgaatcacgtgcaatttctggaaggaaaggcacccactctgccaaggatcctccagagatagcatataactgatttgaccacggcatcggctaagaaagccagagacttcttgcctttcctgcaccgaagtagaagagttcctgctgttgaggaatatgtgctcagaggtcatcgttttaagttgttaattccaaaagaaacttgcagcattgctttctctttttctggagtcaggtgtccaggtcgtgctgaaccatattctgacgaagcaattgctctgatgaggagaaagataatgcaaagagatgtagaggtaaatcaattcctttctgaactttagattcctgtatgcccgcttatttaattggtaaatatttcttatttt

SEQ ID NO: 10925 - DNA, 425 bp, Glycine max
  Clone ID: jC-gmfl02220127b12d1
ctctagctcaaaaaaaaatataaattgttcaagcctattaacttgagtcatggtgtctcaagacgtctattttataatttacctcctgttacacttatttacggccaccaccggtctttctacgaaggaggaccagagtcctgcttgtatgactgaatctgtacatactgtcacattccacacctgcacgacaccgatttatgcgggaaattctccaaatatatcagagctggctgcctgtctctattagaccacctgtctcttttcattcacgtacaatgccctttctgctgcatggggagcattaacgctgatttcactatccagagcatcaagagttacagcaaggattgccccagttccctgccctttcactttgcctcccgaagtatatttctcctcaaccttggccctgaactcttttc

SEQ ID NO: 10926 - DNA, 450 bp, Glycine max
  unsure (1)..(450): unsure at all n locations
  Clone ID: jC-gmfl02220127c01a1
catctttcttcttcttttccttcaaacaatcaaatccacccacggcaccctctcacataaaaaaaaatctcagatttcttcattccttccattcaattccaatccaaaatggatcaacaccacttnctccaccaccaccactatcaccacccccaagaacaccgcaatcgatacacctccctcacacctcaatcccaccttcacagtcaccaccacaataatcttcctccaccaccgccaaatccttctccgcctctttcctaccaccgcacaccgnaaccctacacccctcctacaccccaaccccaacatcaacaacaacaattcccttatacacccctcccagaccgncctctcgaagaagaaccccaacctcaacgtcatatcccatacgatcttctncctcgccgnaccaccaccctnccctggaaccctaaccctaaccctaac

SEQ ID NO: 10927 - DNA, 382 bp, Glycine max
  Clone ID: jC-gmfl02220127c02a1
tgcgagaaaccgccacgaggcttctggtagcagcaagtttggtctagaaagatcccatggagtcggtccgaacgaggatccacccccttccttgacgaacacagagacgtgtgtttaggattctatttgagccgaggtttgagatttagatgcaaataaatatataccctgtcttgagccgagtcccctttaagccaatagcaatcaaacaaagtttcggttattggtgttcatttttcttcctccatctttctctaaaacattaattgaactctccattccttaaattttaccaacgagctagttccgacactgacaaagcaatggcaaagcctgagttagaggtgactggtgagagcaagaacaaagaactaaagcacct

SEQ ID NO: 10928 - DNA, 391 bp, Glycine max
  Clone ID: jC-gmfl02220127c02d1
gagggggggcaccccccaaagggggccccaaaaaagagccctaacccattttttttttgccccacaaagggggggagcaccctttttgagcattttccgccccatttacaaaaaaggttttttttacaggggttctacaggggttaataacatagttttaccatgcctaaaaaagctaaaaaggttgtttaggcccaaccccccctttggctaaaagggcccaccccccaaaacaaggtccttcttaagcaaatttttttgaaaaagaaaggctgattttaatcaaaaaaagaggccgattttaatttttgttcctaaaagggggcattttctcctttaaagggcgccctccccgggtggaaagcccggggtttttttttaaggggaaaaa

SEQ ID NO: 10929 - DNA, 448 bp, Glycine max
  Clone ID: jC-gmfl02220127c03a1
gagtagagagaggttgaaagttaagaagtagcaaagatgtttccattcgggcacaagggtcaaaagataaaggggactatggaggttatgcagaagaatgagttggatatcaacagcatcaccagagttgacgggatcgtcggcaccggcttagacttcttaagcagagcactcgatacagttacttttttagcctcctccatctccatccaacttattagtgctaccaaagctgatggagggaaaggaaaagtaggaatggctacaaatttgagaggaaagataacattaccaaccataggagctaaagaagaagcatacgaagctcaattagattgggacagagacttcggaattcccggagcattttatattaagaacttcatgcaaacgagttctactcaagtctttaattctcgaagacattccaaaccatggaaccattcac

SEQ ID NO: 10930 - DNA, 462 bp, Glycine max
  Clone ID: jC-gmfl02220127c03d1
aaaaagttcaaacctgcatgattgcatttattattttggtttccattacacaaacatggtttattaatgacaaatacaagtacattcagccactccaaatacataacttaaacatacacaactgatgaaggaatcagattccttctatttcacatttatttaaagccagggacagtacttcagcaaccatagagcccttagatagagatactgttgggaattcctctgaaagtcaatccctcctcactagaaggatagagcaaagtgtaaggcattttagccggcccatagcggtttctcaatggctcattattggtcttctctataagcttcttttcaatctcttcaagattctttccaaacctcttaaaggcctctaatggcccggcatcagaagtccagtagtcaccgccatctctctgcccaaggtagaactcatcaaatgcgtgccttgataaaatt

SEQ ID NO: 10931 - DNA, 223 bp, Glycine max
  Clone ID: jC-gmfl02220127c04a1
ggaggcaccgatgctattgctactacacgtgttgtaattcgtagagagaataagcagtcacctactcctgctttgaatggaaacgttattgatccaacatttagaggtaccggagaaagaggggatatcgccacttcaagtgtagagggttatattactgcactaaacaaaatgctggattcacaggaacgattagcattcgacgaatgaattgtagcacctt

SEQ ID NO: 10932 - DNA, 376 bp, Glycine max
  Clone ID: jC-gmfl02220127c04d1
aagcaaataagaagtgcatttctcatatattagacccatgtggagacttacaaaggtaacattgttcaataatatggtccatacttaaaaagatcacaaagaaatcacaaatcgctagctgaatttataacttgaagcgtgaattctaacatttaggcgctagaattctttcgacaaatacaaatcattcctttgaatcgagcattttgtttagagcagtaatataagcctctacacttgaagtaacaatatccactccttatccggtaccactaaatgttggataaataacggatccattcaaagcaggagtaggtgactgcttattctctctacgaaatacaacacgtgtagtagcaattgcatcggagcctcc

SEQ ID NO: 10933 - DNA, 367 bp, Glycine max
  unsure (1)..(367): unsure at all n locations
  Clone ID: jC-gmfl02220127c05a1
tctcaaccctagtcaaagagagtcaagcacatttttttgtttgagtgtgtagcaaagggtggtaggtagaggagcttgttgtggttggtaggtaggagagcgcaagataatgcggcaaagttgttgcaattggggaaggttanagtagnagtttctttgcatggtattggtggaggagcctttggcttgtactgattcaattcagaagcttgaggttcagaagcacttgaagaacttgaataggcctcctgttaggtccatcaagagtcctgatggagatgttattgattgcatccatgttacacaccagccagcttttgatcaccctgacctcaaaaatcacaagattcagatgaaacctaatttc

SEQ ID NO: 10934 - DNA, 521 bp, Glycine max
  Clone ID: jC-gmfl02220127c05d1
aaaaaaatacagtttccttgtcccataatagaatattctgttcacattcacacctcaaccttcacagctctagagagaggagcaaacaaaaacaacaaatatatataatatataatataaacagggaaaaccaatgaagaaacttgtttcttgtaactctaagaaagaaacccaccaccccttttctccaacaattttttggagacttcaaagagactaggagcttcattatacaccacaaagctaaggggtaccacaaagttactaaaataactacagtagatgaaaataacacctagttttttttggtggtttttttttctttttttgtttgattaacatgaatgatcaagggcaatttggatttctaccaggaccaccatagtagaagtagttaccccaatctccagcactaccagtttgaacattgtagcagctatcttgctcagtgtaagtgccaaggtcttttggagctctagcttgttgtcaccataacaatctgaatgttcttgaagtaacta

SEQ ID NO: 10935 - DNA, 406 bp, Glycine max
  Clone ID: jC-gmfl02220127c06a1
catttatagaaagaaaaaaatgaagaagaaagagttctgaccatggctagcatcattatttatgccttcatccatagtggacgaagaagcgaggtttgaagccgaagaggcggaggtgcaagcatggaggaactctgagaggttcaagctaacaaaaagaccatacacagcaagagatgtggagtccctccgaggcaacctcagacaaacctatgcctcgaacgagatggcgaaaaagctctggagccttctgaagaaccaccaagccaacggcacagcctcaaagactttaggagcacttgatcctgttcaagtcactcaaaaggccaagcacttggacacaatctatgtctcaaggtggcagagctcagccacacacaccacgagcaacgagccgggccctgac

SEQ ID NO: 10936 - DNA, 549 bp, Glycine max
  Clone ID: jC-gmfl02220127c06d1
cgaataagcaccaagtaaaatatatttaagggaaggagtaaaccaaattacaaaacagtaaaaccagatttctttgtgctccttgtccacaattgcatgtccaaatatacactataagtaaaatatgtttaacagtaggagtaaaacaaattacaaaacacagaaaaacaagttttccttgttctccttgcccacatggccaagagtctgaacaagtaagaaatataagaaattatgaaggcaaaaatagcagaatgattcaatggcccgtttaatacttcaattattgaggacatttattccaaattccaatccaacacagaaattggtgaattttccccaagttccactctcggcagtatagttctgcaaaagtagcactttcacattctggccttagcaaccacaatactgcctctatcaatttctacagctcctggcctagtccatgattctttaaactgctcttcagttactccttttcccattgcagcagttgaagccacacctccctggacagtcttgagatacctatcatagtagttagca

SEQ ID NO: 10937 - DNA, 285 bp, Glycine max
  Clone ID: jC-gmfl02220127c07a1
tgttcggatttgaggtgcagctatgacttctttgagccgtgtattagtagtttctgatactccaatttttggtggtggtgttgttcaaggagtcggtgcacaagcttgtgtaagaatctgggtttttcttcaatatgaagtactttgaggaaaaagtacaggctggtgaatgggtagaagttgagaagtacttaacagggtttaccaaagttgatgataatagatactccatgaaaatattctttgaaatcaggaagcaaaaatatctagtagcacttgatgggc

SEQ ID NO: 10938 - DNA, 197 bp, Glycine max
  Clone ID: jC-gmfl02220127c08a1
cttcattcctccatcttcgtcccctgtcatttgcagattcttctctctggatcgctgatattcattcatctactttgtaagggatttggtagtgaagacatcattagagagatttgttattcgctttttaaccctaccatttataacctgcgggaagcaaggaaaaaagcagcagaatgagtagtacacaggtgcca

SEQ ID NO: 10939 - DNA, 415 bp, Glycine max
  Clone ID: jC-gmfl02220127c08d1
aaggggagtttacattggtattttcaaaacaaggctttttattctacaaataggacagaaaatcaaaatttgatttttggaccttgaaatcacttgatttcagagggagaaaagaaaaatattaactgccataacactcccttttcctagctaagcagttcccgcatttaagttaaggaatttttttacaattcccatcatttctcccccagggaaaccccccaaacatccctttgcaggtgccactttatttagctcataaaccgaatcacccctataagcttgacaacatttggcttttttttcttgtggttccaaatcatcaagcaagtcttcacccgacttaacacttggaataggaaatgggtcaagaaaagttttggaaatggtggattccccaattgcaccaacaaag

SEQ ID NO: 10940 - DNA, 317 bp, Glycine max
  Clone ID: jC-gmfl02220127c09a1
tagagcttcgagctagcaactgaccatttcaactcaaagaacattcttggaagaagaggctttggaatagtttacaaggcatagcttgaatgatgggtctgttgaggctgtcaaaaggttaatggactataatgcagccggaggtgagatccaatttcagacagaagttgagaccataagtttggctgtccaccggaatcttctgcggctttcggggttttgcagtactcagcatgaaaagctccttgtttatccctacatgtctaaaggcagcgtagcctctagattaaaagatcacattcacggtcggccagctt

SEQ ID NO: 10941 - DNA, 488 bp, Glycine max
  Clone ID: jC-gmfl02220127c09d1
aaagcagaaattttaggtcatccatttcaacaaagaagatacttatacatgactttcctcttttttttttttctttttacagatgaatacgagcattacatagctattgacacgaatgacaatgtcatatttaacatttaaactacaccttttaaacaaggagctataggggaaaaccaagatacttgtttgtcacctaggaccaaaaagctccatggcttcaactacgagtgaagattcctttattaaatctgaatatctttgaggctcacaagaccgaaaccttggggtttcaatcctttgggaggcctcccatttttcagctaagccatccccttctaacatcttcaatacttttgacatcttggggcggggcgaaggattgaattgtgtacacaagagtgcaacctgaaccatttcttctagttcaatcagatcgaagttgccctttagatctttgtctaccatttgactcaatcttccatcct

SEQ ID NO: 10942 - DNA, 360 bp, Glycine max
  unsure (1)..(360): unsure at all n locations
  Clone ID: jC-gmfl02220127c10a1
ctttttcacgcgacgccctagttcatttttcttctccgttctcttctctctctgttcttcactcactctcattcattcaccatgacgaaacaacatgccaattggtctccttacgataacaacggaggatcatgtgttgcgattgctggagcagattactgcgttatcgccgcagatacgagaatgtccaccggttacaacatcctcactcgcgattactccaaaatctcccaactggctgagaagagtgagatggcttcatcaggctttcaagctgatgtcaaagctttgcagaaaggtntgtctgctaggcattagatttatcagcatcaacacaacaagcaaatgagttgccctgcg

SEQ ID NO: 10943 - DNA, 459 bp, Glycine max
  Clone ID: jC-gmfl02220127c10d1
gactcagacaaaaatccaatgcaaatttaagtgaaagcagtctagttataatgggagcagactagtacttgttcaaagcaatttcactggaaatgctattcttaatttcgcctcatgggaaaaacccactacgtcattttaaattttagaagcatttcaaacattctcaatccaagacaggtttctccaacaacaatttcctgtaaagcattagtctttccttagggccatgtattcacgatgaataccactggcatttaggatgacgatttcaaccttatctccggggtatatatctctctcagttgcagatgcaaaaacagttttgaccagatcaactgcttttgcttcagacaatggagtaacagcatcctgggcaggtaacaggagtgggctaggagacttcagctggttatcaagaaatggcataataagtgtggatccagaaccctgagagct

SEQ ID NO: 10944 - DNA, 352 bp, Glycine max
  Clone ID: jC-gmfl02220127c11a1
aaagattcgattctactagctgggatactagctggacaggagaagtttggaggcctcagagatggatactatatccatgggcaatgtgctattataatgtttgatgttactgcccggctaacatacaaaaatgttcccacctggcaccgtgatctttgcagggtctgtgaaaacatcccaatagttctttgcggtaacaaggttgatgtcaagaacaggcaagtgaaagcaaagcaggttactttccacaggatgaagaatttgcagtactatgagatttcagctaagagcaactacaatttcgagaagcctttcctctattaggcctggaaacttgcaagtgatcctaatt

SEQ ID NO: 10945 - DNA, 456 bp, Glycine max
  Clone ID: jC-gmfl02220127c11d1
aaaggaacataaaccctcatttttctaatcaatagtatcgagtttaacttgaaaaaaaaacccaaaaaggaacaaactctaccctccatcggctaaaccccaattcgcatggtatattaaaaagaaccccaaaattttgtcgaaacaaccaaaatcctcatctttttaacgcccatggttgatatattaaactgaggttttaaatttaagcaacaaatctggatgataattgattcagatcctcgaattcgcatccaaaaatgtcaacactacaacccccaacagcacatacagtagcatacaaataccagcgcactcagaaaaacagccctctactcaaaagattcatcatcatcgtcagggaggggctgactagcagctgcaagaagctcagcctcgtgctgttgctgtgcagctaaatcaatttgaacttctggtggagccaatgcaggagat

SEQ ID NO: 10946 - DNA, 387 bp, Glycine max
  Clone ID: jC-gmfl02220127c12a1
ctagagtctgagagtccttttttccagagtcatggctatggctttgagtctctcccaattccctgttcgagggtctgtttctttgcccaaaagaagactacccagaagaagcttttgcattaggggcatgtcagaaacctcttccacttcttctgagagcacccaacaagaacaaccaacttctgataatgcttcttcagagacaattgctcctccccctaacttcaagccccctgagcctaaacgctttgcaattaggcctgataagaccagagaagagttaggagctttgcttcctttgatctttcgttttgccactggagttttcgtttctgggtattctttttcaattgtttctaaggatgaaattcctacagacgaatatgc

SEQ ID NO: 10947 - DNA, 421 bp, Glycine max
  Clone ID: jC-gmfl02220127c12d1
tgttttagttttttttttttttttttttttttttttttatagagaaaatttgatttacccgttagagcttaaaaccattatcaattacatttacaaaaggaaatgaaggggcatatcatgagacttaaaaacccttacaaggcctttccctattatagcatcacttactaaagagcgtatgttgctcataaatactctatgatttctgcactttcaaacatttctatcccagtgtttggatcttccaaaaaaggtgcctggaaaggtccagttttctgataaagaatatgtctttttgggctacccctagcacaactgacaagcaagggtggcagctccaattccacaagtacttcacgtacaagtttgcagaaaggagacccctcatatgcccataatttaagaggctttggagggaact

SEQ ID NO: 10948 - DNA, 377 bp, Glycine max
  Clone ID: jC-gmfl02220127d01a1
tagccccttgaaaacttgaggctgctataagtattgtagtgagggacttcaacactccctttttcttttctactcgttatcctcatcttgttgagcgtgtgagttagagagagttagagaaagggaaattgccaagccgttgacactgcaactctagtgattcagcaacccaatgggaaagtagaaaggttgtattggcctgtaagtgctagtgaagtgatgaagaccaaccctgatcactatgttgctcttcttatctccaccacattgagctcatccaaagacaatgaaaatcgctcaaataagcgtgacaacaccaacaccaccaaccctgttcgccttacccgcatcaagcttctcaagccaacagataccct

SEQ ID NO: 10949 - DNA, 205 bp, Glycine max
  Clone ID: jC-gmfl02220127d01d1
cactagaaagtattatctgaatacattaattagatagttcaatatgtcaacctttactatacacaattattatgcatgaacccagttgttcaaccgaagggaattttatcatctctcagttttttttcaggctttcctgaatgtactatatatttaattcaattttaatttccacagatctaagcaatcatggagcggggattaa

SEQ ID NO: 10950 - DNA, 272 bp, Glycine max
  Clone ID: jC-gmfl02220127d02a1
attaggagattccttttcaatctgcaatgctcatgagggaagcaagtccaaagccaatagatggcttgagggccccttggaggtataagtctgtacataaatctactggttttgagaaaccaagaaagtatccccagccatttcctttttctctttatgatttgttggagcaaagtctacccctgtataatatgctacgacgccatgtgaagaaaaagtcatctcttctgagccctcctttacctaatcctgatcttcctgttcctgcaaac

SEQ ID NO: 10951 - DNA, 463 bp, Glycine max
  Clone ID: jC-gmfl02220127d02d1
acagcgcatgagaattgatatttattgtcgaaaagttgcaaaacgtgagacgatgataaaatttgtactaaattacatttttaaacttgcaaattgtactatatttatttagatatacccccttccccccaaaaaaactgagagaaaaaggtcttcttcactattttattaattaatacgagagggaaaaatgcttccatatatgtagcttttagtaatgtacagcagcaatttcctctcacttccaactgcagtctttcaagtcttaagataggttggtataggtacaccagactgttctgtcaactttttataagcagcttgcaaccttctagtgactggtcctacttctccattgccaattatgcgaccatcaaccttcactacggggcttagttctcccattgttccagtcgtccatacctcatctgcagtatgcacttctgacaagctgattcggcgc

SEQ ID NO: 10952 - DNA, 324 bp, Glycine max
  Clone ID: jC-gmfl02220127d03a1
ataccaatagttgatgataatgactcattattggatatatactagtcggagtgacataacagctttggcaaagaacagagcatatacacatattaatcttgacgaaaagactgttcatcaagctttgcagttgggccaggacgcatatagtccctatgagcttagaagtcaaagatgtcagatgtgtttgcgttctgatcctctgcataaagtgatggaacgcttggcaaatccaggtgtcaagcggcttgtcatcgaggaagctggcagcaagcgtgtagaaagcattgtttcattgagtgacatattcaagttcttcattgg

SEQ ID NO: 10953 - DNA, 442 bp, Glycine max
  Clone ID: jC-gmfl02220127d03d1
aaaacaacagtatctcaatcttcatcctcattgttttttcttcaaacttgatatcttcacagcatggaatgattacagaagttgtgctcccccaccttgctggtatctatgtcaggagcacaatacatttgaagataatacgaatggggagagatgaataaattttgggcaatcaaatactctgaatttacaggcctctttctcagcctaaaatcttaaaaagaggcaataaagcaagaggccaatccaattgttttacaatgaaatgagagataaaatcaccgtgtagaaagcactttcaatggtttggacaagtgatgatggctagttgtatggatgcttaagtgttataaccacagcacataccatttttttttttttcccccccaaaaaacccccccgagagaattttttgttttttttatgaaaaaaaaatttttaa

SEQ ID NO: 10954 - DNA, 347 bp, Glycine max
  Clone ID: jC-gmfl02220127d04a1
ggcaagaatatcaaattggtctcttgtcttcctcctcatctctacactactccacatagagcccagcctctcaagcccaagcccaagcccaagcccaagcccgttcataaaatcctcctgcagcagcacccagtacccagccctctgcgtctcatccctctccgtctacgcctccagcatccaacaggaccctcaccaactggttcagacagcactctccctctccctgaaccgcacccaagccaccaaaaccttcgaggctaactgcaacaaattcagaggcctgaaacccagagagcacgctgcactcaaagactgcgccgaggaaatcagcgacagcgttgacc

SEQ ID NO: 10955 - DNA, 475 bp, Glycine max
  Clone ID: jC-gmfl02220127d04d1
aagttgcatgagaagatccatatatctataaagacgcacatttataataattacatagagcacataaaagaagaaaagtaaagcattaagcaaccaagatcattgttcccaactagtgttgtgcagcatagtggttaataagcgagagagcattgctagtaacctgagcaacattgagcatcctagccctaatagagtccttgatcttcccattcagcgccttcccggagaatccatcgccgcaagtgctctcatcggtcaaagcagaactgacccatgtctccacgttgctaatgtgccacgtgaagtcctcacccttaaccttacatagcttgagctccttcagcgaccggctgaggcggtcaacgctgtcgctgatttcctcggcgcagtccttgagtgcagcgtgctctctgggtttcaggcctctgaatttgttgcagctagccacgaaggttttggtggcttgggtgcg

SEQ ID NO: 10956 - DNA, 392 bp, Glycine max
  unsure (1)..(392): unsure at all n locations
  Clone ID: jC-gmfl02220127d05a1
taggaggttcacatcataattcaaagcaaaagagcaatggttattaagaggaatgggaatcatcagaagaggttgctgagcagattctaaaggaaccaaattctagattcttaacgtcaggccataatgatgaccaagcttgagtctctgaaaaggccactggcaattctctgcagagtaatggatttggtcagactgagagggacaatttaagggaaatcagggtaattgcacctggaagtattctcccatcgacccctgacacaaaggacagtactgaacccaaccagagaaatggngaaaactcatcgcgtgtgtttggacttagtcgnagattactaataaatagctttcagcggaaaggtnctttagatgaaaaatctgaacattat

SEQ ID NO: 10957 - DNA, 522 bp, Glycine max
  unsure (1)..(522): unsure at all n locations
  Clone ID: jC-gmfl02220127d05d1
gaaatgaaactgcactacacttaataacagataaacaggatttattcacacatgtgtacatacaacaaagcctcaagcaacttcacttcaagaggctaaaaaacataaaggactactcgtgtatgaaatattttttttctttattaaaaaaaacatgtcatgtatcactccagttatcatcatcttcaccatcatcactcgcaacaacctgacggattgcatttgccttctccaaaattgctgtaactttgacgtttgctgtggaaccagtggtatcatttgactttcctgatactgggggccttaggttgaatgcctgaaccaataaataaatggcaagtcaatgcaaaagttgactacaattaacatgatttattttaatgttgctagaacatgttctggattgatttttgtcatcaatttgtaatttagaggactaattagatctaaaaaaataactaagtatttaatgaccattntgacgtatttataatttataatgaaatacaaagttgatgacac

SEQ ID NO: 10958 - DNA, 291 bp, Glycine max
  Clone ID: jC-gmfl02220127d06a1
taatcatcaaccatggcagggagattgacgaacgcagcatcgaggatcttaagcggaaacggcgtcgtttaccgatccgttgcttcctctcttcgcctccgctccggcatgggcctccccgtcggcaaacactatgttcccgacaaaccccttcccatgaatgaggaactcctgagggacaacggcactgcatttcccgaaccgtgtatagatcgtattgctgacactgtcggaaagtatgaagcattggccaggctgtgagggggatagagttttttcgcgtcgctggga

SEQ ID NO: 10959 - DNA, 565 bp, Glycine max
  unsure (1)..(565): unsure at all n locations
  Clone ID: jC-gmfl02220127d06d1
ataaactcattgatccaaaatcaattcggtaaatgcatatccaaacacatgctgggcataatacttactcactcctcacaatagtcaccataagcattagcatgatcaaaagaacaaccagattcggctcttctattcctttagatggtttcagcaagtcctccatgatcccttattttgaactacacaaaagcacaaataaacgtagaagaacaatacatcaaacaagaacttctcatccgatcgttgccttggatctacctatggttcaccaccaagctccactcgcagattggcatatggatatactttgggtgcctgatacaaagaaaataacaaaactcaatcaacataagtactggacagctgcaaaatagcactgtataagaagcttcaaaagacgaaaatatcaaaaagaaggtggccattaatacaagcaagagtgcaatcaggatacatggactataacaatgacacaaaaaggacagaaacctccattagtccatagaccatgaccatgcccaactctagncaacaaactgcacttttctttcaaccaaacaga

SEQ ID NO: 10960 - DNA, 331 bp, Glycine max
  Clone ID: jC-gmfl02220127d07a1
gaggctcacacacgcacagatctgatctatctgaagctgaaaacgccgacgcccgacggagatgatgaagatggggtcctcaccttcacgttgctccttcttcctattcctcctcctcctagaggcgctcttcccctcgtcgctctccgagatccggttctccgagatccgaaacgacgatcgctccatcgttcccttcgatcagttaggattcacccacaagggtcgccttgagctcagcgtttccaaaatatcactctccaattccaatttggacctctccaaagtgggattcttcctctgcaccctggattcctggcttcatgtcttc

SEQ ID NO: 10961 - DNA, 403 bp, Glycine max
  Clone ID: jC-gmfl02220127d07d1
gcaagggatcagtttttatacttaaaagtaatatatgttcaaagcactacacaagggtttaggatattataacactaatgcaaaaactggcatgagtccaaaacacaaaatatagcccaatgatttatgaataatgactattcccataaaatgtaacatgcaaatttttactggctgttgaaatgaaacctgaaagcattgctgagcatgggaccaacttgttcaacaactaattttgtattttgaaagaaattacaattcaaattcattttcaagcttcaaggcctttggggaagccttttccttttcggcatcgaagacaaaatacggattgggagcctttggcttgaacttgtacccagtaaaaaaatagaaagcaagggtggccaacttaacagcaacc

SEQ ID NO: 10962 - DNA, 284 bp, Glycine max
  Clone ID: jC-gmfl02220127d08a1
gccagtttatccctagcgattccccaatatggaatatttgaaaatgtaaattcagtggacgagctagcaaaaatgcctcaatggacagaagaaaagcctctacgagttgctactggtttcacctatctggggcctaaatttatgaaagagaatggacttatgcatgtcacattttcaactgctgatggtgcactggaggcagctcctgcgatggggatagctgatgctatctcggaccttgtaagttgagggaccacactgagagaaaacaacttgaaggatat

SEQ ID NO: 10963 - DNA, 348 bp, Glycine max
  unsure (1)..(348): unsure at all n locations
  Clone ID: jC-gmfl02220127d09a1
cagagcctctgcttccgacacaaatcaatctttctgatcatatattattcttttagtttttttaatttattctccatacacatgcagacaataagttcgaacaagttcaggagcggcatggatttcttccaccgagcgaaagcggagcgcctccgcagccaccacgacaagtacctcctcgcggaggaggacgaggagtcggagacgcaagaccgcaacggctcctccaaaagcgcacggaggacggtagaatacgtggccgaatacgacaacataattcgcctgaagagctgntacagcaagtacctcaccggttccaaccacctcttcctcttgggcatgacgggc

SEQ ID NO: 10964 - DNA, 538 bp, Glycine max
  Clone ID: jC-gmfl02220127d09d1
atatctgataaaagaaaatcttctattgctgacaaaacttatactatttacatgcggtatatccacctagagaaaaaatcatgaacaaaaaattacataaaccatcaaacaacaaaattcccggaatccacatgcaacacatgcttatattgaagctggagttaatgaaaaagaagccccaacaaaatccaccatcagaatcgcctataacacatgtcattgatgaaaggacattgctgttttgatccatgcaatgacaactctaagcttccctcacaggaccatgatgaactctgcttaataaatgaaatggactagaacatattcctaaattctgaactggcttcgatcagtacataactacatatacgtaggctttcgttgcaaaactctaaaggcttctcacagtaagccttgtgcctcaaagtctcttgccactgaaaaggaaaagacagcaaatgttattaaggtaacaagataggacatttgaggagaggaagatatagattggaacaaacagaaatatgattgatgtcta

SEQ ID NO: 10965 - DNA, 297 bp, Glycine max
  Clone ID: jC-gmfl02220127d10a1
ctataaagcaggggagatcatgtcttaagaggcttagtatactggaattaatacaaggcacttattgaagacaagcaagaaggttgaagagttctctggtatgtatttacaaccacacaaagctgttgtaggtgataatgcctttctccatgaaagaggcgttcaccaggctggattgttaaagcatagaggtacatatgaaatattgtctcccgaagatattggccatgaaaagtccaatggagttaatatggtactagggaatctaagtggacgccaagctttgaaaagtcgact

SEQ ID NO: 10966 - DNA, 551 bp, Glycine max
  Clone ID: jC-gmfl02220127d10d1
cgggaactattccttcttttattctccttgatcatcaagcaaataataagttcatttctcatatattagtcccatgtggagacttacaaaggtaacattctccaataatatgttccatacttaaaaagataacaaagaaatcacaaatagcaagctgaatttataacttgaagtgtgaattctaacatttaggtgctagaattctttcgacaaatacaaatcattcctttgaatcgagcattttgtttagtgcagtaatataagcctctacacttgaagtaacaatatccactccttctccggtaccactaaatgttggataaataacgtttccattcaaagcaggagtaggtgactgcttattctctctacgaattacaacacgtgtagtagcaattgcatcggtgcctcctgtaactgtacttggtgagtattcaagtacttttacggtttccttcactatgagattaatagccttgtaagctgaatctactggtcctacaccaacagaacaagcaacatgtgtgctaccatcactaagaacaagtttg

SEQ ID NO: 10967 - DNA, 291 bp, Glycine max
  Clone ID: jC-gmfl02220127d11a1
ctggaacagctataataattaagaattctagttctccctcggttaaaatcttggatacgtaaggttgtcttagacagagatgatgaacaattaaagaaaactgacaacaaaccaacaccgatggaagaagctgtgcaagctgcaaaatcagctgcagctgcagctgcagatgtggcaaaagcgagccaagaaatgctggcttcaaaaggcgaagagatggagatactttgaggaagttgagagccttttagataagcaagtacaagaaatgaagtcaatgaccaatgccat

SEQ ID NO: 10968 - DNA, 422 bp, Glycine max
  Clone ID: jC-gmfl02220127d11d1
ggcaaagaaaaaaaacctttttacattagaaaacaaatttattgcataaaaagaaaccggcgcttgcaatatgggatggggggcccgctcaaaggccacctaatttgattatgaaacaaatggggggacaagcttattccaaaaaatgtttttcaagaaaaaacatgcgggattcaccttcatttccaaaaaaattggactccaggccccccttggttctcactaaaagggggaaccgagctgacactgtttcccttaactggccctttaaattccaaaagtttgggggccctatgtcccacatcggaacccgttaaagaaggggcccctggctggttataaaacatttggtccttttgggccgctggctttggccccctgattggttctgcagcccccgggataactttggggggggggtg

SEQ ID NO: 10969 - DNA, 394 bp, Glycine max
  Clone ID: jC-gmfl02220127d12a1
ctacataaacacttcccacccaaattttattggaggaagcaagagcattagaaatagctgcacagcagaccaagtcgtctagggttgctataccagtttctaggcaaaaggatgctctggaatctgataagggatctgcctctgaaagaagtgtgaagtctaaggctattcttgcaagacaagctaatggagtagttcctgatccgggagtccgtgctgcatcagatgttgaaaaaattgtaccatctggaaacactggtggatcaagtagggagcatctcatcgatttttggaggatgtgatagccgtatgtctgagaaagagaatatatctagtaaaccgcatgctgaaccagttcacagcattgagcaatcagtctctatgatccatttga

SEQ ID NO: 10970 - DNA, 414 bp, Glycine max
  Clone ID: jC-gmfl02220127d12d1
gatgacaaaaatatctgactaaccaaaaaagaggaggtcatatacacgattatatagaaaaccgattctcaaaaatgtgaacaatcaccagctcccattattctttctctgggagccttgtaaaaaatgcccatgctatatgagaagaaaaggtgaacgcaaggaaagaaagcagtggccaacattcaacaccattttagctagatagagtaatttcatgcagtccagctccgagaggcagaattctaaatcccggaagttgcagtgtaatcaaatgaataaaatgccttgagttaaactacttccaccaatgagctcattcgcccatagctcatgcatctaccatgggataaaaacctgacatgaatggccttccgcttccattggaatctgcattggcatgcaatggtgatt

SEQ ID NO: 10971 - DNA, 395 bp, Glycine max
  Clone ID: jC-gmfl02220127e01a1
tggcctcgccgactcggttgctatctgcgagagagagtgagtgagaggttctcttgcagcaacaaggtttagtgacaccaaacagacgggaaatgggtcgaggggtcagagctggaggaggacagagttccttggattatctctttggcagaggggtacctgcctgcagtgcaaatggagctcgcactcaaaatgcaagagctccttcaccaccggttgataagcaaagtccagcaccagcaccagcaccagcacctgcacctgcagcagcagcagcaccagcacctgcaccagcaccagcaccagcaccagctgataagcaaattccagctggaattcctggaagtctcaaaaacaattaccatcgcgctgatgggcaaaactgtggcaacttt

SEQ ID NO: 10972 - DNA, 283 bp, Glycine max
  Clone ID: jC-gmfl02220127e01d1
agagccagcccttttttttttttttttttttttttttttttttcatgaaatgaacacaataataaagattagagaacatttatgagccactttagctcattcgcacagtaaatttcattaatcgaaacccacacaataacacagaacatcaaacctatgaatcagcttagtttggccatcaagccacaccaactttgtcaagagattcaattgaacaagaaacatagtccactggtttaaactcaatgcaacactatccattttacacatgattcatcacatg

SEQ ID NO: 10973 - DNA, 423 bp, Glycine max
  unsure (1)..(423): unsure at all n locations
  Clone ID: jC-gmfl02220127e02a1
attctagaggggtaggtactctttggaaaagtctgctgttatttacaaagactgggttttcactgatcaagcattgcctaaagatcttgtcaagagaggagttgcggttaaggatccatctgctccccatggagttcggcttttgattgaggactatccttatgcttctgatgggctagagatatgggatgccatcaagtcctgagagcatgaatatgtctcattctactacaagtcagatgcagcaattcaacatgatcccgagctccaagcttggaggaaagaacttgtccaagagggtcatggagatttgaaagataagccatggaggcaaaagatgcaaactcgagaagagttgattgaagcctcggctaccctcagatggatcgcttcagcccttcatgcagctgntaactttggaca

SEQ ID NO: 10974 - DNA, 379 bp, Glycine max
  Clone ID: jC-gmfl02220127e02d1
cttgggtgttttttggttattttttccctattgatcccctctatacacaaaacccggggaaagggccatctcaccaccctacttcctgcccgataaaacgttggagggaaacccaccgcggacaaccccgcacagaccttaaaaaaccccagggttctgactaaaaaaaaaaaaacaagcggccgggctcaaaaatccaccgggaaaaaagggggccccaaccccccaggggggagagaaacgcccccccccgacctcgggttccaaaacacccggacagggggccaaacacccaacctcccctaataaaaaaaagcgggggggccccccccgagaaaagaccccccccccccccaaaggaggggcgaaaaaagggggg

SEQ ID NO: 10975 - DNA, 373 bp, Glycine max
  Clone ID: jC-gmfl02220127e03a1
agttcatagagtagaaaattttagtcgagttagagatgagataattactgaaggtgatatagaatctgcaaaagaagagaatgttttggaatcttcctcagaaccagttgacctcagtgcaggaaaggaagaccaaaactatggtatctcagaaacttctgattgtgcaagaagttctcaatgttcaaagcaggatgtaacagaagtaaacaaaccaacatctccactgtcatccccctcgcactcttcccccactaagaaaattgaagagctaagtgttacagaggtatctggtcggccaagtcctgtatctgttcttgataccccattcttagaggatgatatcaaccctggctactccagatttcaaccg

SEQ ID NO: 10976 - DNA, 407 bp, Glycine max
  Clone ID: jC-gmfl02220127e03d1
ggaaaacaaaccccccggctaatatatttatgatcagcatatcaaactctaaaaaatttacaactaaataacgggggcccttagtgggggaagggaagcccacatagaataaaactggtaaacttttgtcattgtaaacaaaacaagcatcatttgtactttaacaaaaagcagttgcaacgggcttcttatttacttattgggacttgggggcccttatttgagtatcctcactccccatgaaaggttttaacactggaaaagtcaggcctgatcaaagagaaatgttttgctaccaaatttgctttaaaaaaaagcctacaagtccccaggattttttacttcccttccacctttcaaagcaatttaagaggggataatgaacaaaaaggaggggttttggtttt

SEQ ID NO: 10977 - DNA, 404 bp, Glycine max
  unsure (1)..(404): unsure at all n locations
  Clone ID: jC-gmfl02220127e04a1
gaagaacagacaacactgactagtcccagagcgacggctaagcctctttgttctctgtcccaagcttcgagcagaagaagaatcaaatatcactactttgattttgagctctattgcctttgccatcaaccggcagccatgtacagaaacgctgcttcacgtcttaaggccatcaaagcccgttcgtgcagcagcagcagcagggtacctgccagtgccagattagcaagttccgttgccacgcaacaatcctcttcttctggttagggaggtttattaggatggctcactggagaccgaaccagttctttaccatctctgggttttccatcttcaggcgttacacttncccctccattgcctgattatgttgcgccggagaaaactattattactacactccc

SEQ ID NO: 10978 - DNA, 494 bp, Glycine max
  Clone ID: jC-gmfl02220127e04d1
caatccaaaaaataatccagtagttttaagttcagtccaaaaaatagtcatgtgagaactctcagatcaatgtttatgtacccagaaataatgagatgtgaaaatcactaatttattgactacaacaaggatagttaggaagtttaacttaattttacacctttcatccgtacaagacttgattgtttataaagaagactcaatatgatgggtggatgaaagcaatctcattaggcacggaatttgagactcactgattcatagcttggaacatagagaacatctccatatgatgccattgtgagaggagaacaaatgagctttcgcgaaattgaagtgatatccttcgaggttacttcatccactgccttcaagaaatcctccacaggtttccttttaccatatgtcaaaatttgtctttctatatcttctgaaacaaccatttttgattccaaattcaataaaattgcagatttgggagcctgtttggctcg

SEQ ID NO: 10979 - DNA, 311 bp, Glycine max
  Clone ID: jC-gmfl02220127e05a1
ttctgatccatatatatcatactttctttagtaataacttaaagaaccccacaataacaccaaccatgtccacaattgcaaagagagatttgagttctaatgaagtagtgagtgagctgagaagaggtcctaggactctagaagaagacatgcttactcatacactatattgctcgtcatggagaaagccgtaggtatatgttagccaaaagtgcaggatagaagaggactggaaaaagttgcagacttagatggctgaattattagaaaccagacattaagagagggaacctcactccacaggagcaact

SEQ ID NO: 10980 - DNA, 485 bp, Glycine max
  unsure (1)..(485): unsure at all n locations
  Clone ID: jC-gmfl02220127e05d1
natggctaccacgatagcctactgcganactncccggacgacagctactagccggcggccgcccttttttttttttttttttttttttttttttttcattttttccttattctatattatggggcacttttggtttttttccccatcttcacctctattcctttattaaatttttctttaccttttcctctctatcctcgggagaaaaaatcccctcaaataacaccaaaaataccacctggtacggggaaaaaacaaacacacctcaacccatatataaaaataatataacagggagaaccccaaacaccccacccctagattattcatataaaaaaaacaatattaacaaagggactttacaaaaaaaaccccccaccactacaaaataattcccccaaaaaaagaacctccccccccaaaaaaaaacccgtacaaaaaaacacccaaaaattgcttcttctcccaaaaacacacccccccac

SEQ ID NO: 10981 - DNA, 310 bp, Glycine max
  Clone ID: jC-gmfl02220127e06a1
aggtagagtgtttctttgtgtttcagttcccatctaaagagggtagatgctgtccaaatgatttggaaggctgttgcacgtaaagttcctttcatgaagctcaagactaataggtctaggagatttctgaggtctctttatgggaatcacaatttttggagaatgttaatttcgttggataggatataattgcaaattaaagacaaaacttaaatactacttaattaggtcttgtttttctaaaaaaaaaaaatttaatatttattaattaaaaaattttctatattgttttttttttataaaaataaaa

SEQ ID NO: 10982 - DNA, 246 bp, Glycine max
  Clone ID: jC-gmfl02220127e06d1
ggggaaaaacacgacctaattaaggggtttttaaggtttggctttaatttgcgattttttccacccccacgaaattaaccttcccccaagatgggggttcccataaaggggccccagaaatttcctaaacctattagttttgggctttatgaaggggacttttcgggcaacagccttccaaattttttgggccggatccccctccttagggggggactggaactaaaagaaacttttaacccttgg

SEQ ID NO: 10983 - DNA, 343 bp, Glycine max
  Clone ID: jC-gmfl02220127e07a1
aagatagagagtgaagtaactgaagagaagaaaaaatgccgagcctcaacctcagcaccaacgtgtccctcgaaggcgtcgacacctcttccatcctcgccgaagccacctcctccgtcgccagcataatcggcaaacccgaagcctatgagatgattgtactgaaaggatcagtacccatagcttttggagggaatgagcagccagcagcttatggagaataggtttccataggaggtcttaaccctagtgtaaacaaggaacttagtgctgcaattgcttcaattctggaaaccaaattgtcagggccaaagtcgcgggtcttcttgaaattctatgacac

SEQ ID NO: 10984 - DNA, 485 bp, Glycine max
  Clone ID: jC-gmfl02220127e07d1
aagcggtgccagataatgtttgtcacaaaaagtgtcaaacacatatgatccccatttatccttgcaattaagcaagttacgtttgcgcttaggctaccagaaatcccgagtgtacttatataatgatacaaacatagacataaacacgggtgaaacataatgaacactccatccaacattcaaggtaccacaaccaatgtaacatggaattcggatttcagaatgtagatccattccatccgaagttggaacccttggtgtcatagaatttcaagaagaaccgcgactttggcactgacaatttggtttccagaattgaagcaattgcagcactaagttccttgtttacactagggttaagaccaccaatggaaaccaattctccataagctgctggctgctcattcccaccaaaagctatgggtactgatcctttcagtacaatcatcacataggcttcgggtttgccgattatgctggcgacg

SEQ ID NO: 10985 - DNA, 259 bp, Glycine max
  Clone ID: jC-gmfl02220127e08a1
agcaagagctcttctcaaaaaagcaaaaacataaagaaaagagctagtcactttctctctcctagcccgccctagcccgagctagccaacttccacacttagcagcctagcccggccggcccagtgttgaaaaactctctctttcacatgcagacttccactgcctctctcttccaccacctacagcccctttggactgattttcataactgggttagagttagagttagatttactctaactgaattatctatgtact

SEQ ID NO: 10986 - DNA, 412 bp, Glycine max
  Clone ID: jC-gmfl02220127e08d1
tttttttttttttttttttttttttttttttttttttattttttttttgttttattgggtatttttaattttttttattttttaattttatatatgtatttttgttaaatttaaataaaaaggagaaggaaaaaaaaatttagagcataaacaaaagaaataaaaaatttccaaaaaaaaataaaacaaaaaaaaagaagaaaaaaaaaaaaaaaaaacaaagaggggggataaacaaaaaaaaaaaaaaaaaaaaagggggcaaaaaaaaaaaaaaaaaatgaaaagagaaataaaaaaagacaaaaaagggcggtgggagggaaaaaaataaaaaaattaaagagtcttaaaaaacataaagtggggttaaaacaaaaaatataaaaaaaaaaaaaaaaaagacttctgg

SEQ ID NO: 10987 - DNA, 387 bp, Glycine max
  unsure (1)..(387): unsure at all n locations
  Clone ID: jC-gmfl02220127e09a1
gaaaaatttctccttgtttagtacggcacacaagtgagatcaaagatggaaaatatgccaccaggttatcgtttctaccccacagaagaggagctgatttcgttctatcttcacaacaagctagaaggagaaagggaagacatgaatcgagttattccagtcgttgatatatacgactacaacccatctgaactcccacgtaaaaatcttatatatatatatatatatacatatatatttccctcatctccctctttctcttttcatttttctaattgttttttcctttcaatcaaaatcgagcttgacttgaaagctatggtacaagttgatttattgcatatatatagaagcaaagcacattctggataattnaagggtacatac

SEQ ID NO: 10988 - DNA, 505 bp, Glycine max
  unsure (1)..(505): unsure at all n locations
  Clone ID: jC-gmfl02220127e09d1
atcagacaaattagccactatacacaactttataaagctagcaagaaatctaacaaatatttaaagtagttgttctgcatgcggtgcgacatacacaattaattaacataacctactacttattcagtcatcggtgtagctgagacttgagagtcaactttgttgtagcataccaacaaagcacagatagattggattggatgtgttcatggttctgatcccaagaacatatccactttctcccaatccaaaaaagggtcatcgttgttgtcaacatccatttgagtagcttcctcaccgtgaagagggggttggtcatggtctccggaggaagagctctctgctggtgaacacgttgcacttctctccaccattttatgatgataatcatcatatgatgttgaacccttttgttgctcttctacattttgagcacccgaatagctttctgtgtccctccttggcggggggncgtctatcaaatgctgtcaaacactttgatttt

SEQ ID NO: 10989 - DNA, 316 bp, Glycine max
  Clone ID: jC-gmfl02220127e10a1
ataggaacttgcagaaacataaacatattagatgtcttagtgaagttgagaacaatgatgagcttcatgtggttatgttcccattccttgcatttggtcacattaacgcatttgttcaactctccaacaagttgttctctcatggagttcgtatcactttcttgtcagctgcatccaacattcccagaatcaaatcaactcttaatctcaatccagccatcaatgttatcccactatacttcccaaatggcataaccagcactgctgaattgccaccaaacttggctgcaaatctcatacatgcacttgaccttac

SEQ ID NO: 10990 - DNA, 548 bp, Glycine max
  Clone ID: jC-gmfl02220127e10d1
agagaattcatgcactaactggtcttattataactacagtagaatctggagaaaggagacacattggaagagactagactaagaaaatggattagtcttagtagactttattttacattaatattggaagagaatagaccaagaaaatgagcactgaccaaactagtcacacacattcacacacaaaacaactaatacacgatcgaacagttcaaattttaaatgatagcttatagtccaagaaatccgaatcctgaacactaagccatagacttcaactgggcaaccagatcagtgatgaatttgttctgaattcctttattcaataaaaactccttccatttcatgtggttttcttttatttgcttccctggctctttatcatcctccaccatgatagtttttactgccttcagtatatcctctttcttaaagtccccatcttcactcctattcacctctatccctgcctccaaagccttggctatgagcttagcattgaaaaactggtcagccttgaaaggcaacagcaccagttcacaatcact

SEQ ID NO: 10991 - DNA, 292 bp, Glycine max
  Clone ID: jC-gmfl02220127e11a1
gggatttcgttagctggaagctcttgaaagtagatataaaagtgaatctacaaaagatgaagatgaagaggatgatatgtatgtcctttcaacaagcaaccagcgagtatctgttcaacttttgggtaaagataaagtttatgataagctaagttgatttgagaagttaaccagtgtatcattgtcatatatgggcattagttcccctggaatcccatctcacattaataatacagtgccaagtaagcttgattctagaacacttccatttctttgctaatatcaagatgaa

SEQ ID NO: 10992 - DNA, 447 bp, Glycine max
  Clone ID: jC-gmfl02220127e11d1
aacatggtgcatcaaaacccctgataagacctggaactggagcccaacaaaatgcttacaaatttattatttttagagtccttcttccaagagtgatgggcgctaattagaacaagatacattcttcatcacaagagaagatttatcacaagttttctggggtatttatgaactttgtttatctacaaggataattgaatcatcgccgaatccaagggtccataatagatgaagtgtcattgtcatgcaccaggggaaatggaaaaccctcttctggaagatataattttagcttcatggacttcagcataaaaaagctttcgcagagaaatttcagcttaccaactgttgttgtcgctgagaacttctttggcaatgatggcttctcacccatggatgctccaacacaattcagagcaattgacaataatcctgagctgattgttt

SEQ ID NO: 10993 - DNA, 276 bp, Glycine max
  Clone ID: jC-gmfl02220127e12a1
cagtctctctctcaccaaactgataaaacgcggaattgaaaccaacctttatttaagtctcacaccttacttagctaccttctttctttttcaccagtcgcacccattattcattagcatcatcgttcactcgcatcagaatcacaggttcagtttctgaggattgttagaaaaaatttcctttaagttgaaacttggagtgccggctcaagatattatgatgaatggaaaaggtactcagactgagtataggggcgaaagttcgggttcaacttc

SEQ ID NO: 10994 - DNA, 432 bp, Glycine max
  Clone ID: jC-gmfl02220127e12d1
cttattgaataagcacttaaaattttgtataaaacttgatacacggctaattgcatatgactaagggaaaagcaaatgattggcaaggttcaaacagttttacaaaattacgacaaccaactcatgaattggttgctttacacagcaatgattaaaataatggactgttcttccccactaaaagggcgtaattcatatttaaaaaaaaaaatcatcacatgtgtactgtaaagaatatccaggaaaaacaaaaacatacgagtgatttctttccctccagggacctcctcttttatgtgtaggaaaaagatggccacaacctactggatcattaatactttggcaaatagaattttcaacgtgcaatttagcagctagccctcactgaataagaaatagctactttgtgttcataaaggatgaggaatgttt

SEQ ID NO: 10995 - DNA, 392 bp, Glycine max
  Clone ID: jC-gmfl02220127f01a1
aggtagcggagatcctagcactctcttctgcagctttcgccgacagcttcattcaccatggctgagcaaaccgagaaggcttttttgaaacaaccaaaagtgtttctcagctcgaagaaaactgggaagggaaagagacccggaaagggagggaaccgcttttggaaatccattgggcttggatttaagactcccagggaagccatcgaaggaacctacattgacaagaagtgccccttcactggcaatgtttccatccgaggccgtatcttggctggaacatgtcacagagctaagatgaacaggactattattggtaggaggaattatctccattttatcaagaagtaccagaggtacgagaaaaggcactccaacattcctgctcatat

SEQ ID NO: 10996 - DNA, 62 bp, Glycine max
  Clone ID: jC-gmfl02220127f02a1
ctgaagcccatgattctagtaacaccatttcaaatgatatgggaagtaactctagcaatttt

SEQ ID NO: 10997 - DNA, 542 bp, Glycine max
  Clone ID: jC-gmfl02220127f02d1
caaaacaatgcccctccagcttcctttaaacttcaacacaagaaggacaagcacaaaatggtatcttcatgccattcatgcatcaaatataaataacaaaaccgcaattgcactggctgtcagctgaaggctttgtatactccaaaggccaaaccaacaaaattttgttaatcaaccatcgtcatccacagcaccaacatatgtgaggtccgtccgtctcacccttacagcccctttaagccagctggtggctcgaatattagcatggtcaccacttcctatgctagcagtattacctgccgaagagtaagatccagtaccatcttctaagagtgtccaaggatctatttccaaatcattgtcctgttgttttgatttccctgatgcattagaagcaacccttgatagaactgggttcctctgaggaatagttgaactactggagttagacccaggatttgtaatgctgggttgaaggcaaacaagagcggaattggaaatagatggtggctggcaggataaagagcaccgcataaagggga

SEQ ID NO: 10998 - DNA, 376 bp, Glycine max
  Clone ID: jC-gmfl02220127f03a1
cacaactctgctacccttttctctctctctcggatttcttgcgcggtttatcatgggggatagtcagtattcgttttctctcaccacatttagcccttctggaaagcttgttcagattgagcatgctttgacggctgtcgggtctggacaaacgtctttgggaattaaagctgcaaatggagttgtcattgctaccgagaagaaattgccatctatattggttgatgaagcatcagtccagaaaattcagttattaacaccaaatataggagtcgtatatagtggcatgggtcctgattttcgagttttggttcggaaaatcaagaaacaagccgagcagtatcaccggttatataaagaaccaattcctgtcact

SEQ ID NO: 10999 - DNA, 531 bp, Glycine max
  Clone ID: jC-gmfl02220127f03d1
cgcagtgcaattaataatgcattgaacttaactggaaatataaaaataacagagataaggaacaatcagattctaaaagggtgaaaataataaattagcaatagtcattaagtcattccgcaccgtctaaacaaactaggtttgtttgaaaatgttgatgactttggaaaagggtttatctgaaggcttgctggtcatcacaacgagtagctcgcaaattcactattgccatcacaatgtcaataattaagctaccaattaaacccaactgtgaaacaaacaacttcaggaacacaagagttcttcattgcagattattctacttcagccaaatagtcgtcaatttcagctggtgtcaataccctgaactttttatcagctccaattatgccaatttcaatgttttttcctgagatctgtccctcaaacccttccttcagagtcaatattgctgtgtggactgcatcatcaagctccatatcatctgtgtacctcttctcagaaacgtctttgcattagaacatttttccc

SEQ ID NO: 11000 - DNA, 377 bp, Glycine max
  unsure (1)..(377): unsure at all n locations
  Clone ID: jC-gmfl02220127f04a1
gaataattcagactgcaacatcgagaacgagctagggtttcctcgaaagtagatagcaccttgcctcaagtgaagattcagatgtgagagaagctgcccttcgaggccttctccagcttgctcacaatgcgaatgatggcaaggatggcaatgagaaagacagagcgaaaataaagcaacttcttcaagaacgaataaacaacatcagtttaatgtcagctgaggaccttggagtagtcagggaggagaggcaacttgaggactccctgaggagaacttgcttcaacgagccgtcttctcttcgagagaaaggtcttctagtgcttccggggganagacgagccccctncagatgttgctagcaaatattttgagcc

SEQ ID NO: 11001 - DNA, 474 bp, Glycine max
  Clone ID: jC-gmfl02220127f04d1
gaaggcacaaaaaaatgaaggcattcaccgctgcaatcatacattaacaaactacaatggagggctagttatagtgtcacagtgtaacataccatgagatcatcatcctagaaatactagggaaaaccaatctgaggccagaaaaaagggttaaaaacatagcctataagtgaaagaaagaaattactattgtatgataagatagaaagaaagcttggtttaaaaaacagaacataaagcatttaaactttcgatatattagcatctgtctatgaactagcatctcctttatttgaaccttggttgttagtgtatgtaggaaaaggtcctgaccctaaaagcaaagggatctcattcttttctgggtctttctttgaagatggatttgcagtcgaagatctaagaggaggctcaaaatatttgctagcaacatctggagggggcacgtcctcccccggaagcactagaagacct

SEQ ID NO: 11002 - DNA, 270 bp, Glycine max
  Clone ID: jC-gmfl02220127f05a1
ctcgagccgcagttctttaccatctctggatttcccgcttccgggcgttacacttcccccttcatagcctgattttgttgcgcccggaaaaactattattactacactcccaaaaggactcaaagaggcctctgaaacatcaccgactcccactgcgtcggttggcttatatgtagattgaggttcaatatacgagactccgataagttttggggctacacatctgctagaacgaaaggctttcaagaccactagaaaccggagtcactt

SEQ ID NO: 11003 - DNA, 525 bp, Glycine max
  Clone ID: jC-gmfl02220127f05d1
aatcaccataaattagaatttcaactagcaatacaatacacttattcaaaaccagttcctgatccattgattatgatttggtttttcaaagggattcaatccaaaaaatagtctgtgagaactatcagatcaatgtttatgtaccccgaaataacgagatgtgcaaatgtggctagtgcacaatcactaatttattgactacaacaaggatagttagggaagtttaacttaattttacacctttcagccgtacaagacttgattgtatacaaagaagactcaatatgatggatggaaacaatctcattaggaacggaacttgaggctcactgattcatagcttggaacatagagaacatctccatatgatgccattgtgagaggggaagaaatgagtttttgcgaaattgaagtgatatcctttgaggttacttcatccactgccttcaagaaatcctccacaggtttcctctcaccatatgtcaaaatttgtcttcctatatcttctgaaacaaccattcttga

SEQ ID NO: 11004 - DNA, 352 bp, Glycine max
  Clone ID: jC-gmfl02220127f06a1
agctgaagtaattgaaccaaagaagaatgattcaaaggctaaaaaagcagctgataagaaagtgccaaagcatgttagggagatgcaagaagcactagctcgaagacaagaagctgaagaaaggaagaaaagagaagaggaggaaaggttaaggaaggaggaagaggagcgacgtaagcaagaggaacttgagagacaagcagaagaagctagacgtagaatgaaggaaagagaaatggaaaaactccagaaaaaaaagcaagaaggtaaactgttaactgagaagcagaaagaagaagcccgtcgtctagaggcaatgaagaagcagattctcaataacacagggggcatg

SEQ ID NO: 11005 - DNA, 422 bp, Glycine max
  Clone ID: jC-gmfl02220127f06d1
caggttccacgtggcttattgaacctttgccattaataccaatttccataaccaaatgcttggtaggaaacaccaaaaggatacatagcccgcgaaaaataaagtgcctctcagctacaaatggaaaaaatttgtacaataatacactaggaaaccaaaagtgaacaactttttagtcaaatcaattacttccgtaaaattttgcttttcctcactgaattgcatttagaacccttatttgcttccatgtatgccacagatatgtatatatggggtagtaattcacaattttgaccttgcctgtttccctttccgcaccttttttacctgcgcttctcagctgacaaagaattggagtttcgtctgttaagttacttttgccttttcatgacacagccatctatctgaatcattgcatcatc

SEQ ID NO: 11006 - DNA, 315 bp, Glycine max
  Clone ID: jC-gmfl02220127f07a1
tttagactaggagagagtgggtgaaaccgaaaccctaactaatattgaagaagaagatgagcattcgaaggttgagtggcgaagaatcgcaaacactttactctctcctcagagcagagcagcgtccactccatgagatcctctcccaattcaactccgcaatcccttcctctcgccatttcactctctcttcctatctcctcatcctattgcaggacaataaggcgctcagcaccactgatcggttaatagcttttgctctgctagtagaagcttattcatcccagaaaccggcttcaaatcccttcataagct

SEQ ID NO: 11007 - DNA, 405 bp, Glycine max
  Clone ID: jC-gmfl02220127f07d1
agggggggaattcaattacattctaaattctctattctcacatttttgaacatttcataatataacccggtacaattaaatgcaaatgacatgctataatcttgatttattggccacaattagaaaatgagtacataacgctacctagctctagggagatacatatctacagaaagtcttgaaataggacagcaaagaggagaaaattgacagactaaaacaacaatcattccaatgacttgagcagcctaaataacgcagctgcctttctaatacgtgaaaactcgatgcaaaacgcttgaacttcaatgaagagaactttaacattaataatattggtccgaatgagactttgcaaaaaaacacagacaagtcttacaagcctggtctgcatggatttatcct

SEQ ID NO: 11008 - DNA, 232 bp, Glycine max
  Clone ID: jC-gmfl02220127f08a1
gtaactgttacaggtagattcggatactgagagttttctgcttcctggattgccccatgtattgaagatgacgcgtttgcagttaccggattggcttagagcaccgacaggttatacttatttgatgaacatgatgaaagactcggagagaaagagctatggatcgctgttaatactttttatgagcttgatggagattatgaggagcattacatgaaagccatgggaactt

SEQ ID NO: 11009 - DNA, 383 bp, Glycine max
  Clone ID: jC-gmfl02220127f08d1
ggggaaaagccaaaaaacaaaaatttccccaattttggggccccctataaccccggtccccgaaagaagggcccccgggcaaaatctttcaaaatatggggcccccccccttttttttaacccaaaacctaccaacccttaaaattttttttttttaaagggggaccaaattccgggggacaaaacctttattttcccccctttttttgaagggggggtgccccctattaaaaaaaaccgggccttttcccgaaatgagaggaaattccccccaaagggggcccaacttttggggggggcccttcccagtttgggggacctccaccccgggaacagttttttaaaaatggtggaaaaagacccccccccccaaaaaggttttt

SEQ ID NO: 11010 - DNA, 383 bp, Glycine max
  unsure (1)..(383): unsure at all n locations
  Clone ID: jC-gmfl02220127f09a1
cagcacaaagcagggttactagtctagttcaagctaccatctctctctctctttcttagagcctccttgccagaagttaaaatggcccaagaaactttcctattcacatctgaatcagagaacgaggggcaccctgacaagctctgagaccagatctccgatgctgagctcgatgcatgctaggagcaagaccctgacagcaaggtagcctgtgaaacctgcaccatgaccaacatggcgatggttttcggagagatcacaaccaaagccaacgaggactatgagaagattgagcgagacacatgcaggaacataggnttagtctctgaagatgtaggtcttgatgctgacaactgcaaggtcctcagcaacattgagcaaca

SEQ ID NO: 11011 - DNA, 521 bp, Glycine max
  Clone ID: jC-gmfl02220127f09d1
agtaaaattgtatactctctataatttgagattattacatatttctagcataaatcttgagagaacatttttttttgtttcatcatataaaatatatatgttctgaaagaacacatacaagtacacaaaaaaaagggggaaattcataaaaaaatacagaaaaaaaaaaacagaattgagtaagagggaaggaaacatagagaaaattttagcaatcagataataagaagccagtagtagtgcaaaagtcccttgccaagagtgttggaaccccttttagttaagcaggtaccttctcccccttgagtggcttcaccacttcccatgtgaagtcagggtcatctctgccaaagtgtccatatgcagcagtcttcaagaacctgccatttccacccctcttgagatcaaggttgatggagatcatgccaggcctgaagtcaaaactctccttcacaatgctgaggatttccttgtcagggatcttcccagtgccataagtgtcaacaaacacagacaagggc

SEQ ID NO: 11012 - DNA, 314 bp, Glycine max
  unsure (1)..(314): unsure at all n locations
  Clone ID: jC-gmfl02220127f10a1
agcacgaagtagcaatcttaatctttcacaaagtatttttttaaagttgtctgaccagcaagatcccaaaaactactttttcattccatttctcgtccttccttctcaccatctcccacactccaccgccatgacggacaacgaccgcgtctcccgccgcaccgaggtcctcaccaaccacctcctccagcgcacacccccaccctcccttctccgccccctcccctgcctgagctactcccccccggagctctccaacaccatctncttcgacactcgcgagatgcgaaaactgatggactgccacaaccttg

SEQ ID NO: 11013 - DNA, 406 bp, Glycine max
  Clone ID: jC-gmfl02220127f10d1
cgggaaagcccaacttttatttgggtctaaacttattattcaccctacaatatgtaaccacgttatttcgggattagatggggacaaacttattggcactgttcagcaatattctacatagggtaacaaaaacattattcacatttgtttaccaaaaacacgccaaccttatatttaaatcatatgcaaaaatttgcataagcttgctaaagtggagaagaccaagaatttgaatcaccccaattttttgcgatggggctcaaaaatgctttgggaataccaaaggaactgcccaaggcaagggcgtggggtcaaagttcaacacaaagttttggcacttttttcctcactggaaaagctttttttgttgacaagtttccatttggaagaaggggagaattttttt

SEQ ID NO: 11014 - DNA, 348 bp, Glycine max
  Clone ID: jC-gmfl02220127f11a1
aaaataatgtaatatgcttagatagggcgtgggacagtgggggaagttgtaggggtttcagggcacgcattctatcgctgtttctctcgaatcaacaaaacgccaccgtttcattgatctacttcctccaaagccaggtctccatgaataggtaccaattcaagctgcaaatatacttgaacttcaacttatcccacattctccactctcaaaggcttcaactctcaaatctggcggaattcatacaggggcaatcaatgatgatttatacaaggaattgaggcatgcatgtgctggtccccttgtcactctccctcgagaaagggaacgagtctattactttccaca

SEQ ID NO: 11015 - DNA, 280 bp, Glycine max
  Clone ID: jC-gmfl02220127f12a1
cgtaacttcatctgggtttcatgaaaaaagattaaggaatacaatgggttccgataatcaccagaacttggagttcttgaaggagatcggtttgggctcttccaacattggctcttacattaaaggccagaggaaagccactggttcttctgtcacttctgttaatccttctaacaatcagagtatagctcaagagaccgaagcaactttgcaagattttgaggaggggttgcgtgcttgcagagaagcagctaagacatggatgactataccggcaccg

SEQ ID NO: 11016 - DNA, 309 bp, Glycine max
  Clone ID: jC-gmfl02220127f12d1
gggttggggcggaaaaaaaatcccaccttcttcatttaacctttcttcaaaaagttctacttctttgaaactgacatgcatagggggccaatcttaccttacacctagtattgaaaaacaacacttgcaaccctcaagtttccccactaacattcgtggctatttttaacgaccctctaaactgtaaaatctcattattttatgcaacctgaccttcctaaaaagatttttacccaaagattatccccttatcaaacggtggcgaactgccacaatgcaatggaacttgcaaccgccccttttttgggt

SEQ ID NO: 11017 - DNA, 241 bp, Glycine max
  unsure (1)..(241): unsure at all n locations
  Clone ID: jC-gmfl02220127g01a1
ctaccaaccagtcctcattacacaacaaaactgagggtaggttgtttaacacagtaagagaagaacttagattagttttgtatcacttttctcaaccgaggaagccctagtataatatcactgtaaacgttatggagtttctctgaatacacttgcgnttatttatgatgagagttcttgaaactacttgctattgaatattattagttttcttgtttttcctatcttagaaaagctttct

SEQ ID NO: 11018 - DNA, 441 bp, Glycine max
  unsure (1)..(441): unsure at all n locations
  Clone ID: jC-gmfl02220127g02a1
agaaaaagcagagaaactcatgttgactcatcacaattcccttaaccttccctctaatattcctcttctgcattctaacacgcctacatcgtttctgctaccgaatggaaactaagttgtgaaatcatgggcatattcagatgaggggccttgtttttctatgtgctccttttgtttagaacctgcctggccaaagatcaacatgttagtcagatatatcctggcttcagtgcatctcagccagataggagcgaccataaaggttttttcttgctatccaacagctcggcgttcgctttagggttcttcaccactctagatgtttcatcgnttgttctagttggcatgcacttaagcagctacaaagtaggnttggactgccaacagaggcttacttggtgggacttctgataatttgtgcttgaccgngatgggaatgca

SEQ ID NO: 11019 - DNA, 423 bp, Glycine max
  Clone ID: jC-gmfl02220127g02d1
gggaaaccccccttttattggaattaaacctaaaaaaaggccttttgcctgaatcatttagctacttggacttgggcccatcttgggcctgaaaattgaacccatgacatggggcccttactaaaaaaactaccccggccccaagaaaaagcttcccccctccccaatttcatgaaagctgaataagccccccattgggataatggggggggatcagggtccgggcacaaaccatcaagcatttgggcttccttagtcatgggagggcccaaactcaccttattttgtttgccccaaaaagcaactttaaaagcagccccaacccttttattcttttaaaaaaaaattatttttggaacaagaaccctttttaggttcccttcttccatcattttgaacacataaaaaggaaaaagcgccttt

SEQ ID NO: 11020 - DNA, 242 bp, Glycine max
  Clone ID: jC-gmfl02220127g03a1
cagagagcaacttttatattcatgattgcagtttaaattcacctatgtttggttatataattctttcccatgattttattcatgtaaataaattgaagaatttgtttactagctttgggggctttatcatagtacgttctattatatttttcagtaatgatattgatgaaatttggtatttttttatttattattattatatataatataattttttttaatatatttttttttaatttttg

SEQ ID NO: 11021 - DNA, 180 bp, Glycine max
  Clone ID: jC-gmfl02220127g03d1
aaaccaaatttcatcaatttcattactgaaaaatataatagaacgtcctttgataaagcccccaaagctagtaaacaaattttttaatttatttacctgaataaaatcatgggaaagaattttttaacccaacctgggggaatttaaactgcgatcatgaatataaaagttggtcactgg

SEQ ID NO: 11022 - DNA, 409 bp, Glycine max
  unsure (1)..(409): unsure at all n locations
  Clone ID: jC-gmfl02220127g04a1
catggcctctctttttcttagacaggctctgctcctccgcgttagcttccacaactaccaacgcttcaccgccggaggcgtcgccgcacgtcaccggctgaggtagcagcgcagccgccaacctaccgtcagacgaagcggagaagaaaacaaactccggcggcatcagcaacagctcctttgcacggaaagctcagtatcctccgtcaagagaagcgcggagggaggacgaccccgattaccgcaaatggaaggacaaagaaaaggagattctcagcgacattgaacctatcagnaggtctcgccaaagatattctccactcacgaatgtacatggatggagcgcgattgaatgaagaggacgagaaagctatagntgagaagctccttgcataccatccacattctg

SEQ ID NO: 11023 - DNA, 531 bp, Glycine max
  Clone ID: jC-gmfl02220127g04d1
gaattctagcaaatatcttatataatattttagaggtggatcaacaacaagattctgttccttactgccaaccagttacctaaccaccaatttacaagtcaacaaagtgaagttcacttcaataatttcctgtgtagctttcataataactaataagcttgatatcccagtcaatgattatccactaccattgacaatggaggcaggacactgaacaataaggggggaaagcagatgtaaaaagcagtcagcacaccaaagtatacaaattctactatatatacatcaaccactcccacgcttaaaatgttctctaataaacctttccgcatgagtagggtacttatctctaatgtattcccgaaggcacttctgataggagaaatcaatccagccaccatcagttcttacaacaaaaagacaccttgattgtcgatattggggatgacggtcaaccataatggattcaaggccacacccaatcttatcttcagaatgtggatggtatgcaaggagcttttcaactatagc

SEQ ID NO: 11024 - DNA, 352 bp, Glycine max
  Clone ID: jC-gmfl02220127g05a1
cttagaatgaaaaaaacttaaatcaaaatacttaatagcatggcgatacatttatacaaaacttctaccccaagcacacgcaatggagccgtagacagtcaagtaaaatccaatccacgaaatcatttgatctatggacagcatcgttgaggtaaagagccgaatgccagaggaatcattaccgcagggcatagagggggaggtcataagcgtctataccgtaaaattgattttcgacggaatgaaaaaaacatatatggtagaatcgtaaccatagaatatgaccctaatcgaaatgcatacatttgtctcatacactatggggatggagagaaaaaatatattttacacc

SEQ ID NO: 11025 - DNA, 234 bp, Glycine max
  Clone ID: jC-gmfl02220127g06a1
ccccaatcttcactgaaccgcaccgcttccatttcaagagcgttcgttcactacttgctctcagttcccaacaaacccatcgctctcgtcgacgatttcctcacactagtttaaacctctctcccactctccgccccaaaactcactattctccaggctccgcagaatcgctcacaaaggtaaaaaatatatatacgtagccgctaattttctgcatttgctttgaattcagct

SEQ ID NO: 11026 - DNA, 454 bp, Glycine max
  Clone ID: jC-gmfl02220127g06d1
tttttttttttttttttttttttttttttttttttctattttttttttggtttttttggtttttttttttttttttttcttttttttttttaatttttttttttttcttttgggaaacaaaatcccccccctttcctttaaataaaaaaaaatctccccaaaaaaaaaattttaaagtgtttttttcccggaaaaaaaaaaattttcggtttggaccccccatatatttacccccccccccttttggggcgcctgggggcttttttaaaaaaaaaaccctccccccggggaggcacaccctacacacctgggggggattaaaaaactccttgcaaaaaaaaaacccggggaaaaaaaacccccttccttttttaaaaaacatggcccctccttgggggaatagttttcccaaagggggaaaaccccctaccgcaaaagtcggttttttttcccc

SEQ ID NO: 11027 - DNA, 326 bp, Glycine max
  Clone ID: jC-gmfl02220127g07a1
agtgtctgcactcacacagaacctttgcgcgcaagagtgagaaaccaaattgaagaagcgagcgaatagagagagagataaatagaaagcgaaagcgtatgaacaacacaacaaccctaacgttgctcatggaatgcgtggcgcattctaggcaaccaccacacaagaaaatcaccaccggcgccggcggtttcccagcggaaactctatacgaccacgtctacggcggtgcggcgaagttctgcagcggcggccaccaccactccctctgcccgcgcttcgaggactacggggaaattttcgcgagcttacacgcgccacgcgcc

SEQ ID NO: 11028 - DNA, 227 bp, Glycine max
  Clone ID: jC-gmfl02220127g07d1
ctcatgttccttatgcttcgggctccactgaacttcacttagggtttgcctatcaatctcttttgattcctcgctctctactcgtttatgctccttgcattgtttctcagacacatgttttaagcttcctgattggtcagccttaggtactttcttttcagtttttccatgcaagtggaccattcttgctttctcactctttttaagctcaaagatttcggccattt

SEQ ID NO: 11029 - DNA, 257 bp, Glycine max
  Clone ID: jC-gmfl02220127g08a1
ttcttctagcaacaaaacaataataataccacacactcactcacatacaaaacttcccttcaacaccatcctagctagctcctcactcttcaacaccatgggcgtaatagcgccgccgcagacatcaccatcacttccgttggttacaaaccttcaccaccttctctcttctcttcttctcttccacttcagccattaccaatctcgccccacatcccagaggaggggcagagaagcagcttaaccaggaagagaag

SEQ ID NO: 11030 - DNA, 400 bp, Glycine max
  Clone ID: jC-gmfl02220127g08d1
aaaagccgagaaagggttaaaatattttccttccggaaatcacccccgaacatatttcttacattcccaacactcctttggtggctgaccatccctcaaagggttaacccaaaaatcaatacactttaaacttcaatttttctataaacataggacttaaaaacatcccaacctcaggaacattaatcagggcatgaagggctctaattctgggattaaaaaaaaaaaagacagcccaaagggggaaactttaagaggggggggtgctgttaataccaaaaatggtcaccttttagggtccggcaaaaacaacgaacggggtcttttttttgctccgggctttttttatatgctacctttattattaattaaaggcccgcaataaaaagcttgttccccc

SEQ ID NO: 11031 - DNA, 271 bp, Glycine max
  Clone ID: jC-gmfl02220127g09a1
agagccagcaggggcatcaacaacaaaatgtttagtaccaaacatctagctttccagcctgtaaaaaacagccttgtttagtacctctcaacaagttgtcttaaataatactgaagatatgtcggcaacaattctggcaccacctaaactagacagacataaagattctgcagctctggacttccatctccattgagaaaaccataactgtattgctgacaacatgaagcatcagctgccacctgatcatgaagctgaatctataaagaaa

SEQ ID NO: 11032 - DNA, 494 bp, Glycine max
  Clone ID: jC-gmfl02220127g09d1
gaggaaaaagtaacttaaattacagtaagttatccgagcatcaatcggcataacaatctctttccacataaattgattcaggttccaaatgaacaagttggaataaccagggtctttatacattaacacaacacacagaataattcccaaattctacatgaagactcctcaaccttttttcgcatatccccatcattatgccattgtggccaatgctctgaatcagctatctgttgttgcctcacttgcattttcgttagaggtctgtcgcacaaattgtccacgaaatcgaggtcgttgttcagctaatctctttctgctctgatatcgaacctttttatgaaagcacctctcccttctctcttttctcttttggcgaaatttagttaaggccacttccctttgagaagtcttgttttgatctactctgttggcacttccacttccactagcatcaccactgccactattcccagtgagtccattggtgcttt

SEQ ID NO: 11033 - DNA, 320 bp, Glycine max
  Clone ID: jC-gmfl02220127g10a1
gaaaagggctataacttcgagcaaatcgaaactctctctctggaggtaacatagacccttatcatcccttgacacctctcttctaaaaaatacgctcttgcccagtgacaggcagacagcagagctaggtgctaaaaggtcgaagatgtatatgaacccaacccaaatgaaataaacgccgtttttgtgttcaggcaattggaatttgtcaccccatttggcaagtagaattttttccacaaagaaatgacaaattccgctggttccaaagttctgaatgacaatgcaacaagcacatttttaattcctacttctgaata

SEQ ID NO: 11034 - DNA, 482 bp, Glycine max
  Clone ID: jC-gmfl02220127g10d1
gaaccagtaaattcaactgtattaaacattccaaattattaacctcagtgtaaaaagaattcgttatgtttgtcaatgtacaaaaggaagccaagccatttcataagaaagagggatttagaattgatacaagcaaggacaatgcttgcaggattctaaagtctatagtttttcatctatctaactgtgacacaagatatttatctagcttgaaaccagacatctcagcttccttgcagagctctttgcactttgctatcctcccagaggccatgtagatatgaagcatgtccttgtacaagccaaaagagggagaaaatccaccctctttaagttttgaaaaatatctcgtggccctagatagatcattcaaagcaacaaacagttttattaccacgcaataagctggaaggtcaaaaagacaatttgaagactccatttcccaaactacagccaaggcctttttgttttttttttttggg

SEQ ID NO: 11035 - DNA, 400 bp, Glycine max
  unsure (1)..(400): unsure at all n locations
  Clone ID: jC-gmfl02220127g11a1
ccacccttcaataggcggagatcaagcacgcccgtcttgccatggagggcttctagggctttgcagtccaagccgccgccaccggcaagggcccgctcaacaactgggccacccacttgagtgacccactccacacaaccatcattgacaccttctcatcctcctcttaagaagaagagtctttcttgagcctcgtcactattactagcatattagaaaagtcttttcttcttcggctttaggttagaattagaacattttcacttagttggattagtagtacttgtgaaaaacttgtaacgagaaattggagaagctaagcagaaatgcttctgctagatggtaagcgttctcctgtaaatggtnattatgcacggaatcgagatggaatgacgatggt

SEQ ID NO: 11036 - DNA, 408 bp, Glycine max
  Clone ID: jC-gmfl02220127g11d1
accctcggcattccctcttgattccgtgcgtggtaaacatttacaggagaacacttaacatcaagcagaagcatttctgcttagcctctccaatttcaccgttacaaggtttttcacaagtactactaatccaactaagtgaaaatgttctaattacaaccaaaagccgaagaagaaaagacttttacaatatgcttgtaatagtgacgaggcacaagaaagactcttctttttaagaggaggatgagaaggtgtcaatgatggttgtgtggagtgggtcactcaagggggtggcccaattgttgagcgggcccttgccggtggcggcggcttggactgcaaagcccaaaaagcccaccatggcaagacgggcgtgcttgatctccgccaattgaagggtggcttgag

SEQ ID NO: 11037 - DNA, 331 bp, Glycine max
  Clone ID: jC-gmfl02220127g12a1
ctagccaaattaggattaggattagggctaccaataccaataccaataccaattctattctatggcttagctcaagcgcccaaatacacggtctcggaaccccttcctcccgaaccctatttttaggtcagaggctaaataccaaggccgcctttatcaagctcaagtccacacctagaagactccgccctctcagagtggctaatgagaaagtcgccggtatcgattagggaaccaccaactccgccgaggctgccatggaaagcggcatgcccactatcatcaccaacgccgagggccagagaaccacgccctccggcgaggcctacac

SEQ ID NO: 11038 - DNA, 526 bp, Glycine max
  Clone ID: jC-gmfl02220127g12d1
cgaacctatgaaatccgtgtctaatatttgaaggaaacacgcacccactctggattgacaaaaattattaagaatttggaacagaagaaaacatataatgggggaaaaaatactaacatatacctctctattggtaataactagttgcctgctcatttagagtcagtgaaatctgcatcaatgacatcaccgtcgggtcccttgcctgaggattctgaggggccagagtcggcaccgggtggtggtgttggccctcctgcgcctgcagctcctggttggttgtaaagggactgaccaagctgcatgacttcctgatttagtgcagccatggcatccttgatagcttgggttgaacccccagaaatggcgtctttaagctctcctagttttgcttcaaccttctctttcacagggccaggaaccttgtctccaagctctttcaattgcttttctgtctggtataccacagagtctgcctgtttctttgtgtcaatagcatccctcttctctttgtcttccttcgaaa

SEQ ID NO: 11039 - DNA, 367 bp, Glycine max
  Clone ID: jC-gmfl02220127h01a1
gggtaaaagaacagaggcgaaaaaccttgagcggagttgaagctatgggaagcagattgggaagaagagtggagcagttcgcgaacctccccataaagcttctgatgccgaacagcttcaccaacatccacgaaatcgctctcaagaccattccttcggccacgaagatcgagatcaagcgcgtccttcaatccctctacggcttcgatgtcgataaggtccgaacgctcaacatggagggcaagaagaagaagcgtggaggcttgttgattgcaaaacccgactacaaaaaagcctacgtcaccctcaaaacccctctctccatttccccggatctctacccgatccgaatcatcgatgaggacaa

SEQ ID NO: 11040 - DNA, 462 bp, Glycine max
  Clone ID: jC-gmfl02220127h02d1
acattgcaaccaaggaatgtatatataataaaaataacaaaatcgcccataacgtacatatacaccagatacaaatttttcaagacgtatgatattgcaaatgacttaaacttctacacaagaacgaacaaaatgctataatgaattcccacactgccacacagttcaaagttattgcataccaataatttcaagaacccttattaacttacactttcaaagggattggcacaacaatattatatgctaataaatataataatcttaagatgatgaagcaggtttggaagatgggttgaaaggaacctgctcagcgcatgtaaggatgtcatggggcccagcctgttctcgaccaacaccaagaaggtcaagataatacaggtaatgggaaacaatattgttcattgagtccacatcaccttgtccacaaacaccatccccatagagaatgttcattgtagt

SEQ ID NO: 11041 - DNA, 493 bp, Glycine max
  unsure (1)..(493): unsure at all n locations
  Clone ID: jC-gmfl02220127h03a1
ctctcctctatccttcgagcccacagtcaataatgtctcttccaactccatcgctcccccttctccgttgcatccattttcacgattccaatccattaaaaatagaaagccaaaaccccatcatattcctagaatcacatgcagaggaaaccaaaacaatccaacaccaaaccctaattcccagggagaacctccacatattgtaggacataggaggaacgttctacttggcctaagagggctttgaggagctgttactcttaacaacaacaacccttttgcctttgcagctccaatatctcctcctgacctaaacacgtgcggtccaccagacctacccgcagagagaaaacccaccaattgttgccccccatcttccaaaatcatagatttcaagttctctccctctaaccaacccttgaggagaagaccagccgcacattaggncaacgatgagtatctagccaaatacaaaaaagcccttgacctcatg

SEQ ID NO: 11042 - DNA, 430 bp, Glycine max
  Clone ID: jC-gmfl02220127h03d1
aatacataatcaattattttattaatcaagtattaaatgaatcagcatatgataggaaatacataatatctctttatgagttacacactttattggaaactagtaaccatatatgtattaccacacacacatatataagtggttgaagcatatagataattttcaatccgaaagaagctctattttgatgcctctgattttaacacgccctttcccatatttgggaaccagcgtcaccctaacactggcatcatcttccgcttccaattcttccaacaaatccgtaagtcccagcctcaaacaagtaatgatgcccttgtttttgtgcatatgtgaatgaggcacactcacaaagcttcctgcaaattctgtattatctggtcgaatctgcttatcatcttcatcattgataaacacatcaaatttcaca

SEQ ID NO: 11043 - DNA, 333 bp, Glycine max
  unsure (1)..(333): unsure at all n locations
  Clone ID: jC-gmfl02220127h04a1
cttgtctcctacgcgcccgatgtaactgctcatgtccaacaaggtaaaattaccaaactcaccggggttaagaccaaagagctcttgctctggatcacgctcagagatatctatgttgatgaccctcccactggcaaaatcaccttcaagacccctgccggcctatttaggtcttttcctgtctccgctttcgagattcaagaggagcctgaggctaaggacactactaagcgcgtgccggataccgctgagcctgtgcaagtcaaggaactctgattttattctcaaacaaggtcgccgtggnggttagcgtgcaaaatatatttatatata

SEQ ID NO: 11044 - DNA, 462 bp, Glycine max
  Clone ID: jC-gmfl02220127h04d1
aacaatatcgtaatccattttcttttcaaagccagaacaaggagatgatggttaattagcaataaagccgcacaatatctgaaagcttaacataaaaggtaacataaataaacttattaataaacatatatataaatatattttgcacgctaaccaccacggcgaccttgtttgagaataaaatcagagttccttgacttgcacaggctcagcggtatccggcacgcgcttagtagtgtccttagcctcaggctcctcctgaatctcgaaagcggagacaggaaaagacctaaataggccggcaggggtcttgaaggtgattttgccagtgggagggtcatcaacatagatatcactgagcgtgatccagagcaagagctccttggtcttaaccccggtgagtttggtaattttaccttgttggacatgagcagttacctcgggcgcgtaagagacaagctt

SEQ ID NO: 11045 - DNA, 412 bp, Glycine max
  Clone ID: jC-gmfl02220127h05a1
tgagttagcaagacttatatgtatgtgttcaatcttgcagcccaaacaagaatttatccaaggccggagacgatatggtggttgcgagctgttggtgttcatcttcatcttcatggctgccactgtcattgccactgcattcgaacttgaaggcagcatcaacgtcactgtccccgaaatggaaatatcacgcattttctgaagcctcctcctcctcgtgttctctcgttcacaacaaccatgacgacgaccttcaagctctcttacagatccttccatctgatttgcatcacaatctcctcaatcaacctaaccgccctcaacttctagatgttattttggatttgaggcgttttccagattcgcgttatctaggaaaacacggaggccattctttaaggaacactgagct

SEQ ID NO: 11046 - DNA, 542 bp, Glycine max
  Clone ID: jC-gmfl02220127h05d1
atcagcaggagatatacatgtgtgtgtgtgtgtgaaaaaaaaatggaagaaattattagaaggggactcatgttgaataataaatatccctaataatttagttttttacggtgtttgatgtggtcgcgtgatccatataactaattgcacctagtgggataagtaagactattgttactatcatagtaatatatgctcaattaacatacctgatgtgtaagccagtagtgtctatctctcatctcaattaagaaatcaaatgttggaggtgctttcctctcaagaattgtcttctgagaatttctggctctggcttctgcatctcccagagtaacactttctattccgccaatctaataaagcaaatggaggtgaatcttgaatattactgttgattatattgcacaatgattcatggctccacaaatcaagtaaatctttaaatctttaacatcaaatattaatctactaaatgcttattgaactgaatgggtgatataatttttcaggatacttttgaaaattaaaacgtcaatgaaaac

SEQ ID NO: 11047 - DNA, 365 bp, Glycine max
  Clone ID: jC-gmfl02220127h06a1
taggagggttagtgagagttgttgacttcacattgacgatcctttttttttcctgtctgtttgcttccaatttctcataccttcaatcttcaatcttggaagataggagaacagcatagattgagttttaccacacgatcgtagagcttctgatatttttcgaagaggaaaggcaaaagagttagcatttaagatgggaaaaacaattgagttgtatggattccctacatctgagaatgtgtctgatgtaaagacatttgtagtgcagtatactggtgaatgaactgtgttcgccattaaattaagacatggaaaaagtcgggttccaagagcatttgcaattattcaattcaccaccgcaaatt

SEQ ID NO: 11048 - DNA, 359 bp, Glycine max
  Clone ID: jC-gmfl02220127h06d1
acccattcaaaatttttatttttaattttaaaaaaagcaggggaatggaagtgcccccccttattccttgagagaaaagggatatattcactcatacctgttatatagggacattaccatagaacatacctgcgttgttcctataaaaatataaacaagctgcctggttcaaaaatccaactggaaaatggggggggcaaagtccaaagttggcaactcaaacgcaacccactgaaactgttttccaaagaggaccttttaatgctgagtttcttttttttgatttggacaaaaagagggtaaaccccccctgggaaacttagataagggccccttttcatgcctttattatagcaacc

SEQ ID NO: 11049 - DNA, 205 bp, Glycine max
  Clone ID: jC-gmfl02220127h07d1
aaaaagaaaaattggactttttcaattataacatctgcgaacattcattccaattcaaaatattgcgcctcactgaatttaagcaacatcccatatattccttttcgcctagttttagcggcttcttcagccattcccttgagatattgcttaaattcagggaggcccaatattttgaattataacatctgcgaacattcattcc

SEQ ID NO: 11050 - DNA, 364 bp, Glycine max
  Clone ID: jC-gmfl02220127h08a1
ggagtttagattttcgtcccaaaatttcctgagtggtagcctgagagctaacatattactttcataccaactcaaccaatttatcttcttctttaattcaactacaaaaactggttcgcggggaaaacttgattctcgttatttgacataacatattagtaatccttcaggggacatatgaattatatgataaaatacaagcatgtaatatgagaaatagaagcatgtaatatttgatttacttcaatctccttagaaactttgaaattattcaatttacggcatttctggttaaattcgtttagtattataagtgcacctgtacaacttaagtgtgaaattggctgcactatatataatatga

SEQ ID NO: 11051 - DNA, 546 bp, Glycine max
  Clone ID: jC-gmfl02220127h08d1
ctcgtgttcaagctgcaagcaccagcactttgatggtgccttgactatttgctgttagaatagtggggcgatcactcttccagcaaacagcgctgatgaaatatgatccagcctcatcttcagcgtcatccatatcaggggacccaaatctgtgcgaagtcaaaggtctcgagatttccttgtggtaaacaaagacttcatttgtttcactgccacacgcaatatattcactgcttactgtaagaccaacaaagtttttctcatttgcatggcctttgaaagtacgaactggtaagttttccttcacatcccataatcgcagtgtactatctgttgatgcagaagcaagttcatcattagacagaaatttcacgtatgaaacagccttcctgtgcccactgaaaacatggactggacggctaatatttctcaaatcataataatggatatgatggtctgctgacccaactgcaatataattgccagatccaggattatatttgacacaacatatgtttgctttcatgtctatatttagaacactag

SEQ ID NO: 11052 - DNA, 325 bp, Glycine max
  Clone ID: jC-gmfl02220127h09a1
agtatttccctacctctcccttcaagaagcagatcttcgtcaagaccctcaccggcaagaccatcacccttgagagaggaaagctctgacaccatcgacaacgtcaagagccaagatccaggacaaggaaggaatccccccggaccagcaacgtctcattttcgccggaaagcaacttgtggacggccgtacccttgctgactacaacattcagaaggtgattgctcttcacctagtcctccgtctccgaggaggcatgcagatcttcctgaagacactcaccggcaagaccataaccctagatgtagaaagctccgacaccatc

SEQ ID NO: 11053 - DNA, 481 bp, Glycine max
  Clone ID: jC-gmfl02220127h09d1
caacacaaaccgaacttattttcaagggacattattacagacccattaaacatcaaagttcttcaaatgttttgggaacacatccaacattacacaacgagcttaaaaccccccacggagacggaggacaaggtgaagggttgattccttctggatgttgtagtcagcgagggtccttccatcctcgagctgcttgccagcaaaaatcaccctctgctggtccggggggatgccttccttgtcctgaatcttggccttcacattgacaatggggtcagagctctccacctcgagggtaatagtcttacccgtaagagtcttcacgaaaatctgcataccaccacgaagacgcaacaccaagtggagagttgactccttctggatgttgtagtcagcaagggtgcgtccgtcctcgagctgcttcccggcgaagatcagcctctgctggtctggggggattccctccttgtcctgaatctta

SEQ ID NO: 11054 - DNA, 285 bp, Glycine max
  Clone ID: jC-gmfl02220127h10a1
catccgcagctgcttttattcgcaccgcaaacagagagccatggccgtcggaaagaacaagcgcatctccaaggggaagaagggtggcaagatgaaggcagctgatccctttgccaagaaagataggtatgacattaaggctccttctgtttttcaagtgaaaaatgttggcaaaaccctcgtctctcgtactcagggtaccaagattgcttctgaaggactcaagcatagagtgtttgaggtctccttggctgatcttcaaagggatgaggatcatgcattcaa

SEQ ID NO: 11055 - DNA, 490 bp, Glycine max
  Clone ID: jC-gmfl02220127h10d1
ggggtctaaacaaaacccagatatatattacgcaccaaaaatgtcttctcgttgtctaaacaaaactgtcactcagcttacacagaaacatttgacagaacagtaagtttgtaacttaaattttcaatggtaacataagaaacagaaaacctagaacaatttgaatatgcattatcactaaatcaagctccaacaatttcagggggttcctctgccactatttcatcagcagggctgtctacctttgcaccaacatcctcggagtaatctccatgaacctccatcagtttcccaagatcaaacttaggagctttcaggatcttgactttacgaacaaacacattctgcagagggtaaatactagatgttgccttctcgatctcttttccaataatctcaggaataaacttccggaccaactccttcaaatcacatgctgttgcctgggtggtcatgatctccctcatctttctacgaatctgtctaatct

SEQ ID NO: 11056 - DNA, 348 bp, Glycine max
  Clone ID: jC-gmfl02220127h11a1
gagatagcaacatccttgctcacacccatatcaggaaaagaagaaaatatcacattattctctctctctctctctctcacacacacacacacactacgtatgaaatccccgtagccagaatcgtctcccttccaaccagacaacaaacgccaccctcacactctcaattattctcacattttgatttgtttatatattattcccttttcaagactctcaatatcatatcttctacttgaagcaaagtttccttcttggaagatatggagaatccaggattgttttctgcgaataagtctgagaattcggtgaaagtaagctttcggataccggattttacccaatggg

SEQ ID NO: 11057 - DNA, 397 bp, Glycine max
  unsure (1)..(397): unsure at all n locations
  Clone ID: jC-gmfl02220127h11d1
nnnttagctactacgatctaacaaatacgtcacgcccactctagctgcaccttttattaaaataccaatatttaattcattacaagtaccaggtaggttttaacctatctttaacaaatatatctttttaatcaaggaccaacttacagtcgctctgaatgaaattcacaacgaacgcctctttaatgtcataaaaacttgttccattatcagtgaatgatttgaggtaaacaagaacattacatcataaggtaactttcttcctcccactaatgaactcatcacccaactttattttaacaacatgttttgcttccaaaaacattgaaaatgtgcctatttaaaaacaaatttcaaataaaaacactaaaacttcttagcattctattaaagaaca

SEQ ID NO: 11058 - DNA, 282 bp, Glycine max
  Clone ID: jC-gmfl02220127h12a1
gagcaaaatgcgcgtggatcagaaccatactattagttaacacgattaagaagaagtagtataatgggtcaattagatccattttcatgcatgctgatagcctagattggtttttaaaggtttagggtgtctttggagccatgggtgatggcttcaccacccctatctcggtgtacatcatgagcggaatcgtgaacaatgttggaggtgttttaaaaatgacaccaaggactttcatccacaacgtcaataagtattcactggcgttgacatacttggctt

SEQ ID NO: 11059 - DNA, 408 bp, Glycine max
  Clone ID: jC-gmfl02220127h12d1
caagggacaccctgtttgggctcatctttttatttttcttaccaaaccaaaaggggggcaaattataatcccaacattggcttggtttatttgggtattggaaaattcattctcaatggcactctgggttggtgcacttttttggagaccccccctagagttgtaaactccacttgggcccttagacaacaaacacaaatgggtccctttttttaccaccctccctttggtcaacacaacaattccatgacaattctttatagggctcaacctatgagccaccaccacacttgttctttctaccatgacttgttccaaagcatcttgaaccaccttttctgattgactattaagtgcccttgtggccccatccaaaagcaacacttttgggttttttagcacacccct

SEQ ID NO: 11060 - DNA, 518 bp, Glycine max
  unsure (1)..(518): unsure at all n locations
  Clone ID: jC-gmfl02220128a01a1
gtgtgtcttgaatcatcagaagcctttggccttgatgccaatcacttgaggtacatcactgatcacttccggtacaaatttgcgaacgagaggctgaagagaacagcaagatattattcatccaattggagaacctgggctgctgtcaacattcaatttgcttggagacgttacaggcagaggactaaaggtccagtgacccctgtaagggacactaatggaggcactgaacgcaggctcttgcaatatgctgcaatgttcatgtcaataaggccacatgaccaccttgaatgaaaactggtgtgtccatgatttttcttattgttgttggttattgatcctcaataaaattgtatttcaaatccattagacctgttgaaggtgaaatgtattaaaaaaaaaaaaacaacaaggtgagtacgagtaattgaaaaaattattgagaccccttctttcatttgatngtaagtttaccataatcatntttcatggaaattgtgtcttgagcaatccccatc

SEQ ID NO: 11061 - DNA, 279 bp, Glycine max
  Clone ID: jC-gmfl02220128a01d1
attatctaattttaacatgtattataaaattaaataattacttgacaatatatagttaaattctcataccagaacaaaactgtgaagtaactgactctactatttcttctcaactgattgtccatccattaagcacctaacagcccctcggcaggatggggattgctcaagacacaatttccatgaaaaatgattatggtgaacttaccatccaatgaaagaagggggctcaataattttttcaattactcgtactcactttgctgggtcttttttttt

SEQ ID NO: 11062 - DNA, 385 bp, Glycine max
  Clone ID: jC-gmfl02220128a02a1
gtcctgagtggtctgctacaaatatcttgcttgttatacatatgaatatggactcacaagcacctgatattgcatgcaaagtaatccgaaaaaattgatctattacttgtaatatacgactgcacctaccagaagatttagatagtgacgtgtcaagttaactcgccttgatatactgaactgtgctcacattcgagaccagtgattaatcattcaagtaaattgttcaccaccgaactattttgttgaatcgttaatatcagatggcagatctgtcttgattcactcttatgccctgtgtctttttcgttgcaagccctattctactactccttgatgtcatcatgctcttactcgatagtcgaatcaacacaacaatagtgat

SEQ ID NO: 11063 - DNA, 99 bp, Glycine max
  Clone ID: jC-gmfl02220128a02d1
ataacgattgttaaacccatattaatggctttcatgggaactgcctacgacttcaatagatatacataagactagaaagattgaaagcttgtcataggg

SEQ ID NO: 11064 - DNA, 580 bp, Glycine max
  Clone ID: jC-gmfl02220128a03a1
acttgcttcacttaagtgttctgaaattaggtactacatagatgtgtggtcaattttatagtctttgtgcattccttaggtttgttaggtgcccggtacgagtatgatagtcatcagttttaaagtgtccatgcctctattaatcaggaaacatcgcctacgaggatatttgaagttacatgcctggcctccattccatgttttcatcacttaagattctcaatttctttgttaatttactttttgggggtctgatatgcaggaccaacttaaagcttccttggaggcctctaatttcaatcgatggaagcacagcttatgaattaaatgaagattacaaaattgttagacatgttgagagttggaacatttctgcagttgaagcagttttgcagattttctcctttaagtctaaaaatccaggtggttgagacatcgagtgtcatgaaattatccatgtgtcactctctgttggcactttcaaacggagtcactcgactctagtctctccaccaagcatatagctacacagagaagccaccattactactcccacatgaccttgtagatgaagagcacg

SEQ ID NO: 11065 - DNA, 189 bp, Glycine max
  Clone ID: jC-gmfl02220128a03d1
aagatcaaaggagccttgcttccccattattacttctacacttttgccaacatcttaaaagaaggtacaactcacaacccttaaaccttgaaccccagaccacacaaaatttccccccaacactcattataccaattaccccccctggaccattccttttccattttttgatcctaaaaaacccaacca

SEQ ID NO: 11066 - DNA, 262 bp, Glycine max
  Clone ID: jC-gmfl02220128a05a1
gtcatacgctgcgtgcttcatttatattgttagagccacgcatcgatctgtggttattgggtgcattgaacctaagcctgctcctcctgttcatctgagcggattcaactaccacacattagcggctggcagaactgtctggcgattcatctttcacgtaacaagttgctggcgcagccaaagtatttgcaccagcagcggacgtttgtgattcttctgtcaactatcagccaagtaacttatatgctgcagacaatgggga

SEQ ID NO: 11067 - DNA, 274 bp, Glycine max
  Clone ID: jC-gmfl02220128a05d1
ctgtgagtgtgctttctacctagcgcgactcatccgcattatttcccgggtcgtcgtcggcggccgccctttttttttttttttttttttgatttttttatatagattgatataccaaaatacttgtcattcatggtaaagcacatcctcataaataccagtaccataaagatgaccgcgggaaaaaaaccttgaacattcataaggagttttagactcatctaatcccttccttgggataacgggttgggggcacggctaaatatatcccgta

SEQ ID NO: 11068 - DNA, 241 bp, Glycine max
  Clone ID: jC-gmfl02220128a06a1
gtcatacgcagcgtgcgtcaaatatattgctaaatccacgtatcgatctgtggctattggatccattgaacctaagcctgctcctcctattcatctgagcagattcaactgcaacatatttgcggctggcataacttttgggcgatgcatctttcacgtatcaatttgatggcgcagccaaagaatctgtaccagcagcgaatggttgtgagtctcaagtcaattatcagccaggaaactc

SEQ ID NO: 11069 - DNA, 206 bp, Glycine max
  Clone ID: jC-gmfl02220128a06d1
atataaatagttaaacagggacaaacggcaatcatattaaagctcatccccaaaaaaatcagaaacttaaaaaggaacgagggataaaataccataatcgtagataaagagttttaaactcagcgaatccgatcctactgaaaacgtatgaaggcatcgcgtcaatataaccggttaatcccctaagtatggttgcaaaatgaggg

SEQ ID NO: 11070 - DNA, 284 bp, Glycine max
  Clone ID: jC-gmfl02220128a07a1
ctcatatactgcgtgcttcatttatattgctaaatccacccatcgatctttggctatggggtgcattcaacctaaacctgctcctccagctcatctgagccgttttaactaccacacattagcggctggcagaacttctggccgattcatttttcacccaccaaattgctggcgcagccaaagtatctgcaccagcagcgaatggttgtccatcatctgtcaactatcatccaagagaacttttattctccaaacaatggagatctcccactatttcaatacta

SEQ ID NO: 11071 - DNA, 91 bp, Glycine max
  Clone ID: jC-gmfl02220128a07d1
ataaattgttaaacacagatacagggcattcatagtaaatagcatccacatgcatatgggtacacttgacatgaaagagggaaaaaagatc

SEQ ID NO: 11072 - DNA, 285 bp, Glycine max
  Clone ID: jC-gmfl02220128a08a1
gacacatacaacgggcgttattcgagatgatagattgaaccattgctttttggctatcagatgcattgaacaatagcctttgcatgcgaatctctttttgagtcttcagtagcactctacaagaccttgcaagggagaggtacaatcaattttgcaagctactgatggttcacctgtgcaatgcatccccaccagcacatcatggctttccatcaaaactcgtctctatgctatgaagctcctagtcacctagagaagagccgatccaacgagtcggagtatttt

SEQ ID NO: 11073 - DNA, 90 bp, Glycine max
  Clone ID: jC-gmfl02220128a08d1
atattcattgttatatccggagacacggcaaataaacgaaagcacaaatgacaaaaggtcaatacactccaaaggtacatgttaccacaa

SEQ ID NO: 11074 - DNA, 466 bp, Glycine max
  Clone ID: jC-gmfl02220128a09a1
gatctctgcttctacctgggtgcttatccttgcacttaaaaggtacctattagttccaaggggtaaggttaagaacttgtaagttatagtagcagttactggaggaagaagcttcaattccttgcggataacgaatgtggttggagtgccaagtgagcattttaaccgatacatgcatctcttcaaagttgagacgagattgttttggtggcttctcttcggtcctcttcccgtggcttattgatatatagaacaattagtccaggaatttatgcaaaagactgatagagcaaggcaaagtagagagtcttaacaataaatggttttttttttataaatatttcttgtttctaataaaggcttgcatcacttatttattttttgtagttagttcttttatataaataagcatcctcttaatgtatgtagtcacttcagtttcagattactaaatttttgttgttct

SEQ ID NO: 11075 - DNA, 335 bp, Glycine max
  Clone ID: jC-gmfl02220128a09d1
agaacaacaaaaatatttagtaatctgaaactgaagtgactacatacattaaagaggatgcttatttatataaaagaactaactacaaaaaataaataagtgatgcaagcctttattagaaacaagaaatatttataaaaaaaaaaccatttattggtaagactctctactttgccttgctctatcagtcttttgcataaattcctggactaattggtctatatatcaataagccacgggaagaggaccgaagagaagccaccaaaacaatctcgtctcaactttgaagagatgcatgtatcggttaaaatgctcacttggcacttcaaccacat

SEQ ID NO: 11076 - DNA, 423 bp, Glycine max
  unsure (1)..(423): unsure at all n locations
  Clone ID: jC-gmfl02220128a10a1
gggtagtcttgaagcggaaagaacaacagtaggattggcagcaagagacccttcagggattctctccccatacacctacaatctaagaaacacaggccctgatgatgtttacattaaagttcactactgtggaatttgccattctgatctccaccagattaaaaatgatcttggcatgtccaactatcccatggtcccaggacatgaagtggttggtgaggtactggaggtgggatcaaacgttagcaggttcagagtgggagagttggtgggagttggactcctcgtaggttgctgcanaaactgccagccatgccaacaagacattgagaattactgcagcaagaagatctggtcttacaatgatgtttatgtcgatggaaaacccacacagggtggctttgctgaaaccatgatcgttga

SEQ ID NO: 11077 - DNA, 301 bp, Glycine max
  Clone ID: jC-gmfl02220128a10d1
aaacaaaacacagcttcttttttagagtgaacaacaaatacagctttagttctcaattaattaataacttttccagactcttcatgatggaaggatggatgttgcgtgtgtccggctagtagtatactttctttcttttactgatcgacaagtttgctgcctttgacatccacaacaaacctgtatctcacgtcattcttctccaacctttcaaaggctttgttaatgtaatccatgtttaccatttcaatcatcgaactcagacccttctttttccagaactccaacattttctttggct

SEQ ID NO: 11078 - DNA, 336 bp, Glycine max
  Clone ID: jC-gmfl02220128a11a1
ggagaaggcattgtggaagtccaagttcgtggtttccggaggggggtagaagtggatggtgtttgtggtagtaccaaaaaccatctttaacgtttcacatctaacaccaacaccatttacagaaaatgaaacaactcgatgcattctagacccaagaaacaaccccgcaaccagtaccagccactcatgctcctccaacaaaacaaacaacaattaactttcctactcaagaataacattcttcaactgaagatcctgccccataatcaaccaccaaagcaccaaaagcagaaaccactcgatcaccaacacccgaatctgttgaaacaactccta

SEQ ID NO: 11079 - DNA, 191 bp, Glycine max
  Clone ID: jC-gmfl02220128a11d1
gatcgaatacatagttattttcatgattgagtttttacccactgacacaaataatgatcataatactacaatcattgcaagtggcaattgcttctggaacacgcttctaacataatattaatttataatctttagaatatgtggccatcgcggtgcgttccattgatccattctaacctgcattttattaa

SEQ ID NO: 11080 - DNA, 327 bp, Glycine max
  Clone ID: jC-gmfl02220128a12a1
attctccctttcctctccgaaccctcgatcactctcacgcgctcctatattcgctcctccaccgtcgctctctcgaacaaccacaacaccatcttcatcacatggcaaacgcagcatctggtatggcagtccatgatgactgcaagttgaggtttttggagctgaaggcaaaaaggacacaccgtttcatagtttttaagattgaggagcagcagaagcaggtcattgtggagaagcttggtgagcctgcccagggctatgaagatttcactgccagccttcctgctgacgagttgccgtatgctggttatgagtttgagtatctga

SEQ ID NO: 11081 - DNA, 288 bp, Glycine max
  Clone ID: jC-gmfl02220128b01a1
atcctatattctcttcttgaatcatcttgcttatgctgcctatcaaaatggacttattaggaccggagatcatagggccactcatttggttttcttgcttggattgagcatgacactatttgccggcgtccgaacccaagacgaaggtccatccacctatcatgctcctcgcacacccaaagcatcttcacctgccgtacagagatctgcgtcacctgttccctcttgacctccaccctgtgagtatgcgacaccaggtaccactcgccctccatccacactcaacta

SEQ ID NO: 11082 - DNA, 141 bp, Glycine max
  Clone ID: jC-gmfl02220128b01d1
actcgaatgcaacgatcgataaactaatagtaatggcatacaaaataactgccctcgaatacaaaacctcccctcaaatctaccaagaatgcaagcaattcatatagttcaaatacagcattaaactcccacgatcacatt

SEQ ID NO: 11083 - DNA, 474 bp, Glycine max
  Clone ID: jC-gmfl02220128b02a1
atttctctctgccttgctcatttacacacctctccaaccttttactttcagctttatttgaatccctctctctcctttccaaatggccagcgttgaggttgcacatcaaacaccaacaacagttccagaaaatgaaacaaccgaggtaatcaagacccaggaaacaaccccggaaccagtgccagccactgaggctcctgcaacagaacaagcagcagctgaggttcctgctcaagaagaacaacaagcaactgaggttcctgccccagaatcaaccaccgaagcaccaaaggaagaaaccaccgaagcaccaacaacagatacagtcgaaacaacaactacagaagaagccaagccagatgagcctaaagaagttgcagttgagaccgacgaggtggtgacaaaagagacagaggaagagaagccagctgcacaagagaaatcagaggagaaaactgaagaagtgaaagaaga

SEQ ID NO: 11084 - DNA, 203 bp, Glycine max
  Clone ID: jC-gmfl02220128b02d1
aaagtaaatatcatttattcaaacctaaagaaacacaatagcacatgatcacaaactcatgtaaccctgccaataaaataaaccctcatccctaaactccaggacccaggagcagcttgctcacttcaatacacaactcctagaatatcgtatgggaccacggggaaagcacgctgatgtggagccaagagttgtgctcacac

SEQ ID NO: 11085 - DNA, 371 bp, Glycine max
  Clone ID: jC-gmfl02220128b03a1
ctttaacctcacccccccctagccacttcctaattagcattattattgtccacagacagctaaaggatcctgtatgtctctctctatatctactctagatccgacacccccatacatctctccctatgactccaacccacatctgatgtcagtgatacgttctgactatacttactatgtgctctcctaccttcgctgaactacatgctcgccacaacaacttctcattccacctctccaccccaattgtcaccaacgaattcaccgcatatgttcgcttacatgtcgaactaagctattgttcatcgttgttgccaccccatgcgccaatgcctcatgcacgatacccatatatgtcttagagcatgtaa

SEQ ID NO: 11086 - DNA, 92 bp, Glycine max
  Clone ID: jC-gmfl02220128b03d1
aagacttactgtagaatacatatctaggggagcactgggagttgataacgccgtccatttaaatacattatacaggactgaggcagaaatgt

SEQ ID NO: 11087 - DNA, 282 bp, Glycine max
  Clone ID: jC-gmfl02220128b04a1
cttttgctcaacgatccccactttaactccatgttgccatcatctgtttgttttgacagtcaccggtgatcgtaaaacacttaatacaaacttcatcatgtttttactttactctactgctgggatttcatgaacaactttatatgcattcttcaagctaacgtgggttgtgataatgggccctgctgacactccagaggaatgatgcaccattaaattaacttttcaatcaccggactatttttctgaataaccaatatctgaacgaagtccgcatttgat

SEQ ID NO: 11088 - DNA, 93 bp, Glycine max
  Clone ID: jC-gmfl02220128b04d1
accatattcactattgaacccatatcctcaccagcacagtgtactgacagcggcgacagtttttctacattggaacgcaatgagatactcatt

SEQ ID NO: 11089 - DNA, 114 bp, Glycine max
  Clone ID: jC-gmfl02220128b05a1
cttatatacaacgttcttcattcttaatgatatatccacccatcaatatgtggctatgggatccaatcaacctaagcctactcctcttaatctccttagtagtttccactacca

SEQ ID NO: 11090 - DNA, 262 bp, Glycine max
  Clone ID: jC-gmfl02220128b05d1
tgtgggtgattctctatgacagctatgacgatgcatgcacacgtccgtatggacgagctcactcttcagcggccggccttactacttgtttgttttttgcaattgagaacacttttactgagagctgcgtgacagagaagttattctatgccttagactctggtgcagttcctatctattttggtgcaccaaatgtcattgattttggtccctccacattcaataatagatggtagaaaattcaacttattggaagagctgg

SEQ ID NO: 11091 - DNA, 251 bp, Glycine max
  Clone ID: jC-gmfl02220128b06a1
gtcatacgctgcgtgcgtcaaatatattgtttaagccacccatcgatatttggttatgggttccattgaacctaagcctgctcctccaaatcgcgtgagcagattcaactaccacatatttgcggctggctgaactgccgggcgaatcatctttcacgcaccaagttggtggcgtaaccaaagtatttgtacctgcagcgaatggatgtcattcttccgtcaattaacagccaagaaacttttatgcttca

SEQ ID NO: 11092 - DNA, 148 bp, Glycine max
  Clone ID: jC-gmfl02220128b06d1
attgttataccaagatacctggcaataatgttaaagcacaacccctaaaaaaccagaaccataaacatgaacgagtgaaaaaaacccataatcattcaggaagacttttatacccactgaatccgatcctggggtaaaaggctgaagg

SEQ ID NO: 11093 - DNA, 335 bp, Glycine max
  Clone ID: jC-gmfl02220128b07a1
gtcatatgcagcgtgcgtcagttttattgcttgagccaactatcgctatgtggctatgggatgcattgaacctaagcctgctcctccagatctcctgaggggttttaactaccacacattaaaggctggcagaacgttcggacgattaatttttcaagcaccaaatggttggcgtagccaatgcatctccaccagcagcggaggtctgtcattcacctgtcaacttgaaggcaagtaactcataggctccaagcacagggcagaatccacgatcaggaatagtaccgcccggggatggattttctcatccgtgaggaatggattatcctttcatt

SEQ ID NO: 11094 - DNA, 95 bp, Glycine max
  Clone ID: jC-gmfl02220128b07d1
attacacttataatgatacctagataacagacaataaaattaaagcactaaaccaatggggccattactatctaaacagacgcaccaaaagtaat

SEQ ID NO: 11095 - DNA, 241 bp, Glycine max
  Clone ID: jC-gmfl02220128b08a1
ctcatacacagcttgcttcaaacatattgctaaacccacccatcgatctttggctatggggtccattgaacctaagccagctcctcctaatctcctgagctgttttaactgcaacacatcaacggctggcagaactgacggacgaagaatctttcacccaacaaatggttggcgtaaccaaagtatctccaccatcagcgaagggatgtcagtcagctgttaactatcagccaagaaactc

SEQ ID NO: 11096 - DNA, 201 bp, Glycine max
  Clone ID: jC-gmfl02220128b08d1
atatagatagataaacaaagataaaaggcaataatattaaagcacaagttcaaaaaaatcaaaaaaataaaaagaaacgagtgaaaaaaacccaaaagcacacagaaagagatgtaaactcacagaatccgatcctggtaaaaacgggtgaaggcaacgtataaagataacagagtaatccgttaagttgattgaagaatg

SEQ ID NO: 11097 - DNA, 321 bp, Glycine max
  Clone ID: jC-gmfl02220128b09a1
cacgaacacaacgcacatcataacaattgccaaacccaaccattgctttttggctaccggaagcattgacccaaaaccatcaaacccaaatccctttatcattcctaactacaactcatcaaagccttgcagcccaacgaaccatcaatcgttcacggtgctgatcgggtacaggaccaacctctcaccaccagcagagaacggctgtcacttagctgtcaactctaagccattgaactctcatacttctaaaacagtgctcttccaacgattggaactgttccgaacaaagaggaatctatccgtgcgtgaagaatccat

SEQ ID NO: 11098 - DNA, 163 bp, Glycine max
  Clone ID: jC-gmfl02220128b09d1
aacactcataatgatacctagataacaggcaattaattgaatgcattagactctggagcacttcatatgcatactgttgctgttacaattactggaattggaccctaacagtttcatactgcatgatttccaacctgcacaaaattgaccaatggaaagcctt

SEQ ID NO: 11099 - DNA, 465 bp, Glycine max
  Clone ID: jC-gmfl02220128b10a1
atcatggtggccgtaacccgcctcgcgaagcgcgcgtcaaccttctcaccccgagatgaggaggtgcctgagctcctccgaagtcaaatcccacgcgccgccgcacgacgccgcgtccttccgcccgtttccgcggcgcgaagatctgagcaagcggtgcgtgcagtgggcgttcctcggctgccccggcgtcggaaaaggaacgtacgctagtcgcctgtccaacctcctcggcgtccctcacatcgccaccggcgatctcgttcgcgacgaactcgcctcctctgaccccctttcttcccaggttctcttcttcttcctcttcactttgaattaactagattaatttttgtaacgcacatttggtcaaggttattgaaatttctgcgtacggcgcagcgcttagacagaaaaatgggatgataattattattttaaaaaatattaaaaagttgtcatctaatc

SEQ ID NO: 11100 - DNA, 234 bp, Glycine max
  Clone ID: jC-gmfl02220128b10d1
attcaaataacatgaaacatcatattaaataatttttttcctggaagttactccagtaaaaaagccttccctaaatcacgagcatgtgatgatgtgttggaggtaatagaataagttcattcacatttaatttacaacaatagtgatgattgcccaatcctatcgacgttgattcccgaccaactatctttctagccatactgggagatattattcactctttacaataacctt

SEQ ID NO: 11101 - DNA, 294 bp, Glycine max
  Clone ID: jC-gmfl02220128b12a1
caacaacatgtctcagttttccacctccaaacgctgaataaaaaaaaaggaatcacagaaacagagtatccacagcgtatagtcccaaaatgcatctggatcaacatgaccccaaaacgacaacaagagcaacaaaagtcctccctctgttcctctacttgttcttcttcttcagcctcgcctcttcggctcctcccatgctcccctccgacgcagtatcgttagtgtcgtttaagcgtgaagcggaccaagacaacaagctcctctactccctcaacgaaagctacgactact

SEQ ID NO: 11102 - DNA, 240 bp, Glycine max
  Clone ID: jC-gmfl02220128c01a1
ctcataaacagcttacttcaaacatattgcttattccacccatcaatctttccctattgggtccagggaacctaaaccaacacctcctaatcatcttaccatatacaactacaacatattaacgtctggcaaaactacgaacgaagcatttttcacccatcaggttcttgacccaaccaaagcctttctaccatcagcaaacgcatgtgattctccagtaaattatcagccaactaactc

SEQ ID NO: 11103 - DNA, 160 bp, Glycine max
  Clone ID: jC-gmfl02220128c01d1
gtacatagatagtaaaaccaaaagaactggcaaacatggtaaaggacaacctcaacgaaaccagaaccataaagaggtacgagggaaaaagacccacaacgccaaagaaagagatctacactgacacgaatcccatcctggggaaaaaggattgaggcaa

SEQ ID NO: 11104 - DNA, 102 bp, Glycine max
  Clone ID: jC-gmfl02220128c02d1
gtattgataattaaacaataatacctggcattaatgtgaatgcacatgttcatagaatcctgtaccttaaagatgtacgtgggtaaattgtctagagcagga

SEQ ID NO: 11105 - DNA, 253 bp, Glycine max
  Clone ID: jC-gmfl02220128c09a1
cgcatacactgcttgcttcaaaaagattgcttgacccaagtaacgatctctggctattcgatccaatgaacctaagcctgttcctacgaagggcctgagttgcttcaactacaacccatcatccggtggcgagacgccgggataataattgttcaaccctcacatggatggcgcatgcaaaccatctacaacaaccgagaaggggatggattcagctgtcaactcaaccccaggaaacttttactattcaaag

SEQ ID NO: 11106 - DNA, 168 bp, Glycine max
  Clone ID: jC-gmfl02220128c09d1
atacaaataaaaaaaccaaaacacccggcattaatattaaagcacaacctcataaaaaccactaccataaaaagaaacctgggacaaaaacccaaaatccacagtaacagttacagactcagccaatcccatcctgcgaaaaacatatgaatgcaacgcctcacgata

SEQ ID NO: 11107 - DNA, 584 bp, Glycine max
  unsure (1)..(584): unsure at all n locations
  Clone ID: jC-gmfl02220128c10a1
atctaagtaagtgttgagagaagagtgcgtttgtttgtttgaaattaagtagtaaagatgtttggaatcatcggaggaaacaagggtcacaagataaaggggaacttggtgattatgcgaaagaatgtgttggatatcaacagcatcaccagtgttaagggtgtcattggaaccggcattaacatcattggaggtgtcgtcgacaccgttactgctttggcgtcccacatctccatccagctcatcagtgccaccaaggctgatggacatgggaaaggtaaagttggaaaggctacaaatttaagaggacaagtgtcgttgccaaccttgggagctgncgaagatgcatacgatgttaattttgaatgggacagtgacttcngaattcccggtgcattttacataaagaacttcatgcagttgagttctatctcaagtctctaactctcgaagacattccaaaccacggaaccattcacttcgtatgcaactcctgggtttacaattcaaaaactacaagactgatcgcattttctttgccacaatacatatcttccaagcgagacaccagctccacttttgag

SEQ ID NO: 11108 - DNA, 259 bp, Glycine max
  Clone ID: jC-gmfl02220128c10d1
gttgaaacatgcgtgattgcctttattgctttctcttcgatctgttataaaaacagaatacagcaaacacgagaacattcaaccaccccaaatgtaacttgaccatacgtaggtcgatgaaggaatcatattcctcctatttcacattattgaaaaacaggcagagtagtacagtcaaccctaatgagagagcccttagatagagatactgttgggaaatcctctgaaaggcaattccttctcactagaaagatagagc

SEQ ID NO: 11109 - DNA, 251 bp, Glycine max
  Clone ID: jC-gmfl02220128c11a1
cgccctgtctaactacatgcatggacttgcacctgagaacacttttactgagagctacgtgacagagaagttatactatgccttagactatggtgcaggtcctatgtatttcggtgcaccgaatgtcaatgtattctgtcccttcacattcagtaatagatggttgaacatgcaagtcattggaagagtaggctatgcacgtgaaggctgtagctaatgatccagctgcctatgcagaataccatgcatgg

SEQ ID NO: 11110 - DNA, 157 bp, Glycine max
  Clone ID: jC-gmfl02220128c11d1
gaatgaagagtgatgtttgcatgaattgacatatcaagttgacatatgcacgtgttattatcaaaaatcatacatcaacaaaaacacttcaactatagtgtaacctaaggtggagatagaatcaacctctttccaccaaaaaaggggggcaataaaa

SEQ ID NO: 11111 - DNA, 252 bp, Glycine max
  Clone ID: jC-gmfl02220128c12a1
cgccatgtctcactacaagtttgttcttgcaattgagaacacttttactgagagctacgtgacagagaagttattctatgccttagactctggtgcagttcctatctattctggtgcaccaaatgtcatggattttgtcccttcacattcaataatagatggtagaaaattcaactcattggaagagttggcttcgcacgtgaaggctgtagctaatgatccagtagcctatgcagaataccatgcatggag

SEQ ID NO: 11112 - DNA, 387 bp, Glycine max
  unsure (1)..(387): unsure at all n locations
  Clone ID: jC-gmfl02220128d01a1
gttctggaccgtcacctcaatcgagcgtgctaggtggctgtatgacagttcctacagaaccaaaatgttttgcttgctagctagaacgatggggacgataaagagggaacttggtattaagcgggacccagcggatatgctaagctcgctatcaggaattactgatgcagcgagggagggcattactgtcaggtgcagtgtgagcagctccgcaaggaaactggaagctaccacaataaaaccgagcatcatagaaagcctcgactcgagctgaatagaacaccaagcatgctagtgtgtcttcttctatgggactcgagtagatgttaccatgggagaaaaccgtatatccattgangaaaatgaccgaggaaagagagtcttacc

SEQ ID NO: 11113 - DNA, 138 bp, Glycine max
  Clone ID: jC-gmfl02220128d01d1
ggtaatccatcctcaataccgacagtaaaatccttatttccgactctgatatcagctgcttaccacacacaatgaagtacatgagacatgactgaggcatgcctgcacttcggcttgagaaagtcctggacatgcccc

SEQ ID NO: 11114 - DNA, 245 bp, Glycine max
  Clone ID: jC-gmfl02220128d09a1
cacataaactgcttacatcaaacatattgcttaaaccacccatcgatctttgggtatggggtgcattcaacctaagccatcacctcctgctcccattatgatattcaactaccacacatcagcggctggcataccaatgagcgaagaatgtttcacgcgacatgtggatggccaagccaaagcttcagtacctgcagcgaacgcttgacattctcaagtcaattctcagccaactaactcacagt

SEQ ID NO: 11115 - DNA, 130 bp, Glycine max
  Clone ID: jC-gmfl02220128d09d1
attaatatacaaatataataggcaataattttaaaaaacaaacccataaaaaccaataccataaaaatatacataagaaaataaactaaaatttctaataaatagaattaaacatacttaattccattct

SEQ ID NO: 11116 - DNA, 253 bp, Glycine max
  Clone ID: jC-gmfl02220128d10a1
cgcagatactgcttacttcaaaaatattgcttaacccacccaacgatctctgtctattggatgcattgaacctaagccttttactactaatttctttcctgtctataactacaacccatcatccggtgacaagccgccgggataataattgttcaaccctcacatggatggcgcaaccaaaccatttacaacatccgagaaggggagggatttagctgacatctctaccccatggaacttttacttttcaaag

SEQ ID NO: 11117 - DNA, 225 bp, Glycine max
  Clone ID: jC-gmfl02220128d10d1
tcccttttctttttttcttttttatcacattttttatatagattatcaaacccaaacaaccaccaaaaatattaacccatttagtgagggttaactgcaccctagacacaaacctgggaccaaaacccaactcgcccaacaaggagattcagactacgacaatcccaccctgctaaaaacggatgaatgccacgcaccactctaacacgctaatcccttaggttg

SEQ ID NO: 11118 - DNA, 310 bp, Glycine max
  Clone ID: jC-gmfl02220128d11a1
cgccatgtctcactacaagtttgttcttgcaattgagaacacttttactgagagctacgtgacagagaagttattctatgccttagactctggtgcagttcctatctattttggtgcaccaaatgtcatggattttgtccctccacattcaataatagatggtagaaaattcaactcattggaagagttggcttcgcacgtgaaggctgtagctaatgatccagtagcctatgcagaataccatgcatggagaaagctgtggtgtaccttggtaactatggaaaaactcgagctgtgagccttgacacgt

SEQ ID NO: 11119 - DNA, 358 bp, Glycine max
  Clone ID: jC-gmfl02220128d11d1
acgtccgtggccgccctttttttttttttttttttcaattttgaatgaagagtgatgtttgcatgaattgacatatcaagttgacatatgcacgtgtttttctcaaaaatcatacatcaacaaaaacacttcaactatagtgtaacctatgtggagatagcatcaaccactttctaccagaaaaggggggcaataaaaaataaaatatcacatgagctaagcctttcttggtcaaatgtacattagctcagagaaacaagcaatctctatacaggttgcaaacctaaattcaatgcgtcaatctctatcatgcagaactaccaatctagcaaaaaactcaacctagctttccgcattt

SEQ ID NO: 11120 - DNA, 300 bp, Glycine max
  Clone ID: jC-gmfl02220128d12a1
cgccatgtctcactacaagtttgttcttgcaattgagaacacttttactgagagctacgtgacagagaagttattctatgccttagactctggtgcagttcctatctattttggtgcaccaaatgtcattggattttgtccctccacattcaataatagatggtagaaaattcaactcattggaagagttggcttcgcacgtgaaggctgtagctaatgatccagtagcctatgcagaataccatgcatggagaaaggtgtggtgtactctggtaactatggaaaaactcgagctgtgag

SEQ ID NO: 11121 - DNA, 240 bp, Glycine max
  Clone ID: jC-gmfl02220128e01a1
gttcgaggctgcgtgcttcaaacatattgtttattccacgcatcgatctttctttattggctccggggaacctaaacctgcacctcctgatcatctgcgctttttcaactacaacttattagcggctggcgatacaatgcgcgaagaattttacaccgtccaagtgcttggcgcagccaaagcatatgtatcagcagcgcacgcttgtgaatgtcctgtaaattacaagccaaggaactc

SEQ ID NO: 11122 - DNA, 90 bp, Glycine max
  Clone ID: jC-gmfl02220128e01d1
attatacaataataactatcaatcatggtaaatttctttctcataaaatccactaccttatatatatatctgttaacatattcctcaatt

SEQ ID NO: 11123 - DNA, 192 bp, Glycine max
  Clone ID: jC-gmfl02220128e09a1
cacaacacgctgcttcaaaactattgcaaacccaccatcattgtggtatgggatcattgaaccataacctcacctcaaatcccctggcctatataactacacacattaacggctggcaaccgccgggcgaagaattgtaacgcaacaaatgttggcgtggccaacgtctagaccagcagcgaacggctgtca

SEQ ID NO: 11124 - DNA, 96 bp, Glycine max
  Clone ID: jC-gmfl02220128e09d1
atataaattattaaacaaaaataaatgggaaaaatattaaaaaacaaactcaaaaaatccattaaaataaaaataaacgtaagaaaaaaattaaaa

SEQ ID NO: 11125 - DNA, 249 bp, Glycine max
  Clone ID: jC-gmfl02220128e10a1
cacatatacagcttacataaaaaatattgcttaacccacccatcgatctttgtctattggatgcattgaacctaaaccagcacctcctaatctcctgagcatatataactacaacacatcagcggctggcaaaccgacgcacgaagaatctttcacccgacagatggttgacgtagccaatgcatcagtaccagcagcgaacggctgtcaatcaaatgtcaactatcagccaacaaactcacagtcttc

SEQ ID NO: 11126 - DNA, 170 bp, Glycine max
  Clone ID: jC-gmfl02220128e10d1
atataaataaatatacaaaaataaatggcaataatattaaaacacatcctcaaaaaaaacattaacaaaaaaagaaacctgagaaaaaaaaccaaaacacaaagaaacagatttagactctgacaaacccaccctgggaaaaacatatgaatgccacgcacaactataac

SEQ ID NO: 11127 - DNA, 350 bp, Glycine max
  Clone ID: jC-gmfl02220128e11a1
attcaacttaagagatcaatatggccaccaccactacccagcctccctctaatatctgttttttccttctgttgttgcttctagcacactttcatttgggcataagccaacttgagctgaattactactctaaaagctgcccaaaagctgaagagatcatcaaggaacaagtcacacaactatataacaagcatggaaacactgccgtttcgtgggtcagaaatctcttccacgattgcgtggttaagtcatgcgatgcatcattactgttagcgacggtgagcgatgtaatggtcgagcagacatcgataggaagttttgggatgagaaactttcaggtacgtaaacac

SEQ ID NO: 11128 - DNA, 323 bp, Glycine max
  unsure (1)..(323): unsure at all n locations
  Clone ID: jC-gmfl02220128e12a1
ctacccttctctcacaaatctatttccattccattccctcagagagagcaagatcacccttctatagagagaaaacacacacacacacacacaaaacaaaactcttaaagagggtgaagatttttttggaacagaataagagtatggcccttacaaaacaaatcttgggttcttcattgctagagaggtccatgtttgttccttcttcttccccttcatcacttctgaaccaaactcgggtcttagttcctttggagaacaagagagttgtgagggtgaagagagctgcanagtttcctgtggcagctataagtgaggatttg

SEQ ID NO: 11129 - DNA, 240 bp, Glycine max
  Clone ID: jC-gmfl02220128f01a1
gttataggctgcatacttcaaacatattgtttatttcaaccatcgatatttgtttattggatccggggaacctaaaccaacaactcctgatcttctgctcatatttaactacaacttattagcggctggcaatacgatgcgcgaagaattttacaccgtccaggtccttggcgtaaccaaagtatttgtacctgcagcgaacgcttgtgaatgtcatgtaaattacaagccaaggaactc

SEQ ID NO: 11130 - DNA, 174 bp, Glycine max
  Clone ID: jC-gmfl02220128f01d1
attattgtcatttatgttaaatttcttcttcttatatttctttattttttaaatttttgtgtttatattttttatatttctacattatcattttttatatttattttaatttccttctttgtttaaatatttttaattgcatatgttttttttttttctgtttttttcttaatt

SEQ ID NO: 11131 - DNA, 550 bp, Glycine max
  Clone ID: jC-gmfl02220128f09a1
gaagaaatagaaaaccatcaaccgcaaccgtgtaaatttctggaactttccaccatgatcgagatcctacacctgtagaacactaacttcaatacccgaatgatttaaacaccgtattccttcgacaccattatcatcaacaacctcaaattccaagcacaagttctctgagttgttttgtgagatagcacatagcatagcaaggaaggagtattacaaccgaaaccctgaagaaaaaaagagtagaggaagaaaaaacacctgcaccaccaacgatgggtgtggattactacaagatcttgcaggttgataggagcgccaaagacgacgacttgaagaaggcttataggaaacttgctatgaaatggcaccctgataagaaccccaacaacaagaaagaagctgaagctaagtttaagcagatttccgaagcatacgagggtacttagtgatccccaaaagagagcaatctatgatcaatatggagaagagggtctgaagggtcaggttcctcctcctgatgctggtggtgctggaactggaactactt

SEQ ID NO: 11132 - DNA, 267 bp, Glycine max
  Clone ID: jC-gmfl02220128f09d1
gcacattattaactgataaaccacacaaaaataatcaaatcaaaattttttcgcagggggaatcaaccaaaatatattggtatatcttacatctttacaaaaaaaaaaaaaagtagttcccaggggggaatctgacaaatactatactatctcacgcttaggcatttaagagttttctgattcctgctttttgctcttcagtgagcctagttgggaacttgatgttaaactttatcctcaaattccccttctttgatggatcttttg

SEQ ID NO: 11133 - DNA, 503 bp, Glycine max
  Clone ID: jC-gmfl02220128f10a1
ctcgagccgctcgagccgattcggctcgaggattgctattgcccattggtgggtcagcgctcctctctctctctctctctctctcctcgaactccgacgcacccttccatctctccctttcactccaacccaaacctgaatctctgatcccttctccctctcctttctctttcctctcctccctttgctgtactacatcccagccacatttccttttcactccgattttcacccccaattttcaccagggaatccaccgttaattttcgcttaactgttgaactaggtttttgtttattgttcttgttgggtcaatcgagaatgcctcgggggtgattccgattcgtgtcttagatctcgttactgttgcgtccgtggattgaatttggggggagtttatcgatcccttagcggtgtttatacaatgtggttggagaagtatttatgagttcggatgagtccttgcttttggaatcgtcggattctcgtccagtgattcatca

SEQ ID NO: 11134 - DNA, 242 bp, Glycine max
  Clone ID: jC-gmfl02220128f10d1
ataaaaacaaaagttcaaattttttcttctatttttggtttttcaattcaaatattagggggatttgcaagaaggaagagatgaaagacgcagggaccgtgaaaattacattttctttcctatcatattgtcgtcctttgagacattctccttttaaaaggacgtttttcaagcctgatttttacataactatagtacacttagttacactctactcttccacactttttctataaaccggg

SEQ ID NO: 11135 - DNA, 348 bp, Glycine max
  Clone ID: jC-gmfl02220128f11a1
ctggtcattaatgcatcaaaagatagggtacccaatatcaaattcaatgtagctaaagtgttgcagtctctcatcccaattgttgatcagtctgttgttgagagtaccattcgtccctgtttggttgagctcagtgaggatccagatgttgatgttaggtttttcgcctcacaagcactacaatcttgtgatcaagtcaagatgtctagctagatcagtttgcatgtggtctttagttttttttttttcttataagatttacattttcttctgtaattgacatgacgccaacttgcccaatcctttggatcacattaattgttgtgatcctgctttgctttcatttta

SEQ ID NO: 11136 - DNA, 342 bp, Glycine max
  Clone ID: jC-gmfl02220128f12a1
cagaaaaggggttaagcgaggaagactgtgtagaaactagaaaccctagagagagagagagatgagaagaactcttctgagaaatgctactctctacactcgcaaccttctccatcactcggcccctgcattcgacgcttcaactcgtccccaactcagactcttctgctccaatgaaacccccccaccggttccccaaatcgacgacgttgaccacaaagagctgaaagcgcagatcgagagctacttcaagggcgacgagcaggtgcttccgtcgatcatggagacgattctgaagcggaagctgtcgggaaagcacgaagacaccgacgaccagctcat

SEQ ID NO: 11137 - DNA, 358 bp, Glycine max
  Clone ID: jC-gmfl02220128g01a1
cttatacgcagaacacttcaaacatattccttaaccgaattaatattatccatttatgggctagagcgaaactctacctctatctatctctcctttaataccacacaaatttaacacactttatttcttctacaccactatcatgaacatcttataacttcaagcacaagttctctgacaatgtctttcatatagcacacaacatatcagggacatatgattaccaccccgaccctgactcacaattttacccaggaagaacaaccacctgttccaccaacctatcgacctgagtactacaatatcttgcctggggattgaatcgccaaatactacgacttgaaaaacgcttatacca

SEQ ID NO: 11138 - DNA, 99 bp, Glycine max
  Clone ID: jC-gmfl02220128g01d1
aaacaccaatagaaaaacacaaacacctggcaaaaaagggaaagcgcaagctcaaagaaaccattaccataaagagggacgtgggaaaaaggcccagaa

SEQ ID NO: 11139 - DNA, 250 bp, Glycine max
  Clone ID: jC-gmfl02220128g02a1
gttatacactgcatacattaaagagattgtaaattccaagcatcgatatatttctattggaaacatggatgctaaaccatgaagaacagatcttcctgagatattgagatactaggctattatgcgatagaatgcgtttgatataaacatcttccaccgtgctaatggttggcttggcacaagcattaacatcatcagaggaggcgtgtacatcatctgtaatttggcagccaacaaattcatatagttc

SEQ ID NO: 11140 - DNA, 132 bp, Glycine max
  Clone ID: jC-gmfl02220128g02d1
acaaaaataactgggattaatgttaaaggacatcctcttagaaaccattaccataaagagtaccgtgtcaaaaacacttaaactatagtgtaaccatatgtggagatagcatcaaccactttctaccataaa

SEQ ID NO: 11141 - DNA, 376 bp, Glycine max
  Clone ID: jC-gmfl02220128g03a1
ggtcgagatagaacatataaatcatcttacctttacaaatacattctttgaacttatggggtgagttgaattataccttcaaaaactaaccattcccttcactactgctaaaaccaaatcttgtctacacatacctctatgatcaacatcgtgcaagatcatcagccttcctatgatgaggtttgggagagatcacacagcatatcgaggaggtgagattacatcgcgtgccctgattaacaaaagatatgatgatgagaagcttacagggccacaaaccatgggtggggatcataacacgatgttgcgagctgaatatatctccccagacgacaactcgtaaaaagcctgtactaaactctatataaactgggac

SEQ ID NO: 11142 - DNA, 93 bp, Glycine max
  Clone ID: jC-gmfl02220128g03d1
atatatataaaaatataaaaattaatgggaaaaatattaaaccacaatctcaaaaaaaccatttttctcaaggggaatcaaccaaaatatatt

SEQ ID NO: 11143 - DNA, 579 bp, Glycine max
  Clone ID: jC-gmfl02220128g04a1
tttttatagtgtaattgtgaactgtactgagttggacataccgaggacattaaacagttataatatttgatatctacaaaattggaaatctggattaaacttgaacttgagatcatggtgagggctatgttatcgacttgagaataataatgcataaaacactgagttacggcttgcttttccctactatccattatagttatgctgtatttaaatgtcactgtaaaaatatgatgattttccttggtcgggtctttttcaagaactgactatttttttgttggaagaaatgaacatggcatttccaggattacagagctatggcattataatgaccacagcacgttagtcaaagatgaatcccatggttgataatgcttgatatttaaattcaatatctacttgatatttgcttatgaatcaccttctcttttgtatatgctcaagtgaacaagaatggacagttcgatttcttttattatgccattagtcttcttctgatgagctccttgagccaatcaacgggatacatactggtatagctggatgatcgatattgatgattctcaagtatttgat

SEQ ID NO: 11144 - DNA, 154 bp, Glycine max
  Clone ID: jC-gmfl02220128g04d1
gtggcaatgataaacaatgaaatctaatgcaaactgaaaacggtaacaacgctgtcacattatagttgaggaggctgtgtataatttcctgattttcctcaaattacagacccaattagggaattaagcccaaacacactttagactagaataa

SEQ ID NO: 11145 - DNA, 251 bp, Glycine max
  Clone ID: jC-gmfl02220128g05a1
cacagacacagcataattcatacacatggtttatgccaaccatcgatatgtggttataggttccactgaagctaaaccaataacccctaatctcgaagggagagaaaggggccaactattagcggctgacaaggcacccgggccatgagattgttcacccaactagttgctggcatatccaaggacttaataccctcagagaatggctttcagacagctgacgactactaagataagaactttcatgcatc

SEQ ID NO: 11146 - DNA, 147 bp, Glycine max
  Clone ID: jC-gmfl02220128g05d1
catcattgatagttagaccaggattctattgaaagaaattacagacactcactcacgagtctattctcatatagatgggcgtgcgtcatataacccaaactagtaagtatagatcttatacagcatggttccctatctaagttaaag

SEQ ID NO: 11147 - DNA, 258 bp, Glycine max
  Clone ID: jC-gmfl02220128g06a1
cacatacacagcatgctttaggcctataggcaaatccacccatggatatttgtgtataggatccattcaacctaagccagcacctgcttattaccagagcctagataactaccacccatcaggggactccgggctgctgtgcacataatctttcaccggacacgttcctggcataagcaatgcagtacaaccacccctgaacggcacactatcggaggtaaattacacggcatctagctctatgcttccaaggtcatg

SEQ ID NO: 11148 - DNA, 154 bp, Glycine max
  Clone ID: jC-gmfl02220128g06d1
atataaaaataataataccggaacaattggcaaaaaagtaaatgcacatagtcaaagaacacaatgcaaaaaactgtgctcagtgaaaaaaacccaacatggtacagcaagggtttcaaactctctggaacccaccctgcggaaaacagatgaa

SEQ ID NO: 11149 - DNA, 145 bp, Glycine max
  Clone ID: jC-gmfl02220128g07a1
cacatctacatcttacttattttacaatcataattgcaactcacgatattagggtattggttcctttgaaccataaacaacacctatcaacctttactacagtattaactattacatatctaatttttgcaaaaacattgaaaaa

SEQ ID NO: 11150 - DNA, 125 bp, Glycine max
  Clone ID: jC-gmfl02220128g07d1
gaacacttataatgaaagcggggtaaccgagaaaacaatctatgccttacactctggagcctttcctatttattatggcgctacaaacagatacggattttggccccttccatttaagtaatggc

SEQ ID NO: 11151 - DNA, 541 bp, Glycine max
  Clone ID: jC-gmfl02220128g08a1
aagaaagataagccagaagaaattaaacattccatatcacaaaggtcacccaatttgagctattttagtcccaggatctatttagacaaaagaataagcagtgtttcaaacaaagtgaaccagactccaaaagtagctcaagaatggaagtcacaaagaaagcctcttcaatgtcatatcaacttggtccatgagcaagatatgatggagttaaaaaagaacagagtggaaaaggtagcatccttcccatcactaatgaactcaggagggaaccataaatcagtgactgtttctgctgcaaaaagcattgatgatgtgcctatttgtggacagatttcaaataagtgcactaaaacttctcagcatactagtagagaacaaaagaggagctgggacatggttgtagacactgcttctcttctgacaaggagtcaaggaaagctttgcagcttttacaaggccttcaggagactcgtttaatcattccaagtttggtcataagggaacttcgcagcatgaagcaaaaatttagaattttcag

SEQ ID NO: 11152 - DNA, 332 bp, Glycine max
  Clone ID: jC-gmfl02220128g08d1
gaaaactgaaaaatgagaatattattattacagttaagaaactaatcatggaaagtaatgagcttcaaaccagcttttgatggcaatccacaatatttctcccttaaaactaaatcatcttggcaagaccaagtcagtcctcgaggagagctctttggccacatgaacctctcagagaaggggttcactaaactctgccgaaattgttgcactgtctcacatagcaacccctttgccatggattttattttcaatgagacatcactactaataaggacaagttgtacaacattatacttttttccatattgaagggcacagtcaacgatgtg

SEQ ID NO: 11153 - DNA, 394 bp, Glycine max
  Clone ID: jC-gmfl02220128g09a1
cggctcgagctcagagggcattcagcttctgaagttgaattagtgaatggagaaaaggggaactctgcttatttatctgcattaaagacagcacctatgccagctttgcctccacctgaaacaaataaaccaatggagaaggaaagtcgtaatgaaaataaagtcacccctaagaatttcttttcaagcgtgagagatattgaattgctctttattaaagcttcagaatctggccaagaggttccaaagatgcttgaagcaaacaaagttcactttcgtccaatattccacggaaaagaaaacggttctatggtgtcctcgtttttgaaggtatgcttctcatgtggggaggacccaagccaagttccagaaggcaatttgagtcatttcaact

SEQ ID NO: 11154 - DNA, 245 bp, Glycine max
  Clone ID: jC-gmfl02220128g09d1
caaacaatattattaatcaataattatatacacataacgtaaatgaaaaaatggcacaagcaaagaaaatcaaggaggggagtataagtcctggtacaaaaccctttattagcaaaaaaattgcacccaaatttcttcaccatcagaacctagtacttacagcttttactgagtccttaaccatgcactcatagtctctctagtgcaatctatcagctcccttctattcttagaactcaaatgaa

SEQ ID NO: 11155 - DNA, 551 bp, Glycine max
  Clone ID: jC-gmfl02220128g10a1
atcgaccatatcactttcgtcaccttcacagatacattcgttgcaatcatccatctcacttccacaaattcctccaaattctaaccaaacccttcactactccaaattccaaaacttcttcacactccttcttttccctcttctgttgcccgatcttctgcctccaagattttggtatttgggattgatcacctggagttggaaatggttaaaagttatggagtgttctgatttgcaaaagatatcatgttgcggtgcttagagggacttaagcctttatttgcttccatattacgatgttgtgacctggatatatataaccagccaagaggccttgaagatcctgaacttcttgctagagagactgtgttcagtgtaagcgaaatagaagcactttacgagctcttcaaaaagattagcagtgctgtcatcgacgatgggttgattaacaaggaagagtttcagttggcattgttcaagacaaataaaaaagaaagtctgtttgctgatcgggtatttgatttatttgacacaaagcacaatgggatact

SEQ ID NO: 11156 - DNA, 267 bp, Glycine max
  Clone ID: jC-gmfl02220128g10d1
acatgcggtagacaagttttgaccataaagaatttcaaaatattctgaggtcatgacatactcataatttaaaacaaactctacacaaccttggaatcttgcttttgaaatttcgaaaaatgggaaccaaatgtgtctagaagtttgaagaaaaaatgaaagtaaaatcccagcaaaagaatccacaaaacaaaatacattattcaaagatataacaaatgtaaggtaaaagcaaggctgtctgccatgcccttttttgtacaaaag

SEQ ID NO: 11157 - DNA, 352 bp, Glycine max
  Clone ID: jC-gmfl02220128g11a1
ttgagaagaggatgtggagggacaaaatgcgtcacaagcgattgaaagaacaaaccaagtccaaggaagggactgatgcaacaaagcaaaggcaatcccaagagcaggcaaggaggaaaaagatgtcaagagctcaagatggaatactgaagtacatgctgaaaatgatggaggtttgcaaggcacaagggtttgtttatgggataattcctgagaaggggaagccagtgactggagcatcagacaatcttcgtgaatggtggaaggacaaggtcaggttcgatcgaaatggtcctgctgccatagtgaagtatcaagctgataatgcaatccctggaaagaatgatggatg

SEQ ID NO: 11158 - DNA, 345 bp, Glycine max
  Clone ID: jC-gmfl02220128g12a1
gttctagatcgcgatctagaactagaacggagtttggttttataggaaccctcctattcatccatttatcgatccacgtccatccccatctttcttctcctattctctctgttttcttttcttcttctaaaaagtgagagaagaaaaaagggaattgaaggaagaagattgagaaaaaagggggaatgcccagataattaattcggtgaaatttcggattttcgtaagtgggtgtttctcttttcgtgtttttaccttcagtggtggaaggaagggggtttgggttggtgagttgatggacttgatgagcgttgagctgtgtgtcatccctggacggcatggatg

SEQ ID NO: 11159 - DNA, 492 bp, Glycine max
  Clone ID: jC-gmfl02220128h01a1
gggttttagggcattttttcgcaaccagaaaacccccaattctctttccaaggcttcgtcaattctccttccaaagcttccaaatgcttcgctccaatggctttaggctccttcgatcgctgcccgaaaaactcctccgccacgccaacgaacccatatatgatggagtgtgccaaaggggttataggacattgagttctggtctttgtaatccatccagagttattgggaatttttctccaaatgttggaaatggtgttaatttgaagaacttgttgctttttggagccgcggatacatattgggggacatctagatccgttcatgggtcagcatcattggcaagggactattacgaagtgcttggtgtgagtaagaatgctagttcttctgaaataaagaaagcatactatgggcttgcaaagaagctccatccagacacaaacaaagatgatcctaaggctgaaagaaagttcaagagtttcatggcta

SEQ ID NO: 11160 - DNA, 252 bp, Glycine max
  Clone ID: jC-gmfl02220128h01d1
gatcaatagacagatgaatatatatatagtttcatgttgacactatgcagaaattatattctagtttacccatggtccaatgataaaggctactccttcatgggaccttgcttttgagatttggaatcacattgcgtgacttgcgccctttcttatggaataagggaactatatacagcactgactagaattctagcccagaggagcatgaagggattgccttctaaggtcttacaaaaaaaattttggatt

SEQ ID NO: 11161 - DNA, 404 bp, Glycine max
  Clone ID: jC-gmfl02220128h02a1
ccagctaccatgtctctgtttctgtcttagagcctgcttgccagaagttataatggcccatgatactgttctattacatatgaataaaagaacgacgggctccctgacaagctctgcgaccacatctcctatgctgagctccatgcatgcttatagctcgaccctgacatggagggcgcctgctaaacctgtaccacaaccaacatgtggatggttttaggagagatcacaacccagggcaacgtgtactatgataagattgcgacgtgcacatgacggaacattgtctttgcttctgatgatggatggccttgactctgacaactactggggactggacagcattgatcaaccgagcgctgatattgctcaaggtgggcacggacacctcacatagaggcctg

SEQ ID NO: 11162 - DNA, 237 bp, Glycine max
  Clone ID: jC-gmfl02220128h02d1
gcagcgaattgggtccctcgggtcgacgagctcggccgcccttttttttttttttttttttaaagggatagttaactctaccttagtgaaaagattgcggatcgacagattgcaaccaccacatatctctatccatgaagttcaaagcacactcgtatagggttcaacttaaaacccaatccatgaccagagagcacccaccgctttccaccaaaaaaggggggaaacggatgaaca

SEQ ID NO: 11163 - DNA, 435 bp, Glycine max
  Clone ID: jC-gmfl02220128h03a1
ccttctcaactcccacctcgactccgtgcccgccgagcccgataaatggctgcacaatgccttctgcgaccaccgcaccgcctacggcgccatcttcggccgcggcgcccaggacgacaaatgtatcgctattcagtacctggaagccatccgcaacctcaaatgccaagccttcactccacaccgcacaattcacatctccctcgttcccgacgaggaaatcggcggcatcgacggcgccgccaagttcgtggagtccgaggaattcaacggactcaacgttggattctcgctcgacgaggggcaggcctcgccgggcgatgaattgagggttttctactccgataggggtccgcggaacgtgaagattagggctaaggggaggcccggtcatgggtcgaggatgtatgatgggagtgcggaggagaatttgat

SEQ ID NO: 11164 - DNA, 244 bp, Glycine max
  Clone ID: jC-gmfl02220128h03d1
gaatccttggcccatgttaggcaaccatcgatgatttaacacaaaggaccaaattaacttcacagaaaataattcctgatcattacaataactaagggagcattagtcctggaacaaaccgtaccattcccagtccccatcatgagcgaattggaacaacagaggactttatttcttacttttttcatggtgtccgataacaacgttgctatttatgcttttactccacttattatttggaagt

SEQ ID NO: 11165 - DNA, 287 bp, Glycine max
  Clone ID: jC-gmfl02220128h04a1
caagctaccatctctctctctctttcttagagcctccttgccagaagttaaaatggccgaagaaactgtcctattcacatctgaatcagcgaacgaggggcaccctgacaagctctgcgaccagatctccgatgctggagctcgatgcatgcttggagctggaccctgacagcaaggttgcctgtgaaacctgcaccaagaccaacatggggatggttttcaggagagatcacaaccaaggccaacgtggactatgagaagattgtgcgtgacacatgcacgaacat

SEQ ID NO: 11166 - DNA, 213 bp, Glycine max
  Clone ID: jC-gmfl02220128h04d1
cttagtaaaattggttgctctctatgatctgagattattacctatttctagccttaaagttgaaagaacattctttgtgggttcatcatataagaaattctacgggtctgaaagaacacatactagctcccaaaataaagggggaacttttttaacaacttcctctaggggaatacctaattgcgtttcagggaagggaacctcgggaaaatt

SEQ ID NO: 11167 - DNA, 388 bp, Glycine max
  unsure (1)..(388): unsure at all n locations
  Clone ID: jC-gmfl02220128h05a1
cgcttctctctctttccttcccagagcttcctgtggctgtggaatcatcgtatcttcttacgtccgaagcaagcctttgtcttgtgtgtgttcttcccccttccgtcagacttctaggaaaatcagatgcatcgtgggtaaatnttcccttacacccaagaatgaagtcaaggacttgacaggttcaagtttaaccagttacaaacatagcagtcttctggaccccatagatgtttcttcatcttcagatgatgaaaatgaccttcctaatgatgatgtgtctaatcaattagtcctttatgatcctgtggcgaatggaaacaatgcaattgaacttgcacctgatcctctccagtgtgaacatccattgcttccaagaagcaaacct

SEQ ID NO: 11168 - DNA, 274 bp, Glycine max
  Clone ID: jC-gmfl02220128h05d1
gctgaatgaccattttttcatattacaatattacttgattctaacatgtttctcttgggacaggcacccttttttgaacaaaagattcttccaggatgcaaaatacatttttattaagaataccacgagaatgacctcctcatgaggacaagtgaaccgcctttacactgcttttccccggaagctcattacacctaaaatgccctatttaaaaggataaacgaactatttctatatttgacagtaataagcaactgactgacttcacaatgca

SEQ ID NO: 11169 - DNA, 484 bp, Glycine max
  unsure (1)..(484): unsure at all n locations
  Clone ID: jC-gmfl02220128h06a1
gaaagacaaaggaaggcacattcaaaggatctatgcaatctctttgtttgcggccatatgcttcatctgggcttacagattgagccacatacccgcatatggcaaatgggcttggcttggtttgtttgctagagaactctggtccggtttctattgtctatttggtcaagccctccgctggaacatgctgttcagaaaaaccttcatcaatagactctctgaaagatatgagaatagcttgccgagagtggacatgttatgtgttcactgtagacccaatcattgagccacccatgatggtgattaatacagtgttatctgtgatggcttatgactatccagcagagaagctcacagtgtatctctcggatgatgcaggctcagacataactttttatgctcttttagaggcttctacctttgtcaagcattgngtgcccttctgcaagagaattaaggtggtatccgagtcacctgctgctta

SEQ ID NO: 11170 - DNA, 334 bp, Glycine max
  Clone ID: jC-gmfl02220128h06d1
gcactaaaattatgtactttccaaaaaagacacacaatcttacaaattatactcaaaagtctatctacaaatcaaatcgacaggtatatataatcttagcgttgtactccaaagtctatgtacaaatgagatcaaagggaatcaggggtaaggcaaaagaaagaatttaatctttctggatgaacattattctagtccatcaatattatctaactcaccttcacagttgctgatgtagcattcccataccaatcattcttaccgggggtctcaaaaacttggggaaactgcacaaaagccatttcctggcctggctctttatcccatgaaaaac

SEQ ID NO: 11171 - DNA, 429 bp, Glycine max
  Clone ID: jC-gmfl02220128h07a1
aaaaaacgaaccgggttttctttctttgtttctctctctctctctctctatttctcacataaaccgcctacatgcatgcggttcataaatcagcaaagccttgaaaagttgctgtgtgtgttcgaagaagacaactttttcctttattatttatttttctcactgagcttcagttaaagtagctagctagctagagggaattctgctgttttccatggctaaagcaggaaagtttttgttttgatctcaatcaagctcctgttatatacgagagagagagagagatgctgtgtttccaaagtaagagaaatccaattgaaggcctcataaagtttgatcaagagggatagcaatagcatcatatctatccatcacaccatgaataagatcagcaacttgagttgtgttaggagctctgatctcatagat

SEQ ID NO: 11172 - DNA, 360 bp, Glycine max
  Clone ID: jC-gmfl02220128h07d1
gagaaaaatcaatggttcaaattaattattcagtaaaattgaaaaatgctttgtcgtatgaaaattatctgaattgttttgtgtacaagctagattctcaaacgatatacttaaattgttttaatgtaaaaatctcacctcatcttatcataatctatagaataccaagctaattcagtatgtggcacgggcaacaaggtggtcctaagtttgctcaatctcattggtatatttcttgtgtaaaaaataggaaaagtgaactaatacaaacatcttaaaataattaaataatatgaatgtataataagagagaatgatactttcatcatataagtgatgatttttatgccacaagatgca

SEQ ID NO: 11173 - DNA, 425 bp, Glycine max
  Clone ID: jC-gmfl02220128h08a1
gaagatgtcaattttgttgagaaatcttttgagggtggtgaccgatgcaatcctgctgaagactcaccttgctggaagggagcttctgctgctcgcttttctcattttgaaccttctgcagctctgtctcaagaatatgtacacaaaaaagaaagtagctttggttctgtcattaaggagcctcagaattatctgcttgatacagaaaacaatatgaaaaaatcatgtggaaattcaaatggctttcaaatgcatactggaattgtctatcaggacagaagttcagcaggttctccaaggagattttcagtaacaaagtttgcacctgaatattgcaagtcaggtagtgctctgaatgatggtccttttcaatctaagcctagctgtgaatttggacttcacaatatgtggatattaccaaaatg

SEQ ID NO: 11174 - DNA, 258 bp, Glycine max
  Clone ID: jC-gmfl02220128h08d1
ctgataaagataataaatctaacccataagcatttattcagagtcatatgctcaaaacataaacatttattgaaccatataaccaaactcttaaaaggtttcaaaatcgttctacaagcttttctccacatgttcccagtctgacgcgaagccatcggagtagtaagtaggaggctgaaactcacaggttccgctaggctgagtttcttgattgtcctccgaatccagatgaaactcctttgggattgacttgtccac

SEQ ID NO: 11175 - DNA, 398 bp, Glycine max
  Clone ID: jC-gmfl02220128h09a1
gtgctttgaaacaaagctgcgcagtggcaataacgtgtatttggtctctcatccaccttctatggcataaaaagttatacagaaaacatcatactattacttgtcatatacgactgcacctccaagaagatttagatagttagttgtcaatataacttgccttgttattctgttctgtgcttacattcaggactagtaaataatcatttaattaaattattcaaaacagaactattttgttgaatagttcataagagaaggcagcccgatcttggttcactcttacgcccgtaatttttctgttggaagcaatatttcagacaccttgatgtcatcatgccatgacttgagatcgattcaacaaaacaataatgaaggagaaatataaattggcactc

SEQ ID NO: 11176 - DNA, 163 bp, Glycine max
  Clone ID: jC-gmfl02220128h09d1
gagggccaatttatatttctccttcattattggtttgttgaatcgatctcaagtcatggcatgatgacctcaagggggccgaaaaattggttccaacagaaaaattacgggcgtaagagtgaacccaaaacgggctgccttctcttatgaaccttttaacaaa

SEQ ID NO: 11177 - DNA, 467 bp, Glycine max
  unsure (1)..(467): unsure at all n locations
  Clone ID: jC-gmfl02220128h10a1
gtgctttgaaacaaagctgcgcagtggcaataacgtgtatttggtctctcatccaccttctatggcataaaaagttatacagaaaacatcatactattacttgtcatatacgactgcacctccaagaagatttagatagttagttgtcaatataacttgccttgttattctgttctgtgcttacattcaggactagtaaataatcatttaattaaattattcaaaacagaactattttgttgaatagttcataagagaaggcagcccgatcttggttcactcttacgcccgtaatttttctgttggaagcaatatttcagacaccttgatgtcatcatgccatgacttgagatcgattcaacaaaacaataatgaaggagaaatataaattggcactcnnaaaaaagaaaagcggggaaaaatggatggaaaacgaaaaagaaaaaaaaaaagggcggccgccgact

SEQ ID NO: 11178 - DNA, 203 bp, Glycine max
  Clone ID: jC-gmfl02220128h10d1
gagggccaatttatatttctccttcattattgctttgttgaatcgatcccaagtcatggcatgacgacctcaagggggctggaaatattgcttccaacagaaaaattacgggcgtaagagtgaaccaaaaacgggctgccttcttttatgaaccttttaacaaaatagttctggtttgaataatttaattaaatggttattta

SEQ ID NO: 11179 - DNA, 350 bp, Glycine max
  Clone ID: jC-gmfl02220128h11a1
taactcaactggatatggtgatgagcttttatgggcagctagttggctctatcatgctacgggtgatgattcttaccttcagtttgtgactggccaagatggagaagactatgctcaatggggaagcccaacctggttcagttgggataacaagcttgctggaactcaggttttgttatctagattaagcttttttaaggcaaaggacatttcgaattcatatagctctgggctccatagttacaggaaaactgctgaggctgtaatgtgtggtcttcttccggattctccaacagccacaaaaagcagaacagatgatggtcttatatgggtgagccaatggaactctt

SEQ ID NO: 11180 - DNA, 328 bp, Glycine max
  Clone ID: jC-gmfl02220128h12a1
attttacactttaaaaatgttttctggcctaatgtagaattcttaggagtagttgcagagacatcttatggatgcagctactttcttaatctccacaaggctatgggtcgtcctgtccttgtttacatgcctgctgggcagctggccaaagacattgagaaaatgtctgatgaagcagctgctaactttgctttcatgcagctcaaaaagatccttccagatgcttcttcaccgattcagtatcttgtgtctcgatggggtacagatattaatacactaggttcctatagctatgatgcagttgggaaaccacatgatctgtatgaga

SEQ ID NO: 11181 - DNA, 572 bp, Glycine max
  unsure (1)..(572): unsure at all n locations
  Clone ID: jC-gmfl02220130a01d1
aaaataaccaaaagggtaaaatggtaattgtgtatatttttctattgaaatttaaaatccggtccgccaaagcaaacatgcaaggcaatgttattttcggggggtggtgtgttctaaaaagtagaaacccgccattactagggcaccatcccccaacaagccaaaggcaacactgctccctactttatccataaaaagtctagagaaaatatgcaatagatcaaacagcaataagcttcccactaatttgtaaaatgctaaatctggtacttgctctgttctatcattattaagatgagggatgcactcctgctttaatctttatcttcgtccatgtcatctgcaacagacctgctcgtttgtgcagttaaatcagagttctttgaactagccatgtcatcatcatgatccgaatcaaaatcttcaccactccatatacgacgttttggccttacatccatgtcctcctcttcctcttctggaacttcgatgaccgatggtgttgnttgaaaaggtgcactgggtgcatggngaaagcctgaaagttgttcccagtatgtattccgaatttt

SEQ ID NO: 11182 - DNA, 412 bp, Glycine max
  Clone ID: jC-gmfl02220130a03a1
gatatttacgttcagagctatgattagggtggactatttgttgtttttagcttgataactgctgatatcactatgcattgcacactattgtgactaggggtcacctagatcatcattggtagcgtgagctgtgctgctagagagatgccctccactgactttgacagaagagaattgatgacttatcaaaatgtgatagaggagaagcctgcctatgcaaaggtaccaggccataaggagcatgctggactcaatggatatgctgcaactgcaataactatggctaatccggttccaaagccgatctctaaaattcaacctatttgaatcactggcaataagactattacaaaacgaggtcctgacaggaaacgtatttcacagtgagaagcagatgctcatccgagcccta

SEQ ID NO: 11183 - DNA, 297 bp, Glycine max
  Clone ID: jC-gmfl02220130a03d1
aaaaggggagtcgctggcaccgtccattacattagtatgatcgagccacaaacggtcacgccgcaaacttctttgtacatatggcatgaactacatatcatacactacagtgcacgagaggagcccaaaattcatgtgcatacacgagcgacatgttcttataaggggatgataatatggaaccgagtggtgtgtagaatgagaaccagcttgatactataatggaggtgggattggctggctatttgacagtggagatagcattggcctcatggagggggtgtgatcaggctgctg

SEQ ID NO: 11184 - DNA, 542 bp, Glycine max
  Clone ID: jC-gmfl02220130a04a1
gtatctttgcatgcccgccaccaccgtaggcagcctgacgttcatgtcccgtcgaagctcggaatcgtcggctctctaaccctcccatggaacacccttacaagccgctcgcttatcgcgctctcgggcccctcttcccgcgctcctctctgcacaccactgacctcacatacccggccgggtctgcaattcctgaccctgcttgttccgaatcgacaggcctgcagaggcattacgacatagacgccagctgggactaccaccacaacctcatcaagaactactgggacgagctcgaccgcgccaccgactactacgccgctcacctcatcgacagctacggccgctacgatcatgcttacaaggccaggctatacagctgcgccaacgttactgaaaaaaactctgacgcgacgcactatcaacgctatcgagagcatacctgctagatggaaacgctaagccgactacgccaccgagacatcgtcaaaatcctcagtaactgggccttacgccgtgatcgcgtactggactacgagtcc

SEQ ID NO: 11185 - DNA, 483 bp, Glycine max
  Clone ID: jC-gmfl02220130a05a1
gggaatgtgaaacttattaccagcagcaaaatccacattatgatcagaatcattatccctagctttattctacaagcattagaaacatgaaacttctcagtcaactagtttatcaatgtttacaaaggatcggattcggattcggactccgtctcgggaaaattcgagaagatttttcgaatttttcaccactgctttgtgcgcagcgatcggtttcggattcgggctccgattttcgcctctcgcgaagagcttgggttcatttgcactaatggaggggaaggaggtttgcgcgtcggagtcggcggttgatggaagccgcgacgtttggagttcggagccctcgctcgcttcctccgcggatcacctcgttgtaatggtgaacggaattctcggacgtgagacggattggaaatatgctgcggagaaatttgtcaaggagttgccagataaagtgtttggtcactgtaaggctatttgaaa

SEQ ID NO: 11186 - DNA, 314 bp, Glycine max
  Clone ID: jC-gmfl02220130a05d1
ctccttattcggcgcggcttctttatcttctttttgtcttgtcgttgttatttctgtggatttcttctgtttctgccggggggaaaaacactttttggccccccgaggcctacgagcctgcgaagcgtgtgtgagcctattgaaggaagccaccgccgcacaaagattccctcatgctgctatttgccggggggagctgaacaatattgccccacactctcttgtaaatcgtacagcggaggttcaacccccgggggcaacgatcaagtcccccccctaaatatagatggcccaccccagccggcacacccgct

SEQ ID NO: 11187 - DNA, 608 bp, Glycine max
  unsure (1)..(608): unsure at all n locations
  Clone ID: jC-gmfl02220130a06a1
caacaacaactatctctcatccttcttctttctgtatccgtaacacttgcaacacacatggctacaatcaccaacactttcatattcaaaccccccatctctcatcacccaaagcagcttgtctattcccaccgatcatactctacgcagtctcaccaaatataaaaccccctccggagcgaattctcggcggctggttccgaaagccacggcggctcccggggccaagaagacagaaaagccgcacgagagagtccagcgagtccacagcgtggaggagttcgagtcggcgctcgaatccgccaaagacaggcttgtggcggtggaatacgctgccagcgacagcgaggagagcagccagatataccctttcatggtggagctgagccgcagctgcaacgacgtggagttcatcctggtgatgggcgacgagtcggagaagacgaaggagctcctgaagcgggagaaggtggagaatgtgcctcacttcagcttctacaagagcaaggagacgatcacgaggaggaagggattggtcccgacatgctggtaggngatgtgctatactacggtgacaaccactcttgtgtggtgcagctgcacaacgt

SEQ ID NO: 11188 - DNA, 475 bp, Glycine max
  Clone ID: jC-gmfl02220130a06d1
tttttttttttttttttttttttttttttttttttttttttttttttttttttttttttgggttgtttttttttttttgggcccaaaaaaggggggtatttaacatccccctaaaaaaaaaaaaacccaccccccattaatttttttttttccaaagtttttaaaaaaaccctcccattgaccaattttctcccaacgttctaagacggggaaaagtttaattaacgggggggttattggaaaaacccccaattttttttcccccccccggggggggctttaaaagaaagcaggttccttttccaaaaaggttataaaaccgggggggggggggcccaccttaaaagaagagaaaatacaggtggggtgtaaaaaaattaatttgggcccccaaccccctggcccctggaaaattccccaagggggccccctttgccagaaaccggcgacccgcctttaatggtgccacctttgt

SEQ ID NO: 11189 - DNA, 452 bp, Glycine max
  Clone ID: jC-gmfl02220130a07a1
gaagattccaatcggagctcagaaaaaaaagaaacctaatcgccgatcgcgtcgaaagttcgttgttgttctgtgaaattgcctttttttttttttccgttctgtgataattctgtgaataataacaataattgtgtgtgttttgctcttttaggtaacgtagctgaggttcctttttttgttataattgttttgccgtttgaagatagtcgtttcggttactgctgcgttttgtgtttactggtgttttaattctgtgcaattttttaattctacatgtttgattgtttattttaggatgcgtgatttgtttgttttctatgacttctgagttctggagttgaaatgttgtctaacgagtttagaatccgttgcttttgtggtacgtagccgaacaattcaatgcctgaattccaaggttttgagttggtttagtgtaatttacgaaaacc

SEQ ID NO: 11190 - DNA, 415 bp, Glycine max
  Clone ID: jC-gmfl02220130a07d1
gggtaactagaaaacttataaatggggacccaaaaaaaaagaaacccttttacccaaattggtaagggaaaaaaaacccgaactttaacactggggggccctattccaactgggggggccccaacaaattaccctccccccctccaaattaacttttaagaaaaagaaccctttttttatccctttgaagggggctcatggggccctccaaattaaaattcccacgggcccattcccgttcccaaggggcacccatgctttttcacagcctttacgaatcacaacaactttaaaagaacctaagggagggcttttgacaaaaccaatgaataatcggggccccttgctcacccccatgtttggcggggattggaggatttgcaggtcggaccctcttgggccccaaaatgggact

SEQ ID NO: 11191 - DNA, 388 bp, Glycine max
  Clone ID: jC-gmfl02220130a08a1
gaagatgccagtccaaacttgcaaaataattaaagctacacgtcgatcacttaacaagaactatggtggactgtgaaattgcctttcaaacttgaaccgttatgagcaacaagtttgaatacaagcagcaattgggcgtgtgatgcactttcaggcacacagggctaatgttcctaaggctgaactaaaggagaagctgtttaagaagaatgaattgaaatactgttgtactgtgtgtgtcttgaaatttcaaacacattcaggaggttaataatacactggagatggtatgatttatgatgcagcatatgatggcaagatatatcatctcagatacagacttaaaatgaacggctaacgacaccaaagtaccgaagttatggaagca

SEQ ID NO: 11192 - DNA, 320 bp, Glycine max
  Clone ID: jC-gmfl02220130a08d1
ggggaagggtgttttccaaagaaaccaaccccaatgaaattaaaaccgcttttccaaatttacaaaggggaaaaaaaccccgaccttaaaggggggggggcctattcctccttgagtggaccaacaatttgcaatcccccactccaaattaccctttaaaaaaaaaaaggcgttgtcaaaccctttggggggggcccaccggggaccacaaaaataaatgtggggtggcacacccccggtaactatgagccccctttctttttcacccgcttttgcctccacacctccctaaaaggaactcaagggacggctcttgaaaa

SEQ ID NO: 11193 - DNA, 536 bp, Glycine max
  unsure (1)..(536): unsure at all n locations
  Clone ID: jC-gmfl02220130a09a1
ctatatgttcccctgcaagagctgccactgtttatattagttttaatctgtagcatgatgctgcttgccgagttattgcaagactaaaaaaggaacgagatgaagctaggtccttacttgcacaagcagagaggcagttccctggttctgcaccaaatgccataacagcaaatgcccccgtcctgagcaatgggaaaagagctgctgaggatgaggatctggctcctggtgcaaagaaaattcatcctggaatatcttctagcataatttctgagctaactgattgcaatgctgctctttcccagcagagaaagaagcgacagattcctccaactttggctcctgtcgaagctctagaggcatatacccagatatctagtcatccctttcacaaaacaaacaaacaaggcattatatctcttgatatcctttattctaaggacttaattgcaactggaggtattgatacaaatgctgntatttttgaccgaccatcangacagatattatctacactcagtggtcactctaaaagg

SEQ ID NO: 11194 - DNA, 413 bp, Glycine max
  Clone ID: jC-gmfl02220130a09d1
ggaaacaaaaggaattgtttttcataaaaagcgggctcctaaaaaaaggggggggttttccccccttttttttatgggtaaaaaaaccccccggacaagaatggctccccccatttaaattcccgatcgtaagttttggcccacaaaccagtttttccactaattaaacaatgggccgtccaaaattttttcggggccccaaaagctttgggggtttgacccccaaggcaaaatttggggctttttttccctaagggtgacccccctgaccaagggctcgttttgtttccgcccaaagcccgaaagaccatttgttccctcctacatccccaacttgccttggggggggccagaccttttattcaaagaacccccccccttctgtaactttcccaaccccaccatggattttt

SEQ ID NO: 11195 - DNA, 538 bp, Glycine max
  unsure (1)..(538): unsure at all n locations
  Clone ID: jC-gmfl02220130a10a1
ctatatgttcccctgcaagagctgccactgtttatattagccctaatctgtagcatgatgctgtttgccgagttattgcaagactaaaaaaggaacgagatgaagctaggtacttacttgcacaatcagagaggcagctacctgaaggtgcaccaaatgccataacagcaaatgccaccgtgctgagcaatgggaaaagagctgctgaggatgaggatctggatcctgatgcaaagacaattcatcctggaatatcttctagcataatatctgagctaactgattgcaatgctgctctatcccagcagacaaggacgcgacagattcctccaactacggatcctgtcgaagctctagaggcatatacccagatatctagctatccctttcacactgcatacgaacaaggcattatatatcttgatatcctttattctaatgactgaaatgcaactgaaggtattgatacaaatgctgtgatatatgaccgaccatcangacagatattatctacactcagtggtcactctaaaaggtg

SEQ ID NO: 11196 - DNA, 381 bp, Glycine max
  Clone ID: jC-gmfl02220130a10d1
gaaacaaaaggaaccgtttttccccataagcgggccactaaaaaaaggggggggctccccccccttttttttatatggaacaaaacaccccgaacaaaaatagcctcccccatttaatttccccataggaagttttggcccacaaaacaggtttccccctaattaaaccatgggggtcccaaaatttttttcgggccccaaaagccttgggggtttgatgaccaaggcaaaatttgcggctttctttccctaagggtggcccccctgaccaagggtttgaatggttgccccccaaaacccgaaagaccctttggtccattccccatacccaaattgcccttgggggggcccatctgtgttttcaaaaaacccccccccctt

SEQ ID NO: 11197 - DNA, 541 bp, Glycine max
  unsure (1)..(541): unsure at all n locations
  Clone ID: jC-gmfl02220130a11a1
aaaaatgtcaaggaaaaatgtaaatcactaattggtaaaaaaaatgtttgggagtatgtcttggatgcctggagaaatctggtagatagtccttcggaacaacagtttgatgaatgccttaagaagtttgaaattgtttgttcaccttggccaatgtgtgttgcctatgctaacgaaacatggataattccccacaaggaaaaatttgttacaacctagacanataaggtgatgcacttaggaaacacaacaacaaacagggttgaatatgctcattgggctttaaaaagagtattacagaatagccttggagacttatgtagtgtttgggatgccatggacaacacgatctcgctacagcacactgaaattaaagcatcctttgaaacaagtacacatgttgttagacatgtttttaaagttaccttatacaagaggcttcatggaatggtntcaaggtatgctttaaattacattgctgctgagtctgagtgtgtacattatgctggcaagaatccttcttgttgtggttgtgtcatga

SEQ ID NO: 11198 - DNA, 500 bp, Glycine max
  Clone ID: jC-gmfl02220130a11d1
agaagctacatgttcagtcttcatttatgtcaacatagtctgttttcaacatcataaagcttctgtactactggattctactaatgtatgaaattggccactgctttgcttgaggatgacaattcctagaccataacaatgttaggggtggtaaaggacaactggcttttaaataaacctcttgtacatgcacaaacaatattatgttcacaggacacaagtgattgcataaatttaaaaataagactatttatcttcaatgtacctaaacaaaatgattgccatagacgtgatcgatacaaattatgcaatgcacagaaaaatctggtggtggtttgacttctaagaggaaagaacgccatactttgttgtcgggacaacgatacaaggattacattataccttgatacaatgacatattcaatctcggttatatccatcaacttatccacagtaaccttggataacccatcaacaagtagggacctgcttaattcctc

SEQ ID NO: 11199 - DNA, 331 bp, Glycine max
  Clone ID: jC-gmfl02220130a12a1
ggaaaactcaaacaagttttgtgcaatttactgagcaatgctgttaaatttaccgaggaggggcacatagctgttcgagcatgggctcagaagccaagcttgcagagctcaatgattgctactcaccaatacgggtccagtagacttttgtcgcgcttgtgttgccgccaaaatgaagcacgtgatgacgtggaagacttgaacatccaacaagatccaaattgtatggattttactattgaagtggatgacactggcaaaggaattcctaaagagaagcacaagtctgtttttgaaaattatgtccaagtcaaagaaactactcttggcc

SEQ ID NO: 11200 - DNA, 448 bp, Glycine max
  Clone ID: jC-gmfl02220130a12d1
ggcaaattaaactatgacacatgaatgctttatttatttatttactatttctgatttatatataggctagttagtggtgtaaaaagatatctcctgtcattgtttaatttaaaaacttgataacaatcatataaagcaattaaaaaagataagatttactgctcactcttaagtatatattcttttgatggctttaagtaaagcctctttgttgatgggtttgattaagtgatcgtccattccagcttcaatggacaatattgcctctttccctgtattagctgttaatgcaaagataggaatgtgaacaccatgagacttctcaatctcccttatccgtctcgttgactcatatccatccattaccggcatctggcaggccattaagatgaaatcacatggacgattggaagaattcctagttagaccctcttcaactgtctgaaca

SEQ ID NO: 11201 - DNA, 416 bp, Glycine max
  Clone ID: jC-gmfl02220130b01d1
gtaaaagataacgagaaattgcacgatttgaaacatacaaaaccgcggttacggatcatctacaatggaaaatctcctggcggtgagatataaccgctggccggaactcaaatttcactgggagagtgatactatacaggctcacatttcataattgcgagataaatctccttgtgagcacgcatttgggcagactgaggcttcacatacactcagagtctcccctgcatgcttctcctgcataattaaccatctctggaatatcatgttttggtgcaagcttatgtgcagaatttttattaaaacctagggcgttctacttcacttgttattggtcagctgtaaccacacccacatctggcgccgtttctacactcgtgattgtgagaagatttttcttaacacgggagacaagc

SEQ ID NO: 11202 - DNA, 531 bp, Glycine max
  Clone ID: jC-gmfl02220130b02a1
ccaagactggatgatccaatttcaaggacctttgagcagtgttcttcagatacatttcagatagatggtgcatgtgcatctccaatttgctatgtgtacctatatagatctggggcagaggaaggttgggagcctgggaatgtaaaaatctatggctacaactcagagcctgttactttcgatgacaacacctacatcccaaatggcacgtggaatgggtataatctgtgcgacactgctaatcctgattttataagtcagttatttgggtccgaatccacattgacttatttacatcccagagatcgacagtgaaagactgctatgatgttatacacttgactcagacaggcatggaagtacaccttgtgcatatagccgtgaaaggtgaaacttagtagtagaactctatgcggagagcagggacatgagatgtgtaaggtcaaagtcagttactttgagacttggattttatgctttgtgggagttatgttaaaatttaagttaatgaaaggagaaattctagtaata

SEQ ID NO: 11203 - DNA, 529 bp, Glycine max
  Clone ID: jC-gmfl02220130b02d1
ataactaatttttttcctttcattaactaaaattttaacataggtgcgacaaagcataaaatccaactcacaaagaaactgactttgaccttacacatctcatgtccctactttgtgcatagagatctactactaagttacacctttcacggctatatgcaaaaggtgtattgctatgtgtgattaagttaagtgcgtaacattattacagcagaaaactaagaacaaagcctagaaccaaactcatgagccatttctgagggaatagttggtgtgaagaagaagaaggaggagtctcgcacagattatacccataccacgtgccattggggatggaggtgttgaaatcgaaagtaacaggctctgagttgtagccatagattttcacactctcaggctcccaaccttcctctgccccagatctatatatgtacacatagcatattggagatgcacatgcaccatctatctgaaatgtgtctgaagaacactgctcaaaggtccttgaaattggatcatacaggcttgg

SEQ ID NO: 11204 - DNA, 504 bp, Glycine max
  Clone ID: jC-gmfl02220130b03a1
tggctaaccaaccctgacactccttcttgtccgcttcctcttcgatcatcgcttcagaatgccgccgaagttcgacccctcccagatcgtcgacgtcttcgtacgcgtcaccggcggtgaggtcggcgcggtgagttccctgggaccggaagatcgggcccctcggtctctcccccatgacgatcggagaagatatcgacaaggaaaccgtcaaggactggaagggcctccgcgtcaccgtcaagctcaccgtgcagaaccgtcaggccaaggtcacggtggtcccatccgacgtcgcgctcgtcatcatggccctcaaggtgcccgagcgtgaccgcatgagaacgaagaacatcgagcacatcgggaacatcttgctagacgacgtcatcgagatcgctagggttatgaggtcgaggtcaatggcgaacgaccttagcggcagcattcaggagattctagtgacgtgcgtctacgtcggatgccacggtgatggacaggatc

SEQ ID NO: 11205 - DNA, 447 bp, Glycine max
  Clone ID: jC-gmfl02220130b03d1
aaacaaatatacgcataaatgctaaaatccattaacaaaattgtatcgaaaaaatatcataatgtgagcagagaaagaaactaatcagcccataataataatatctctcgaaaccatcatgtaaattatccaaagcggtaaaataaccttacacaaaacgatcgatggttcccccaaattgatattaagaagaacacgaaacgatctgaagaaagacaaaagaaaaagagagaaagagagtcacaaagccttcctccttaatcgagagggacctcaacatcaccatcggtaatctcctgctgcaagtccttgggatcctttccatcaacggggcatacgacggagacgcacgtcccgagaatcttcttaatgctgccgctgaggtccttcgccattgacctcggacttataaccctagcgatctcgatgacgttgtctagcgagatg

SEQ ID NO: 11206 - DNA, 556 bp, Glycine max
  unsure (1)..(556): unsure at all n locations
  Clone ID: jC-gmfl02220130b04a1
ggcattcactaaatcctaccaatagcctggtgttgaaagttctctctgcatctccttcagccttttctgctaacccaaaatctaaagtgacaagtcctccatcactcactggaacttcaatctcattaggttcaattataccgggcaggaattaatgcccggatattgatctctggctcattgagcttgttcagcaaccgatttttcaggtcaggtgtgcataaggctgggagtccaaccaaacatgataagtcaggtaatgagcagttcttgaatgaacttagcatatggattgatccatgaacaacgtgacctcaaggctgtgaatgttcagcaccgcgaagatggcgaatctaatgacccagccatctatcggatcaatgataatttggaatactctgttgaagtttatgagtggtctgggacagcatgggaaccttacgtagctgatgatgttcaagtgcaatgttacatgatgagcccctatgtcttgaagactntatcaactgatggcaagggccgttatttcacatcatttaaggttccagatgtctat

SEQ ID NO: 11207 - DNA, 493 bp, Glycine max
  Clone ID: jC-gmfl02220130b04d1
ggaaaaagggaaaaagtaatgcatctataataaattagaaacggcaggtagtatcattgccaaatcaaaattttcgatctcaaaataagttcaaccccgcactacaaactacagtatcttaaagcaaaggtttacatctacttgctgtatagatgaactgcagtgaagatgaagaaacccaccatcattgaaaatgatgctccataatagggataggctgctggtataaatctttcatattcattgtgtctaaagggacgaacaggaatctgctttgataaagataagcttgtatatccaagtttttcgtactcaactttgaattggaaaaccccatagacatctggaaccttaaatgatgtgaaataacggcccttgccatcagttgataaagtcttcaagacataggggctcatcatgtacaaatgcacttgaacatcatcagctacgtaaggttcccatgctgtcccagaccactcataaacttcaacag

SEQ ID NO: 11208 - DNA, 612 bp, Glycine max
  Clone ID: jC-gmfl02220130b05a1
caacaacaactatctctcatccttcttctttctgtatccgtaacacttgcaacacacatggctacaatcaccaacactttcatattcaaaccccccatctctcatcacccaaagcagcttctttattgccaccgctcttctctacgctttctcaccaaatttaaaaccccctacggagcgaattctcggcggctggttccgaaagccacagcggctcccggggccaagaagacagaaaagccgcacgagagagtccagcgagtccacagcgtggaggagttcgagtcggcgctcgaatccgccaaagacaggcttgtggcggtggaatacgctgccagcgacagcgaggagagcagccagatataccctttcatggtggagctgagccgcagctgcaacgacgtggagttcatcctgatgatgggcgacgaagtcgagaagacgaaggagctcctgaagcgggagaaggtggagaatgtgcctcacttcagcttctacaagagcaaggagaagatacacgaggaggaatggattgatcccgacatgctggtaggcgatgtgctatactacggcgacaaccactctgggtggtgcagctggacaacgtggaga

SEQ ID NO: 11209 - DNA, 359 bp, Glycine max
  Clone ID: jC-gmfl02220130b05d1
ggggaaaaaaaaggggggtttaaaacattcccctaaaaaaaaaaaaacaaaaccccgctttttttttttttttccaaaggcttttaaaaaacactccctttaaccaatttttttccaacgttctaaaaaagggaaaaccttaattaaggggggggtaatggaaaataacccaaaatatttttccccccccggggggggactataaaaaaaaacaagttcctttttaaaaaaggttaaaaaacatggggtggggggggcggccctcatggaagagaaaaaaaggttggggagagagaaaattaataaggggccccaaccccttggggccgggaaaattccccaaagggcccccctttggc

SEQ ID NO: 11210 - DNA, 484 bp, Glycine max
  Clone ID: jC-gmfl02220130b06a1
ctcagactcggagctcgaggtcgagcgacaacaactatctctgagcctgcttctttctgtatgcgtaacacttgcaacacacatgggtacaatcaccaacactttcatattcaaaccccccatctctcatcacccaaagcagctgctttattcccaccgctcttctctacgctttctcgccatatttaaaacgcggtacggagcgaaatctacgcggctggttccgaaagccacggaggctaccggggccaataagacatagaagccgtacgagagagctcagcaagtcgacagctagccatattcatagtcggcgctcgaatgcgccaaagacaggcttgtggaggcggaatacgctgccagcgacagcgaggagagcagccagatataccctgtcatggtggagctgacccgtagctgcaacgacgtggagtccatcctggtgatggacgactagttggagaagacgaatgagctcctgaag

SEQ ID NO: 11211 - DNA, 248 bp, Glycine max
  Clone ID: jC-gmfl02220130b06d1
gggcagaaaaaaaggggctctctaaccttcctcttggtaaaaaaaagcacctgcccgaaatttttttttttttccaaaggctctcaaaataccccccccttacacaaatttttaaccctggtctaacaaaggagaaagcttacttacacggatggcgttgggcaaactccccaaattctattcccccccccgggggtgccaattaaataaaagaagctcccttctcacaaagagaggcaaacatgggt

SEQ ID NO: 11212 - DNA, 487 bp, Glycine max
  Clone ID: jC-gmfl02220130b07a1
gaagattccaatcggagctcagaaaaaaaagaaacctaatcgccgatcgcgtcgaaagttcgttgttgttctgtgaaattgcctttttttttttttccgatctgtgataattctgtgaatagtaacaataattgtgtgcgtattctctttaggaaacgtagctgtggttccttttttttttataatttgtttgccgtttgaagatagtcgtttcggttactgctgcgttttgtgttatctggtgttttaattctgtgcaatattgtaattctacatgtttgattgtttattttgggctgcgtgattagtacgttgtctatgactactgtgttctggagttgaaatgttgtctaacgagattagacgctcttgcttttgtggtacttagccgaacaattcaatgcctgaattccaaggtttaggtatggcttatcggaacttacgataaccttggtatccaaggaatttattcggattgcataggttc

SEQ ID NO: 11213 - DNA, 467 bp, Glycine max
  Clone ID: jC-gmfl02220130b07d1
gtaaacgaaaaaacttaaaaatggggacccaaaaaaaaagaaacctttttaggcaaattggtaagttaaaaaaaaaccgaactttaacactggggggcccttttccaactaggggggccccaacaaattacccttcccctctccgaatcctcttttaagaaaaagaaccctttttctatccctttgaatgggggtcaatgggccctccaaatttaaattccggcgggcccatccacgtacccaatggacccacatgctttttcaccgccttttggaataacaacaactttaagaaaactcgagggaggggttttgacaaaaccaaggaaaaattggggccctttgccaaaccttatggttgtggtgtattgaaggaattggaggtcggacccttttgagccaaaaaatggaactggccgggggaagttttaccacaatggggggaaaggatcccaaccctttttttt

SEQ ID NO: 11214 - DNA, 456 bp, Glycine max
  Clone ID: jC-gmfl02220130b08a1
ggagatgcctgtgcaaattcgcgaagtacttagcggtacacctcactcactgaacgggaagtatggcggacaaggctgttacaatccgaacccgaaaggtcatgaccaacaggctactatgcaggaagcaattggtcgttgatggcccttcatccacgcagggcagatgttaccaaggctgaacttaaggagaagctggctaggatgtatgaagtgaaagaccctaatactgtatgtgtcttcaaattccgaacacattctggaggtggcaaatccactggatatggtttgatttatgatacagtggagaatgccaagatgtgtgagcccaaatacaggcttatcatgaacggccttgacaccaaggtagaaaagtcaaggaagcaaatgaaggagagaaagaatagagctatgacgattcgaggagtagagaaaaccaacgctaccgatgctgac

SEQ ID NO: 11215 - DNA, 309 bp, Glycine max
  Clone ID: jC-gmfl02220130b08d1
ggggtgggttttttttcaaaggcacggaaccccaaaatttaaagacggtggctcgtaatttaaacagggggagaaaccgggcccccaaactatgcgggggctaatgtcccttggaggacaaatggatacataacgtccccaagccaagttgcgccttggacaaaaaaagggtttgttcaaaccttttcattgtgccccatccggggggaaaaaaaaaacatgggtcttgtttagcccccggagttgggaacgcccattgtttgtctccttttttggcatgctcggatttcttaccaatgagcaaggggc

SEQ ID NO: 11216 - DNA, 461 bp, Glycine max
  Clone ID: jC-gmfl02220130b09a1
gtggccttgcttcagaaagcacaaagtgcttctaaggagaaaggtaaggcatctgctgttgcgatcaacgcggagattcgtcactctaaggctcgcttgctggaggaggttcccaagttgcacagattggctgggaaaaacgtgaaagggctttcgtcgcaagagtttgctgtccgtaatgatttggctcttgcattgccacatataatgcaggcgatcccagatggggctcctcctgtgccaatacagactggaggctgagcagcttctgcctcccgtcctgaaattaagcttgattcagatgggcgatttggtgatgaatacttccaacaacgtgaactatcaagtcaatttaggcaggaatatgaaatgcgtataatgaaacatgaccaaggattggatgcgattgctgaatgattggatacatcgaaaaatatggcacatgatatgaatgaggaact

SEQ ID NO: 11217 - DNA, 463 bp, Glycine max
  Clone ID: jC-gmfl02220130b09d1
aaaaaaatatcatatttctttagggcgggggataagtgggcagcaattcccaaaatttttatcaacaaaacaatttcaatacaaaagtttcgactggatcgaagctggttcacagggtctttaagcctaacatttgtattcttaagggcagaggatgccttgtccaccttagtggcaatcccgcccataaggggaacttgtctatccagttcctcattcatatcatgtgccatatttttcaatgtatccaatccttcagcaatcacatccaatccttggtcctgtttcattctacgcatttcatattcctgcctaaattgacttgattggccactttgtgggaagtattcatcatcaaatcgcccatctgaatcaaacttaatttcaggacgggaggcataagctgcccaccctccagtttgttttggcacaggaggagccccatctgggattgcttggattc

SEQ ID NO: 11218 - DNA, 528 bp, Glycine max
  unsure (1)..(528): unsure at all n locations
  Clone ID: jC-gmfl02220130b10a1
gttgttgggtcgtgagtggaatcagcaaccatgaatatgatgcgaaggttgaagagcattgcttctgggaggacttccatttcttcagatcctggaggggataataactcaaaaagagccaagtttgaaccagaaactggagtgaaagctgatgagaaaacaaataccactgagacaatctgcacagatcaggaacagcttatagacacctcaaaagaaacttccaatgtacgcacatccgatgtatctacagtagctagaaccgagaagtcgggttttgaagagcttcctaaagaattaaatgaaatgaaaattagagatgagaaaagcaaaaacaacagtgaaaaggatatagaagcaactgtagtgagtggtaatggaacagaaacaggtcaaataattacaactgccattggcggtcgagatggacaaccaaagcagacaatctcttacatggctgaacgtgtggtaggtactggttcttttggtatcgattttcaggctaagtgccttgaaactgnggaatct

SEQ ID NO: 11219 - DNA, 457 bp, Glycine max
  Clone ID: jC-gmfl02220130b10d1
gtgaagaagcgatttctattcaattgaggattccacttggtccacttgaaggaataaagtaataattaataaacgaacttgaactatatgaaaacatgcttacaagattgttagaacttagaactcattatctttcacaactgaggcaccaaatttataaactacttcaaaaaaaaaaaggcttgcaaccctgtatcaccaggtagtaccactttatccatttgagtcacctgcagatctttacaagttacttgatagaactttccaaggtgtcgaggtttctcactttgtatagtcacagttgtgacttgtgcagagaagaggctgaagaacagaacagaacaggctggtcaggggcgatgaccaagagggtgtccaataattcaaaacccatttacaatgccctagagatgtttcaactttggaattgattcaactccttgcatactcaggaatg

SEQ ID NO: 11220 - DNA, 334 bp, Glycine max
  Clone ID: jC-gmfl02220130b11a1
agaaatgtcaaggaaaaatgtagatcactatcttggtaaagataatgtttgggagtatgtcttggatgcctgtagaaatctgttagatagtccttcggaacagcagattgatgaatgcgttactaagcttgacattgtttgttcaccttggccaatgtgtgttggctatgctaacgaaacatggattgtcccccacaaggaaaactttgatacaacctacacgaatatggtgatgcccttaggagacactgccactgacaggggtgtatctgctcattgggctatatatagagtatgacagaatagccttggagacttatctactgttgggcat

SEQ ID NO: 11221 - DNA, 390 bp, Glycine max
  Clone ID: jC-gmfl02220130b11d1
gtcttattaaattttctttttggacagccttcattaatgacaacctagtcgggtttcaacttcataaaacttaggggctactggattctactaatgtatgaaattggccactgctctggttgacgatgacatttcccagaccataacaatgttaggggcggtacaggacaactgtctttaaataaacctgctgtacatgcacacacaatattatgggcacaggacacaagagagtgcattacttctaaaatgaaactatttatctttaatgctccttaacaaaatgattgccatatacgtgatcgatcccaattatgcattgcacagaaaaatatgctggtggtttgacttttatcaggaaagaacgccatacttcgttgcctggacaac

SEQ ID NO: 11222 - DNA, 468 bp, Glycine max
  Clone ID: jC-gmfl02220130b12a1
tttggacattccaagctccaaccttcgattctttcttgtcagaggaagcccttatataactgcttctgtcacaaagccaacacctctttccatcaaaacagtgcacaccgtagtttccttgtcttcagatgattacaacaccaaacacacccttaagcttaacaacagtcaggcatggatcatatacacctcctctccaatctacttgaaccatgttccttctgaggttacatccaagccattttctggcatcattcgtatagcggctttgcctgattctgattccaagtatgtggaaactcttgacaagttcagttcttgttaccctgtgtctggtgatgcagcactcaagataccttcagtgttgagtttaaatggcaaagaaacgttctgtggacttgctcatgctggctcaccctcttcatgctaagcttctgtatatgatcgtgatgttactgcgctgaatga

SEQ ID NO: 11223 - DNA, 372 bp, Glycine max
  Clone ID: jC-gmfl02220130b12d1
gtctcttgattgttttttttttttttggtctggttttgttttcttttttggaaaaatggggaaaatccccagggtccaatgttcccccgttatatataaacttgcgggcaacgggatggggcactttttaaagaccagaatttctgttcggtggcaaggaattaaccttaagaaggcttttggaaaaaaaaaaatgttgcccggaaggttggggggaacccccccccccccttcttgggggggaacccccccctggagtgttgggagacgttttcccctttgtaaggacctgggaactttatgagacttgggaagggggcttttttatctaaaaacccgcgggggggggaggaccagcctcttcccccttgt

SEQ ID NO: 11224 - DNA, 473 bp, Glycine max
  Clone ID: jC-gmfl02220130c01d1
gggtaaaactgggaaggcattagatgaaactgtcaaacaattacaagctgttcagtttttcatgtttaaagaatacaagatttgatttagatacatatatactatatgagtatcacaaaaatttaaagagacacactctcaagtaccactttatcaattcttaatgctaatcttgagtcgatcattggccccaggcagctatattcagtggccaagctccacttctccaagcttttttttcttcaaaattaccctgatcttcaagttgatacaaaacaacgaaggttaacggtgcactcatatcatctggggtacttgctagaaagaaataaccaatggcacgatgagcttatggtttccatggcgctggaggtggtggcggtgtaggaaacattgggggaacagcagagaaaatggtatttttgtcaatagatgtgcctttgtcgcctgacaatgccactagtgcagcaact

SEQ ID NO: 11225 - DNA, 615 bp, Glycine max
  unsure (1)..(615): unsure at all n locations
  Clone ID: jC-gmfl02220130c02a1
ctcacacatgcccctatcttccttagctacctagattattcacttcaattcctcacaagcaacaccgtttcttgctccaatggcagctttgtatctcccaataagcatgttggcactcattgttgttgtttctcttgggttgaggagtggtgttcaaggtgcaccacaagtgccatgctacttcatttttggtgattctttggttgataatgggaacaacaaccagctccagtctttggctagggctgattacttgccttatgggattgacttccctggtggaccttctggaaggttttccaatgggaaaaccactgttgatgcaattgctgaacttttgggattcgatgattacatacctccatatgctgatgctagtggcgatgctatactcaaaggagtcaattatgcatctgctgctgctggaattagagaggaaactgggcagcaactgggagggcgtattagttntagtgggcaagtgcaaaattaccaaagcacagtgtctcaagtggtaaatgtactgggatatgaggactcagctgcaaattacttgagcaagtgcatatactcaaatgnngtgggtagcaatgattacctcaacaactatttcat

SEQ ID NO: 11226 - DNA, 523 bp, Glycine max
  Clone ID: jC-gmfl02220130c02d1
cagcaaacaacatactattattcactataattaaataagcaatcttgcaaaactttaccacaaattacacctgtacttgtgaacccatgaacatttagcatatatgaatatgtaagagaaagagagaaaacttaagactcttatgccttaaaaggagtagcacattcgaagaacattaaatatggttgtggcagagcttaatagccactacccactagaacatgttgattgttcagagatcatatctgagctaagcgttggatatcaacagggtaagcatctgatgcagattgagcactgtaagctctctgagccacaacaacattgccagcttcagtaggatgaaaagcatcccaaaacaagtactctctcctgttttggcatggtgtttgcattggaagacatgtaatttgaccattgttccttcctaccccacagcacccagcatttgtaacactgaaaccataggctgaagggttgcttataatatatgaaagatgccataagagttaacatagatgac

SEQ ID NO: 11227 - DNA, 617 bp, Glycine max
  unsure (1)..(617): unsure at all n locations
  Clone ID: jC-gmfl02220130c03a1
acctattcagccgccatgcacactctcctccgatccactctcaggaccaagactgcttcatctttagcatatgctgtggtttccagaagtgctcacgaaaatctccttcaggctcccttattgtctagatcaaatagcactgaggcttcattggcaaaggataattcctctaatgatgtaaaaaatggtcaagggtacaaaggtcatagtatgcttgctcctttcacggctgggtggcagtcttctgatttgcaccctctgatcatagaaaagtcagagggaagctatgtatatgacattaatgggaagaaatatcttgatgcacttgctggtctatgggccacttctttagggggaagtgagccacgccttgttgatgctgccgttgcacaactaaagaagttgccattttaccattccttttggaatcgaaccacattaccttctttggatctagcaaaggaactcctagaaatgttcacagccagaaaaatggggaaaggcttttttggtaatagtggatcagaagccaatgacactcangtgaaacttgtatggtattataacaatgcgctgggaagaccagattagaagaaattcatagctcgtgcctaatc

SEQ ID NO: 11228 - DNA, 483 bp, Glycine max
  Clone ID: jC-gmfl02220130c03d1
aggaaaccaatttattgacatttacaataacgaaaaggttggaacaaagtcttatcaagttactacaatatttccttttcccccggaagtgggcgcagcagagtttattattccatcatgaggcctaagctacttgcgctgagacttgagctcctgtaccttcttttccgtttctttcaaagctttcccataaatgctgattaactcttcaacttctccaggagatataatatatggtggagacatcatgatgttatctcccgcaacacgaactaacatcccatgcttctcacattgtgctccaaaataggcacctattccccattcaggaggaaatggatcattacgtgacttgttgtctgtgaactcagtgcccagaatcaagccagttccccgtatctctccaatgatgggactgtcagaaaaagcttttatgccatcttgaaaccttggggcgatcttgttcacttggtcaacaatatt

SEQ ID NO: 11229 - DNA, 578 bp, Glycine max
  unsure (1)..(578): unsure at all n locations
  Clone ID: jC-gmfl02220130c04a1
ccaggcggcgccgtcggaatcgtcgccggcgtcgagtttgggcgaattgcccgagagttgtgtcgctcagatcatgacctacatggatccgccccagatttgcaagctcgcaaccctcaatcgcgcttttcgcggcgctttcctccgccgatttcgtctgggagtccaagctgccgcccaattacgacgtccttctccgccgcatcttcgccgatttcccctcccatttgggcaagagagggatttacgccaggctttgcaggctcaattctctcgacgacggcaccaagaaagtttggctggatcgaggcatgggtaaactgtgtttgtgcgtttcggccaagggactctccataacagggattgatgataggagaaactggaaccatatccccactgacgaatctagattcagcagtgttgcatacctccagcaaatctggtggtttgaagtggatggggaagttgagttcccatttccagctgggaaatacagcgtattcttcagaatacatctggngcgagccggcagaggtttggacacgagtctgcaacaccgagcatgttcatggttggga

SEQ ID NO: 11230 - DNA, 549 bp, Glycine max
  Clone ID: jC-gmfl02220130c04d1
cttcaaatatgatccacgtttccttgtcatggaatggtcttttttgttccatctgccacaagtatataatattcttcaccatacaaggttatgatagaatgttccagtcctccagactaattaaacaaatatttatacatcgcctccttgcttctacaaaattctaaaccttaaagaaccatattaaaaactcgattctctattcctcctgatgcggcctacgctctatacatataaatactagtatacattcatatgtattttttagcaaaggttaagagtagtttaaaaatgctttaacctttctgaattcacttggatatatcagcacagaatctaaacagagaccccctttagtatgtgtgcaatcaatttgagtcatagagaatttaacttttgttgatgcattgccatcctcgacaacaaaatcgcctgcgtggtaatagatccatttacctggtccgttcagaaaacactgggatgcaacatactggccatctgaagtccatagctggaaacgtacaggctttttgtcccaaccatgaacat

SEQ ID NO: 11231 - DNA, 570 bp, Glycine max
  unsure (1)..(570): unsure at all n locations
  Clone ID: jC-gmfl02220130c05a1
ctcccaggttgcaactagtggtagatttggctggaagttgggaccatttactttgccttgccatccccgcctccacaccaaccactcaagatgtctctccttaagctgctgagcaatgatggttgatatgatatgatatggatatcagggtcaggtcatacaccaccatgatgcatcacaaatgggcaatacattgatcctattccatggccacttgccaaaacaaaacgctaaaaataacattaaaaaaaaaggttaagctatgcagcagcattcagcagtttcaatgcagtgcatggcatcatttgttgaaactaaggactggccacgcatttgttgaagctttatacaaaatattgtggctgaaagaaagataacaatgtggactttttgatggttgtggtgatgagggttnttggtggttaagtgaccagcttcggggtccatgtaaaaatagcatgacagggactggaggtgtcttggttctgttggagtgttggntgaggggtactaagtgaagtctaataatggaaaaaaaagataggtaggatagtgatgtgaataaaaatg

SEQ ID NO: 11232 - DNA, 485 bp, Glycine max
  Clone ID: jC-gmfl02220130c05d1
caaaacgttaaaaagataaagtgagcaaaaacaactgaacatgcacaaagtgttgttctcaatgctgaacttaagctaaaatagctgagtgaacaaattgaattgggaaaagaacaagttagcataaaccaaagcctggactcattttttattcacaacactatcctaactatcctttttttccattattagacctcaactagaccccctccccaacaacaccaacagaaccaagacacctccagtccctgtcatgctatttttacatggaccccgaagctggtcacttacaaccaaaaacccctcaccaccacaaccatcaaaaagtccacattgttatctttctttcagccacaatattttgtataaagcttcaacaaatgcgtggccagtccttagtttcaacaaatgatgccatgcactgcattgaaactgctgaatgctgctgcatagcttaacctttttttttaatgttatttttagcg

SEQ ID NO: 11233 - DNA, 596 bp, Glycine max
  Clone ID: jC-gmfl02220130c06a1
gttggcactgccacacaacagagagatcagaagagaaccgagcatggtgatggccatggccatttcatctccttcttacaacctcactttccttcttcctcgctcaggctcacttcaacctctttctttaactccgtcatcttgttcttcttgtgctcaacctctccgaaacctttcactcaagttatgtgcaaaaattcagagcgttggagttggaagagaaggtccagcttccgatcccaaggccggcgtcttactctacaaacctaaatcctacgaagttctcgttagcgatgccgtcaattccctctcttatgctcttcaagacggaaaacttcgcctcgaaatcgatttcccgcctttgcccagcaacatttcttcttatacgggatcttcacatgagttcattgatgccaacattcaacttgccttgactgttgtacgaaagctcaaggaaaagaaggaaaccagagcttgcatagtattccctgataaaccagaatagcgccgggcctgtcaatgatcaaagcagctctagattcaattgatggcattaccataggttccttagatgatgtccctactggacctatgac

SEQ ID NO: 11234 - DNA, 380 bp, Glycine max
  Clone ID: jC-gmfl02220130c06d1
agatgcccacatttgacatgttgcaaattacaattgagttcgtgaggtccttacatttctttgccatgcgtgacatccgttttcaaacagaaaggggaagactggaaaaatattaccttacgaaatattaacaaataaaaataaaaattgggcagttctgcaggaaatgtctttcttgaatatacgggagcccattcaatgactactacatgcagatgcaataaaacagtctcttctaacagtgtactactcaactccgccatgcagaagatacttctgaatcaaaatcttcttcccaccacgtgcttgccttgtagcctcttcgaagaaattctagggaacttccctcttcttcttgaagtcccaagaccctcaacaat

SEQ ID NO: 11235 - DNA, 379 bp, Glycine max
  Clone ID: jC-gmfl02220130c07a1
ctgtatggatgaatcgattaacagaatatgtgttgaccgagccgatagtgctcagcgcttaacatacggaatccttgttatgactcatagactgagcctgactatttatacgcacttccccaggatgctttgcgcattgagtgtgatcacatgtacaaggccgacacaacctatacaacgtgtgagatactgaaggtgatacggttacggatgcatcagtcatggagtgtgtgcttcacaaacgtggctttgactaagattgaagctagccagctataagcatataggctctggcattgatatggctgctgacacagttgctgatcatcaaacatagacgtaatgtggtcagcttgagcagatccgggtatgataatct

SEQ ID NO: 11236 - DNA, 320 bp, Glycine max
  Clone ID: jC-gmfl02220130c07d1
gcaaatgccatttttgggacatcactctctagcaactttttacaggggcaaaagaacatttggcccccccgtgtcttctaagggtaccatggaggaagctgcatccacctgattaccaagctacttctgttattttgatgaggcaaggactaacatgctgtacccggttacgcttatatgctaattctctttgtggcaaaaataacaggagaaccccttttcacagatttggcacactctgtaaacaccaatggcttcggtcaggcacaaatggctattcaccccaatgccccactgacccatcacttttagattccacc

SEQ ID NO: 11237 - DNA, 612 bp, Glycine max
  Clone ID: jC-gmfl02220130c08a1
tggcaccccaaataaacacaaacatggacgcatcaaaactcaatcaattgaagcatttcatcgaacagtgcaagtccaacccttccctcctcgctgatccttcactctccttcttccgcgactatcttcaaagtcttggcgcgaaaacttcctgagtctgcttattccgaatcgacgggcgtggagagggatgaggacatagaggatcttacggaggagcacgagaaggtagaagaagaagaagaagaagaggacgatgtaattattgaatccgatgttgagcttgagggtgaaacctgtgagcctgatgatgatcctccacagaagatgggagacccctctgtcgaggttactgaagagaatcgtgatgcatcgcagatggccaaaattaaagccatggatgctatttctgaaggtaagttggaggaggcgattgagaacttaacagaagctatttcactcaatcctacctctgccataatgtatggaactagagccagtgtttacatcaaaatgaagaaacccaatgctgcgatccgtgatgcaaatgctgacttggagaataatcctgattctggctaaggatacaaatcacgtggcatagcacgagca

SEQ ID NO: 11238 - DNA, 455 bp, Glycine max
  Clone ID: jC-gmfl02220130c08d1
caaacgtccaaattcactcgggaaaataacatggcattgttgacaaataaacatactaccaacacgagctatataggggcacctaagaaacaggactaacaaacggctaaaagtttaattatttggggccgatgtagaatgccatactcattcaatacccgatgccagagggctggaaagtgaaagtctctaatgacttacaagcatctaaaagtattgactcgggaccacctccaagtttggtcatcattttcgcaattacaggagctacctttggatttgataggcgcttggcaaaatcagcaaggtccttcataacatctggaagagcagccataatctgtggatcaccaaatgacgccatcagttcagggtcactcaagattgtgctaaaatgaatgtttccaggcatgccaccagcccctgggaatcccccaggcatgccaccagcccct

SEQ ID NO: 11239 - DNA, 428 bp, Glycine max
  Clone ID: jC-gmfl02220130c09a1
ggaggattcggtgggcctggtgggcttggcggactcggaggtcctggtaacggtgaaggacccagtcttcctctcccttgagagttgagaccacacaccttcgtgtttctttcggtcgctactttgctattatagcctatatagtctttcttttagtgtttcgttaagaaaataattgtggcgtgaggtgttatgttctaagaaatctaggctttgtcgcctggaaaaaatagtagtacgtagtagtactagtttgtgattttttttttgtttttataaaaaaagtagcaatagtgtgatttcatggtttgtaacgagtgggtgttttaatttcctacatgttatcatgtatggttctgttagttttatgggatgcatattttcacttgaaattagagcatatgcattttgtaaaagagacacaaaaa

SEQ ID NO: 11240 - DNA, 412 bp, Glycine max
  Clone ID: jC-gmfl02220130c09d1
acaaaatgcatatgctctaatttcaagtgaaaatatgcatcccataaaactaacagaaccatacatgataacatgtaggaaattaaaacacccactcgttacaaaccatgaaatcacactattgctactttttttataaaaacaaaaaaaaaatcacaaactagtactactacgtactactattttttccaggcgacaaagcctagatttcttagaacataacacctcacgccacaattattttcttaacgaaacactaaaagaaagactatataggctataatagcaaagtagcgaccgaaagaaacacgaaggtgtgtggtctcaactctcaagggagaggaagactgggtccttcaccgttaccaggacctccgagtccgccaagcccaccaggcccaccgaatcctcc

SEQ ID NO: 11241 - DNA, 404 bp, Glycine max
  Clone ID: jC-gmfl02220130c10a1
cctcggggaattccaattccacattttcaagaaataaggaggcaaaaatgttcatatatgaattggaattatttgttttcttattaggcctatcctgaagccaaaggaaatgagatcggaattcctcggggaatcccaattccacattatcaagagttaaggatgcagacacgatcatatatgaaatggaatcattgggagacttatgtaagcctatcccgaagccacacgacatgagatcggaactcctcggggcattccaatttcacgtctctgggacgtacggaggcatacatgctcatgtatgagttgcaactatttgatcaccttattaggcctatcttgaagtcagtggctatgaaagcccaattcatcgctgggaccgagcttgacaaccctatact

SEQ ID NO: 11242 - DNA, 564 bp, Glycine max
  unsure (1)..(564): unsure at all n locations
  Clone ID: jC-gmfl02220130c11a1
gggataaggacctatatgttaggccataactagcctgcactttgaaatctatttcagtttgaattttgaaagtgagtgtggcgtaccgtgtacgtatctgcagaaagtgaatgaatggtaatgggggaagaagggtgcaaggtatgtgttacaggaggcagtggttacattggttcctggctcatcaagaagctactggccaagggctacacagttcatgcaactctcagagacttgaagaatgagtcaaaggttggcctcttaaagagccttccacaatcagaaggaaaactggtgctgtttgaagctgatatttacaacccaaatgattttgaccttgcaattgaaggctgcaagtttgtgtttcatgttgctactcccatgatccatgaacctggctcccagtacaaggatactagtgaagcggcagttgctggaacaaaagcattttcctgtcttgtgtgagagcagggacggtgaagcgtctcatctacaccgcgtctgttggttctgcttctncattgaaagaaagatgggagcggttcaaagatgcaatggatgaaa

SEQ ID NO: 11243 - DNA, 501 bp, Glycine max
  Clone ID: jC-gmfl02220130c11d1
gaagccgagtttattttttaatcataattgcgaaaacaatagtaacaacagtaagatagggagcaagaagaaatgaggcagacgcctggtgcatattgtattacaagcagatatagcaatcaagggtgtagatggagactagatatcacccatccttcttgcacatttgatacaatcatccaatagcatcttggcgtcatatttgtatacaaagcctttgtcacacagctttgttgaggcccacttgatatccttcttcagcccatcttcatattcttgtttcacattgaattctggataatgaagagcgtaatgattagccatctcttctaatgaaatatatgaacttgcacacaagaatcttccactgatcgaggtgctttccatgcagaaaatatgagcttcacagacatcatcaacgtgtacaagaggaattttccccaacaattcctttaggaacttgagtgatatgtacgccctttcattctgcatgatctgagc

SEQ ID NO: 11244 - DNA, 571 bp, Glycine max
  unsure (1)..(571): unsure at all n locations
  Clone ID: jC-gmfl02220130c12a1
gattcgacgtgtcctaactctgaaactctactattctttctcctccgcagaaccttaacaaccaaaaccaagcattacagttcccaatttcacagaaacaccagaattgatcaaaacacataacaaaaaaaaagtgaaaatggcgagcgctgtanagaaagagggtggcgcgagagaggaaactttctctttggagcttcctgctccacctggttggaagaagcagttcatcccaaagaaagctggcacccccaagaaaaatgagattgtgttcactgcagcaacaggagaggagatccataacaggaagcagctggaaaaatatttgaaagcacaccctggtggtccagctgtatcagaatttgactggggcactggtgagaccccaagaagatctacaagaattagtgagaaggcaaaggcagctccttcatctgtaagtgagcccccaaagaagcgtactaaaagatcatcagcctcacaaaaggaaacttcncaggaagaaaaagaacaggagatnaaggaaaagcggaatgcagaagctgatgacaccactaaggatgataatgat

SEQ ID NO: 11245 - DNA, 585 bp, Glycine max
  Clone ID: jC-gmfl02220130c12d1
acgggcaggaccaaattacttggcatcactgccttacatatgattacatgtccatattacatatcttacaacataatgttacaatagcaactagaagctacacgtatgtccaatacacccatgaatggtaccttatagggctatgttctacaattgtatattgtttcaagaaacaatcagataaataacagtaagaaaaactaaagtcatcttcaaacacagatctaaaggggtcagaatgagaggagagatgccgagaacttattaatctattccctgctccaggcttttgacctcaccagttcagctcccatgatttccattcacagtcaactctgtttcagccttcttgtttatctcatcaagcttgtgatgttcttcaccaatcacttttgttccttccatttccccaacttcaaattcatgagtacttttgacgtgttcctctttatccactccttccacttcaaccgttttgtctgcagtagtgcatgtttccgatttctctggctccccagatccacgatattcttttgtctcttcctgtggttgctcaatctttacttcatgctttctcagaaaaac

SEQ ID NO: 11246 - DNA, 523 bp, Glycine max; identical to SEQ ID NO: 11226
  Clone ID: jC-gmfl02220130d01d1

SEQ ID NO: 11247 - DNA, 586 bp, Glycine max
  Clone ID: jC-gmfl02220130d02a1
aatccctatttttcttcctcagtagtgtcatttacgcttctcttctctgcagcaactatgcctaaccctaaggtcttcttcgacatgaccatcggcggtcaatctgctggccgcatcgtgatggagctctacgccgacgttactccccgcaccgtcgagaactatcgcgcgctatgcaccggcgagaagggcgtaaggcggagcggcaagcccctccactacaagggctcgtccttccaccgggtgatcccgagtttcatgtgtcagggtggcgacttcaccgtcggaaacggaaccggcggcgagtcgatttatggcgccaagttcgccgacgagaacttcgtgaagaagcacaccggtcccggcatcctctccatggcgaacgccggtcccggaaccaacggatctcagttcttcatttgcacggagaagacagagtggctcgacggaaagcatgtcgtgttcggacaggtcatcgaaggattgaacgttgtcaaggacatcgagaaggtcggatccagctacggcaggacctccaagcccgttgtcatcgccaactgcggtcaactctcttagacgacgttga

SEQ ID NO: 11248 - DNA, 417 bp, Glycine max
  Clone ID: jC-gmfl02220130d02d1
aggcgaattatagatgtcctaattttattgaagggggctcatcatgttttttttatgcttctcataacagactccattcactcactctatgaaccccaaccaaccaaccacatgatactgatattgaaaaggaaaggggaagggtttcgaaatgatatccttaacaccacaatcccctaaacgacgacccgagaaagaaaagaagagaaaaaaaaggcaaaaacgacaccgaaagaaataacacagattcagagattaaagccgcgggtcaacgtcgtctaagagagttgaccgcagttggcgatgacaacgggcttggaggtcctgccggagctggatccgaccttctcgatgtccttgacaacgttcaatccttcgatgacctgtccgaacacgacatgctttccgtcgagccac

SEQ ID NO: 11249 - DNA, 595 bp, Glycine max
  unsure (1)..(595): unsure at all n locations
  Clone ID: jC-gmfl02220130d03a1
gatgaagaagaaaccgtgtcgacttcggaggacgcaatttacggggagaaggtggagcctgagtttgatttgatgaagacaatgctgcgaaagtcgtatacgccgaagaaggttgccgcggaggaaaaaaacgttgaattggaagtggggaatagcagtaaggacactcttgtgaacgaggaaaggaaggaagtgaagggctcaagttcgggttcggtttcgaacaggaaggacggaccgaggtttaaggatttgggtgggatgaaggaggttttggaggaactgaagatggaagtgatcgtgcctttgttccacccccaattgccaagacagttgggagtgagaccaatggctggcattttgttgcatggaccacctggctgtgggaagactaaacttgctcatgccatagctcatgagactggtcttcctttctatcagatttcagctactgaggtggtttctggagtttcaggtgcatctgaagaaaatattagagagctttttgctaaagcgtacaggtctgcgcctgctattgtctntattgacgagattgatgncattgcatctaaaagagagaatttgagcgtgagat

SEQ ID NO: 11250 - DNA, 451 bp, Glycine max
  Clone ID: jC-gmfl02220130d03d1
aacaaaaaatttggaacaatattattggataaagtgaaccataaattataaccatttgccaaaaattatgtcctgactgcaggaaacatgtacatctcattacaaaagcaaatactctaaatacttgacgctcatataaatgatttctttcaccccattctttaaaggaatgtcgacacctgctaaaataacaaagtgaatgtcatgctgctcatgctgctttaaagccctctgacaaatgctgataatactgcttttgcctgtctgacacagacggagacactttactcagtgctacctcaaaatggtgcctcttgatggtcctcttgatggtcaatgtatcacaagttgtctcaatagaggtcaatctctcttcaagagcagccattgctgcttcattcatcaatgcagcaagatctgcgccacttaggttttcacacgcttccatttt

SEQ ID NO: 11251 - DNA, 71 bp, Glycine max
  Clone ID: jC-gmfl02220130d04a1
attttgagtgattatttcaataatgggtggtactcttatccctgttgaaactttgagttcagtgcttgact

SEQ ID NO: 11252 - DNA, 71 bp, Glycine max
  Clone ID: jC-gmfl02220130d04d1
agtcaagcactgaactcaaagtttcaacagggataagagtaccacccattattgaaataatcactcaaaat

SEQ ID NO: 11253 - DNA, 609 bp, Glycine max
  Clone ID: jC-gmfl02220130d05a1
gttggcactgccacacaacagagagaacagaagagaaccgagcatggtgatggccatggccatttcatctccttcttacaacctcactttccttcttcctcgctcaggctcacttcaacctctttctttaactccggccatctggttcttttttttgctcaacctctccgaaacctttcactcaagttctgtgcaaaaattcagagcgttggagttggaagagaaggtccagcttccgatcccaaggccggcgtctcactttacaaacctaaatcctacgaagttctcgttagcgatgccgacaattccctctcttatgctcttcaagacggaaaacttcgcctcgaaatcgatttcccgcctttgcccaacaacatttcttcttatacgggatcttcagatgagttcattgatgccaacattcaacttgccttggctgttgtacgaaagctcaaggaatagaaggaaaccagagcttgcatagtattccctgataaaccagataagcgccgggcctgtcaattgttcaaagcagctctagattcaattgatggcattaccataggttgcttagatgatgtccctactggacctatgacttcatttttc

SEQ ID NO: 11254 - DNA, 570 bp, Glycine max
  unsure (1)..(570): unsure at all n locations
  Clone ID: jC-gmfl02220130d05d1
agatgcccacattagacatgttgcaaattacaattgagttcgggatgtccttacatttctttgccatgcgtgacatccgttttcaaacagaaaggggaagactggaaaaatattaccttacgaaatattaacaaataaaaataaaaattgggcagttctgcaggaaatgtctttcttgaatatacgggagcccattcaatgactactacatgcagatgcaataaaacagtctcttctaacagtgtactactcaactccgccatgcagaagatacttctgaatcaaaatcttcttcccaccacgtgcttgccttgtagcctcttcgaagaaattctagggaacttccctcttcttcttgaagtcccaagaccctcaacaattcctctttggcctcgccaaggctgaagcggtttgcactttctgctatgcaagcataagaaccatctgcttgtttaagcatcacctgccaaggacctgngtactggcggaatacagctccactgtaattgacaatataaggtgctattgcaactgtctttgaatactctcttgattcgatgtagaacactg

SEQ ID NO: 11255 - DNA, 577 bp, Glycine max
  unsure (1)..(577): unsure at all n locations
  Clone ID: jC-gmfl02220130d06a1
gtttaaaatctccttcagttccactgtccacaaatgtacttctgtcaatggatagccttccaccacaatcaattgcagcacagactacagttggaagaattgggttaagtaatattgacctgaataatgtatatgatgatgtacaggattatgttgagaacacgaggaattgtcgtcctcctctgccttcaggaaatgggtctcttgatcatcctttattggtccaatgtgactctctcaagtcaagtccaccacagacaagtagaaactcagattcaacctctacccagtcaccatctagttctagtggagaagctcagagtcgcacagatcgaattgttttcaaactatttggcaaggctccaaatgatttcccccatgctctccgatcacagatccttaactggttatcccacagtcccacagagatagagagctatataaggccaggttgtatcatgttgactatatatcttcgcctagaaaattctgcttgggaagagctatgctacaatctangacccagcttgagaaagcttgccgcgtcaaatgatngtttctggagaacangatggat

SEQ ID NO: 11256 - DNA, 466 bp, Glycine max
  Clone ID: jC-gmfl02220130d06d1
aaagtatagtcacctgtagtaaatgttatataatcattgattgatacaaagtaccctcctaaatgccggcaagcttaccctattatctttgcatatacatgaactaataacaccatctacctaatatttgctagatagaacagtgagcattttgtgccgaacatctgaagtgaaggtaaaccttccctacatattttgatgacagctactatcacagatgtatatacttagaactaaagactttcaaacccaaaaaacaaaagtgcaggcctactgcaaagaatacctgatatacaacattagattgacccatactccaatgattcccagctgaagggctggaatacataataaactttgggtgagcttttgaagagcaaagctacacagacacacacagctgcaatggccaccattgacagcattgctggcctgaaaaccagtgcccttctcatgccaccataca

SEQ ID NO: 11257 - DNA, 582 bp, Glycine max
  Clone ID: jC-gmfl02220130d07a1
tggcaccccaaataaacacaaacatggacgcatcaaaactcaatcaattgaagcatttcatcgaacagtgcaagtccaacccttccctcctcgctgatccttcactctccttcttccgcgactatcttcaaagtctcggcgcgaaacttcctgagtctgcttattccgaatcgacgggcgtggagagggatgaggacatagaggatcttacggaggagcacgagaaggtagaagaagaagaagaagaagaggacgatgtaattattgaatccgatgttgagcttgagggtgaaacctgtgagcctgatgatgatcctccacagaagatgggagacccctctgtcgaggttactgaagagaatcgtgatgcatcgcagatggccaaaattaaagccatggatgctatttctgaaggtaagttggaggaggcgattgagaacttaacagaagctatttcactcaatcctacctctgccataatgtatggaactagagccagtgtttacatcaaaatgaagaaacccaatgctgcgatccgtgatgcaaatgctgctttggagaaataatccttgatctgctaag

SEQ ID NO: 11258 - DNA, 455 bp, Glycine max
  Clone ID: jC-gmfl02220130d07d1
caaacgttcaaattcactcgggaaaataacattgcattgttgacaaataaacatactaccaacacgagctatataggggcacctaagaaacaggactaacaaacggtaaaaagtttaataatttcggtaagattaaaaatgcaataaacattaaatacccgatgccagagggctggaaagttgaagtctcaaataacttacaagcatctaaaagtattcacttgggaccacctccaagtttggtcatcattttcgcaattacaggagctacctttggatttgattggtgcttggcaaaattagcaaggttcttcataacatcttgaagagcagccataatctctggatcaccaaatgacgccatcagttcagggtcactcaagattttgctaaaatcaatgtttccaggcatgccaccagcccctgggaatcccccaggcatgccaccagcccct

SEQ ID NO: 11259 - DNA, 613 bp, Glycine max
  Clone ID: jC-gmfl02220130d08a1
tggcaccccaaataaacacaaacatggacgcatcaaaactcaatcaattgaagcatttcatcgaacagtgcaagtccaacccttccctcctcgctgatccttcactctccttcttccgcgactatcttcaaagtctcggcgcgaaactttcctgagtctgcttattccgaatcgacgggcgtggagagggatgaggacatagaggatcttacggaggagcacgagaaggtagaagaagaagaagaagaagaggacgatgtaattattgaatccgatgttgagcttgagggtgaaacctgtgagcctgatgatgatcctccacagaagatgggagacccctctgtcgaggttactgaagagaatcgtgatgcatcgcagatggccaaaattaaagccatggatgctatttctgaaggtaagttggaggaggcgattgagaacttaacagaagctatttcactcaatcctacctctgccataatgtatggaactagagccagtgtttacatcaaaatgaagaaacccaatgctgcgatccgtgatgcaaatgctgctttggagattaatcctgattctgctaaagggatcaaatcacgtggcataacacgagcaa

SEQ ID NO: 11260 - DNA, 437 bp, Glycine max
  Clone ID: jC-gmfl02220130d08d1
caaacgttcaaattcactcgggaaaataacattgcattgttgacaaagaaacatactaccaacacgagctatataggggcacctaagaaacaggactaacaaacggtaaaaagtttaataatttcgggaagattaaaaatgcaataaacattaaatacccgatgccagagggctggaaagttgaagtctcaaataacttacaagcatctaaaagtattcacttgggaccacctccaagtttggtcatcattttcgcaattacaggagctacctttggatttgattggtgcttggcaaaattagcaaggttcttcataacatcttgaagagcagccataatctctggatcaccaaatgacgccatcagttcagggtcactcaagattttgctaaaatcaatgtttccaggcatgccaccagcccctgggaatccccca

SEQ ID NO: 11261 - DNA, 185 bp, Glycine max
  Clone ID: jC-gmfl02220130d09a1
gatactttggctgaagcgcagttccacattgccatgaaataatgaggctactctgttcatatgtgaattggaattgtctgatttcttctttggcctgtcctgaatccaaaggaaatgagatcgggatatctccggggcgccgagctgcgattcgatatagtgaggtcgttcaaggacggaagagt

SEQ ID NO: 11262 - DNA, 209 bp, Glycine max
  Clone ID: jC-gmfl02220130d09d1
tgtatgactgaagcacagcctaatttcctgtgggacaggctactactcggaggacgcacttaattttcaatttcatacaagaacactattgtctccttatttgtggaaaatgtggaaccggaaagcccagaggagatcccatataaacgagctggaaacatacacgctcgattgttactaaacagaggatgagactgtcgctggtcggg

SEQ ID NO: 11263 - DNA, 486 bp, Glycine max
  Clone ID: jC-gmfl02220130d10a1
gatcgagataactagagacagtgagatgaacatgaaagcccttgttgtcttcgatgctacaattgagggagcatgggaatgccatgcgtacgatatggtccctgtccgaatgaacactgtctatggggcccgtacttccgaggtgaaatgctcaagacgtaggcttgctgtggaagcacacatcatcttcggcttcgagaccattcctgaacagagcgtcgaagcaccaaaggactgcatccatggcgaacaatatagatcagactccaggacagttaaccaacacgcttactggtatgccagagacctctaagtccatcccaaggacacatctgcgttcagtatagatggcaccgtactctctaatattgcatgctacggaatacatgcatatgtgtgctgaaatataactcgtccttgactgatgaatgagtacacaagggcaacgcagcggcactgcccgagactcttaagaattacaacagc

SEQ ID NO: 11264 - DNA, 368 bp, Glycine max
  Clone ID: jC-gmfl02220130d10d1
ggaacaagggcgcattttttattaaagccacgaaagagaaaacaacatagggaaggctcttacatgacttgttgacacacagctgaaacaacataaagtgaagcttgtgcccctatttgaacgcgtggtattacatttagatagataggagcaagctagattgttgagaggagaaggaactactgactgtagtccaggggattaggaagctcaaagggcctgctttggcctctgtggcctccgaagagatcgctccattggtctccaatgatcccaacaatgttgtatccctgccttatcaatttatctgtcgctgctgttaagcatgaaactgcattgggagagaaaggatcttgtggatccttgag

SEQ ID NO: 11265 - DNA, 448 bp, Glycine max
  Clone ID: jC-gmfl02220130d11a1
gggataaggacctatatgttaggccataactagcctgcactttgaaatctatatcagtttgaattttgaaagtgagtgtggcgtaccgtgtacgtatctgcagaaagtgaatgaatggttatgggggaagaatggtgcaaggtatgtgttacaggaggcagtggttacattggttcctggctcatcaagaagctactggccaagggctacacagttcatgcaactctcatagacttgaaaaatgagtcaaaggctggcctcttaaagagcctttcacaatcagaacgaaaactgatgctgtttggagctgatatttacaacccatatgattttgaccttgcaattgaaggctgcaagattgtgttacatgttgctactgccatgatacatgaacctggctcccagtacaaggatactactgaagcggcaggagctggaacaaaaagca

SEQ ID NO: 11266 - DNA, 409 bp, Glycine max
  Clone ID: jC-gmfl02220130d11d1
gaagcctagtttatatgctaatcataattgcgaaaacgagggcgacggcagaaagatggggagcaagaagaaatgaggcggacgcctggcgcatattgtgttacaagcagatgtagcataaaggtgtgatggagactgatatgacccatccttctagacatttgatacaatcatccaatagcatctgggggtgatatttggttacaaagcccttgtcacacatctttgttgaggcccactagatatgcttgttcagcccatcttcatatttttgtttcacatcgaattttggacaatgaagatcgtaatgatcaccccatcctcttctaatgaattatatgaacttgcacactagatatttccactgatcgaggtgctttccatgcataaaatatgagctccacagaca

SEQ ID NO: 11267 - DNA, 518 bp, Glycine max
  Clone ID: jC-gmfl02220130d12a1
agcaaagtgattgagagatctttgcaaagttcagaagatggtggaaaggtgtaaatatttttcagaaggcttatgttttgattccaatacacgaggagtaagttttcttgttagcattgaactattgtttgtaaatgataattcttgtaaatggtgagaagttcttttttgtgctttcctttgaattaggtcattatctgaagaaactactattcacttgacaaaagggactgttgtgaagaatcatttatcaatgtttagatatttgagctaaaatgttacctccttatttcatgtgaactaaatgagcacacttgattataagtagtgggactattattcaagaaaggacaattattgttggaggtatacacaatcggttgtagacagaaggttcaccttatgatattgtatgctttttgggagggaaattttggtgacatagaggaataagatgtacattgtagtttctaggtcaagtgccaagtagagttttgagctatggttcatggagtttg

SEQ ID NO: 11268 - DNA, 553 bp, Glycine max
  unsure (1)..(553): unsure at all n locations
  Clone ID: jC-gmfl02220130d12d1
gggtaaaatgaatgctatgaatcgttttattcctatatatcataaatacgaaagtaaagttgggatgaaaacaacttccaaaaataccgggtagatttgaactctatattgcctctagtcgtcagttttgtactgtttcccccactatacatttggaaaggttaggaactagagttgtttgttatttctgcacagccaactgttagccacccttgcttggattaaagactgatggactatttaccaggtcataggaaaactctatccaaaaattaccagctgaatagctggcttctgtacaaggaaaaaaaaaaactggcaccaaccatacgaatatcaacagattgttcgttcaaggaaatgacaattgcaattctgccatgttaagtcacagaatcctcggtggtctcaacacaatcagttgcagggccagtaagagaatccctggcagtctcaacacaatcagttgcagggccagcagatgatgaaggagaagattccaattacaattatccgngactgaattcttgtatttttctacaagcaacttacg

SEQ ID NO: 11269 - DNA, 445 bp, Glycine max
  Clone ID: jC-gmfl02220130e01d1
gctggaacaatgagaccatttatcctttagaaccagcaggcgcaccggggagaaaacgcaactggaccagttggactaaaaactcactattgattcaagacacccttttttgtttgggccgattaactgtgtttagccacccccttgaactccggacatgacatgcaagctcacaatgttttctatgaacgccattcctagtaagattcacaattttacactaccttcctcaatggtgtacttcagactccagttgtccacaacgggggaatactaaacacgcttgtagttatacaactgtgcaatttccagtatacgcagttcatttgtgcatgcgttctctgggcaatgctccagctgaacaatgactcttaatgatatcgtgtacaagggaggactgataatcaacgctactacatatccagcggtcggagatgaagataca

SEQ ID NO: 11270 - DNA, 609 bp, Glycine max
  Clone ID: jC-gmfl02220130e02a1
tgcaaaggctgaaaaggatgaagttgctgaaaaaacaacacagacaagctcttcttcttgataatttcttgggtgttgatgggcttgcccctgggcattcacttcatgatagaaaacctgttacctacgctttaaataccaatgcgccccccatacaaccatatttgtaattgtactgtcctatacattgatagtgatgactgatgaacagtggtaacaaaatctggacatgggtaagttgttgttttggattgtttgattttttttagggttgctgatctgagacgaggatgaggagtataacagaagatgggttgttgacaggagaaaaatctgagttggtggtgacttgtggtggtttgacaaaggtcgagtagggttcatgttcgttgtgaatggtattacttgtagtttcgtattcatcgattgggtctgatggtgttgttcattgcctttgcgagaagtcggctgttcaactacaatcgtgaaccaacaagcatctaaacaagttattttggtgatgtgctgagtgggatgaagttaagaactgtagatttgggtttgggatgatgatttgaagaaatgattgaaccaagactctgaaaatat

SEQ ID NO: 11271 - DNA, 523 bp, Glycine max
  Clone ID: jC-gmfl02220130e02d1
aaaaacaaaaaggttcataaggatttaaaacagcatgtcatcacaattggtgatgcttcactatagaccacattatcatacctactagaacactacttcattgcaaatgcaatggtaacaacactcaataaatctcaaaggaacactacaatgcatcctaaaaccttgatcatctttcgttcagggttaatcttgggatgttattttgccattttttttctcagttcagcaacaacttcaaaatttgtctgagtttgatgttcttctatagccaacatcttcttcaactccatgatttgttcctcataccaacaaattcttcatttgttgtaaccttcagctttagcttcttcatttgggtgacaacaaatgattcaaatccacattacttctacaacccacattacttcccacgccaccattattttcagagtcttggttcaatcatttcttcaaatcatcatcccaaacccaaaatctacagttcttaacttcattccactcagcacatcaccaaaataac

SEQ ID NO: 11272 - DNA, 620 bp, Glycine max
  unsure (1)..(620): unsure at all n locations
  Clone ID: jC-gmfl02220130e03a1
ccgaaaatgaaatcaattgttccagagatttcattttcggatactccaccaccttgatccaaaactcgaagatcttggtgaggaagcccatggcaaatcagcagaacatagtggtggcagatggcacagggcagaagaacatgcccacaggaatagtcctccataactgcgagatcatgccggaccctaccctcttggcagaccgcttgagcgtgaagacttacttggccaggccatggaaggcattctcaagggcagtgttcatcgagaatgttatcggggacttgattcagccagatggttatattccatggaacccaattgaaccaaacacacaggattgctacttcgctgagtttggcaacactggaccaggttccgttgctcaagcaagagccaagtttggcaaaggtctcattagcaagcaggaggctgcacaattcactgctgagccttggctccaagctagcacttggttgcctgctgctggcgttcctttcgatgctagcttcaccaaagcttaaggatccgagacaaaccagcatcttgagtgttataatctcttttatagcctacctaaattaataaaactataaacaggaaatcgantacctaatttc

SEQ ID NO: 11273 - DNA, 366 bp, Glycine max
  Clone ID: jC-gmfl02220130e03d1
gggcaaattaagtaggttccattaaatagccaaaagcaaaattcccattgcttctcccatcatcagtctatgttatatgcatactgaaaacagagatgaagtggttgatacaaaaaggcataaatcataaatatgaaaagcttattgaatgattacaaatcagctcctcaaacaatggagtggctatgtgtgactgcattgaaattagggaatcgatttcctgtttataggtttattaatttagggaggctaaaaaagagattataacactcaagatgctgggttgtctcggatccttaagctttggtgaagctagcatcgaaaggaacgccagcagcaggcaaccaagtgctagcttggagccaa

SEQ ID NO: 11274 - DNA, 617 bp, Glycine max
  unsure (1)..(617): unsure at all n locations
  Clone ID: jC-gmfl02220130e04a1
cttcaatggaatttggcaaaaagtagccatcgccccaacgatcccatttcccttgacttctctacgtgaagatccttgtgtcgcatagagctagttaaaatgtctgagggaaatgcagggaaaggaaagagaattggcatcattgggcgtctcagccttattgttggtggctatggttgtggcaatcacagttggggtcaatctcaatgagaatggttccaacaatgatacagaggacaacaagaaaaatcatgttgtttcttctataaaagccgtccaaaccctttgtcatcccacaaattataagaaagaatgcgaggaaagccttatagctggggctggaaataccacagatccaaaagaacttatcaaaattttcttcaacatcaccattacaaaaattggtgataaactcaaagaaactaatattttgcatgaggttgaagaggaacccagagccaagatggcacttgaaacatgcaagcaactcatggatctttctattggggaattaacaaggtcacttgatggaataggtgagtttaacctcataaatgttgacaaaatcctcatgaatntaaaagtttgcttanttgggcggttacataccaagatac

SEQ ID NO: 11275 - DNA, 380 bp, Glycine max
  unsure (1)..(380): unsure at all n locations
  Clone ID: jC-gmfl02220130e04d1
aagtacataagagaaaagcttcactataaacaaagatacacactatttaattgcttgagataataaaaaatgcagttaacactagagttaattaatgaaatgaaaataattaaagaataaagaagcacaatcattactttntaattaatttatattgcttgattttgcaactcattacttttattgccaattaagtattgtctttttgtgcctatggtgtttcggcacgccaggaaagcaaggaattccggtaacctcaatccaatcagttccatgaaaaaacttagatggtgagaaccaacgtgctgcttttgaattgaggttccaaatcccagcccatttcacacgcttggatttgtctgaaccggggccaatgttgt

SEQ ID NO: 11276 - DNA, 584 bp, Glycine max
  unsure (1)..(584): unsure at all n locations
  Clone ID: jC-gmfl02220130e05a1
ctagctcctcgaaaatgctggcacgcctcgccgcgagtcgcttcaacgagatccgtcagattttccgtcagccttctagggctttctcgaccgctctgaactaccaccttgacacaccggacaacaaccctaaacttccatgggaaattcaccgaggccaatcaagcaaaggttaaggagattttgtctcactatccatccaactataagcaatctgctacaattcctcttttggatcttgcccagcagcagcatggtggctggctccctgtttctgcaatggatgcggtagctaagattgtagaggttcctcccatacgggtctatgaggttgccacattttactccatgttcaaccgagctaaggttgggaagtaccatctgttgatttgtggaacaacaccttgtatgataagaggttcacgaggaattgaagaagccttattgaaacacttgggagtgaagcgcaatgaagtaacaccagatggtttgttttctgttggagaaatggaatgcatgggatgctgtgtgaatgctactatgattacagtggccgattattcaaatggatncganggatatac

SEQ ID NO: 11277 - DNA, 526 bp, Glycine max
  unsure (1)..(526): unsure at all n locations
  Clone ID: jC-gmfl02220130e05d1
aactaaattatctttcatcgtaatctcaaatttcattcatgatgattaatgtacagagtacagaaacgcatagataacgctggtaagtaataaacaagccaagaaatttatggatggcgtttatggaacaaatttttgaaacggaagccatccaggatgattcatacaaaaattggttgagcatctaacagtctgacaatgtttcaattaaggcaagctccaagacatgcaagcctcacattattgaaggcaaaaagtatacaacacttcagcaggaatccaggtcacggcagggaggaggcttgggctcacttaacaaagtagtgttccctccttcaggtccactcttaattcggcggngattttgggtgccgtgcggtggcttctcaccctttctcagcttttctactatctcaactactttctcttggggttatatcttcaaagtaantataagtatatccttccgatccatttgaaatatcggccactgtaatcataggagcattcacacagcatcccatgc

SEQ ID NO: 11278 - DNA, 597 bp, Glycine max
  unsure (1)..(597): unsure at all n locations
  Clone ID: jC-gmfl02220130e06a1
tgatttacaacttttttcttcctcatggtcacaatgcttttaccacttgttctatgtcttactctccctgtgtttttcttgttcttcatccaacaccttagagccttcaagaaaccccccctacctccaggtcctaaaggccttccaataattggaaatttacataaattagataactccattctttgcatgcagctatggcacctctcaaagaaatatggccctatattttcccttcaattaggtttaaggaaaactattgttatttcctcaccgaaattggccaaagaggtactgaaaaaccatgacctagagtttagtggacgacctaaactacttccccaacagaaattgtcctataatgggtcagagattgtgttttccccgtacaacgaatattggagagaaatgagaaaaatttgtgttgcccatatctttagttcaagcgtgtctctagctnttcatctataagaaagtttgaggtgaagcaaatgatcaaaacaatatctgggcatgcctcttcttcgggtgttacanactngagtgagttactcatatctctctcaagcactataatatgagaagtgcttttgggag

SEQ ID NO: 11279 - DNA, 523 bp, Glycine max
  unsure (1)..(523): unsure at all n locations
  Clone ID: jC-gmfl02220130e06d1
attacttatttttggttcttaagtttaatataaatattacattattatctagtctttcactagaaagcagaaacaataaatttgcagcatagtatagtggcactatttccttaataattgacatccagtaaattattattattattattattattattattattattattattattatacgaccaaaagaaaagaaggcaccagaagtaccgcgttcaccacaaacagatacaaagaataatgccacaaaacaaaccaaaacagcacgactgaaaataattttacaacacgcctttccgataatgaaaggactgtacaacctcttattttcacttgatttagatcccatcatcatttccaccaagaccaattaattaagagatttttgtttttctgaggtcccacacaaactntntcttcatcctaaccatcctttctatctactntaatggctacttctaacatgaatttgccccttatctacttcgtatttaccggtcttgatatcnaaacaaaaagagga

SEQ ID NO: 11280 - DNA, 537 bp, Glycine max
  Clone ID: jC-gmfl02220130e07a1
tcttactcgatccatggatcgttgtatggcttctgcgtggaacacatatatagatctgggaatattattgccgtaaggtgcagaggcacaacctgcgttcttcgtgctcggggattctcttgcggataatgttatccacaagctttttggcatctacagctcgggcacatgctcctacttatggcattgatttcccatccggtagacccactgcccgtctgtctaatggctactacatacctgacttcatcagtctgtcacttggggcctaatccacattgtcttatttagatcccgagctctacagtcaacgactgcttggtggtgccaactgtgcttctgatggcattgcaattctcactgacactggactccagtttggcatcataatcctaatatatccacagttggagtactggccagaataccagtagagcgttagtgctatgatctgacctgagcagactgaacgcttaataaatggagcattattcctcagtactattgcaggcaacgactatgtgaataactattact

SEQ ID NO: 11281 - DNA, 405 bp, Glycine max
  Clone ID: jC-gmfl02220130e07d1
caaaaaagaattcattgaagaaaaaaaatcactcaatcataacagatgcaggctttgttttgtactgcccaagaaaaggtgaaccaaaacggggcttatcatcattcatcctccccaacattttaatataccatccactgacccatcggcgatgagtaatcactatatgtggcacctaattcgaacacatttttgaccaaataacaggcgttgggagacttttgcaagacacagaagatgtgcggtaataaacagatggacacagaccctggatttatctagatcttaggccaatgcaaagccatcatggtgctgagattcattgggtacatatgctctgaggcgcctgtcagaatctgttgaacgattgtcctattatccctttctgctggatggagaggatcc

SEQ ID NO: 11282 - DNA, 548 bp, Glycine max
  unsure (1)..(548): unsure at all n locations
  Clone ID: jC-gmfl02220130e08a1
gaggatgcatacaagtcaccattgagtgtcatcattcttgatgacattgagagattattggagtatgtgcccattggtcctcgattttcaaacttgatttctcagacactgctggttctgctcaaacggctttctccaaagggggaaaaaactcatggttattggcacagcatgtgaactagatttcttggaatcaattggattgtgcgataccttctctgttacttaccatattcctaccttgaacacaacggatgcaaagaaggtcctagaacagtcgaatgtgtttactgatgaagatattgattctgctgcagaggcgttgaatgatatgcctatcaggaaactatacatgctgatcgagatggcagcgcatggcgagcatggtggatctgcagaagccatcttttctggcatagagaagattagtatcgctcacttgtatgattgcctgcangatgttgctaggttataagttgttgtattaagcgctatctaagttagagtgcatataatccttattggagtgaaatctttcttaacagttc

SEQ ID NO: 11283 - DNA, 480 bp, Glycine max
  Clone ID: jC-gmfl02220130e08d1
cagcacaaccaaacaaacactgattcaaaaaaatctctgtaactgaaccggaacaagcaatgtaatgaactgttaaaaaaagatttcaactcaataaggattatatgcactctaacttagaaagcgcttaatacaacatcttataacctaacaacatcctggaggcaatcatagaagtgagcgatactaatcttctctttgccagaaaagatggcttctgcagatccaccatgctccccttgcgctgccatctcgatcaacatgtatagtttcctgataggcatatcattcaacgcctctgcagcagaatcaatatcttcatcagtaaacacattcaactgttctaggaccttctttgcatccgttgtgttcaaggtaggaatatggtaagtaacaaaagaggtttcacaaaatccaattgattccaagatatctagttcacttgttgtgccaataaccatgagttttttccctttggag

SEQ ID NO: 11284 - DNA, 549 bp, Glycine max
  Clone ID: jC-gmfl02220130e09a1
ggagtcggtccgaacgaggatccacccccttccttgacgaacacagagacgtgtgttttggattctatttgtgccgtggtttgagatttagatgcaaataaatatataccctgtcttgtgccgtgtcccctttaagccaattggaattcaaacaaagtttcggttattggtgttcatttttcttcctccatctttctctaaaacattaattgaactctccattccttaaattttaccaacgagctagttccgacacagacaaagcaatggcaaagactgagttagaggtgactgttgagagcaagaacatagaactaaagcacctgggatttgtgaggattgctgctattcaaacttttgcgattgtgtcaaatctgtatgagtacgcatagcagaattctgggcctttgagatccgctgttggaacggttgagaacactgtgaccaccgttcttggtactgtctgcaacaaattcaaggactttcctgatgatgtcctgggttatgttgacacaaagtggatgaagcttacacaagttcgatgagcat

SEQ ID NO: 11285 - DNA, 392 bp, Glycine max
  Clone ID: jC-gmfl02220130e09d1
tttctttagtttttttatgttatatttttttttttttttttttttttttttttttttttttttagggtttggttttttaacagggttgcaaccccccaatggaggcccaataaaaagcactatgccattttttatttgccttccaaggggggaaggaacccttataagccttagcccccccatggagataaatgggattgcctacatgggttttccatggattaattacataagcgtaccatgccttaacaggctgaaaaggatgtttagtcacaacccccccattttcttgattgtgcgatcccacaaaagagggttactcataagcaaatttttttgaaaaagttaaactgaattttatcagaatcggatgccgattttaattttgggtc

SEQ ID NO: 11286 - DNA, 478 bp, Glycine max
  Clone ID: jC-gmfl02220130e10a1
ggagtatgttccagagtccatgtatagagtcttaaagcactatagcaatgctaatcaaagaatgccaatcatctacgtaaaactttatatgtaccagattttcagggggttggcttacatccacactggtcccaaagtttgccacagagatttgaagcctcaaaatatactggtggatcctcttacacaccaagtgaagctatgtgattttggaagtgcaaaagttctagtcgaaggtgaagctaatatatcatacatatgttcacgattctatcgagcaccagaacttatatttggggccacagagtataccagttcgattgatatttggtcagctggctgtgttcttgctgaacttcttttgggccagccattattccctggcgaaaatgcagtagaccagcttgtacatattataaaggtgcttggcacacccacccgagaggaagtacgctgtatgaatccccaatacaatgac

SEQ ID NO: 11287 - DNA, 515 bp, Glycine max
  unsure (1)..(515): unsure at all n locations
  Clone ID: jC-gmfl02220130e10d1
gaagaaaaacagatagataccacattacatttcacaaggaaaggaactggtgtgcgttgtgcaccattgcaaatgaggctcatattaacaagaggaaacaaatgccaacctacaaaccccaccatctaaaaaactcttatggaccctccgctacttccagccaaggctctagttttccccaaacagaagcattctgaggggagacctgcgtgaccatacatggtcaaataatactatgtcgttggagacgtgtacgatcaacaaggctatatatgcgtggcgaagtaaagatccaccagatggcacatgggaatcaaaaggcacatatactgacggatcatctgcagccatccggcatcgcgaatctcagtctcggctgagctagaaactacattcgccatgtcacagaacatgggattaagacaaagaataatggtgccactttttcttaacttatcagctagtatacactatgtcccctaagctatatagtcacgatcctnccagatgcataa

SEQ ID NO: 11288 - DNA, 514 bp, Glycine max
  unsure (1)..(514): unsure at all n locations
  Clone ID: jC-gmfl02220130e11a1
tccaaacaaccttctttctttttctgtgatcctttctttcaggttcttaacttgatcagtgtgcagtgtccaaatcataagggtagctgcaaattgcaatggctaagcatgatgttgagggtggttccttctctgcaaaggactaccatgatcctcctccagcaccgttgattgatgctgaggaactcacacagtggtccttctacagggctatgattgctgagttcattgccacaatgctcttcctttacatcacagtgctcactgtgattggttacaagagccagagtgatgtaaaggctgggggtgatgtgtgtggtggagttggcattcttggcattgcttgggcctttggtggcatgatcttcattctggtgtactgcactgctggaatctcagggggtcacataaacccagcagtgacatttgggctcttattggctcgcaaggtgtctntgattacagcaataatgtacatggtggctcagtgcttgggagccatatgtggagttgg

SEQ ID NO: 11289 - DNA, 231 bp, Glycine max
  Clone ID: jC-gmfl02220130e11d1
aagtaaaagcatggttttatatatatttttttccacgttgagtacaagagattaaattacctaaaagaaaatatcacacactgaaagaaaggaaagtgcttgaaaatactaaagggtatttaccaatggctcttgtctttgaaagaaccttcaatctacataataggatcaaagaaaaggttgcaataaaagcacaagcaattgccattattgacaatatttatattattc

SEQ ID NO: 11290 - DNA, 316 bp, Glycine max
  Clone ID: jC-gmfl02220130e12a1
cactaaccctcttctgcttggaggcgcgatcctttctttcaggtggatccggcaaacggagtgcaggctccaaaggataagacccttcgcgcagagccgagacctatcatgaagtttgcgcctccttcgccgatgcgggagaataccacgtaccagctgcatcaccgtattcagcggctgacgtactcacacacggatggttatgcaaggagatgagtgctgaggacattgggaggaaccacctgcccatcataacagcgcatactgtgatatgttacacagatccagagtgatgcacaggctggccacaatcagt

SEQ ID NO: 11291 - DNA, 415 bp, Glycine max
  Clone ID: jC-gmfl02220130e12d1
aatgcatatgttttaatttcaatagaaaatatgcctcccataagggtgcggtaccatacatgataacatgtatgacattaaaacacccactcgttacacaccattgaaatcaaagtattgctcctctggttattgaatcaaaaagaaaccccaatcttcatattctgacgaaataatatgttttcatgcaagaacaagctaattttcttacaagacaacacctcacgccacaattattttcttaacgaatcacgtacagaaagacctctatgaagttatatttggctaacattccagcgatagaaacaggatggtccaagagcctcactctcacgggagatgaagactggggccttcaccgatgccagaaccgccgagtccgtcaagggcaccacgcacaacaaatacttgcttt

SEQ ID NO: 11292 - DNA, 485 bp, Glycine max
  Clone ID: jC-gmfl02220130f01d1
gattgtaagatttatttcatttttttaaaaacaaaagggttcatatacgagggtgaaaacacaccataggcgatcgacatattggggagagcgctctcacatagtgagacacactatatatcgatcaccttatctggtaacagcatacgtttagtatggaaattgcgagtcggaagacaatcacttacaataaagtctctagaaggagacacgtatcaatggcgctttctataaacccacgatgaatttttatgcaataagctaatttcggacagtgattctaccatttaatttatccttgcaactccacctaccaaatttttctaacgatgatgtgctcctatacacagcattttttgcaactccacaatattgaccttaaacaaacaaactgttcatatgtggaaaaccagaggtttagcgatttcaattggtagacaacaaatgattcaaatacacagtacttgtacaacccacattaattt

SEQ ID NO: 11293 - DNA, 411 bp, Glycine max
  Clone ID: jC-gmfl02220130f02a1
cgggtgtccatagagccgggggaaggagagacaggaccatggacatagagcaaagggtacaacgagaattactcgatctttcaacggcactgccgactctagcccaaaaccctatattagatacctaaggggcacatgcggcaatagaggctttgcgtttactgtgaactacgaactgggactcgctacaatagcgtcaccgcttgaagagatcgctgtcgccatccacggtaaccacgtcaagagaccctctttatctctcttgatggtaatatgagtctgctgctcactgtgccagcagtgatgtaaactcggtggtaagctgagcacgcgcgctgttcagattgaagcgttactagtcaaccaaaggtgtggcacagatggccactaaacaatatagagagaccgagg

SEQ ID NO: 11294 - DNA, 389 bp, Glycine max
  Clone ID: jC-gmfl02220130f02d1
ggcaggaacattgagtccatttattcgttagaaccggcaggttctccggagggacgaggcaagggtaccatttgggctgcaaactcactgttgattcaagtagctcttttcggtccgggaggataaacggtgtatagcaacagacatgatctactaacatctcatgcaggcgaaaaatgtgctctttgagctccaagccacctaagattaacatgtttacactacctgtttcacttctggccttcaaactcgagacttccatcacggtggatttctaccacatccttgaacctatacaactggtgcaatttgcattataccactttatatgtgcatgctttctctgggctatagctgcatctgtacaatgactagagatgatatctgta

SEQ ID NO: 11295 - DNA, 616 bp, Glycine max
  unsure (1)..(616): unsure at all n locations
  Clone ID: jC-gmfl02220130f03a1
cttcaatggaatttggcaaaaagtagccatcgccccaacgatcccatttcccttgacttctctacgtgaagatccttgtgtcgcatagagctagttaaaatgtctgagggaaatgcagggaaaggaaagagaattgccatcattggcgtctcagccttattgatggtggctatggttgtggcaatcacagttggggtcaatctcaatgagaatggttccaacaatgatacagaggacaacaagaaaaatcatgttgtttcttctataaaagccgtccaaaccctttgtcatcccacaaattataagaaagaatgcgaggaaagccttatagctggggctggaaataccacagatccaaaagaacttatcaaaattttcttcaacatcaccattacaaaaattggtgataaactcaaagaaactaatattttgcatgaggttgaggaggaacccagagccaagatggcacttgaaacatgcaagcaactcatggatctttctattggggaattaacaaggtcacttgatggaataggtgagtntaacctcataaatgttgacaaaatcctcatgaaattaaaagtttggcttagtggcgcgggtacataccaagata

SEQ ID NO: 11296 - DNA, 453 bp, Glycine max
  Clone ID: jC-gmfl02220130f03d1
aagtacatatgatttaagcttcactataaacaaagatacacactatggaattgcttgagataataaaaaatgcagttaacactagagttaattaatgaaatgaaaataattaaagaataaagaagcacaatcattactttttaattaatttatattgcttgattttgaaactcattacttttattgccaattaagtattgcctttttgtgcctatggtgtttcggcacgccaggaaagcaaggaattccggtaacctcaatccaatcagttccatgaaaaaacttagatggtgagaaccaacgtgctgcttttgaattgaggttccaaatcccagcccatttcacacgcttggatttgtctgaaccggggccaatgttgtggtactcggcatagaagcaagtgtccataccagaaggaccctctagtccttgccatggcaaatacccatcagc

SEQ ID NO: 11297 - DNA, 542 bp, Glycine max
  unsure (1)..(542): unsure at all n locations
  Clone ID: jC-gmfl02220130f04a1
tgaacaatggcgtctctctctcacctcaacaaactcctctgcatgcccccgctcaactcttcaccctctatttcgccaccacgcagcagcgtcggaatttggaccaaacctgtcggaaggccgaggctactggtgcctgtccgagccggcacgagcgacgacgagtgggggccggagaaggaggaggcgtacggcggcggcgtagcggtggaggagaaaccgacgaagtcggagacggagacggagaagctgaagaaggccttggtggattcgttttatggcaccgatcgtggactgaaagcaacgagcgaaacgagagcggagatcgttgaactcatcacacagctcgaggccaagaaccctaaccctgttcccaccgacgccttgactcttctaacggaaatggatctcgcgtatacatccttgcaggtttatntccattgttgtcaagtggaacactaccattggtcaaggtagaggaaatatcccagattattgactcgctgaantttaccgtccaaaactctggtcagttcgctggt

SEQ ID NO: 11298 - DNA, 375 bp, Glycine max
  Clone ID: jC-gmfl02220130f04d1
gatgttacttgaagttggttgatgcctttcgattctgctcataaaccatcacattaacaaccaaccaacaattcgcaacacagcattaacaaactgttctacacatgtatcttcaaaatcattgtataaaattcagaccctttacttatttataaacataagcctgatattgaccaccaaagtaaactagtttgttttgtttatcttggcaaaagagagcttccttctttgataagaacaaacacactgccaccatcgccccttgagatacgcaattcttcgtcgaggtatgtggtgagtaaccaggactgagcattgctgttggaaattgggatcttcaagggaggcctacttgaaattgttttcactaccgat

SEQ ID NO: 11299 - DNA, 620 bp, Glycine max
  Clone ID: jC-gmfl02220130f05a1
aaccctagctggataggtcaaacatcatcatgtcggacgaagagcaccatttcgagtccaaggcagacgccggtgcctccaaaacctaccctcagcaagccggtaccattcgcaagaacgtgctacatcagtcatcaaagggacccccttgaaaggttgtggaagtttcgacttccagaactggaaagcacggtcacgccaagtgccactttgttggaattgatattttcactgtcaagaaacttgaggatattgtgccctcttctcacaactgtgatgttcctcatgtgaatcgtactgattaccagctcattgatattgctgaggatggatttttgagtctgcttactgaaaatgggaacaccaaggatgacctcaagcttcccactgatgagagtctgctcactcagataaaggatggatatgctgagggcaaggatcttcgagtgtctgacatgtctgctatgggtgaggaacagatttgcgctctgaaggatattgggccaaagaactagcttttggtgctggcagcctgtcgtttctatttaagcaaagatccttatgtaagactttatattgtattgttcaagacctggcttatggcttatagaatctagtca

SEQ ID NO: 11300 - DNA, 509 bp, Glycine max
  unsure (1)..(509): unsure at all n locations
  Clone ID: jC-gmfl02220130f05d1
atcaatgcaggcaatgaaaatctcatcatatcgtaccgaaaaaaaccttcccacatttgactcctcctttataacaaagtcataggacagcatagaaaaccagaaaaaatgtgatatagtttctgtgaccacatccataaacaccattgttaagactagtctgactagaatctataagccataagccaggtcttgaacaaaccaatataaaggcttacaaaaggatctttgcttaaatagaaacaacaggctgccagcaccaaaagctagttctttggcccaatatccttcagggcgcaaatctgttcctcacccatagcagacatgacagacacaacaagatccttgccctcagcaaatccatcctttatctgagtgagcagactctcatcagtgggaagcttgaggtcatccttggtgttcccattttcagtaagcagactcaaaatccatcctcagcaatatcaatgagctggtnatcagtacgattcacatgaggaacatcacag

SEQ ID NO: 11301 - DNA, 601 bp, Glycine max
  Clone ID: jC-gmfl02220130f06a1
caacacaacattctttcgtgaaactcagaaaaccctaaacccctctcaaaccttgtagattccgacatcctagaattagttactggtttagtagcttagcttcactcactttctatttcttccagaatgccaaatccaaagcacattattctgcagagctttgtcttcctctgcctgcttcttcaggcatcgtcaaaatccacgatcgagccatgctcgaactccgactcatgcaacgcgcttctgggctacaccctctacacggacctcaaagtctccgaggtggcgtcgctgttccaaatcgaccccatctcgctcctcaccgcgaacgccatcgacatctcctaccccgacgtcgagcaccacatcctcccctccaagctcttcctgaaaattcccatctcctgctcttgcgtcgacggcattcgcaaatccgtcgctactcactacaagacccgcccctccgacaccctctcctccatcgccgacgccgtctacgccggcctcgtctcctccgaccagctccgcgaggccaattccatctccgacccttcggatctcgatgtcggacagaacctcgtcgttcctctaccttgacgtg

SEQ ID NO: 11302 - DNA, 409 bp, Glycine max
  Clone ID: jC-gmfl02220130f06d1
cagcaaagcaccaaataatatatggctaagcgtgagaggaaacccgaaatcccatagttttccagattcacgaatcagttcaagagtacaaaatgaatatcagcaactacgatagacaggtgcacctgtgacaaacacaagtagcaggccaactataccccccacaaaattgagaagattacaatgccacaggtatcatcaacttgacaagcaataacacaagtgcattcgtcaaagtgggcaatggtttcaccaaggagcatgcaacagaagccccggaagaaatgccgctaatagggccatttgcaggagagaatcctcctggaagccccgctgaaggcaccagcgaggatttgggtgatgctggaccagctccatcgaacagtggtgctggggcttgtgcaaacac

SEQ ID NO: 11303 - DNA, 440 bp, Glycine max
  Clone ID: jC-gmfl02220130f07a1
gatgatgcatacgagtcaccattgattgtcatcaatcttgatgacattgaaagattatagaagtatgtgcgcattggtcatcaagtttcaaacgtgatttctcaaactctgctggtgctgctcaaacggcttggtacaaaggggaagtttactcgtggatcatgtcacagcacgtgaactaaattgctcgaaatcaatagtatggtgcgataccttgtctgatacttaccatagtcctaccttgatcacaacggttgcatataccgaactagaacaggcgattgtgaatactgatgaagatctcgaatctgcttcacatgcgtagcatgatgtgcctatcacgaaactatccatgttgaccgagacggcatctcatggcgagcatagtatatctgcagactccatctaccatggcctatagaacattagtatagttcact

SEQ ID NO: 11304 - DNA, 374 bp, Glycine max
  Clone ID: jC-gmfl02220130f07d1
catcacaacccaacttactctgtttcaaaaaaaattttgtaactgaaccggagcaggcaatgtaatggactgttaataaaagattgcaactcaatacggattttatgcactctaacttagatagcgcttattacatgatcttatcgccgaacatcgtcctggaggcaagcttagttgtgagcgatacttatcttctctttgacataaaagatgggttttggatagccaccatgctcgccttgcgctgacatctggagcaacatgtctagtgccctgataggcatatcagtgatcggccactgtagccggatcaatatcttcatgaggtgacacattccactgtgctcggaccttctttgcatacggtgtgttca

SEQ ID NO: 11305 - DNA, 404 bp, Glycine max
  Clone ID: jC-gmfl02220130f08a1
gaggatgcatacgagtcaccattgagtgtcatcattcttgatgacattgagagattattggagtatgtgcgcattggtcctcgagtttcaaacgtgatttgtcagactctgctggttctgctcaaacggcttgctacaaagggggagataactcgtggatattggcacagcacgtgaactaaatggcttggaatcaataggatggtgcgataccttgtctgttacttaccatattcctaccttgatcacaacggttgcaaagaccgtcctagaacagtcgactgtgtatactgattaagatatcgaatctgctgcacatgcgtatcatgatgtgcctatcaggaaactatacatgttgatgcagatggcagctcatggcgagcatgctatatctgcagactcca

SEQ ID NO: 11306 - DNA, 434 bp, Glycine max
  Clone ID: jC-gmfl02220130f08d1
atcacaaccaaacttactctgtttcaaaaaaatctttgtaactgaaccggagcaggcaatgtaatgaactgttaataaaagattgcaactcaataaggattatatgcactctaacttagatagcgcttattacatgatcttatagcctaacaacgtcctggaggcattcatagaagtgagcgatactaatcttctctttgccagaaaagatggcttttgcagatccaccatgctcgccttgcgctgacatctggatcaacatgtatagcttcctgataggcatatcagtgaacgcctctgtagcagaatcaatattttcataaggtaacacattcaactgtgctaggaccttctttgcatacggtgtgttcaaggtgggtatatggtaagtcacagagaatgtatcacagagtccaattgactccaagaaatct

SEQ ID NO: 11307 - DNA, 554 bp, Glycine max
  Clone ID: jC-gmfl02220130f09a1
atcgaaacctacatggttacgaaattaaatttcccaccttctactgcactccgagtaacaactcgcactatatatgttgcattgacaatgttaattggcatatgtatcccgttctttggctctcttcttggatttcttggaaggctttgcgtttgccccgacatcatattttttgccctgtatcatatggcttaagcttaaaaagcccaagaaatttggcttgtcttggacgattaactggatctgcattattcttggggtaatgttgatgatagtatctccaattggtgctctaaggaatatcatattatcggccaaaaactacgagttcttctcataaactattgatgcaatcattgattccccaaccgattttaaagttgatgagtgaaactaaataacaagatagcacgcagacatgcgttatacattgaatatagataagcttaataggatttgtggaagtgatacacacacaactagcctggtacagaattatacttcttttgaagtaacaactatcttatcaccgtgtagcttatagcggaaacact

SEQ ID NO: 11308 - DNA, 338 bp, Glycine max
  Clone ID: jC-gmfl02220130f09d1
gtggcccataattcccctgctttataaccatcccccccgggaaaactgaacaaaagtggttcccttaaaaacccccccgggaaataaaaattggggccccttaaaaaaagaataaactttcacaaggggacacgggggggatttccctccacaaataccatgaagcttctttttcttacaagtttaacacctcgatggagggtttatatggatttatgtcccctcaagaaatttaaaaccggggggggaaaaaaagtatgcaccatgaattccttgaaaaaacccgcattttttggcccagacaaaaaatgtccttaaagccccattgggggatactt

SEQ ID NO: 11309 - DNA, 473 bp, Glycine max
  unsure (1)..(473): unsure at all n locations
  Clone ID: jC-gmfl02220130f10a1
atcgaaacctacatggttacgaaattaaatttcccaccttctactgcactccgagtaacaactcgcactatatatgttgcattgacaatgttaattggcatatgtatcccgttctttggctctcttcttggatttcttggaggctttgcgtttgccccgacatcatattttttgccctgtatcatatggcttaagcttaaaaagcccaagaaatttggcttgtcttggacgattaactggatctgcattattcttggggtaatgttgatgatagtatctccaattggtgctctaaggaatatcatattatcggccaaaaactacgagttcttctcataaactattgatgcaatcattgattccccaaccgattttaaagttgatgagtgaaactaaataacangaaagcacgcagacatgcgttatacattgaatatagataagcttaatagggattgtggaagtgatacaca

SEQ ID NO: 11310 - DNA, 369 bp, Glycine max
  Clone ID: jC-gmfl02220130f10d1
tttctttgtgttttttgtttttttttttctttttgttttccccctttttttttttttatgctttgtgattggttctttctaagccctcaaatgctcccctccatggccttaagccccgggaaaccctgcccaaaaaactcctgcgtcacgcccacgaacgcatatatgatggagtgcgccaaaagggaaataagacattgacaaggggacttggggtgcattcacagcacagggaattttctccaattgttggaaaggggaccccttggagacctggttgtttgtggtaccgcggatccatataggtggacatcggggggcggtcatggggcagcatcattggctagggactagaacccagtgcttggg

SEQ ID NO: 11311 - DNA, 572 bp, Glycine max
  unsure (1)..(572): unsure at all n locations
  Clone ID: jC-gmfl02220130f11a1
tatgctttctcaactatccgaaaaaagctacaatatgcagtatatttgttatcttttcaagatcttcaatctctgcatattgtagatcttgaaaagataacaaatatactgggtcacaaattttcaagtcttccaaatgatgatctggttgggatggaatcttgtgttaaagaattagcaaagcttttacgtttggggtccgttaatgacattcaagttgtggggatgagtgggataggtggaataggaaaaacaactcttggtcatggtttttatgtagaaatctctcattaatatgattttggttgtttcattgatgatgtaagcaaaattgatcagaattctagtgtatcaggtttacaaaaacaattaccttgtcaatctcagaatgaanaaagtttagagatttaccatctatttaagggaacatgtttgttattgactaggctatgctagcaagggaattgatagttcttgataatgttgatcaagttggactcctaaagatgtttccaaggagtagagatactttgtacgtgaatgctangtgaaggggcagaatcatcatattt

SEQ ID NO: 11312 - DNA, 474 bp, Glycine max
  Clone ID: jC-gmfl02220130f11d1
ataaaaatccattttttgtatttgttacaaatataccagaaattgcatcatcctctgaaacattacaactaccaaaagaaaagtatcttttgccaaccaacaccagcatcctagaacaaccgaaaacattatttaaaatttgcatccctgattctttagttgagtcatcaacaactaaaaatgaaagtcttaccatttctcctttgcttgtagcttgcataatttctgatgatatatttgcagcaacttgattgagttttccagggagggtttggcagcatcttttcttccttctgctgagattcttcctttgcttctttttccttgattttttccttcattttgttcaattgccaaaaacttgtgcttctaagctgacaaatttccgctatgcatcatagctaagtttgatagttcaagatcctgtttatatacccaatgatacccgtatttcttcacctcaacatgaaaacc

SEQ ID NO: 11313 - DNA, 557 bp, Glycine max
  unsure (1)..(557): unsure at all n locations
  Clone ID: jC-gmfl02220130f12a1
gtgctttggagggagacagtggtagcagtagcacaagctcctttctctctcggacccaaacctacgcccttcttaagcaacaattgcaagtggctgctaaatctgaggattacaaggaagcagctagaattcgagactcgttgaagcaatttgaggacgaggagcctgttttgcgtctgaggagactattgaaggaagcaattgctgaagagagattccaggatgctgctagttaccgtgatgagctaaacaatattgccccacactctcttttaaaatgttgcagcgatgctacaacattgggaatcagggttcaagttaggagtgtatatatagagggcagaagtcagccttcaaaggggctatacttctttgcatatagaataagaattaccaataactcagaccaccctgttcaacttcttagaaggcattggattataactgatgctaatgggagaacggaaaatgtctggngaattggagttgttggtgaacagccattaatacttnctgganatagttntgaatactcttcagcatggcccactgacaca

SEQ ID NO: 11314 - DNA, 359 bp, Glycine max
  Clone ID: jC-gmfl02220130f12d1
ctacaaatattgatattgatttctttcttgatttcaataaaagacaaaggtatgctgatcatttttggtcgtaacattcagatattttacacttaataaagcaaatagcctgctttaatacttcggaatggtgatgagaatgataataatttacatgtcgcagaagtgatgcagcagttcaatttcaaataacacatccttcatcttgtccaagcagagagagagaaaacggggcaatggccacattgaatgatcgtgagcctactctttcaaaatggatcatctgataatcaccttccattctaccatttggtgtgttcagtgggcatgctgaagagtattcaaaactatttccagga

SEQ ID NO: 11315 - DNA, 525 bp, Glycine max
  Clone ID: jC-gmfl02220130g01a1
gctttacctgcgatcaacattggcagagcatcaagcatgctcaaagccgacttcaaatcccgtcgaagaaaacacccaaactccgaaaaccacgcgaaacacaaaacccggcgtcaaacgcctcatcatcagcgtcactgtgctcttctcattcatcctaggttttcctcttctgtggaaatccgttaaaatctaccgcgcgccgctcccgttcgatcgagtcgactccttctcctcccaaatcgaatccaaacccttgtccttcccatgccgctttctagccatattcatcggcttcgatttcatggtttcaaacggaaatgtaggagccgcgattgagagaaaaatgtcggacctaagtcacggcggcgattgcggcggatgtggtggtaactactctgtttccgtggcggtgggcgggggaggcattgatgcggtctattttggcgggaagttgcggggtaatgacgaggatgctgatgaattggtgaagagtgtggtgagtgagtatggaggagggaatat

SEQ ID NO: 11316 - DNA, 509 bp, Glycine max
  Clone ID: jC-gmfl02220130g01d1
ttgttttttttttttggacgtaaatatcatttttttttttaagagatattgaaaatggtttaggggggggtgacaaaatgattttagatcacaggagcacgaagatactagattgattcatttcacagattagtaatgagatttttcaataactcaagtgtgaatttttagtaaagagcattttccctcaatctactcataactatggtacaaccaaaagccgtcatgccaacattgccttgctccaattatatcacatgtgacgtaagcatcgtgtcaacattgtcattttcaacagaattcacaacgcagaaggtcttgggaagagaaaggaaggaggctttacttgggttgaagttgaagtgcttcaccacacgctatgtcccaaatcccaggaaactagctgcatcttgttatcactgctcaacagatttatgaaacttttactttgtccttcgatgctaaggacttctttttttcttgcttggaccttttccattctcgtaaag

SEQ ID NO: 11317 - DNA, 558 bp, Glycine max
  Clone ID: jC-gmfl02220130g02a1
gtcgagcactagagtcttgtactgctagactgaaagagcttccttgttcaatggctccatttggctccttggtcattctcccctttttgttgatagcaacagtgacttgttctacttcagagaaggaaaatagtaaaactttcatagtccaagtccaccaccaaaccaagccttccatattccctacccacaaacactggtacgactcctccctctcttccatttccaccaccgcttctgttatacacacctacgacaccgtttttcatggcttctccgcaaagctctcaccttcagaggcacagaagctgcaatcactcggccacgtcatcactctcattcccgaacagcttcgttcccttcacaccacgcgctcccctgagtttctcggcttaactaccgccgacaggaccggcttgctccacgagaccgatttcggctcggatctcgtcatcggagttatcgacaccggaatctggccggagcgccagagcttcaacgaccgcgacctctgccccgttcccgccaaatggaaggaaagtgcgtcgccggacaaaa

SEQ ID NO: 11318 - DNA, 525 bp, Glycine max
  Clone ID: jC-gmfl02220130g02d1
accaaatatttgactgatcaagatattaaaaaatttcaaaggattcaacagacagcatcattcaaaaaggaaaggaaccttccaaaatattcttatcctcttctaaaaacaacattttctacaaacattcttaattatacaacatgaaagatatacttccaccatacctttgtctttgatgataactttccccccttttgacagcaccaccatcacgctctctctaacaaaccatccttcctccagttcttacaaatggaacaccttcacaaacacattctctattaagcacatagagcttttttttatttttaaaatacgatattatccaagatggataaatacccaaaatttctacacccaaaacctcaatccactaatccagaggctgctgcatcgtcacaacaaggggacttgtgacagtatgcttcccatcagaccaaactatgaagccactcttcacactagaaccacccggagaaagcttaacagccctaatttgaaccctgacaagaaagttgagct

SEQ ID NO: 11319 - DNA, 622 bp, Glycine max
  Clone ID: jC-gmfl02220130g03a1
aacatgtttaccatgtggcagggagcaaaactaaagcaaaggaattggagcttttgttagcaatattgccagacaataatgggtctctctatggtgatctcaagcgaatttgtgaaactgaccttggcttaatttcacaatggctggctgacaaagcatgtcttcaaaatcactaaacagtacctggctaatgtgtctctgaagatcaatgtgaagatgggaggtagaaacactgtacttcttgatgctgtaagctgcagaataccattggttagtgacataccaaccataatttttggagcagatgtaacccacccagaaaatggagaagactcgagcccttcaatagcagctgtagtagcatcccaggactggcccgaagtgacaaaatatgccggtttggtatgcgcccaagctcataggcaggaacttatacaagatttgtacaaaacttggcaagaccctgttcgtggcacagttagtggtggcatgatccgagatttactggtttcctttagaaaggcaacaggacaaaagccactacgaattatattttacagggaccgtgtaagtgaagggcaattttaccaagttttactttatgagttggatgcgattcgga

SEQ ID NO: 11320 - DNA, 468 bp, Glycine max
  Clone ID: jC-gmfl02220130g03d1
ctgtaaaggccttatggcaaaattttctacaaagattgacatagaatattttttacaatgctaaatttgacatctatatagaatctaatagtacttgtaggaattcattctaagctatgcctcaagaactgtaatcatggatttatcacaggaaacctacacgactaatgtacaaagtaatgtgagctgaacattgcattccatgattgttttcacttacctaccatgttgatgcttgccctatatatctatcattccaccaaggccaagtcactagcagtctaacagtaaaacatgaccctcttcacattttctttcaagtctggcaatggcttgacactataatcaccagctgctcgtattgctttggcaccataaccattgccatcacctgcagagccaatggcttgcatatctggctccatatagaaacgtgctcgaaacgctgctaaatgtgcataatatgct

SEQ ID NO: 11321 - DNA, 514 bp, Glycine max
  Clone ID: jC-gmfl02220130g04a1
aacatgtttaccatgtggcatggagcaaatctaaagtataggaattggagcttatggtagtaatattgtcagacaataatggggctctgtatggcgatctcaagcgaatctgtgaaactgaccttggattaatttcacaatggctgcttgacgaagcgtgcctgcaaaatcactaaacaggtcctggctaatgtgtctctgaagatcaatgtgaagatgggaggtagaaacactgtacttcttgatgctgatagctgcttaataccatcggttagtgacataccaatcataatttgtggagctgatgttacccacccagaaaatggagaggactcgagcccttcaatagcagctgaagtagcatcccatgactggcccgaaatgacaagatatgccggtttggtatgctccctaactcatatgcaggaacttatacaagatttgtacaatacttgacaagaccctgatcgtggcacagttaatggaggcatgatccgagatttactggcttact

SEQ ID NO: 11322 - DNA, 327 bp, Glycine max
  Clone ID: jC-gmfl02220130g04d1
ctggaaaggccttattgcaaaatttgatacaacgattgacatagagtaggggttacattgctaaatttgacatctatatagaatctaattgttctcgtcggaatccattctgagctatgcctcaagagctgtagtcatggattgatcacaggagacccacacgactcatgtacagagtcatgcgagccgaacattgctttccatgactgcactcacttacctaccatgttgacgctgggcctatatatctattattccaccaaggacgggtccctggccctctaacatggaagcatgaccctctttacattttttttcaagtcaggc

SEQ ID NO: 11323 - DNA, 568 bp, Glycine max
  Clone ID: jC-gmfl02220130g05a1
cttaaagcaaagaggggccttccatggacccccagcaacctcctctaaaacattggatgctgctgggagactgagttcagtggagtctactgaatacaaaagtgagctgtttgttgcgagtactgaagatgcagaaaatgggtatggataggaatgatggctctgatcctgctgagggaatgcctgtatttcagaatgtcttgaaagatatgattcctggggtaaaggtgaaggtattcaaggtgataactccagagaaagtagacaaggatctatctaatgtgattgagaagataattgaggacgaagacggagacgaagacgaagatgactagatggaaaatgatgcataaagtctagaactggatgagattaagtttgagactgaccattatggagatgatgagattgaagtaaatgctggtctgggaacttttgaacgtgaagaccataatgagtttgctgtcaaaattgccattgttggatctgttcagacactgtctggtgatctatcctctagagatatgcttcgagtccatgctatgctggagatgaatgggcgtggttc

SEQ ID NO: 11324 - DNA, 446 bp, Glycine max
  Clone ID: jC-gmfl02220130g05d1
gatgaaaatttcatcataacagaaagaacgatgatatcatgaattttatgatacatgggaatttttcttataaattaggaacaatgtacaaagttgatgaagataccctgaacactacacctccataaaatgtcgaatgaagagactagtacattgggctttagtgctgatattatgaatccctcttcaatctatagttagtcaagctacagctaccaagcttaagatacctcggtcatttgagttctagacaagcagccaaatgctcaacctatgctactcggcagaaagctagtagtgaagatcttttaaagctcaaatggaaaccctgtatagatgggtgatatcttccattgaagcacaatttagcattcaacaaaacctagaacgctgagaatctgaagaaagaatttacaagtctctgatattatgaacaaaaccctact

SEQ ID NO: 11325 - DNA, 410 bp, Glycine max
  Clone ID: jC-gmfl02220130g06a1
ataaaagccagtactggcctctcatgaaccccctgccacctagtgtactacattgcatgctgctcaaagactgatcttcatcctaatgatactgaatacaatcgtcatctgcaagtattgactactcatgatgcagataattccagttatacacatgatagatctgctcctgctgatggactgtctgtcttttgcacgtcctttaaagatctgaatcatacatgctcggcgctgggcttaaagttgacaactcgatacatagaaggcaaggatttatatcaatgagaccgagaatatggtcgatgcctaacatggagacctggactagtgagtactagataggaaatgatacagacagtctcgtgttctatgacatgtacatgaagactgaccgtcatgtatatgataac

SEQ ID NO: 11326 - DNA, 258 bp, Glycine max
  Clone ID: jC-gmfl02220130g06d1
aggacaaatttacattatttcaacaagaaccataccatggtgggttttatcatacatggcaactttcattaaaaaatacgaacaatgcactgagatgactaagatacccaaaccactgcacctcaataaaatgtctaaagcaaagaccaggacactgcgctggaatgcctagatcacgaatcccgaagaaatctatatagagaaaaaccccacatcccacgcatctcagacctcacacttactacttgtatacatgca

SEQ ID NO: 11327 - DNA, 319 bp, Glycine max
  Clone ID: jC-gmfl02220130g07a1
gccaggggcacctaaagcggggagtggagacccattggaggatttctgcgagacaaaccctgctgatgaggaatgcaaagtttatgaatagaggagagctccttttctaacgtatcatgtgaaaaagaaggaaattgttcagacagtctatctgaggagagattttcaaagtttatatttatttgcagccaataataagttttggcgtgactgaatgaatatcacccatatattgattgatattgaatttctgaattcttgtaactgatttgcaattcttcgaatcttttaatcattgctcagtgttaagtggaaggct

SEQ ID NO: 11328 - DNA, 318 bp, Glycine max
  Clone ID: jC-gmfl02220130g07d1
gccttccacttaacactgagcaatgattaaaagattcgaagaattgcaaatcagttacaagaattcagaaattcaatatcaatcaatatatgggtgatattcattcagtcacgccaaaacttattattggctgcaaataaatataaactttgaaaatctctcctcagatagactgtctgaacaatttccttctttttcacatgatacgttagaaaaggagctctcctctattcataaactttgcattcctcatcagcagggtttgtctcgcagaaatcctccaatgggtctccactccccgctttaggtgcccctggc

SEQ ID NO: 11329 - DNA, 510 bp, Glycine max
  Clone ID: jC-gmfl02220130g08a1
cttgaccgagtttcgaaacgtcggaaagcagagtattccgctcctgcagtaccaatgattgagggagcatctgtccaagtgagaaattggtcatatgggaatttatctaaaagagacgcacttcgtttttctcgttcagtatgaaatatggcaatgagagccaagttgacttaattgttgccgaggttggtggtgctgttggggctgctccacctggagtacagattgaacttttcaatgctcttattgatggctgtacagaagcagtagaacttggaaatcttgatgcaaaggggcctttgctggatttttttggtgtaccagtgaaggcaaatgatctacttacccgtgtccaacaacttcaacttttggcaaagcgcattggtcgatatgaagatcctattgcacaatttcgtgtgctgtcatatctcaaaccatcaaactggtccaaaggttgtggatggaatcaaattgatgatgctagattgcttcttggatacattacatggg

SEQ ID NO: 11330 - DNA, 504 bp, Glycine max
  Clone ID: jC-gmfl02220130g08d1
cgaaaattaaagctataattaccacaaaaatccaatacattgtttggctacatcagctaacataatactttatggggtgagcagtaaaatcgaataaaattgcagaattgacaatgtacagtttcctaagtatgtctatagcaagtgggtaaaactcttcgcttttcaagattttcgccatgtcactttgcttggtcatatcttcgaaggagtagaaatcaaaaaggaaaaagaaacaattggcaagactagtttttcatcttgcattagatcttttcggcttcagccatcttcaaggatgtgaatcccagtgtagggatatttctcatatccgccaaaacacaccaaaaagggatccgcaaggtcttattcgcatgggtggaagaaaaaaattccacagaatgtacaattgctgaagctgtataaatgcagagtgaaagccaacagccaacactcttgtaatcagccactctaatccccaccatgctggttactttatacctg

SEQ ID NO: 11331 - DNA, 564 bp, Glycine max
  unsure (1)..(564): unsure at all n locations
  Clone ID: jC-gmfl02220130g09a1
atttggaacaaacaacaatagaggggttgtggtgctctgtgtgctgcaatttccttttgagcttgtgtttgattcatcaaatcatcaaagatgactgtaggggcaggaatatctgttgcagatgggaacttgatggtggtgggggaaaaaagtgctgagccatgtccatgacaaggttcttgttacccctgcatgtggtggtgctttgctcaatggggcattcattggggttcaatcccatcacaagggtagccgtacagtcttcccaattggcaagcttcaggggttgcgatttatgtgtgttttccggttcaagatgtggtggatgacgcatagaatgggcacttgtggacaagatatccccattgagacgcagttcttgctcgttgaagcacacaatggctctgatattgaaggaagaagagaccaatgtgctgctacctatgcagttttcttaccccttctcgaaggagatttcagagcagttcttcacgggaatgatcaagacgagattganatctgtgtggaaagtggattgcctgctgtggaggaatttgatgggac

SEQ ID NO: 11332 - DNA, 495 bp, Glycine max
  Clone ID: jC-gmfl02220130g09d1
atcaaataatcaattagttctccatttaaaggatatgcgggctaatcttaatgcatttctatccgtatatttcttttctagcttaacgaaactacaatgaacttcttagaaatgaggcctaatgaaaccaagagcaaccaattcatactgtatgggaacgatgcaaaggctgcatttacattctgcttaagtatatcacaaaaaatagggagagaacttcgtgatattcattcattgcttctggttattccttacagggaacctctaacatttcctgccattggtctacatacgctcatcatattggtgcgaactatggatacatcaagtctataactctaaaccccttcatcttgagacaaagactctgattcaaaaatcaatagaaatgctccattggtataactctttctcaggtactctcaaatcaatagtcaccaatccagattcttcctcatacttgaattctacctcttctgagtcaactgttatcaa

SEQ ID NO: 11333 - DNA, 452 bp, Glycine max
  unsure (1)..(452): unsure at all n locations
  Clone ID: jC-gmfl02220130g10a1
atttggaacaaacaacaatagaggggttgtggtgctctgtgtgctgcaatttccttttgagcttgtgtttgattcatcaaatcatcaaagatgactgtaggggcaggaatatctgttgcagatgggaacttgatggtgttggggaacaaagtgctgagccatgtccatgacaaggttcttgttacccctgcatgtggtggtgctttgctcaatggggcattcattggggttcaatcccatcacaagggtagccgcacagtcttcccaattggcaagcttcaggggttgcgatttatgtgtgttttccggttcaagatgtggtggatgacgcagagaatgggcacttgtggacaagatatccncattgagacgcagttcttgcttcgtgaagcacacaatggctctgatattgaaggaggaggagaccaaggtgctgctacctatgcagtttt

SEQ ID NO: 11334 - DNA, 439 bp, Glycine max
  Clone ID: jC-gmfl02220130g10d1
atcaaataaccaattagttccccatttaaaggatatgcgggctaatcttaatgcatttctatccgcatatttcttttctagcttaacgaaactacaatgaacttcttagaaatgaggcatattgaaaccaagagcaaccaattcatactgtatgggaacgatgcaaaggctgcatttacattctggttaagtatatcacaaaaaataggtcgagaacttcgtgatattcattcattgcttctggatattccttacagggaacctgtaacatttcctgccattggtctacatacgctcatcatattgttgcgaactatggatacatcaagtctattactgtaaaccccttgatcttgagacaaagtctctgattcaaaaatcaatagaaatgctccattggtataactctttctgaggttctctcaaatcaagaggcacc

SEQ ID NO: 11335 - DNA, 540 bp, Glycine max
  Clone ID: jC-gmfl02220130g11a1
ctccagtgggttcttcttcttctattacatcaacgtcgtccaagaccatgaccatggccatggccacgatcctgctcctgttcacggtcttcgcggtttcatcggccctagacatgtcgataatctcgtacgacaacgcccacgccgccacgtcgcgcagcgacgaggagctgatgtccatgtacgagcagtggctagtaaagcacggcaaggtgtacaacgcgctcggagagaaggagaagaggttccagatcttcaaggacaacctgcgattcatcgacgaccacaactcccaagaggaccgaacctacaagctcggactgaaccggttcgcggatctcaccaacgaggagtacagggccaagtacttgggaaccaagatcgatcccaaccggaggctcggcaagaccccgagcaaccgatacgcgccacgtgtcggcgacaaactacctgaatcggttgattggaggaaggaaggtgctgttcctccagtcaaagaccaaggaggctgtgggagcttgtgggcattctcagcaatcg

SEQ ID NO: 11336 - DNA, 362 bp, Glycine max
  Clone ID: jC-gmfl02220130g11d1
cgggcaaatccaaataatgctgggttggcacatagtctacataacctgggaaactaacagcaatcaaatatgttcgccatttggaattggaatttgaatacaaataccgtgcatcaataatttaaccctatgtacacagccaatatctgactgaaatttgatacagaatagtttcaatttgtatcataataaaagggcacagagaaatttatgtgaaggtaaaggggaagtgtatcagctggggtttaaattcttcgtctttcatttacttcataatgggctccttcctgcacgttcacatttcctttatctgcttaagcactgctgaccttgttcttacgcccaaagggccaatggggttt

SEQ ID NO: 11337 - DNA, 457 bp, Glycine max
  Clone ID: jC-gmfl02220130g12a1
gtgcggcttcggggaaatcaagggtgtacttgaagcgtacgaagtacttgcctgatttgatgggtgattccctcgagggttaccctcgtcgcgttttcattgatgtggggctgccggagaaggacggagggagtggcaccgattggtttcacaagacataccctacgaggaacaaggactttgagatatataagatcgagacggtggcggagggtggtccacagatcgagatgtcagattggttgaggaagaatgtgagggaggaagaatatgtggtgatgaaatcagaggctgaggtggtggaggagatgatgaggagtaaggccataatgttggtggatgagcttttcttggagtgcaagccacaacaagggaatgtgaagaagaagaatagaagggcctattgggagtgcttggctttgtatgggaagttaagagatgaaggtgtggctgtgca

SEQ ID NO: 11338 - DNA, 396 bp, Glycine max
  Clone ID: jC-gmfl02220130g12d1
gggtgtggtttttcttttttatcttttttttttttctttttttttttgtggaaaaaacggggaaaagtggtaaaaaacccccccccccaaaaaaaaataaaactttaaggggcccggggagaaagataaaaacccggagttttaaacccccggggggcccccccccccccttgataaggaccaactacttgttcggccctttttacccccaccaccgggggttccttttaattggatccccccttgggggggaaaaaaaagttttttaaaacccccttttggggtgtccccccctgggagtgaagaaaagaccccaccagggtttgaaaaaaggggcccccccccaaattcgcgtgcgcacccatactaggtttgtgggggcccccccctttattt

SEQ ID NO: 11339 - DNA, 522 bp, Glycine max
  unsure (1)..(522): unsure at all n locations
  Clone ID: jC-gmfl02220130h01a1
gcaaaacctgggatcaacaatggcggaaatctccaattcgccaccgacttcaaatcccgtcgaagaaaacacccaaactccgaaaaccacgcgaaacacaaaacccggcgtcaaacgcctcatcatcagcgtcactgtgctcttctcattcatcctaggttttcctcttctgtggaaatccgttaaaatctaccgcgcgccgctcccgttcgatcgagtcgactccttctcctcccaaatcgaatccaaacccttgtccttcccatgccgctttctagccatattcatcggcttcgatttcatggtttcaaacggaaatgtaggagccgcgattgagagaaaaatgtcggacctaagtcacggcggcgattgcggcggatgtggtggtaactactctgtttccgtggcggtgggcgtaggaggcattgatgcggtctattttggcgngaagttgcggtgtaatgacgaggatgctgatgaattggtgaagagtgtggtgagtgagtatggaggagggaatat

SEQ ID NO: 11340 - DNA, 498 bp, Glycine max
  Clone ID: jC-gmfl02220130h01d1
ggacgtaaatatcatttattaaaataagaaatctagtcaatggcatcggggtcattcacaacatgattttagatcacagtagcacgaagatactagattgatacatttcacagattagtaatgagatttttcaataactcaagtatgaatttttagtaaagagcattttccctcaatctactcataactatggtacaaccaaaagccgccatgccaacattgccttgctccaattatatcacatgtcacgtaagcatcgtgtcaacattgtcattttcaacagaattcacaacgcagcaggtcttgggaagagaaaggaaggaggctttacttgggttgaagttgaagtgcttcaccacacgctaggccccaaatcccaggaaactagcttcatcttgttatcactgctcaacagatttatgaaacttttactttgtccttcgatgccaagtacttctttttttcttgcttgtaccttttccattctccgtaagcagc

SEQ ID NO: 11341 - DNA, 513 bp, Glycine max
  Clone ID: jC-gmfl02220130h02a1
gtgcttgaaattcttgaaatacgtgactgccccaaactagagggaagtttgccgaatcaccttcctgctctgaaaacacttacaattagaaattgtgagctgcttggctcttctctcccaacggctcccgccattcaaagtttggagatatgtaaaagcaataaagtagcactgcatgcgttacctctcttagtagagactatagaagtagaaggaagcccaatggtggagtctatgatagaggccatcactaacatccaaccaacttgtctccggtctttaacattaagggattgctcgtcagccgtgtcatttccgggtggtcgtttacctgaatcactgaagagtctgtatatcgaggatcttaaaaaactggaattcccgacgcaacacaaacatgagttactggaaacactgtcaatagaaagcagttgtgattcactcacatctcttcattggttacctttccaatctcagagttgtcacaatcggaagtgtgaaaatatggaatat

SEQ ID NO: 11342 - DNA, 569 bp, Glycine max
  unsure (1)..(569): unsure at all n locations
  Clone ID: jC-gmfl02220130h02d1
ctaccgaattgcaattgtatatttattatgcttttatcaattcttacatatgtacatatctatcatatttttagaataatcataccactattaatttatagtacaggggataagagataagctgaaatcatccaatcttctgaagttcacttgtacaccttttcatccttcacattgtacccaacgaaaaacctcacaaataaaaatttagctattgagaaagtgtcaatttcacgtcaattaaatcaaaagttacattcagcactagttcaaatttgaacttagattcatgggtaggtacagttgctccgggccaatcaaccatatctgtatcgttacttcttcgaaacatatatacaaggtcaatttccacgttgcctttgataatttgttgattctctgttgatcatccttggtggctaaatccatctatcgtcaaccttaatgccagggatgtggcaaattttaggccaaatntgatggtgcttcatgcggcatagtttttccagcaaaggacaattctttatggttaattttattagagagtcaagaagcctttctccaccata

SEQ ID NO: 11343 - DNA, 429 bp, Glycine max
  Clone ID: jC-gmfl02220130h03a1
atcatgccgaccatgcggcagggagcagaactaaagcataggaatgggcgctaacgatcgcactattggcagacaataatgggtggctctatggcgaactgaaacgaacttgcgatactgacctaggctcaacaagaccatgcctgcgtgacgacgcatgccttcacaatcgctatacagtacctgactaatgcgtctatgaagaccaatgcgcagacgagagcgtcgacacactgtactcgtagatgctgacacgctgcagaataccactgggctactgacatgaccaaccatacagatgtggagcgatacgttacccacccataaggatggagaagactggagccctcaagtagcagctggacaagcacaatacgactgtctcgaagtgacacaatatgccagcttggtatgcgcccaagctcataa

SEQ ID NO: 11344 - DNA, 339 bp, Glycine max
  Clone ID: jC-gmfl02220130h03d1
gaaagggctttatggtaaaaactgctacaaagattgacacagaatgtgttttacaatgcttattttgccatctatatagaatctaatggtgcttgaaggaattcatcctaagctatgctctaagacctgtattcatggattcatcacaggaaacctcctcgactaatgtacatagtgatgtgagctgaacattgcatgccatgaatgtttgcactgacctaccatgtcgaagcactgccctatatatctattatttcaccaaggccaagtcactaaccgtctcacgagcaaacatgaccctattcacattttatttgaagaatggctgtggcttgacac

SEQ ID NO: 11345 - DNA, 614 bp, Glycine max
  Clone ID: jC-gmfl02220130h04a1
ctcgagccgctcgagccgattcggctcgagcagctggctcatcaagtccaagaaccaacctaccttttgcaatctcaattcaatggcgttctctctcattgcgaagcgcttgctctcctcttccctcctctacaggtacctccttatggcccggcgcttccgcttcccaccgctctttcaacaccaacgccatgcgccagaatgacaaccgcgccgacgaccacagcaccgacatggatcgtcactccgaacgctctttccctagcactgagcgccgcgacgatatcttctcagatgtgttggatccatttgttccgactcggagtttgagccatgttctgaacatgatggaccaggtcatggacaatgcgatcctctccgcgtcacgcggtatcggagctggcgctgcagtgcgtagcggatgggacgcgagggatacagaggatgctatgcatctgcgcgtggacatgcctgggctcggcaaggacgacgtgatgatctgcgcggagcacaacactctcattatcacaggtgaaggtgctgaagaaggcgatgaagaatacagcgctcgtcgctacactagcaggattgacttgccggacatagctctacag

SEQ ID NO: 11346 - DNA, 361 bp, Glycine max
  Clone ID: jC-gmfl02220130h04d1
cattgacatttaaaattcaaactgcattagacttttaaacaggagggtcattcacaactctatataacaatgattacagatacgtttgaagtttcaaaaccaaacacaggaacaatactattaagctgttatatgtactaactagattgatcaccacctaataaacgaaaactaaagagtggtgtcgatgcaaaatggccaaatcagattgggttgttgtactcaaccttaacactgaacacgtatgtcctctgttcctacttcattattggcacaacgaccttgagcacaccgtgcttcatctcagctatgatcagggcaattttgtagagcttggccggcaagtcaattctggtagtgt

SEQ ID NO: 11347 - DNA, 607 bp, Glycine max
  unsure (1)..(607): unsure at all n locations
  Clone ID: jC-gmfl02220130h05a1
ctctaactttcctgatggtggtggtgggaggaaccaagctaatcgaagggaaaatggagtcaatcacactgcagagagaagtcatgctttgtttactcagccagtttcacagaaaactaagactaatacaacatcttaagctacaagagtttcagctgttgcaccccatggtgctgcaaatcaatccaatgggaaatcaggtcatgattctgctggccaatctcccatagttagtgtacctaaaagtacttcagctgctaaggacactggccatcaagaaaatgtccaacctcaagcagctgttgttgcagcagcatcctcccctagtcaaacctctggctcagttactaccactgaccaaggaaagtctgtgtcaagttctgatcaacttcaaacttctgtatccaatgtccattcctctttggatcttgtagtagcatcatctgtctcccggaatcctggtgtgagtggtgcaattagtanggaagttgggagcaactggatatctgccggaccaaatcatgttaaaggaaataaagttggtcatgaagttaatggattatcggcatccaagaatgacaaatatgggtccatgaattcaacgagc

SEQ ID NO: 11348 - DNA, 511 bp, Glycine max
  Clone ID: jC-gmfl02220130h05d1
gctccaaataaaattgtataattcaatgttctctgatatcaaaatgtaatatacaggtgagaatttagaacggaaaaattggtaaatctcacctaccaattcttggcttagtatattatcactaggaattaccaaggttcttatatagcaacaactaaatgttctctcgggtgaaagaggtgagggataaataaattggaggctcaaaaatagaaggaaaaaaatagagaaaaagaaaacctgcaactagcacccttcaaaatcgttagcaccaaatatctccaccaaaaacagttaataattttctttctctcattctttggccacatttttatttacacttcagatcaggccagtgttcatacttcctgcatctgagcacaccatgtgtgcatatgaacattatcgcaccaagaaaatgttttccagcctaaaaattagagttccaattgatctgtgcaggctgaggtggctgataagatcctgaaggggggcctacattttaacaggc

SEQ ID NO: 11349 - DNA, 616 bp, Glycine max
  Clone ID: jC-gmfl02220130h06a1
cagctattgaacgctcaaaatctgttgagtcagccattctaggtaaatacaacatttggaggaaagaaattgagaatgaaaatgtcgattctactgttcggttgatgcgggaccagatcattatggcaagggtatatttaaagcattgcaaagatgaagaacaaggtcgaactgtacgaagaactaatttaccggctcaaagagagtcaacatgctttaggtgatgcagtttctgatgcggatctacatcgcagtacacatgggaaaataaaggctatgggtcaagttctatcaaaagcaagagagcaattgtatgactgcaacttggtcactggaaaactaagagcaatgctacagacagctgatgatcaagttaggagtttgaagaaacagagcacattcctcagtcagttggctgccaagaccataccaaatggaattcattgcttatctttgcgccttaccatagattactatctccttcctcctgaaaagagaaagttccctgggagtgagaatttggagaatcccagtctttatcactacgcactgttctcagacaatgtcttggctgcatctgtggtgtcaactcaactttatgaatggcaggatcctt

SEQ ID NO: 11350 - DNA, 507 bp, Glycine max
  Clone ID: jC-gmfl02220130h06d1
caaagaatacagaaatatgatatttaatttctagttctgtccgagtatcaaatcagagtattgtacaatgaggaggttttatggtactaaacaaggtacactacttttgtaccttgtctaaaatgggtgactggggtagtgaacaaattaaatgaattgaaagcaagaatcgaggtgggaaagagatgatgttgggggacaaatatagatcatcattctagcaaagacgctgtagttgaaatagccaagccagaaaggtgatagaaaatatcagagaattcttctctgtactttggaccaaattatcagtactattcatttagcttacagtttcaaagatagggatgattgtacttgacatacttggcccagtaagaccgatattttgtcatggcaatttctaaccatggtttcatattaccattgtagtgtacaactgctgcattctcaatctctgatcgatccaaacttggattataacccaaaccaagtacatgccatgattta

SEQ ID NO: 11351 - DNA, 512 bp, Glycine max
  Clone ID: jC-gmfl02220130h07a1
cttgaccgagtttcgaaacgtcggaaagcagagtattccgctcctgcagtaccaatgattgagggagcatctgtccaagtgagaaattggtcatatgggaatttatctaatagagacgcacttcgtttttctcgtccgttatgaaatatgccaatgagagccatgttgacttaattgttgccgacgttgttggtgctgaaggggctgctccacctgaagtacagattgaacttttcaatgctcttattgatggctgtacagaagcagtagaactcggaaatcttgatgcagaggggcctttgctggattttctcggtgtacacagtgaaggcaaatgatctacttacccgtgttcaacaacttcaacttttggcaaagctcattggtcgatctgaagatcctattgcacaatttcgtgtgctgacatatctcaaaccatcaaactggtccaaaggttgcggatggaatcaaattgatgatgctagattgcttcttgaatacattaccatggg

SEQ ID NO: 11352 - DNA, 457 bp, Glycine max
  Clone ID: jC-gmfl02220130h07d1
caaaaattaaagctataattaccacaaaaatccaatacattgtttgcctacatcaactaacataatactttatggggcgagcagtaaaatcgaataaactcgcaaaattgacagtgctcaagaccctcaagttgtctatagcaagtgggtaaaactctgcgctttccaagatcttggccatgaccctttgcttggccatatcttcgaaggagtcgaaatcaaaacggaaaaggaaacacattggcaagactcggttttaatctggcattagatcttcccggctccagccatctccaaggatgtgaaccccaatgtagggatatttctcatatccgccgatacacaccaaaatgggatccgcaagggcttattcgcatgggtggaagaaaaaaattccacacattgtacaattgctgaagctgtataaatgcagagtgaaagccaagcagccacactc

SEQ ID NO: 11353 - DNA, 459 bp, Glycine max
  Clone ID: jC-gmfl02220130h08a1
ctgtaaccttttctctccggttaccaaaaccgtaagttgctgaacatggacccgcaatcgccggttcgggcggaactggagcctccggttccgacggtctccccacggttcgcgctcacatccagttcgcagcggaaaaatggcgatcgcggtcgatctgagcgactagagtgcctacgcggtacgctgggcggagcataactacctgcgaccgggcgacgccgcgatcctcctgcacgtgcgtcccacgagcgtcctctacggcgcggactggggcttcgtggatctgagcgcggcggaggacggcggcgacgaggagtcgcggcgtaagctggaggacgacttcgacaacttcacggcgacgaaggcgagcgacctgtcgcagtcgctggtggaggcgcagataccgttcaagatctacattgtgaaggaccacgacatgaacgagaggctctgatt

SEQ ID NO: 11354 - DNA, 497 bp, Glycine max
  Clone ID: jC-gmfl02220130h08d1
aagactgtaaaataagactttcgttggtacttaaatctataatgggatttccaaccatgaagtggatcaagagcctccaaatcaatcgtcaaagtagaaaggtagcacattcaaccctggtcaatgggtattgaaacactggagaaacaaacttgtacaaaagcatacaattgctaaccaaccaaacgaccactttacaatgtatagtttgttcaacgaagatacttctcaattctaacacattcttcttgatttgacacatgccttgctgctgtgagcagtttctgaagtttgtagggaaatagacattgctctatactttcattaagcatctgtgtgctcatcggaagcatcatgatacacctcatgctcctcctccggcacaggcggaagctccaccggttccccaacctgcacaacaagaccaccagcaccggtaccgttaccgttaccgttatcgttctcctcggtgttgcgcacaaccacaacgggacaca

SEQ ID NO: 11355 - DNA, 593 bp, Glycine max
  Clone ID: jC-gmfl02220130h09a1
accatccacaggcgctttgatttgaagggttcttcacttggacgaataacaattaagcccgagtcggagattagtgaaacaactatccttaaagatctggatctaaatttcatatttcgactacaaaaatcttggtttcaaggattttgcaggcaaattgatagggactgtgagcttctggaacaagagggaattatggactatagcctgctagttggtattcatttcaaagatatatcagaaaatggtgatcttatttcttcaagatctcatactcttgctggcgattcagagagtgaaggaactccctgtatttctagagtagacatggatcaacttcttctagatcctaccagttgggcgagtatcaaattgggggtgaacatgccagcaagggctgaaaggacggtgaggagaagtggatgtgaattacaacttgtaggagaaccaattggagagttctatgaggtggatctgatttttggtatcatagacatacttcaagactatgacatcagcaagaagctcgagcatgcctattagtccattcaatatgacccaacgtcaatatctgacgtggatcccagacaata

SEQ ID NO: 11356 - DNA, 497 bp, Glycine max
  Clone ID: jC-gmfl02220130h09d1
aaaaggattgattatgtacactcatcttccatttcctatataataatatacatctcaatttgatacaaaatgtattgagtgcttgtcatctcttcccccatttgggagaaatggaataaatatattctagcacaaaattttcttgctttcagcatttcatcatgtatactatataattactgccctatatatacatagaaataagctaattaagatcaaagttgaaaaaaatggatttgtacccaaagtcacatggacctcaattgtggttccaatagttgaaaaatttcaaggctaccgaggttgagagtagcgagggtatgaatggaatgtaacagccacataattgtgtttggctttcaagagtcttcagaaaatattttaaatatgaagtcacgaaaacgccttgaatattgtctgggatcaacggcagatattgacgttgggtcatattgaatggacttataggcatgctcaagcttcttgctgatgtcata

SEQ ID NO: 11357 - DNA, 505 bp, Glycine max
  unsure (1)..(505): unsure at all n locations
  Clone ID: jC-gmfl02220130h10a1
gtttaatacttacaggaaggtcatgcgaagcataagagacaacatcaccgaggaagatttgttgaatgaaataagtgagataattcgccttcccatgtatgctgacaggatcagaattgatagcaaagcgaatcagcatgctaatgtcgcaaggcgaaggtgatttggtggtggtttagatcagatcagggacttttatgccttcaatctttacattggtggtagtgggtgacatcaagtgaaaacaagatttcgtgtataccccgatacttgtctctgggatttgaatgaaattgtattggttttggctatgtattttggccatcatccaaaagatgcttatattatgtagatagttagtccttgcggtaagtattgctgtgctgctgagctgtatggtgcagttagtacggctcaaattccggcttgaatccatttactatgagatgccagatcaagagagttaggtgtagaatctcanatctcaatgtatatcatcaatttt

SEQ ID NO: 11358 - DNA, 476 bp, Glycine max
  Clone ID: jC-gmfl02220130h10d1
cggaggaagcaactttcaactgtttaaagaatcgatgaaaaaaaatgaagtctcactgttacctggggtttggtgtttgtacatattcttaacttaatcgtgcatcatgaatatgaggctagcatactaacactgattcttttttcacacccatttatctgaaccttatacattttcacctctgtgaatccgttcacacaattgcctcccttcacatccttccagaacaacaacatggtagatttccagagctacttttataacgagtagcattgactgggcttccatcagacgtgctaagtaacaaatgtgatgctggcactgttgacacagccttaacgcatgatgacactttcacatgcgcaaaacattaaagtgaatggaaggcttgctactactaaaattaatattcacatacaggggaaattctacccatgtgatggaacttgtctataagaaacggctaccctttgaac

SEQ ID NO: 11359 - DNA, 553 bp, Glycine max
  Clone ID: jC-gmfl02220130h11a1
agaacccctctgcttacctgtcatgctttcttatcctcttgatcattcttttcccaacccacgcacgtgccgacctccccggcacgtgggagcttctcgtcccggacgccggcatcgcctccatgcacaccgccgtcacgcggttcaacacggtggtcctcctcgaccgcaccaacataggcccgtcccgaaaactcctcccaaaaggccactgccggtcggacaaaaacgacgccgtcctgaagctcgactgctacgcccactccgtccacctcgaccttgccaccaaccaaatccgccctttaaaaatcctcaccgacacctggtgctcctccggccagttcctccccgacggcaccctcctccagaccggcggcgacctcgacggcctcaaaaagatccgcaaattctccccgtgcgacgacgcttcgtgtgattgggaagagctcaacgacgtcgtattggccgagggccgatggtacgccaccaaccagatcctccctgacggttctgtcatcataatcggcggacgcggctccaacactgtcgaatt

SEQ ID NO: 11360 - DNA, 513 bp, Glycine max
  Clone ID: jC-gmfl02220130h11d1
agctaccgtgcgccggggtgtcagtactccgtttcaaaaacgctccgtattgtgcacccccacaaaccacaatctcagctttagaatagtctccttctaaagctaacatcgctgatgaccctgcggaagggtagtttctcgggccaccttgtaatttagggtattccttaacgatgacgtggcggttgaaatcgtacatgaccgatcttgtgttagcgaaaacaaaaaggtgaccgtttgggagaaggcggacgtaggggtaaaggttatccatttgcgtgtcttccgtttcggataagaaagggaacgaaacggcgacgttttgtttgggtgggaagaattcgacagtgttggagccgcgtccgccgattatgatgacagaaccgtcagggaggatctggttggtggcgtaccatcggccctcggccaatacgacgtcgttgagctcttcccaatcacacgaagcgtcgtcgcacggtgagaatttgcggatctttttgaggccgtcgaggt

SEQ ID NO: 11361 - DNA, 570 bp, Glycine max
  Clone ID: jC-gmfl02220130h12a1
agaacccctctgcttacctgtcatgcttttttatcctcttgatcattcttttcccaacccacgcacgtgccgacctccccggcacgtgggagcttctcgtcccggacgccggcatcgcctccatgcacaccgacgtcacgcggttcaacacggtggtcctcctcgaccgcaccaacataggcccgtcccgaaaactcctcccaaaaggccactgccggtcggacaaaaacgacgccgtactgaagctcgactgatacgcccactccgtacacctcgaccttgccaccaaccaaatccgccctttaaaaatactcaccgacacctggtgctcctccggccagttcctccccgacggcaccctcctccagaccggcggagagctcgacggactcaaaaagatccgcatattctccccgtgcgacgacgcttcgtgtgattgggaagagctcaacgacgtcgtattggccgagggccgatggtacgccaccaaccagatcctccctgacggttctgtcatcataatcggcggacgcggctccacactgtcgaattctcccacccaacaaaacg

SEQ ID NO: 11362 - DNA, 461 bp, Glycine max
  Clone ID: jC-gmfl02220130h12d1
agttaccgtgcgccggggtgtcagtactccgtttcaaaaacgctccgtattgtgcacccccacaaaggacaatctcagctttagaatagtctccttctaaagctaacatcgctgatgaccctgcggaagggtagtttctcgggccaccttgtaatttagggtattccttaacgatgacgtggcggttgaaatcgtacatgaccgatcttgtgttagcgaaaacaaaaaggtgaccgtttgggagaaggtggacgtaggggtaaaggttatccatttgcgtgtcttccgtttcggataagaaagggaacgaatcggcgacgttttgtttgggtgggaagaattcgacagtgttggagccgcgtccgccgattatgatgacagaaccgtcagggaggatctggttggtggcgtaccatcagccctcggccaatacgacgtcgttgagctcttaccaatcacac

SEQ ID NO: 11363 - DNA, 333 bp, Glycine max
  Clone ID: jC-gmfl02220131a01a1
ggatctcttccccgaattcccggatcatggaatccattaggatcggggatttgtatcctactcaccttgttgacctgtaattagcacctgccgacccttccgtattatatcacctacacagtgggctccagatgcaccttagcgcgtacaaccacctccgtgccagttatgcatgcaacgtaccttactctagtgtgtggaacccctcatcttgtgggtttgactcatcctctggtgtggccactggaatgccgaattacaggtccgccgcgttggcaaagcgtagccacagtttcatcggtcgtggagctgctagcacccaccagcatcttg

SEQ ID NO: 11364 - DNA, 457 bp, Glycine max
  Clone ID: jC-gmfl02220131a01d1
gataaattggcatattaatttttatataaaaaagaatggtgctgcttactcaatggctaacactttgaggtccacttgctagagaaaatacatccattcacccgtagcgaaaacgggggaataaattacactattatacactaaaataaaataaagttcagcatccttcttcgttcaacgttcctccaagtcttccctgacctagaagtcggaactcttcgttcaaatctctggattaacctgaactttggtctctgccatatcatatctaatcctatccctaactataatattgtgtaacggtgcggatagtacaagcagcctcacccatgaataaataagttcattaatcaataaacaaactatgtcggaataaccaagaagcattgtcatggcagcagaccttgctgctcatgctaccattcgcttctgctctatatacagctgctccacccat

SEQ ID NO: 11365 - DNA, 583 bp, Glycine max
  unsure (1)..(583): unsure at all n locations
  Clone ID: jC-gmfl02220131a02a1
gcaagaataagaaagtctggacaaaagcgtgccaggcgtgagaccattgttggccctgctattgataagggtgtggctcatgagtctgttggagtaaaaccagccaccttggttccaaaggaaatccctgtgataaaaaagaaccatgtcttaaagataaacattgttcccaaagcaacagtgaaagaacataaagatgatgacacaacacaagagttacaagagccagaaaaagatgttccggatcctaacaaatttttgactccagatgaattggagagaggaaagttgcctcctgaggaaatcttatcccttccaatgtttaagaactatacagctggaaatcctgctcctgtgttgtatattaagaatttggcaaaagatgtgattgctgatgatttctattttatatttggctccttggttggaagtattgatgctgctaagtctggtcttcaagtcaaactgatgcangaaggacggatgaggggtcaagcgtttataacgtttccttccattgagttggcccatcatgcctttgatctagtgaatggatatgtattaaaagggcagcccatgatca

SEQ ID NO: 11366 - DNA, 295 bp, Glycine max
  Clone ID: jC-gmfl02220131a02d1
gggcaattacaagccggaaccccctaaaattcccctggaaaaaaaaggggcccattactaggctggaaaccaaagattttctaaacccaaaggaagggccctgccggaacccttggggccaaaaccctaattggcccacgttgggggaacccaagttcccatattttgggttcccccgcctaaaagggacccaaaaacccggggtttcccaaatgcctaatttaacccaaagggcccccctaagggaagggcccacccctttaaaaaaaaaaggggccctttaaccaccgttttt

SEQ ID NO: 11367 - DNA, 619 bp, Glycine max
  unsure (1)..(619): unsure at all n locations
  Clone ID: jC-gmfl02220131a03a1
gaagagaggaagttttggggtttgaatctatagaatagaatcaaaccaaattgaaagaagatcgatcgatcgatcgatggctctggtcggagttgaagtgaagcatgcggcggagggcgcaccggaggagaattgctccgccaagcccaccaagcagggcgagggcctccgccactactattctcacaacatccacgagcatcagctccttctccgtcaaaagacgcataacctcaaccgtcttgaggctcagagaaacgagctcaattccagggtgaggatgctgcgcgaagaattacagcttttgcaggaaccaggctcttatgttggtgaagttgtcaaagtcatgggcaagaacaaagtccttgtcaaggtccacccagaggaaaatatgtcgttgatattgacaaaagtattgacatntacaagattactccatccactagaagtgcacttcgcaacgacaggtatgttcttcacttagttctgccaagtaaaagtgatccattgggtcatctgatgaaaagtgagaaaggtcccgattctacttacgacatgattgtggtttagacccagcaaataaagaaaataaagagtcatgagtaccaatcaacatcct

SEQ ID NO: 11368 - DNA, 390 bp, Glycine max
  Clone ID: jC-gmfl02220131a03d1
agggggcctgaaaataaatcttttaaaaaacccctataaaaggagggggcccccccaaaaccccgacccgggaaaaccccaagaaagaatcctttgaatcgggcccaaacttgggaaacttaagccaaaagaaaccccatgcccctggaaatggaaaaacccccaagggggggccgccgcccattttcgcgggaaaataatgggccccccaaacctgaaaaaaaaaacccttccacaactttcccaaagacctggttttttcaggcccctttttcaacaccctggccccagccctttgaaaaaccccccgggtcacggggaccctccggtccctcaagggaaacattccacctttggggcaaacagcccttagttcaacccccgaggccc

SEQ ID NO: 11369 - DNA, 575 bp, Glycine max
  Clone ID: jC-gmfl02220131a05a1
caaacactagcaaagggaaggaaaagtaccttccccaataacccttctctccgatttggcttctctcatcggagggaaacaatcaataaaagaaaaaaaaaacccacaaaaagattataacaaaaaaagtatgaaaggaaaagtactaggttccgcagtttctctcatcctagtggtgggtgtggtaattggcgtggttgctgtagttcaaagcccaaagggcgtgaacaacaacaacaatggaggagaattgaaaaccagcaacagggccgtgacagcgttgtgccaaggctcagacgaccagaaactgtgccacgaggttctgtcatcttcgaacagcacagacccaaaggagtacatcgcaaccgtggtgagaacctcgatggcagcgtgatcaagcgttcaacatgagcgacaggctgacggtggaacacggcaacagcagcgccggaatgaagatggctctggaggattgtaaggacttgttgcagtccgccatccacgacctagaggcctcagccgtgttggtcaaagagagcagcctacaggacgtgcaccagcgcaccgtcgagctc

SEQ ID NO: 11370 - DNA, 542 bp, Glycine max
  Clone ID: jC-gmfl02220131a05d1
gtcgacgagctaaccggcggccgccctttttttttttttttttttttttattttttttttttttttggcaaattaagtagtttccattaaatagccaaaagcaaaattcccattgcttctcccatcatcagtctatgttatatgcatactgaagacagagatgaagtggttgatacaaaaaggcataaatcataaatatgaaaagcttattgaatgattacaaatcagctcctcagacaatggagtggctatgtgtgactgcattgaaattaggtaatcgatttcctggttatagttttattaatttaggtaggctaaaaaagagattataacactcaagatgctggtttgtctcggatccttaagctttggtgaagctagcatcgaaaggaacgccagcagcaggcaaccaagtgctagcttggagccaaggctcagcagtgaattgtgcagcctcctgcttgctaatgagacctttgccaaacttggctcttgcttgagcaacggaacctggtccagtgttgccaaactcagcgaagtag

SEQ ID NO: 11371 - DNA, 601 bp, Glycine max
  unsure (1)..(601): unsure at all n locations
  Clone ID: jC-gmfl02220131a06a1
ccttaatgtctttgatgagtttaaggaaagcactaaggttgacaaggtggttgtcctgtggacagccaacacagagaggtacagcaacctagttgtgggactaaacgacaccatggaaaacctctttgcttccttggacaggaacgaggctgagatttccccttccaccttgtatgccattgcttgtgttatggaaaatgttcctttcatcaatggaagccctcagaacacctttgtcccagggctgattgatctggccatcaagaggaacagtttgattggaggagatgactttaagagtggtcagaccaaaatgaaatctgtgttggtggatttccttgtgggggccggcatcaagccaacatctatagtgagttacaaccatctgggcaacaatgatggcatgaatctctcagcccctcaaaccttccgctctaaggaaatctccaagagcaatgttgttgacgatatggtcaacagcaacgccatcctctatgagcccggtgaacatccagaccatgtggttgtcattaagtacgtgccttatgtangggacagcaagagggccatggatgagtacacttctgagatattcatgggg

SEQ ID NO: 11372 - DNA, 398 bp, Glycine max
  Clone ID: jC-gmfl02220131a06d1
ggataacttgatattaattgattacatacatgcatagctggcctgctctcaaataagtcggcaggaacagacatagagagattcaacgatcttcaaatttcacatttgccagaaatatataacagaatagaggggtatgggatatgagttaagttttgatcacattgaactacactatcccaaaccggtactcttaagactttgaacttcacgttgcactctaggatcatgttgttctcaggagctcatccaacgacaagccctcatgatgctttgcagcatagcgtcgctgctttgacaactgattgaccactggggtacccggtggaaccagaggggccttggtccagtgactcaggatgggcccaactgggtggaatgagtggaatttttcgtac

SEQ ID NO: 11373 - DNA, 555 bp, Glycine max
  Clone ID: jC-gmfl02220131a07a1
agcgagcgagcagtttcaaagagaggatttgggattgggaaggcgagggattgcgctgcgtctcttcctcttctctttcgattcatccctcattcataatcttccaatccaacaacctcagcctcacactcacacatacacacatctgaacgcgtatcgtccctcccatggcttcaaagcgcatcctcaaggagctcaaggacttgcagaaagacccaccaacttcttgcagcgctggtccagtagctgaggacatgttccattggcaagcaacgattatgggtcctgctgatagtccttatgctggaggtgtattcctagtcactattcactttcctccggattatcctttcaaacctcccaaggttgcctttaggctaagggtgtttcatccgaacatcaacagcaatggtagcatttgtcttgatatccttaagaagcagtggagccctgcactcaccatctctaaggtactgctttctatctgctcattgctgactgatccaaatcctgatgatccacttgttcccgaaatcgctcacatgtacaaaactg

SEQ ID NO: 11374 - DNA, 285 bp, Glycine max
  Clone ID: jC-gmfl02220131a07d1
aaaacatatgactatttctacattacttcatagagtaacaccacagccatgacacaaataacatcttgttcatgcgttcgcatcatgataaaaacatcacagtggctgttgaacatagctatttttatcaaattaagacaccgcccttccctatcccctcataacaaacataatcttaccccagaaaaacaggaagagaaaagctaacccaccaaagttttcatagatgccatccatttcaatatacattatctaaacacatatcagcccatggcatacttgtgg

SEQ ID NO: 11375 - DNA, 549 bp, Glycine max
  unsure (1)..(549): unsure at all n locations
  Clone ID: jC-gmfl02220131a08a1
ggcgaggaagttgtcgttgcccagggcgattttctacatcgtgatgcaatgcttgggtgctatttgtggcgctggcgtggtgaagggtttcgaggggaaaacaaaatacggtgcgttgaatggtggtgccaactttgttgcccctggttacaccaagggtgatggtcttggtgctgagattgttggcactttcatccttgtttacaccgttttctccgccaccgatgccaaacgtagcgccagagactcccacgtccccattttggcacccttgccaattgggttcgctgtgttcttggttcacttggcaaccatccccatcaccggaactggtatcaaccctgctcgtagtcttggtgctgctatcatcttcaacaaggaccttggttgggatgaacactggatcttctgggtgggaccattcatcggtgcagctcttgcagcactctaccaccgggtcgtaatcagggccattcccttcaagtccaagtgattcaatcaacggttcatgcttatcaagttgggaacaacaacacaacaaanatcaag

SEQ ID NO: 11376 - DNA, 559 bp, Glycine max
  Clone ID: jC-gmfl02220131a08d1
atatgactctggtgttatttttgattttgcaaattaaattacacaatcacagccgtacatcacacatgagttgggcctcttccaacttaaaagcagaggataacattggcccatgacgcgacacatgcaccacctaataatcataattttacatctttacatacaaaatacaaagactttaaattttaaaaagaagaaaagagataaacagatcatcttaatgaaatgaaaccaaaacccacaaacattggcttgatttttgttgttgttgttgttcccaacttgattaagcatgaaccgtttgattgaatcacttggacttgaagggaatggccctgattacgacctggtggtagagtgctgcaagagctgcaccgatgaatggtcccacccagaagatccagtgttcatcccaaccaaggtccttgttgaagatgatagcagcaccaagactacgagcagggttgataccagttccggtgatggggatggttgccaagtgaaccaagaacacagcgaacccaattggcaagggtgccaaaatggggacgtgggagtc

SEQ ID NO: 11377 - DNA, 512 bp, Glycine max
  unsure (1)..(512): unsure at all n locations
  Clone ID: jC-gmfl02220131a09a1
tgccgataccacagattgtggtttggagatttcttcagaggtcaaaaggttcagatgtactagcaacaaagcaggccttgttgtacattatcttgcttcagtatgttcctagatttctccgaatggtaccgttgacttcagagcttaagagaacagccggtgtctttgctgaaactgcatgggcaggggctgcatattatttgctgctatacatgcttgccagtcatatagttggtgctttttggtacttgttagctattgaacgcaatgacacatgctggcagaaggcttgcagtgacattgggtgcaaagaaaatttcctatattgtgggaaccggcacatggaaggttatagtgcttggaataaaacaagtgaagatattcagtcaaggtgctctgcgatgngtgatcctgcacattntgattatggaattttcgggcaagtcttgtcttctggcatcatttcatctaagaagttcatctccaatactggtactggttatggtgggggc

SEQ ID NO: 11378 - DNA, 531 bp, Glycine max
  Clone ID: jC-gmfl02220131a09d1
attctgtcaaccagtaattatataacttcaataataaacttgagaatagtacataagtttacatgctcggtggcccacagccaagttggcttaatgtataatactataatttacaaggacacagatgaagagtcattacaagtcttgaaacccttacaactgtaaccaggataattgtataatacattgctttcgacctttcttcacaaattcaatcatcatagtcaaccaaaacaagcattttaagagaacacatggaaattttagtcagcatcatccgcagagaagtcaggctcagggggtttctgtagtttcactaactccctggcagtcttggcaagtcgattgcgatgtacaccacgtagagtgtgcgcagcaaactttgaggctaacaaggcagcaccaaagctgtaggaactgccaccaacattttcatgagttccgtctgactcatcttccttttgacgaagcttcataattttcttttttgaataccgacgccatgctgcttgaataaagcatgcagcccag

SEQ ID NO: 11379 - DNA, 550 bp, Glycine max
  unsure (1)..(550): unsure at all n locations
  Clone ID: jC-gmfl02220131a10a1
aaaaggatatatacaagttcttgtacttgctccagacaatatgctgggaacttcagctatggttaagataacatccgtgggaaggtggtcagtttttggggatgtaattgagacagtgaaccctgtaagtgacaataaagctctaaacaagctggttcctaatcaggattgcggtaactcagccaagactggtggattttcagaagagccagaatattgtgcctgtggaaatgacatctgttgtggtcagggtactctcgaaaataatgataattcaagaggcagtgcagtgccacagaaccaaagcaaaagaaatttcattggatggatgctgaggaagcgggagcatctgcacaaaacggttgagagtgagcttgcctcgggatctgttaaaaagcaagaaggaatcatgaggaagtgggacttcgttgataaggttcttttgggtggaatatctatcagcatcttgacgattatggctctagtagtagctggtatgtttagagttatttggtcccaataaaggttntagttnttccgaatcaatctg

SEQ ID NO: 11380 - DNA, 502 bp, Glycine max
  Clone ID: jC-gmfl02220131a10d1
ataacaagctagttcgttcgttctcataaatcatgccccaaagggttttctatgaatcatatcatatatcaatacaactgccgtaaaacctaaagcaagatgcggatacatgtgaaaacacttaataaaatgcgatcaatttgcacgagccaaaattttggaacgacagattgattcggaaaaactaaaaccttttattgggaccaaataactctaaacataacagctactactagagccataatcgtcaagaggctgatagatattccacccaaaagaaccttatgaacgaaggcccacttcctcatgattccttcttgctttttaacagatcccgaggcgagctcactctcatccgttttgtgcaaatgctcccgcttcctcagcatacatgcaatgaaatttcttttgctttggatgtgtggcactgcactgcctcctgaattatcattattttcgagagtaccctgaccacaacagatgtcatttccacaggcacaat

SEQ ID NO: 11381 - DNA, 417 bp, Glycine max
  Clone ID: jC-gmfl02220131a11a1
gggcagggcaaggcaagatcttccaaagttaattagactggcagaaacaggtatcttcaatcttggccatgctgtttcaagaacatacacttttgaggaggcgggaaaagcattccaagatctcaatgaaggaaaaattgtcggtcgagctgtgattgagataatatagctctatattcccagaaatgcttttctgcagcagcaatagctatgcttttcacaccccacaagatatacatgctttggagttgcaaggtgttggtaccctgagaacataaataaatagatgtcttctgatgtttcattgcaggggcatgttcaaatgaaaactgtttttctttttgtgcatttctttgcttctaactcatgtaatcaggtaggtacaccaaggtgaagaataatagtctctgaatgctc

SEQ ID NO: 11382 - DNA, 401 bp, Glycine max
  Clone ID: jC-gmfl02220131a11d1
gagcattcagagactattattcttcaccttggtgtacctacctgatttcatgagttagaagcaaagaaatgcacaaaaagaaaaacagttttcatttgaacatgcccctgcgatgaaacatcagaagacatctatttatttatgttctcaggggaccaacaccttgcaactccaaagcatgtatattttgtggggtgtgaaaagcataactattgctgctgcataaaaacatttctgggaatatagagctatattatctcaatcacagatcgaccgacaatttttccttcattgagatcttggaatgcttttcccgcctcctcaaaagtgtatgttcttgaaacagcatggccaagactgaagatacctgtttctgccagtctaattaactttggaagatc

SEQ ID NO: 11383 - DNA, 576 bp, Glycine max
  unsure (1)..(576): unsure at all n locations
  Clone ID: jC-gmfl02220131a12a1
aaaaagaattattggatatcatagataatctctttatcaagaattatatatcggaagatgcgattctagatatggaaaaaaatatgtatagaaagtattttgattggatgggaatcaatagagaaatactaaatcgttccatatcgaatccagaattttggttcttttcaaaatttgtgatattttatgacgcatataggggtaactcgcaggttataccaatcaaattactttttttttcttctaatgtaaatcaaaatgttagtgaaaataaaaagaacattactagaaagaaaaaaaatgaatctcttgaattggagttagagactcgaaatcgggcaaaagcagaataccctgatcaacgaaatcttgaatcatctatctcaaaccaagaaaaagatattgaaaacgattatgtaggatcagacagtgaaaagaatagtcagggtataaagaaaaagaaagacaagaacaagatggaggcagaacttaatttcttactaagaaatnttttgattntacatttaaattggaataatttcttaggtcaaagaatatttaaacatgtcaagtata

SEQ ID NO: 11384 - DNA, 586 bp, Glycine max
  Clone ID: jC-gmfl02220131a12d1
gatctcttgttcttgtaatatatttataaaaattgttcttattaacatgaattttttctgggtatttgtgataaatttttcgtttattcttttgaattaatgaaagacctatggtttgatacataaaaaattgtttattgttttttctagacaggcgaactggttcgataacaaatatttcttttttcataaatttgttatttttctttttccttaagcctagaagaattaaattcttctgattttgaatcatcataatatctagacctagttctcctctttgaatagaggctattgtaatttctcttaaattttttaatctaatcaggagacaatatactttgacattgttaaatattctttgacctaagaaattattccaatttaaatgtaaaatcaaaaaatttcttagtaagaaattaagttctgcctccatcttgttcttgtctttctttttctttatacccttactattcttttcactgtctgatcctacatatatcgtttcaatatctttttcttggtttgagatagatgattcaagatttccgtgatcagggtattctgcttttgcccgatttcgagt

SEQ ID NO: 11385 - DNA, 539 bp, Glycine max
  unsure (1)..(539): unsure at all n locations
  Clone ID: jC-gmfl02220131b01a1
aaaggagcgagatagcgaggaaatttggttcttacttcttacccgcagacagaggaaggaagggaaatagatggaagctgtgtgtggaagtggaagcagtgtttgggtcacatcctcccttacacgctcacccaagatcacactccctctattccacgccagttaccagcacctaacagcatttccttcacaatcccttcttttctcctatcacccttctcgctatgctaatgctagaaccctccgcgccagaacctcctccaaacccattttccttccccacttaattgcttctctggaacaagttgaccagacttacattatggtgaagcccgacggcgtccaacgtggcctcgtgggagaaattatttctaggtttgagaagaaggggtttaagttaactggcttgaagctcttccagtgctcaaaggaattggccgaggagcattacaaggacctaaaacaaaagtcatttttccctaagctgattgactatattacttcangtccttgtgtgtgtatggcttgggagggtgtgg

SEQ ID NO: 11386 - DNA, 583 bp, Glycine max
  Clone ID: jC-gmfl02220131b01d1
aaaaaaaaaaacaaaacatcgcatgacccattcaaatctgatagaaacagaaaatgtaatgccaggaataggcttggagaatccgagtcaaaaagcaaaattttacaaaatttgagttactgtttaaactcgattaatgcagttattgaacctagaaacggcaagaatcattctaattgggcatctgtggtttattattctctcagccatggtgattggactggggtccaatcgcatacttcgccttccttgaaccatagagctatttcacgcttgccattctcagggctgtcactgccatgaacaacattccttcctgtttgaacagcaaggtctcctcttattgtgcctggttcagcttgaagaggatctgtagcccctataagcttgcgtgccgatgccactactccaacaccctcccaagccatacacacaacaggacctgaagtaatatagtcaatcagcttatggaaaaatgactcttgttttaagtcctttgtatgcttctcggccaattcctttgagcactggaagagcttcaagccagttacttaaaccccttttctcaaacctagaaatattt

SEQ ID NO: 11387 - DNA, 400 bp, Glycine max
  Clone ID: jC-gmfl02220131b02a1
ggtgtgtgcagcgcgctaaactagttggattcgaacttggagatcaaagaagtttatatgtttcgccaaaatttgagcaggggacctctcaaaatattgacgaggtggctcatattccttactatcttacaagtcagttgtgctatcaaagatcctgatgtagaaggtgaagctctgcttgatcttttgcatttcctcaatgattccaataagcaaataacggactgggacagttttttagtgagcccgtgcttcagttggtctcatgtcacttgtagaaacgggcatgtcatatccctggccttggcttcagttggattttctggaacgctttctccctcaattatcaaattgaagtatttgtctagcttaaaattgcagaacacaacctttctggacc

SEQ ID NO: 11388 - DNA, 389 bp, Glycine max
  Clone ID: jC-gmfl02220131b02d1
gcaagcacaagccattaatttccatggttacaaaagcaacacagttgggatatatacatttgcaacctaaattttctcctgttcgaatatgtttgcctgtgccaaatccccctcattcctttcctttcttttccatcgtacatccagcattatttaaacacaggcttttttagttaattatacatttttctttagagaacattaaattacacataagtatagtatatcagtatatggtatattctatgccataccaagcaaccaaatttcaaaattgactctccagctctgcttatcttgctctggaaagctgtatggcttcttgatcaagagtagactcatcattccaaacaaattggtgagtcatgagtgagaattcttgattccta

SEQ ID NO: 11389 - DNA, 337 bp, Glycine max
  Clone ID: jC-gmfl02220131b03a1
gggtcaaccgtgacgccacaatcgctcttgcgcgtttcaatcgccttcgacttctttgcaacgggatcaggtgctcgtccttcacgatggcgggaactgaagcaaaaaaaactgaatccaaaaaacctgccgctaagcaatccggtgggaagaagaaggaggtgaagaaggagactggcttaggtctcacgcatcggaaggcggagaacttcggagagtggtattccgaggttgttgttaatgccgaaatgattgaatactatgatatttccggttgctatattctgaggccttggtcaatggcaatatgggagatcatgcaagagtttttcgatcc

SEQ ID NO: 11390 - DNA, 339 bp, Glycine max
  Clone ID: jC-gmfl02220131b03d1
ctggatcgaaaaactcttgcatgagctcccatattgccattgaccaaggcctcagaatatagcaaccggaaatatcatagtattcaatcatttcggcattaacaacaacctcggaataccactctccgaagttctccgccttccgatgcgtgagacctaagccagtctccttcttcacctccttcttcttcccaccggattgcttagcggcaggttttttggattcagttttttttgcttcagttcccgccatcgtgaaggacgagcacctgatcccgttgcaaagaagtcgaaggcgattgaaacgcgcaagagcgattgtggcgtcacggttgaccc

SEQ ID NO: 11391 - DNA, 372 bp, Glycine max
  Clone ID: jC-gmfl02220131b04a1
gggtcaaccgtgacgccacaatcgctcttgcgcgtatcaatcgccttcgacttctttgcaacgggatcaggtgctcgtccttcacgatggcgggaactgaagcaaaaaaaactgaatccaaaaaacctgccgctaagcaatccggtgggaagaagaaggaggtgaagaaggagactggcttaggtctcacgcatcggaaggcggagaacttcggagagtggtattccgaggttgctgataatgccgaaatgatcgaatactatgatattgccgggtgctatattctgaggccttggccaatggcaatatgggagatcatgcaagagcctttcgatccagaaacagccttcatggcttgatgatctccaaaaa

SEQ ID NO: 11392 - DNA, 339 bp, Glycine max
  Clone ID: jC-gmfl02220131b04d1
ctggatcgaaaaacttttgcatgagcttgcatattgtcattgaccaaggcctaataatataacaaccggaaatatgataatattcaatcatttgggtattaacaacaacctaggaataccactctgcgaagttatccgccttccgatgcgtgagacctaaggcagggtcctttttcacctgcttgttcttaccaccggattgcttaccgggaggtcttttggattcagttttttttgcttcaaatcccgccatagtgaaggacgagcacctgatcccgttgtaaaaaagtcaaaggcgattgaaactcgcaagagctattgtggcctaaccgttgaccc

SEQ ID NO: 11393 - DNA, 557 bp, Glycine max
  Clone ID: jC-gmfl02220131b05a1
gacgcagtacataacaacttttgtttccttggcgccgccacaccaacatgtcagccttcactatttccaacaacgccgccgccgccaccgccacgtggccactcccccaattcaacacttgccactttccgcactctccatccattgttcttcatcattccctcctcaacatccgcgctttcaggatccactgtgtccctcaagaacctctccccccattacaacaacaacccaaacacgatcaactttctcccggaggcgacggaggccacggtgacgccggcggtggcggaggcggaggcggagatggaggtgaaggaggaggagacgaagagttcggacccttgttgaagttcgaagcggttatgagagaatctgaagctcgtggtgttaagttgcctccggatatggtagaggcagcgaggatcaccggcatccgggaaatgtttcttcttcgttacttggagttgcaaggttcgtcttggccactgtcttttctgatgcagcattgtgctatgctgagaaatcgaatgctagctgacccttcttttcttttc

SEQ ID NO: 11394 - DNA, 95 bp, Glycine max
  Clone ID: jC-gmfl02220131b05d1
atatcataaacacttcagggggggtctgtgacaacattttcatccttaaaaaaaagccccaccacagaaaaataggggacgaggtccaatcgctg

SEQ ID NO: 11395 - DNA, 538 bp, Glycine max
  unsure (1)..(538): unsure at all n locations
  Clone ID: jC-gmfl02220131b06a1
ctctcaaccctttatccatctagaggtgcagcggctctcttctctgcacactccgaatgcagtccacactcttcaaccccacccattcccttatccacacttcaccacactctatcagacccaatcctggtcatgctgctctctccgatcgcgccttcatcgccgtggaaacccccacggagactgtgaatctgcacaaggactgttaccgcatcaccgagcccaaattgtatggcgcctcccaagccgtgctctacggcgactgtctctccgcggacgacatggccaaaccccacgccgacgcctgctcagcctggtacgagggcatcacctgcaacatgcaccttcttcacctctccgaggccgttcgcgacagcgctgctgctgctgacatggacaccttccgcttcacaccgttggcgtcaacgacgccatctacatgagcacccgtggcatgtgctacagccttcagtccagtgacctcattgcctacaggatcgataccganatggcataacactggtaccatggcaatatt

SEQ ID NO: 11396 - DNA, 395 bp, Glycine max
  Clone ID: jC-gmfl02220131b06d1
agattacttaatgtactcacggttgtcacataacgtgtggtagaaccaacattatcatcgttaaaatcaagctagtcatcggcaaggcactatgcatgcgagtcctaagcctacttttgcagtggccatttcggtgaatccttagtgtctactgttgctaactaacaatggcagctatgcctgacactagaaacagggtagctctagaaaatcataaatattaaatagtcactaatcaatagtagcaatccaatttcattgctgtaaattctctgcaatgaggtatggatttgaatttttaccaacttgtactggaaacacaagacaaaatgtcaccacggcatactatcagcttttgctctgccggtatgtctatctactcggctgttacgcat

SEQ ID NO: 11397 - DNA, 377 bp, Glycine max
  Clone ID: jC-gmfl02220131b07a1
ctcccaccgcaacacagaacccatggagcagagccccaacccgactctcagttcatgtacagtccatactgtttgaaccttaggaacgcctcttccactctgcagaattctctatcttaattgttcttgacactgcggatctcgatgaccgtgctgtaattgccaagtctaatgctgatcataatgagcttgagccacttgactgttacgaggaagcacaaccctatctctatggctctgtctgagctgcgctgattctgcgctgcagctgaccagcacgaccatgcaaagatggctacgattccgtactagctttgccctataccttaccaggattcactcatggcacttgaatctgagatacagcacgctactgc

SEQ ID NO: 11398 - DNA, 245 bp, Glycine max
  Clone ID: jC-gmfl02220131b07d1
ctgatataacgtagggtgccctatagtcaggaactacaaaatcaaacttgtaaacgtggacgccctatgcatgcaatctctaaggttactatagaggttaccatgagggtgaaacccgattattgactgtacccaagcaacagtggttaatctgcctgaatctgggaacaaggtccccgtatataattataaatgttggcctgatgctcctaaatggtgatactcatattgcactgcacgaattt

SEQ ID NO: 11399 - DNA, 457 bp, Glycine max
  Clone ID: jC-gmfl02220131b08a1
cacacatggcaatgaagaagcccttgtgggttgatccgtccctatgttcggtccttggactggccattagctttgattctcacgacaaggatttggagtccgaggaaagcctgtgggacttgtacgagagatggaggagtcaccagacggttccgcgaatccttggtgacaagctcaagcggctgaacgtgttcaacgcgaatgtgatgcatgttcataacaccaactcaatggataagccttacaagctgaaactaagcaagtttgctgacatgaccaaccatgaattcaggagtacctatgctggctcacaggttaatcaccatagactgttcatagacatgccacgtgggaacgggaccttcatgtctgctacggttagcagtgttcctgctacagcggattgtatgaagacaggtgctgtaactgatgtagcagatcaggccattgtggtagt

SEQ ID NO: 11400 - DNA, 481 bp, Glycine max
  Clone ID: jC-gmfl02220131b08d1
gtaataagcatatatatattgatggatacactggcattggatcggagatactaatagaaaacaccaaccaaagctaattagagtatgattttgtgggaagcattcaaacttcaaagttcatctttaggagatgatgaaggtcctgacggattattggaggagtttttgattgggtaggaagccaacatagctatgccacaaagaccctcctttttagatatgttcctttgcattctgatgtaaccctgttctccccattctggtccccaagagttcctcactatccagtaactagtcccatcaacagttgctacataccccacaatcgccacaccatgatttagctccgtgctacaatcaccagtaaatactgcctcggagtataactggaaatcagataccccggcatcaatggcttcagaaacaggttggttggcgacagctttgagcaatgcattttcatggttaccaggtacattct

SEQ ID NO: 11401 - DNA, 356 bp, Glycine max
  Clone ID: jC-gmfl02220131b09a1
gttctattttgtgaatgtaaccatagtggatagagccgctattctgcacattccatggacaggaccttattgttgattctgaataggagctgaattatggaaagcattatgtgtgactcttattcaatggatgggggaaatacacaatggttacaggcatcctttgtgaggaactcacaatgcccaacctcatggacatatatgatatgcccagggatatcgctgcctctgaggtgactgcatagaaagctgtactaagctgggacgatgacagaacgaaccatgagatcgagactacctgctgctgcttcacaggatgatagacgtgacggatcccatgcacgcatctatgaacc

SEQ ID NO: 11402 - DNA, 407 bp, Glycine max
  Clone ID: jC-gmfl02220131b09d1
gttattatcttttttttattgatggttacactgtcttttgtatcggagtatactaatattaaaacatcaatccaaagctaactagaggatgattttgtgggaagcatacaaacttcaaagttcatctttaggagatgatgaatgtcctgtcggattattggaggagtttttgattgggttggaagccaacatagctatgccacaaaggccctcctttttagatatgtgcctttgcatcctgatgtaaccctgttctcacgattctggtccccaagagttcctcactatccagtaactagtaccatcaacagctgctgcataccccataatcgccacaccatgatttatcttcgggctacaatcaccatgaaatactacctcggagtataactggaaatcagagaccc

SEQ ID NO: 11403 - DNA, 509 bp, Glycine max
  unsure (1)..(509): unsure at all n locations
  Clone ID: jC-gmfl02220131b10a1
gagtctttctctgctgctgcatcaaaagcttctgcagcaccatcttcagccggaataactcctccagctgtgaaaattaatgaaactgacaagatgtggcattaccaggatccatctggaaaagttcagggaccattttccatcgtgcaactacgcagatggagtaacacaggatactttcctgctgatttgaggatttggagaaccactgagaagcacgatgattctatactcttaacagatgccttgacagggaatttttctaaggaaccatcaatggtggataaagctcaatcggggcatgatgtacattacccatcatcatactctaggaagtctccacgacaaggtatagaaggtcaagtaggagaaagactgtcattagatcagaatggtggatcttggaattcacatagtactctgggttctccgggacaaaccacaggangaagttggagatctaaagataatatgaactctatagctaatagaacttctccattggcagt

SEQ ID NO: 11404 - DNA, 342 bp, Glycine max
  Clone ID: jC-gmfl02220131b10d1
ttgagatttttttttttctaacgtgatttttttccgattgtatcatttgcctaaaaggggcgtgaactctgttatcgtctgaaacttggcattagtcaggggcgcgttaatccctgccgcgatcgacgactgacatagatgatggagagccccgactcgcacaggtgtctcagacctagtacatgtctacactacgcacgacctctacttcggagagtactgttccgtggcctactttctcctgccacgctggagcgagtagtacagcaacgtgagtaccctgttggccgatgtccccttcgagacagatgcagtctgctgactcttggagtccaccgtctg

SEQ ID NO: 11405 - DNA, 476 bp, Glycine max
  Clone ID: jC-gmfl02220131b11a1
gtgtctctgtctgctgctgtatcaaaagcttctgcagcaccatcttcagacggaataacgccttcagctgtgacaattaatgaacctgaaaagatgtggcatcaccaggatccatctgggaaagatgagggaccattctccatcgtgcaactacgcacatggtgtatcacaggatacttgcctgctgatcagaggatttggagaaccactgagaagcacgatgcttctatgctctcaacagatgccttgacagggaatttttctaaggaaccatcaatggtggataaagctcaatctgtgcatgattcacattacccatcatgatactctaggatgactccacaacatggtatccaaagtcacgttgtagatagactgacatttgatcaaactggtggctcatggcattctcatattactgtgcgtactgcgggacaagccacaggaggacagtgaaagatctaatgatcctacga

SEQ ID NO: 11406 - DNA, 304 bp, Glycine max
  Clone ID: jC-gmfl02220131b11d1
tttagtttttttttttattaacgcgcttttttttcgagattattattagactaaacgccgctgatgagagctaaaatacttaacccgtgcagtcatcaatcaccatcatcactttacactcaatgacaagctgccacaaatgccacagattgtcctgagcacccatgacccgactatgttgcatgtatcaaagacgcatccactttatacagaagtcatctgtccggaggctaatattcttctccgccctataggtcacgcggcccacggcaagtctacagtggcgaaagcaatatcctgtgtg

SEQ ID NO: 11407 - DNA, 574 bp, Glycine max
  Clone ID: jC-gmfl02220131b12a1
cgaagcctcttaacatcacgcgctcccaccgcgtctcgtgccagtcccctgcatgttccacagcacactcctccgtctcctcccacgacctctgcgcaatcgcacgttgtcctttggacaacattgaaacctccgattgctcttctgccacgtgtcctcccttctactatgcttacggcgacggaagcttcatcgcgcacctccaccgcgatacactctccatgtctcagctttttcttaagaacttcaccttcggctgcgcccacactgcgctcgccgaacccaccggcgtcgcaggtttcggtcggggattactgtccctccctgcgcaacttgcgaccttatctccgaacctcggtaaccgtttctcttattgcttggtctctcactctttcgacaaagaacgagttcgcaaaccgagtccactcattctcggccactacgatgattattccacgagcgtgttgagtttgtttacacctccatgcttcggaatccgaagcattcttatttctactgcgtcggactcaccggaatctctgtagggaagaggactattctggccccggaatgc

SEQ ID NO: 11408 - DNA, 516 bp, Glycine max
  Clone ID: jC-gmfl02220131b12d1
caaacaaaataataattattattattatacacaaaataaatatcacaaaattaaaatataaaaaaatctaaccctgtagttcacgttttagttttgacctagtgtcaattacatacacatgatcgtggaattggggaacggagcctgaacccaaacccaaacccgtcaacttattttccatttacaagatccgacccgacccactggcatgggggcagtgatccagtggtaaacagaacacagtaacactagtttttgtcacggttgagactatcccaaagcgacgcgcattgcctcttatcaaaacccacgcgctggttttccaagtcatacacgacctcaaatccttgctgttgatagttcccaagtatggccccgggcccaccgctcagttcagtgtcatcaccaccgttcattagcatcagacagcccaccttcctcctagcctcatcctcaccgtccaagaactcgtaaaaataattcatcctaggcagcatcacattggaattattcccc

SEQ ID NO: 11409 - DNA, 564 bp, Glycine max
  Clone ID: jC-gmfl02220131c01a1
gttcaattatagcttctcatggaagccctccgcttcacgcaaaaatgtagtcaagaagaacagcttcatatcaagacagacatcgaatgaaggacaaagtttccttccaaaagaagaggaaatgaaatgggtgttccagaaatttgacaccaacaaagatggcaaggtttctcttgaagagtacaaggctgctgcaagggccttggatagggccattggggaagctgaagcagtgaaagcgtttagggtcatggacactgatgaagacggcttcattgacttcaaagagttcatgaagatgttcaatgaagagggtaggataaaagaaactgagatcaagaatgcttttcaagtgtttgatttgaacggcgatgggaagattagtgctgaggagttgtcccaagttctcaaaaggctaggagagagttgcagccttagtgcctgtaaaaaaatggtcaaaggagtggatgggaatggagatggctctattgacttgaatgagtttacgaggatgatgatgagtgggaagatactatgctaagtattatgactttggaatataaa

SEQ ID NO: 11410 - DNA, 521 bp, Glycine max
  Clone ID: jC-gmfl02220131c01d1
aaaaacaaaacatttgccctatagtaatttatatcagaacattgcacccgattactaacaaagcaggacagtcagttaatcaccatacatttaaccaaactatctataaccaatctacttcacaaaaaaagaagagaaactaaatattataagacacaaacttaagaaacactaaacaaggtcggtcctttatattccaaagtcctaatacttagcctagtttcttcccactcatcatcatcctcgtaaactcattcaagtcaataaaaccatctccattcccatccactcctttgaccatttttttacaggcactaaggctgcaactctctcctaaccttttgagaacttgggacaactcctcagcactaatcttcccatcaccgttcaaatcaaacacttgaaaagcattcttgatctcagtttcttttatcctaccctcttcattgaacatcttcatgaactctttgaagtcaatgaagccgtcttcatcagtgtccatgaccctaaacgctttcact

SEQ ID NO: 11411 - DNA, 310 bp, Glycine max
  Clone ID: jC-gmfl02220131c02a1
gttcacttctagctcctcatggtagccctacgcttcacgcttacatgtactcaagaagaacagcttcactttaagacagacctcgattgatggacattgctcacttccaaacaatgaggacacgtattgggcgttgcaagaattcgacgcctacatagatggcgcggcttctcttgaagagctccagggtggtgcgcgggccctgcatggggccattggggaagctgaaccagggactgcgttctgggtcatggacactgacgatgacggtttgattgagctgaaagagttgacgaagatgctcaatgaa

SEQ ID NO: 11412 - DNA, 332 bp, Glycine max
  Clone ID: jC-gmfl02220131c02d1
aagagtgatgaatatgattcaaaatacaaaacgacagccctatgtaactgataacgcatcattgcacacatgttctagccaatgatggcaacgggataagcgccatgggtctaaccactctatctatatccaactttcttcagcattatcgaagctaaactcaatttcattagacagatactgacgaacctccatacaaggtcggacctttatattccaaagttctaaagacaagccaaggtacttgcccattgtccacatcctggacaacgtattcaagtcaatcaagccatatggattcccatccactgattatgccagttgtcaacagg

SEQ ID NO: 11413 - DNA, 258 bp, Glycine max
  Clone ID: jC-gmfl02220131c03a1
ggaacaacctgcagtatgctacttgggatttttgagatttccatgctcctaccctcatgaaagggatgaactgcttctaggtatggaaactctctcatccggatcagcaccatgctgccaagccgtgatctgaaagtggatattcggcgtagagagctcgagatcacggcactcaaaaacctcctctataagaagaacttggagtgcattacacaaggactattgctgcctgtgcgcctgtgatattgtatgtgctgg

SEQ ID NO: 11414 - DNA, 389 bp, Glycine max
  Clone ID: jC-gmfl02220131c03d1
atataacataaaacgggtggagattaataacagtacactaacatgattacttgaataggaaataaaggtatactatatacacaagaatttaaataagaatataaaatatctgagattgaatactttttatacacactatgaaagacaagacagatttctaaattaatatttattgcaacatgccatatgactcacccggagatagacgtttggctgccaaaatattactgaacttgtattgagatactatgaataaacttagcctgttccaaagtcacaaatctgaagcgagaagactgaccataacagacttttttccaccttatattgcaaaagctaattccgtgtgaatacaatggtgccatataatggctaaaatcttaaccaat

SEQ ID NO: 11415 - DNA, 225 bp, Glycine max
  Clone ID: jC-gmfl02220131c04a1
gtaacatcccgcagacttcgacgagcgcagcgagacatgtcaactcctataccctcgagacaactatgaattgctggcatgtgtacagtctctctaatccggaatcgctctctgctcctgagctctcatgctcaagagcgtattcggcgtagacagctcgagattacggcacacagacaccgcgcctgttcttcagctaaaagagcctgaacccagcacaattgc

SEQ ID NO: 11416 - DNA, 137 bp, Glycine max
  Clone ID: jC-gmfl02220131c04d1
atacattgttaaataacagaatacaggtggggatcaataacaggaaaaggacctgaacaactcaacccgacataaaccaggccatgatacacaagcagcgaaataaaacagcaacatatacgagactgactacatgg

SEQ ID NO: 11417 - DNA, 153 bp, Glycine max
  Clone ID: jC-gmfl02220131c05a1
gtcacattccgcagacttcgacgagggctgggagacatgtcaacttctatatcctcgagacaactatcatgttctggcctgtggacagtctctctaatccagaatcgcactctgctcctgagctgtcatgctcatgacctttttcggcgtaga

SEQ ID NO: 11418 - DNA, 88 bp, Glycine max
  Clone ID: jC-gmfl02220131c05d1
atactatattaacctacactaggggccattttacaatccacggccatccccacctttctcctcctatggtctctgttctgtattcttc

SEQ ID NO: 11419 - DNA, 236 bp, Glycine max
  Clone ID: jC-gmfl02220131c06a1
ctcacatgccgcagactgcgacgaggtctgggagagatggcaactcctatatcctggagacagctatcatgttcgggcctgtggacagtctctctaatccagaatcgcactctgctcctgagctggtatgctcatgagggctttcggcgtagaccggtcgcgattagtggacgcggacaccgtgcgggttaggcggctaaaagagcctgtacccagcacaattgctctgagtgcac

SEQ ID NO: 11420 - DNA, 97 bp, Glycine max
  Clone ID: jC-gmfl02220131c06d1
attaacaaacataggggacggctacataataatctccaattcccactgatcaactccaaccgtcaccaccttatgcttctcacacatgcggataaat

SEQ ID NO: 11421 - DNA, 224 bp, Glycine max
  Clone ID: jC-gmfl02220131c07a1
ctcacatgtcgtagacttcgacgagggctgtgagagatggcaaattatatatcctggagacagctatcatgttctagcatgtggacagtctctctaatccacaatcgcactctgatcatgatcgggtatactcatgaactcttttggcgtagacaggtcgcgattaagggacatagacaccgtgcgggttatgcggctaaaagagcctggatccataacaaatg

SEQ ID NO: 11422 - DNA, 257 bp, Glycine max
  Clone ID: jC-gmfl02220131c07d1
ggctggggaaaaaaatcaaccccattatgatcccaaagccaccacctgtcattgttaaaagtttctcccttttaaggatgccattttgggaaaattttcggaacccttttgcagaggggtctggatataggagcaaaaaatttttgtaatccccaaaatctaatccccattgcgggttactacccctaatgcctccaaaggatttccacccggaccctgacaaatgtccctggaactttacgcaaacccttattggt

SEQ ID NO: 11423 - DNA, 236 bp, Glycine max
  Clone ID: jC-gmfl02220131c08a1
gtcacatggcgtagaatgcaacgagtgcagtgagagatggcaacttctatatcctggagacagctatcatgttcaagcctgtggacagtcactctaatccagaatcgcactctgctcctgggctggtatactgaagaacgcttttggcgtagaccgctcgcgattaatggacgcagacaccgtgcgggttagtgcggcttaaagagcctggatccagaacaaatgctgtgagtgca

SEQ ID NO: 11424 - DNA, 369 bp, Glycine max
  Clone ID: jC-gmfl02220131c08d1
aagcattactttttttagtttgttcaataaaattgggcgggaaaacataattaaatccaattggacctgataaccagaaccggtgaaaaccgtactaatagtagacatgaatattatatactaatacgttgaacatgaccacgtaaaaaggcggatcctacttagagagtatactatcacagcttggccatttgtccattctgcaatcgctcggacggcaggccaggccctgtgttattcgacacactttgctttggttgaacctcagagagcttgcgagaaactgtgatacttatgcggcctaagcttgaaaccattgcgatccacgggcatatcaggccagtcttccaatctaggaatgtgcgacac

SEQ ID NO: 11425 - DNA, 446 bp, Glycine max
  Clone ID: jC-gmfl02220131c09a1
gagtctttgtctggtgctgggtcagaagcttctgcgacaccatcttcaggcgggctaactcctacagctgggaaaactaatgaaactgagatgatgtggcattaccaggatccatcgggataagtgcaggtaccatttaccatcgtgcagctacgcacatggagtaacacacgatacttagctgctgattagatgatatggagaaccactgagacgcatgacgaacctatgctcttaacagatgctcatgacagggaatgtatgtacggaaccatcagtggtggataatgcacaatcggagcttgatttacagttacccatcatcatactctaggaagtctccacaacacggtataccaggtcaagttgtagaaagactgacattagatcaaaatgctgcatctttgaattgacataccagtctggggactccgagactaaccaca

SEQ ID NO: 11426 - DNA, 549 bp, Glycine max
  Clone ID: jC-gmfl02220131c09d1
aacctcaattttttccgttattattattaatctaagaggggcttcaacttcttcaactacttaacccttgcataagtcaactgctagcaaaacacagccccaaaagacaattaagatacataaacgagatactacgatgctcaagttctacatacatgacacatgcttatacaacgtttagccatgaaattggaaaatactgcacagtaagagatgtttatctgccactaagtaattagccctacaactaagtgtagctgaaagacacaagaagtcccgttcctgcaacgtccactctcataatactggcagactactctttgtcccccaaaaggaggcctggtacaacctactctgccaaatgatgactgcctattccaagatctaccaccgtaaccagaatgtataccctgtgcacgacgatccccaaggttggggaacctgtctccattatgactttgcttacgtacccacatgcctggatatccaaccggagcacaccaaccaggattgccatttcaggtgctagcccctgaccaggccaaccca

SEQ ID NO: 11427 - DNA, 142 bp, Glycine max
  Clone ID: jC-gmfl02220131c10a1
gcttcatggcatgagatggaactacttgtatttttggcctcatctgcactcggccttacgctttcagttgatataactattgaaactgtcattaggtggcatcaggagcctccattgggtctagctcagatggcagtttcca

SEQ ID NO: 11428 - DNA, 196 bp, Glycine max
  Clone ID: jC-gmfl02220131c10d1
ataaagggattttttttcggtgttaacacatagatctgacggggggggagatatcaaacctgctaaccctttcatctctcgaggacctaaaactgcctcccgcgatagctcactgactaagcatactgaagaacacacgctccaccaaatcacaaggcctaatgcaagcctacgcaaccatcgagcacgagatcgc

SEQ ID NO: 11429 - DNA, 181 bp, Glycine max
  Clone ID: jC-gmfl02220131c11a1
gtgtcattttataagcctgcatcaatggtttcttgggctccatctgcatacggcctgacgcatacagctgctataacatgggtaactctatctacgtggcataatgagcctccatgacgtgtaggtaagcttgcggcttccatggaactgcgtcgccaatggattaatgcactatacgtca

SEQ ID NO: 11430 - DNA, 336 bp, Glycine max
  Clone ID: jC-gmfl02220131c11d1
tttagatttttttttttcttgagcaatttttttctgattggatcatttgaactaaaatggcgggaaccattatatcgtctaaaacttcccattaatcaaggatgcactattatctaccgtgatcgcctactaacatatatgaagccagcgccgacacacaaactgcaacagaaccagaagcggtctaaactacacacgacctccacttctgctgggactataagcaggctagaggaaactacgcaggcaacagcccgtatcagaccaacctgaacaccctttatgccactctcacttgcaatacagatattgtctactgtctctacaatttcacaa

SEQ ID NO: 11431 - DNA, 556 bp, Glycine max
  unsure (1)..(556): unsure at all n locations
  Clone ID: jC-gmfl02220131c12a1
cgccatgtctcactacaagtttgttcttgcaattgagaacacttttactgagagctacgtgacagagaagttattctatgccttagactctggtgcagttcctatctattttggtgcaccaaatgtcatggattttgtccctccacattcaataatagatggtagaaaattcaactcattggaagagttggcttcgcacgtgaaggctgtagctaatgatccagtagcctatgcagaataccatgcatggagaaggtgtggtgtacttggtaactatggaaaaactcgagctgtgagccttgacacgttgccatgccgattatgtgaggctgttagcagaaaaggtggaagaaatgcgggaagctaggttgagttttttgctaaatttgtagttctgcatgatagagattgacgcattgaatttaggtttgcaacctgtatagagaatgcttgtttctctgagctaatgtacatttgaccaagaaaggcttagctcatgtgatattntattttttattgccccccttttctggtagacagtggttgatgctatctc

SEQ ID NO: 11432 - DNA, 472 bp, Glycine max
  Clone ID: jC-gmfl02220131c12d1
gaatgaagagtgatgtttgcatgaattgacatatcaagttgacatatgcacgtgtttttctcaaaaatcatacatcaacaaaaacacttcaactatagtgtaacctatgtggagatagcatcaaccactttctaccagaaaaggggggcaataaaaaataaaatatcacatgagctaagcctttcttggtcaaatgtacattagctcagagaaacaagcaatctctatacaggttgcaaacctaaattcaatgcgtcaatctctatcatgcagaactacaaatttagcaaaaaactcaacctagcttcccgcatttcttccaccttttctgctaacagcctcacataatcggcatggcaacgtgtcaaggctcacagctcgagtttttccatagttaccaagtacaccacaccttctccatgcatggtattctgcataggctactggatcattagctacagccttcacgtgc

SEQ ID NO: 11433 - DNA, 447 bp, Glycine max
  unsure (1)..(447): unsure at all n locations
  Clone ID: jC-gmfl02220131d01a1
gttcactactactccttcactgtacttcaaaatttcacccttccaagtccccaacttgtacagttttactattagactgtacaatctctgttgctcttgctcaatccaatccaatccaagtcccgtctcagtcgaagcaagaaaaccatgtcttcatcggtgaagccgcgtcccatggatagctacaaggtggaaggcgcgcgcgacatgaggaccgaggtggtgttcaacggcgacctgcctcctgcgtcgtcgacgccgacgatgactgtcggcgagagcagcggcgaggaccgccgggtcgagatcaaggccccgaggaagcgcgccgtgacctgggtacaggacgagacgcgctctctcattggccttcggcgagagatggacgcgctgttcaacacctncaagtccaacaggcacctgtgggagcagatctcggcgactatg

SEQ ID NO: 11434 - DNA, 548 bp, Glycine max
  Clone ID: jC-gmfl02220131d01d1
aagagtgatgaatatgatccactataaaattagacaatatgtggtcactgcaaatgcatatttacagacatgttaaggccaatgattggaacggaatttgtgcaaagggactagctcctttttctatataaaactatatacagcattatcaaaacttaaaacaaatacaattccaggttagtgccgaacatacatcaaagatctgaacagtccccaccacagttctccagacattctatggtagctgaacattgaccacaccatgtacctgctttcaactcacaccacgatatatggcaccaggtcgaagatcatccatgttgtcaatatgtctgtaggtgtcaaattctcttagacatattcaaccccggcgggtcataatatcacggaaatcgtcttaagtgtgaaatatcttatcttcagtatgcacaggtatatggtcaggctcatcatagagaggtaatttaatggccattccttcatcaatgtgaagagtgtaattcgctaaaggcaatttacggtcaatacttctgattatctgatcttta

SEQ ID NO: 11435 - DNA, 415 bp, Glycine max
  Clone ID: jC-gmfl02220131d02a1
gtctctttctgtgtctctatctatcgttttctcaagataatgggcaaatcaccatgcgactcgagtcatgatccataagtgagaaagggaccatggatcatggtcgatgacttgttcttgataaactatcttgctgatcacggtgagtgtgtttggaattctccagccgaagcttgtggtctcaaacgaacatgaaagagctgtcgactccgtttgctaaactacctttgtcctgatgttagatgaggatacattacaccctgagaacagcttttgatcatagaacttcatacatagtggggctatacgtggtccaaaattgcaaaggatcttccatgaagaactgactgtgtgattaagtgcttctggagacctaggatccagaagcccatttagcaagctgagactctacaac

SEQ ID NO: 11436 - DNA, 349 bp, Glycine max
  Clone ID: jC-gmfl02220131d02d1
gaacattacgatccattaagcataagcagctacacaaaaataacttgccacaaacaaccaactaaccagccgccatccgacctttttttctcctttacaatatttttcactatatatttcaaatcataacccacgagacgccattcaaaaaccataaccaagaaaatccttatcccacataaggcatttaacgcacattatacatgacaacaccaaacttaaacaactcatataaacagacctaatgatgaaattaaccccgaacacactctatacgagcttaagaccatatataatcacatatatgattcataaaaacatacatatagctagataaaattaacctcca

SEQ ID NO: 11437 - DNA, 237 bp, Glycine max
  Clone ID: jC-gmfl02220131d03a1
ggaacattccgcggtcttcaactttgggtttgatacatgtccactccgatacccctgagacagatttgattttctggcatgtggacattctctctaatccagattcgctctctgctccttatccgtgatgctcaagaactttttcgtcgtagacagcacgagattgggggacacatacaccccgcgtgtcattcagctaaaagagcctgaacccagaacaattgctgtgagtgcact

SEQ ID NO: 11438 - DNA, 101 bp, Glycine max
  Clone ID: jC-gmfl02220131d03d1
gttaacaaacacaactagggtggccatcaataacacaaaattgaccttaataactcaaccagtcattaatacgccaatcatatacaagcaacttaataaaa

SEQ ID NO: 11439 - DNA, 304 bp, Glycine max
  Clone ID: jC-gmfl02220131d04a1
ggcacattccgcagacctcgacccgggcactgagacatgtcaacttctatatcctggagacaactatgaagaactggcctgtgcacagtctctctaatccagaatcgctctctgctcctgatctctcatgctcaagaacgtattcggcgtagaccggtagagactagtggacacgtacaacgcgcctgttctgcggctaaaagagcctgacacccataacagatgctgcgattgcacttcagctactgagtgcgctcgggctagcactgctacagccatcatgcaaaaggagacatctgaatcg

SEQ ID NO: 11440 - DNA, 207 bp, Glycine max
  Clone ID: jC-gmfl02220131d04d1
gttaaataacatatcacaggaggggatcaataactgcaattggacctgaataacacaacccgacaccaacctggccttgttacacatgcagcgtaataaaacggcaacttaggtgatacgaacaacatggggcacaccaatatacgagaacgcgcccatctttacgcgcaattttatagcaacatgccatgtcactgctgcggaggt

SEQ ID NO: 11441 - DNA, 239 bp, Glycine max
  Clone ID: jC-gmfl02220131d05a1
ctaacattccgcagacctcgacccgggctctgatacatgtcaactcctatatccatgagacaaatatgatttactggcctgtgcacagtctctctaatgcagaatcgctctctgctcctgagccctcatgctcaagaacgttttcggcgtagaccgctaggtattaatggacacgtacaacccgccgggtcatcggctaaaagagcctgcacccataacagatgctgcgattgcagctt

SEQ ID NO: 11442 - DNA, 68 bp, Glycine max
  Clone ID: jC-gmfl02220131d05d1
ataataaataagggggcgtttatatcaatgacaaaacctttagaggagaaattcaactggacatcact

SEQ ID NO: 11443 - DNA, 261 bp, Glycine max
  Clone ID: jC-gmfl02220131d06a1
ctcacattccgcagacttcgacccgggctgtgagacatggcaacttctatatcctggagacagctatcatgatctggcctgtgcacagtctctctaatccagaatcgctctctgctcctgatctctcatgcgcaagaacgttttcggcgtagaccgctcgcgattaagggacacggacaccgtgcggggtaagcggctaaaagagcctggacccagaacagatgctgcgagtgcacttcagctgctgaggtgcgctcgggc

SEQ ID NO: 11444 - DNA, 66 bp, Glycine max
  Clone ID: jC-gmfl02220131d06d1
agatcaataagagcaatttgatcttagaaactcaaccggacatcaagggagtcatgggacacatgt

SEQ ID NO: 11445 - DNA, 248 bp, Glycine max
  Clone ID: jC-gmfl02220131d07a1
ctcacatgccgcagacttcgacgaggtctgtgagagatggcaacctctatatcctggagacagctttcatgttctggcctgtggacagtctctctaatccagaatcgctctctgctcctgctctctcatgctcatgaccgcattcggcgtagaccggtcgctactaatggacatagacaccgtgcgggttatgcggctaaaagagcctggacccataacaaatgctgcgattgcacttcagctgctgg

SEQ ID NO: 11446 - DNA, 96 bp, Glycine max
  Clone ID: jC-gmfl02220131d07d1
acattgataacaaacatagggggggggaacatcaataacaccaattggacctgatcaactcaacccgacaccaactgggccataaaacacaagcac

SEQ ID NO: 11447 - DNA, 275 bp, Glycine max
  Clone ID: jC-gmfl02220131d08a1
gtaacattcctcagactgcatcgaggtcaccgaaagatagcatgctctatatcgcctagacaaatttcaagctctggcgtgtccacggctctgtccactccacaagcgcactcgggcctgttccgaatctcatacatgctcgtcgtagaccgctactctactaaggggctttgacgatccactgggtaagcgactaacatagcctggaaccacaacaactgctcagactcgactatagctgctgagtctgcttcagctagcactgttacacccat

SEQ ID NO: 11448 - DNA, 227 bp, Glycine max
  Clone ID: jC-gmfl02220131d08d1
ttttatattgttaaataaaatagggaacgtgaatataaatatcaccaattggatctgatcaactgcacccgttatcaacttggccttaacacacatgcatagtaacaaatctgcacattacgatctcgtcacaaccgatggccccttccaagagtgactcagcctttattatcaccagaattcacagcaacaagccatatcacacctggcgaggtcactgcttcctt

SEQ ID NO: 11449 - DNA, 484 bp, Glycine max
  Clone ID: jC-gmfl02220131d09a1
gttacattggggaaggtctagtcacttccacaataggcctgatctgagatgtggcatctgtcattggtggatcacactctctacatgaaaagcagaagccaccagaagatgttagcccatatagtgtgaacggaaaagtactaggttccgcagttgctctcatcctactggtgggtgtggaaaatggagaggatggtgtagatgaaagcccaatgggcgaggacaacgggcgtcactggacggcgaattgaaaaccagcttcagggccctgacagcgcagcggcaaggctaagacgaccagatactgtggcacgaggttctgtcatcttggaacggctcagacccgaacgagtacatcgaaaccgtggtgagagcctctatggacagcgtgatcaaagcgtataacatgagcgacaggctgtcggtaggacacggcatcagcagcgccgtaatgaagatggctctggaggatagccaagacttg

SEQ ID NO: 11450 - DNA, 269 bp, Glycine max
  Clone ID: jC-gmfl02220131d09d1
aaacgtgtcacattcctctgtatcatccatcaaacaagacgggactacctattgcaaacccattggagcttcctagcttaaaagtttaagactttaccatgcacagcccagactttaattcactgaagccaaaaggcgtcagtccaaatcttgagatgcttattggatggaaacaaattccatcatcaccttgggacgatcctacaagcgagcttactggagcccagatcacgacattctggcaatacggtactcgagctaggtcaggc

SEQ ID NO: 11451 - DNA, 479 bp, Glycine max
  Clone ID: jC-gmfl02220131d10a1
gcgtcattgatgaaggaaacgtacgttctccagttgcgcctggtgtctgtactgggttctgtcaacacagggaggcacagaatccatgatgtggaccatccacgactctgtttctaacctctatagttgcatggcaggaactaggctgagaattaccttttctcctagtatgccattgcttgagtgagggtaaatgctgcatttcataatgcaaggcctgagaacacctgctgtacctggggtgaatgatctgcccatcacgaggaacatgattgattggaggcgatgactatacgagcggacacactgccacgaagtctgggtatgtggaaacacttgagaccgccatgatcaaatcgacatctataggaagtcccaaccggtcgggctgctcagatggcatgaatgtatcagccgctaaaccttgcgctctgaggcattctccacgagctgtgtaggggtctagatgatcgacagga

SEQ ID NO: 11452 - DNA, 419 bp, Glycine max
  Clone ID: jC-gmfl02220131d10d1
ttgagttttttttttttttcaatgatatttgttgcgagagaattacagagagaaggctcggcggttgatttttgccgatttctctcggactcttttgacgggactgacgatgacagaccctaactccatacgcttgcttcacttaactcaagagcgtacaattcaggcactggccttgaagtcggattgtgtgcctaggactactccggagtggcgacggtcttgactgaaaacacggccgaagccggcgtttatcttgacgcgagtgctgctgacgcatgctggctgtcaagtattttgggccaagacggtgcagttgccggtcacaaatgccactggatatgtcaaaatgaacatgtttgcgctaacattgatcgatgggcgcaaagtgagctgactcacatgcgggatgaaaactg

SEQ ID NO: 11453 - DNA, 478 bp, Glycine max
  Clone ID: jC-gmfl02220131d11a1
cgcccagtctaactgcatgcaaggactcgcgaccgagctcactcagactgtgcgctgcctgacacagctgccatactatgccgtacactatggagcaacaactctgtcttccggggccccgaaggtcatggggtgggtaccttcacatacagcaacgcgtggatgaatgtacaactcgtcggaagggaaggctaggaacgggacagtttgagatagagacccagtgacgctggcgcaataccatgcttggataaggtgggtggagcatgtgcactatggagaaacatgcgcagagagcctggactcgttcacatgccgatgctgcgagagctcgaagcactaataggggctgatatgcaggtcgcttggttgcgtagagagctgaagcagtacttgtggatgatcaatgttgccgcgacgaatttacgttagatgactgcatagacattgatagctgcattgacctcatgggcatatg

SEQ ID NO: 11454 - DNA, 269 bp, Glycine max
  Clone ID: jC-gmfl02220131d11d1
tttagttttttttttttttcagtgatatatgaacagagacttttgcatggagagagctcttaagttgacatgtgcacgtgtctctatcacctatcttacctcaatgacaatacttcaactgtaatgtaaccgattgggtgaattaagacaccaccttacaacataagagaaggcctagaaggagcaatgcgtgacatggactaagccggacttggtgacatgttcactgaatcattgcatcaagcaggtgatgttctggatgcatgccc

SEQ ID NO: 11455 - DNA, 477 bp, Glycine max
  Clone ID: jC-gmfl02220131d12a1
cgccatgtctcactgcatgcttggactcgcgaccgagatcactctgactgtgcgctacctgacacagatgctatactatgccttacactatggagcagcaactatgtattccggggccccgaatgtcatggggtgggtaccttcacatacagtaacgggtggatgaatgtacaactcgtcggaagagtaggcttggaacgtgacggttgcagatagtgatccagtgacgctggcgcagtaccatgcttggagaaggtgtggggagcttgtgcactatggagagacatgcgctgtgagcctggactcgttgacatgccgatgctgcgaggctcgaagcacataatggggctgatatgcgggtcgcttggttgagtagagagctgaagccgtacttgtgcatgatgaatgttgacgcagcgaatttacgttagctgactgcatagacattgctagctgcattgagctcatgggcatatg

SEQ ID NO: 11456 - DNA, 303 bp, Glycine max
  Clone ID: jC-gmfl02220131d12d1
gtatgaagagggatgttcgcatgaattgccatatcaagttgacatatgcacgtgtcttgatcaaaaatcattcctcaaccaaatctctgaaagtatagtgtaacctacgtggagatcgcacaccccactttctcccagaaaaggggggctaaaaaaatcactatatcacttgagctaagcctttcttggacagatggacattagctcagacaaacaagcaggtgtctatacaggtggctaacctaaatgcattgcgaccatctctatcatgcatatcttcaaacctaaggcaagacggaacgt

SEQ ID NO: 11457 - DNA, 492 bp, Glycine max
  Clone ID: jC-gmfl02220131e01a1
tgaagaaactacaattctcactgaaagaaagttgctaactcttggcaccagttatcagcttaacatagttgataacaccaaaggcacaacaacattgagggaatgaggcttgtcatatcagctgtatgtgttattgtgctattttcttatgctgctgcgtatgatcctttggatccaaatggaaacataacgatcaaatgggatgttgtgtcatggacaccagatggctatgtagccgtggtaacaatgagcaatttccaaatgtttcggcacatcatgaatcctggatggaccttgggatggacatgggcaaagaaggaagttatatggtccatggtaggagctcaaaccactgaacaaggagactgttctaagttcaaaggcaatgtacctcactgctgcaagaaaactcccatagttgtagacttgctccctggtgtgccttacaaccagcaattctcaaactgttgcaagggtggagtggtggcaaca

SEQ ID NO: 11458 - DNA, 465 bp, Glycine max
  Clone ID: jC-gmfl02220131e01d1
gagtattatgatccggtttattttgaatctactggaataatacatcaaattacagctccctatacaccacaacacacacatataacttcagatttatccagtatcatctcgattttcaaattaaccaacactattcagcatctgataagcacttgtgaatcacaacacacacattcatgagtcgggcttggtttttttcaagcaattccgtaagattcttcatacctgatgtacgttgtggtgtgtgtaggaaaacttggcttcaaaatttcacagaaaataattggatctcgcctacatactatttcaccaaacagttatcatgacaagcattgtcaaaacgaatgctgggaagtttaataggttcacaggggcagaattagggaggattgggtagctatcaggtggtggaagcatgcattcctcaccattaaagtagaccttgcgaggaaatgcccacccctg

SEQ ID NO: 11459 - DNA, 524 bp, Glycine max
  Clone ID: jC-gmfl02220131e02a1
ctcgctcgccaaacgcccctctctctcctccaatggccgaccagctcaccgacgaccagatcgccgagttcaaggaggccttcagcctcttcgacaaggacggcgatggttgtattactactaaggaacttgggactgtgatgcggtcactatggcaaaacccatctgaggcagaactgcaggatatgattaatgaggttgatgctgatggcaatggaaccatcgacttcccagagttcctcaacctgatggctcgcaagatgaaagacaccgactccgaggaggagcttaaggaggctttccgtgtgttcgacaaggatcagaatggtttcatctctgcagctgagctccgccatgtcatgacaaatcttggggagaagctgaccgatgaggaggttgatgagatgatccgcgaggccgacgtcgatggtgatggacagatcaactatgaggagttcgtcaaagtcatgatggccaagtgaggaccattcatccataacctaaatttgaaagcatataagaga

SEQ ID NO: 11460 - DNA, 533 bp, Glycine max
  Clone ID: jC-gmfl02220131e02d1
aaaatattaacagcattagccaaccacatgtaaaaaacacaaatgcatccaattgttctaggttcataataataaccaaaaaataaatatgaaaatggagagtaacaaagcatggtgagacacagctaaccgaagctactaaaaacaaggaacaaagcaaacaagtaggataactagggagcagaagtagtaccagttaaagcaaacaagaaaaacagacactcaactaacaaaagctaataaccccaaatcaagatggacctaatggaaatagaattctcatcaaaacttatctgcactgtccctcttctctttatatgcttttcaaatttaggttatggttgaatggtcctcacttggccatcatgactttgacgaactcctcatagttgatctgtccatcaccatcgacgtcggcctcgcggatcatctcatcaacctcctcatcggtcagcttctccccaagatttgtcatgacatggcggagctcagctgcagagatgaaaccattctgatccttgtcgaacacacgg

SEQ ID NO: 11461 - DNA, 232 bp, Glycine max
  Clone ID: jC-gmfl02220131e03a1
ggaacattccgcggtcctcgaccttggctctgatacatgtcgactccaatttccctgagacaaatgtgatttactggcctgtgcacattctctataatgcagaaccgctccctactccttatcccggatactcaatgacattttcgtcctagacaggtacggattggggcacacgtacaaccctcttggccgtgggctgaaatagcctgaacccacaacaattgctgcgagt

SEQ ID NO: 11462 - DNA, 330 bp, Glycine max
  Clone ID: jC-gmfl02220131e03d1
aaaaaactgtactcaggtggggatcaataagaataatactatgtaagtaattcaacacgtaattaagctggacttattacacatgtagtaaaaaaaaagggcaacttaggagatactaaatatatggggtgcatagtatacgggacagtacacatctttgggggaacatattatatgaacatgctatgtcactggtgcgaagagttaacagatagttgcacccatagaatagaattagcccttaggagactttggtgacacaatagccaggtcttaaatccggattgttctagttcaagacctagactagaacacttaatgcccatggat

SEQ ID NO: 11463 - DNA, 237 bp, Glycine max
  Clone ID: jC-gmfl02220131e04a1
ctcacaatcctcagacctcgaccctggctctgatacatgtcaacttctatatccatgagacaaatatgatttactggcctgtgcacagtctctctaatgcagaatcgctatctgctcctgatctctcatactcaacaacgttttcggcgtagaccgctaggtattagtgcacacgtacaacccgcttgtccatcggctaaaatagccttaacccacaacagatgctgcgattgcact

SEQ ID NO: 11464 - DNA, 254 bp, Glycine max
  Clone ID: jC-gmfl02220131e04d1
agctagctaaccggcggccgccctttttttttttttttttttattatattttttttttattttgttaacaaacttttctcaggtggggatcaataatagcacatggaccttagtaacacaacccgtcatcatgcttgtcttgcaagacatggggtttaataaatagggtaacttatgagatagggaatacatgggggtcacagcatcacggaaggcacaccgctcttgggcttatgttagatcaacatggtatg

SEQ ID NO: 11465 - DNA, 232 bp, Glycine max
  Clone ID: jC-gmfl02220131e05a1
ctcacattccgcagacttcgacccggtctctgatacatgtcaacttctatatccttgagacagctatcatttactggcatgtgcacattctctctaatccagaaccgctctctgctcctgatctctcatgctcaacaacgttttcggcgtagaccgctagggattaagggacatatacaacgtgcgtgttcatcggctaaaagagcctgatacccataacaaattgctcgat

SEQ ID NO: 11466 - DNA, 306 bp, Glycine max
  Clone ID: jC-gmfl02220131e05d1
attaaaaaacgttggggacagaaacagtaatgccaccaataggccctgagaaattcattcctataacacaatggtactaaatcagagttacttgataaactcgattaatgctgatattgaacctataaacggccagaatcattctaattgggcatctgaggtttatcaaactttcaaccatgatgataggacaggggtccaatcgcatacttttccttccttgaaccataaagctattccacgcttgcaattctcagggctgtcactgccttgaacaacattccttcctgtttgaacaacctggtc

SEQ ID NO: 11467 - DNA, 280 bp, Glycine max
  Clone ID: jC-gmfl02220131e06a1
ctaacattcctcagacttcaacccggtctctgagacatgtcaacttctatatcctggacacaactatcatgttctggcctgtgcacagtctctctaatccagaatcgctctctgctcctgatctatcatgctcaagaacgtattcggcgtagaccgctcgctactaatggacacagacaccctgcctgttaatcggctaaaagagcctgtacccataacaaatgctgcgattgcacttctgctactgggtgcgcttgatctcgaactgttacagccatca

SEQ ID NO: 11468 - DNA, 124 bp, Glycine max
  Clone ID: jC-gmfl02220131e06d1
aaataacattggggaggtaaacattattgtcaggaattggatctgagaaactcaatccgacatcatcatggtcctaaaacacatgtattgcaataactctgtaaattcggtgattggatctatt

SEQ ID NO: 11469 - DNA, 281 bp, Glycine max
  Clone ID: jC-gmfl02220131e07a1
cgaacattccgcagacttcgacgcgttctctgagacatggcaacctctatatcctggagacaactatcatgttctggcctgtggacagtctctctaatgcagaatcgctctctgctcctgatctctcatgctgatgacctccttcggcgtagaccgctcgctactaatggacacggacaccgtgcggggtatgcggctaaaagagcctggacccataacaaatgctctgagtgcacttctgctactgggtgcgctcgcgctacgactgttacaggcatcat

SEQ ID NO: 11470 - DNA, 100 bp, Glycine max
  Clone ID: jC-gmfl02220131e07d1
gttaaataacattgggggggaaaacatcattatctccaaatggaccttattaacaccacccgacatcaactgggcaatgatacacatgcaaagaatcaac

SEQ ID NO: 11471 - DNA, 225 bp, Glycine max
  Clone ID: jC-gmfl02220131e08a1
ggaacatgtctcagactgcgtcgagctcagcgagagatggcaacctttatatcgtggagacatctttgatgttctggcctgtggacggtcactctagtgaacaatcgctctctgagcatgcgcggtagtgctcatgacgtccttcggcgtagaccggtcgctactaatgaacagttacaccgtgcgggttatgcggctaacatagcctggacacataacaaatgc

SEQ ID NO: 11472 - DNA, 85 bp, Glycine max
  Clone ID: jC-gmfl02220131e08d1
gttaaataaaatagggggggtaaatatcattataaccaattggaccttatcaactccacccgttaataactgggccataacacac

SEQ ID NO: 11473 - DNA, 248 bp, Glycine max
  Clone ID: jC-gmfl02220131e09a1
gtaacatttctcagacggagtcgagttctacgagaaatatcatgctatatatcgtatagacatattatatgttatagcttgtggacagtaacactactgaacaatcactctcgatacctgatcgcgactactcatgacattcgttgtcatatacagatcgctacttagggacacttaaaacacactggttatacggctatacatatcctgcatacacaacatatgctgtgactcgaatacagctgatg

SEQ ID NO: 11474 - DNA, 92 bp, Glycine max
  Clone ID: jC-gmfl02220131e09d1
gcaaaaggcctttttttgcatttccgcaacaaaatattaacggggggtgttctctctttccaaagctaacatatgaaatcctccagtggata

SEQ ID NO: 11475 - DNA, 479 bp, Glycine max
  Clone ID: jC-gmfl02220131e10a1
ggctcattctaactgcatgcttggaatctcgatcgagcacactcagactgtgcgctgcctaacacaactgatataccatgcggaacactatgtaccagcaagaatgtattgcttggcctcgtatgtaatgcggtggataccatcgcatactgcaacaaatagattaatgaactactggccggaagggactgcttggaacatgtcagtttcagatagaaacacagtgatgcttgcataatagcagtcttaaataaggtgtatggatcatgtgcatcttggagtaacacgctcagagagcctacactcggtcacatgccgatgctacgaaactgaatgcactaatagggcctaatatgaagctcgcttatttgcatagagagctgaagcagtactgctagatgatcattattgccgcgactatattaggttacatgactgcaaatacattgattgctgctttgacttcatgggcatatgac

SEQ ID NO: 11476 - DNA, 377 bp, Glycine max
  Clone ID: jC-gmfl02220131e10d1
ttttggtttttttttttttacaggttatatagaaagggatgctggcaggcattgcgagggccggttgagacttaacgagcacagagaactgggacatcttcttaacccttcgcggcgattccttcgtgtggtacgccgaatggccccatctcagggacccactcctctgggtgctcaaaaccatccctatccctcttccgctatagctcctcgtacccggctgaggcaactcccgcctctccgagcacctctacgacggcggccacaccgacatcaccaacatcgacttctccatggtcgtcatcagaaacatgcttcggcggaacgtacgctaccgaccccttatgcgatggggcgtatggacatgaccgtcatgc

SEQ ID NO: 11477 - DNA, 428 bp, Glycine max
  Clone ID: jC-gmfl02220131e11a1
ctgtaagtgggcatgtgatcgtgaacttattgagctacattaattaaccaatgtgaaagactcttgtgcatgttgcgatattcatcattatatctcagtttgtctcattaaaaatggaaataatatgctaagttgctaactgctttatgtcatctcagtgtatgttagtttagtccaactgtgcaagttttcatttcgaccagtggttcgagttagattttgattcttcatgctatctttgtagtgggatgagtgcagaagtactcttgtgaaggttggaaaaacgagatctcaattcgatgtatggtatgccaagatggtatcctactgttgattatagattttatttgaatttgatattgatgttcaatgattttcaactagagcagagcacacagaggatggtgaaactgctttgaatttaaggt

SEQ ID NO: 11478 - DNA, 282 bp, Glycine max
  Clone ID: jC-gmfl02220131e11d1
gggccatcttgctgtaacttcaaaaggcggtagaaactcaactatcttagtcttcatcctccaacactgggctctctgactagatttgtgaccagatctccggtactgtgcccaaatcatgctcccacctatatccttgctcaaaaggctgccgaccatactgtcccaaaaggatcatgtggatggtgacagctattgctactatccatgccactattgtctatgcgaaaaaccaccatgaccaatgccgcctcctcctatgtggccctcatgaagttgggc

SEQ ID NO: 11479 - DNA, 579 bp, Glycine max
  Clone ID: jC-gmfl02220131e12a1
atgagagtttcaatccctctgactcatttttctccgtgactgcaaatggtgttaccctcctctccaatttcagcgccacagccacttgtgaggccctctcacaggcctacattgatagagagtactcccttgcgccattgaattcagaagccttgactctcactttcaagccttctgataaatacaatggcactttcgcttttgtcaacggcattcagctcatcccgatgcccgagctgtttgattccggagaatcggtagggtatgctgaccaaaccacggatgtgaagagcttgaatctgcaaaccatgtttaggcttaacgttggtggacagtacatttctccaatccaagactctggccttacaaggatgtggtatgatgacaggccttacctttatggtggaagcactggtgtcaccaaccaagccgagaagaacgtcttaatcgactaccagaccatgccaaagtacattgctccttctgatgtctactccacatcaagatcaatggcgcctgacatggatgtcaacttgggcttaatctcacttgggtcttccaagtcgatcccaattccat

SEQ ID NO: 11480 - DNA, 191 bp, Glycine max
  Clone ID: jC-gmfl02220131e12d1
actcggctcgagcacatttcttccccctccatctttttttcatatgtctctattcctatttatgaggaggagttacattaccttgtgtcaccaactactccgactcctttaccataccactaaactattgatccttgctcaccaaatttcattggtgaccgacgaggatatggacaaagctctgcgttccc

SEQ ID NO: 11481 - DNA, 464 bp, Glycine max
  Clone ID: jC-gmfl02220131f01a1
aatcacttcatccttgggcaataaaaagctgattggatcatttgatctaaaaaagcttcaaccatcatattgttaattacttccaattaatatgggctgtgctatcattaaccttctcctaataatttttatatatgaagccagcgccgacacacaaactgcaacagaaccagaagtggtcagaacttcacaagacttccactactgctgtgattataagcaggctagaggaaactacgcagccaacagcccctatcagaccaacctcaacacccttttgtccactctcacttccaatacagatattgactacggtttctacaatttcacaaccggcgaataccccgacatagtgtacgccattgggctgtgcagaggagatattaatccagatgaatgccgtatctgcctcaaactttcagagccaatctcacagagctctgtccagttcagaaggatgcaat

SEQ ID NO: 11482 - DNA, 498 bp, Glycine max
  Clone ID: jC-gmfl02220131f01d1
attgaaataatagtaagagtacttactagcactcccctaaaacataacacaaggacaaacagtttgcaccaaactacgaatgaatagatttataagttacaactcagtatatgccatcttaaaattaattgaaattcataaatattagctgtattagaggaattcagtgatgtgatacttttcagcagcctcattggccttcttcccccgatgttgatctagttgtatactcgattgttgccccggaattaaactctggtaattgtgcactatcatcataatatgcaggttctaaaggtactgggagagtttgagaatggctattaaacacggttacaacgaaagccatggtgggtctggcagctacattttcttgaacacagagtaacccaatgtggatgcatctcactatttcattctgtgaaccattgatcaaggtggcatctacaatatttgcagctgttccttccctccagtttcgccatgcaatacttagta

SEQ ID NO: 11483 - DNA, 350 bp, Glycine max
  unsure (1)..(350): unsure at all n locations
  Clone ID: jC-gmfl02220131f02a1
atcctatattctcttcttggatcatcttggttaagctgcagatcagaatagaataataataaataaagataagatggagactcatttggttttcttgcttggtttgatcttcactctagttgccggcgttggagcccaagcccaaagcccatccacctttcctgcgcctcccacaccccaagcatctccacctcccgtccagtcttctccgccacctgttccctcttcacctccaccctctcagtctccaccaccagcttccactccccctccatccccactcagctctcctcctcctttctctcctccaccctcctcccctcctctttttntncaccccccgcctctct

SEQ ID NO: 11484 - DNA, 469 bp, Glycine max
  Clone ID: jC-gmfl02220131f02d1
actcgaatgcaacgatcgataaactaatagtaatgtcatacaaaataactgccctcgaatacaaaacctcccctcaaatctcccaagaatgcaagcaatttatatagttcaaatacagtaataaactcccacgatcacatccacaaaataatatataaaggtaaggtatagggtaaatagcaaaataacatgaattggcagaaaaatctgcgagtccgaagacagagatcgatgtctagaacaacatggacagcaaagcacatccgaatactaagctcccaatcatcttctgaaaggaccacaagttttgagccccactgtcatcgccggagggagagatggtggagaggctgggaccgggagcaagggaaggagagagtgcaggagcaaacaccttggaaggagacggagctggagaagagacaggtggagaagaagaggtgtaactgttggggtcaatgagggtggt

SEQ ID NO: 11485 - DNA, 157 bp, Glycine max
  Clone ID: jC-gmfl02220131f03a1
ggaactttcctcagtcctcggccctggctttgatacatgtcaacttccatttccttgtgacaaaggtgatttactggcctgtgcacagtctctctaatgcagatccgctctctactccttatcccgtatactcaacaaaattttcgtcgtagacagc

SEQ ID NO: 11486 - DNA, 166 bp, Glycine max
  Clone ID: jC-gmfl02220131f03d1
aaataacataacttgggtggggatctagaaaagcaaacatacttgaacaacacaactcgaaatcatgcaagtattgttagacaagaattatattaattgggtagattcggatgtatagaatatatggggctcatagcctttggggctgtaccctggttttggggaa

SEQ ID NO: 11487 - DNA, 206 bp, Glycine max
  Clone ID: jC-gmfl02220131f04a1
ctaacattccgcagtccacgaccctgtctccgagacatatccacttcgatatccacgagacaaataagaattactgcctggtgcacagtctctctaatgcagaaccgctctctgctccttatccctcatgctcaagaccgttttcgtcgtagaccgctcgatactgatgcacacggacaaccctcttggacctcggctgaaatagc

SEQ ID NO: 11488 - DNA, 198 bp, Glycine max
  Clone ID: jC-gmfl02220131f04d1
attgttaactaacttttctcgggaggggatcaataacagcaatattcccttaacaactcaacccgtaatcatgcaaccattgttagacatgaagtttattaatagtgtaacttcgcagacactaaatacatggtgcccacagcatttgtgaacgcaccctactcttggggaacatttagatcaacatgccatctcact

SEQ ID NO: 11489 - DNA, 232 bp, Glycine max
  Clone ID: jC-gmfl02220131f05a1
ctaacaattctcagtccacggccctgtctctgatacatgtcgacttctatatccatgtgacaaatatgatttactgccttgtgcacagtctctctaatgcagaatcgctatctactccttatccctcgtgctcaagaccgttttcgtcgtagaccgctaggtactgatgcacatggtcaaccctctgggtcctcggctgaaatagcctttgcgcacaacagttgctgcgatt

SEQ ID NO: 11490 - DNA, 272 bp, Glycine max
  Clone ID: jC-gmfl02220131f05d1
atcaacaataccccttttatctaagtaactcaacccgtaaacatgcaggtctttctacacatgtaccttatttaatcgtcatcttttccaatattataaacataactagctttttttacgcgcaaacttattaaacatttaacaaagttagtacttcattttccataactttagaacttatcctagtttctttccactcaatatcatctatcaatacttagtgtactctattaaaacatatccatttccatacacccgtttgaccattctta

SEQ ID NO: 11491 - DNA, 220 bp, Glycine max
  Clone ID: jC-gmfl02220131f06a1
ctcacaattcgcagacttcgacccggtctctgatacatgtcaacttctatatccatgagacaactttcatgtactggcctgtgcacagcctctctaatccagaatcgctctctactcctgcactatcgtactcatagacgtattcggcgtagaccgctagctattaatgtgacacatacaccccgcctggtatgcggcttaaagagccttcacccataac

SEQ ID NO: 11492 - DNA, 196 bp, Glycine max
  Clone ID: jC-gmfl02220131f06d1
gttatctaacttatgggaggtatatatcaacattaccccttggacctaactaactcaacccgtcattaagtggccattgatacacatgcagtttatttaaacgatacctttcgcaatattcaaaacgtagctcacattctttaggcggatactcacgaatctccaaccaaggtcagtacttcattttccaaaactc

SEQ ID NO: 11493 - DNA, 262 bp, Glycine max
  Clone ID: jC-gmfl02220131f07a1
ctaacattcctcagacttcgacgaggtctctgagacatgtcaacctctatatcctggagacagctttcattttctggcctgtggacagtctctctaatccacaatcgctctctgctcctgctccctaatactcatgacctctttcggcgtagaccgctcgctactaatggacatctacaccctgcggggtatgcggcttaaagagcctgcacccataacaaatgctgcgattgcacttcagctgctgagtccgctcgcgctc

SEQ ID NO: 11494 - DNA, 197 bp, Glycine max
  Clone ID: jC-gmfl02220131f07d1
aaataacattgggcaggtgaagatcaatatcaccaattagacctgattaactcaacccgataaaaactaggccatggaacacatggagataaatacatctgcaaattatgagatctgcacaacctgaggctcactactctacgagaactagccattattatcgccaaattttatatcaacattctatctcacatctg

SEQ ID NO: 11495 - DNA, 296 bp, Glycine max
  Clone ID: jC-gmfl02220131f08a1
gtaacatggcgcagactgcgacgagttctgcgagagatggcaacttctatatcctggagacatcttttatgttctggcctgtggacagtcactctaatcaagaatcgctctctgctcctgagctggtatactgatgacatcattcggcgtagaccggtcgctactaatggacatcgacaccgtgcggggtatgcggctaacatagcctggacccataacaaatgctgtgattgcactttagctgctgagtccgcttgtgctcggaatgttaaaggcatcactgcaaagatgacatc

SEQ ID NO: 11496 - DNA, 405 bp, Glycine max
  Clone ID: jC-gmfl02220131f08d1
aaaaaaaattgggaaggtgaacataaatatcaccaattggacctgaacaacacaacccgtcaccaccctgcccataacacacatgcaaattaatacaaatacaccatatgcgatctgcacaacctggggcaccccatctaacgagacccacaagttatcaacgcctgacttcacagcaacaatccatctcacagctgcggtggtctccgcagccttcgcaacctgaactagacatatgtcagggccactcgcttgagacaatgcttgttgctaaacccctacggtactagttcaagaccaagaccactacgtttaacgcccatgcaaggagcttgaatgacccctgggtgagcacaaagcatgcatacaatccctgactgtgtacccctcgctatgccctctcat

SEQ ID NO: 11497 - DNA, 247 bp, Glycine max
  Clone ID: jC-gmfl02220131f09a1
ctaacattactcagactgcggcgagtgctgcgagaaatgtcaaactatatagcctagagacatcttatatgtcatggcctgtggacagtcacactactgaacaatcactctcagtgcctgagctcgactactgatgacatcctttggcgtagaccgctcgctactaaggaacagcgacacggtgctggctatgcggctaacatagcctggatccatatcaaatgctgtgattcgactttagctgctg

SEQ ID NO: 11498 - DNA, 300 bp, Glycine max
  Clone ID: jC-gmfl02220131f09d1
aaaaaaaatcttttttttgctttgcttactaaatgcgcgggggagaggaggataatatgcaagttgcgctgtaggaccccaccctagatgaagtcaccaatgccagaaacgtgccgaaccccacagatgctggtcgttaggaccaaaacaacttcctcagctatgggggaatcggacgatggtcctggatatgacacaaagcactgacttttctcacatctgggggcgccactggtgattgccatgacgtaagcagcggacgtggtgggggcctcggggggcctaccgatgagatctgaa

SEQ ID NO: 11499 - DNA, 211 bp, Glycine max
  Clone ID: jC-gmfl02220131f10a1
ccctcattcttactacatgcttgaaatctcgaccgcgcacactctgactgtgcgcagcctgacacaaaagatatactatgccgaacactatgtagaagcaacaatgtattgcatggcctcatatgtactgaggaggataccatcgcatgcagtcacaaatagattaatgaactactgatcggaacagactgcttggaacacgtgagttgca

SEQ ID NO: 11500 - DNA, 299 bp, Glycine max
  Clone ID: jC-gmfl02220131f10d1
cgggatgttagcaagatttaaaagcgtggggagacatgtatacatgtcgaactcacgaaacttacctgaggaaaatgaatgaggctctgccttcaccgggacccatcagaaatgcaaggcttgcgacaaaacaaggggggctgtaggaaggagatctgacaatgagcctgagctttactggaactgcgataaatgctgacaactcacaaggccttcttgctataggcagttaatcatacgaccttggagccgtgtgctgctaggtgcactttgagctggtgatcaaggaaacgggaacc

SEQ ID NO: 11501 - DNA, 206 bp, Glycine max
  Clone ID: jC-gmfl02220131f11a1
ccctgagtctgcctgtgatcgtgaacacaccgaggtgcagcatatgaccatgaacagcttcacaggaacgaccaaccctgctgaagattaactctcagccactatcagtagcaacgcctggtctatacatcgcaggttaccagtacatgacgtctgacagcgagtaatgtttcgacgaaccgcaactggctgcctgccgtacagga

SEQ ID NO: 11502 - DNA, 380 bp, Glycine max
  Clone ID: jC-gmfl02220131f11d1
aaaaattaatttttttaagcatgctcaaagaaattacacaggtggggacaactcaaaataattaatccgcaccaaaaccaaaccttgaacatatacaaggctgaaccctaaccttatttttgatcaggcaacatgttctaccgcctaatggaaggaccaaactgacacgaacataagatagtgctaaacgattgcgctactgccgtaagatgcctcggagtcttaaggatacaaacttgttgggacttaagctcttgatgtagaaatccctggattaacagtccatgccaacttaggggccccgcaaggtaaaatccaataattcattccaacgtcttaataacccttgtcaggcgaccaaagattacaaaggcggggac

SEQ ID NO: 11503 - DNA, 459 bp, Glycine max
  Clone ID: jC-gmfl02220131f12a1
ccatgtctctgtggagcaccgtatctgctgattgatgatgctgaggacctgcaacctcttgttggagataaccatcccgcttcgggcgaagctctctgataccatcatgatgctcgtaggcccgatgcagaacagcgttatgggtagaccacgacctactgcagctgaggacagcatcactcaacaggatgcctgcacgcactgatgatgcccactccattcggggtgtgcgtaccatgcagcatctgctacatctcggcgtaggcatccactgcttcgatacgacacttactgggcagagcacagccttcaatgatgaacgcgtcgacaccgtcgatcacaccaggcttgtgatccatgccccactcgatgtccaggccgatccacagcatatcacccaaatcgtataggagactgtcgacgggcccgacctgtgcgactacatctatgctgctgagt

SEQ ID NO: 11504 - DNA, 252 bp, Glycine max
  Clone ID: jC-gmfl02220131f12d1
caaacccaattttgcttttaaaaaggttggtcacaaactgacggggaattccatgggagaataaatactgggactgtaatccggagaacacatggcagctcatttttggagggaccttggaacacgacttataagaggaaaagacggtctcataacctagcaacttgttatgccttccgccagaagcatagaatatctaactggctctgtcacctaggggaaaggctttttacaaacgtatcctggggaagg

SEQ ID NO: 11505 - DNA, 579 bp, Glycine max
  Clone ID: jC-gmfl02220131g01a1
aggaaattgaggagcttgttgagaagatcgttggtgggttgttttgtgtgttggccactcttgcggttgtgccggtgattcggtgcccgcgtggcggtcctgcggagatggtggcttctgcattggatcagcggattagggatcatttgttgtccaagaataacttgtttactgagggtgggaactttgtgagctcgtttcagcgtcctgtgttgtgtatttttgaccggaatttcgagttgccggtggcgattcagcatgattttcgctaccggccgcttgttcatgatgtgcttgggttgaggctgaataggctgagtgtgcagggggagaagggtgggatgaggtcttatgagttggacagtgctgattcgttttgggttgcaaatgggtcgctggagtttccggaggttgcggtggagattgagacgcagttgaataagtataagaaggatgtggatgaggtgaacaagaggactggcgggactcatggcgcggagtttgatgggacggatttgattgggacacgaagcatttgatgaatgctgtgaattctctgcctgagttgactgagaagga

SEQ ID NO: 11506 - DNA, 552 bp, Glycine max
  Clone ID: jC-gmfl02220131g01d1
atctccaattacagactatctttaattaatacaaaatgattttcaataaccaaaacatctcacttacagagtgaaaataaagcataaatggcaaatcatgcttttcaaaaaacttttcactacaatgaagataaagcatagaccactgtgctaccagaaactaccaagaagcaaccccctaactttataatcaagaaggcagtgaaggtttatattccttcattgtttttttctagacgatgaacatcaaacacagatttgactttgcctgtgttatctcgatgtcagagagattttctttgcacactaaagaataatttggcaaactgaaatgtgaattacattcacctctgaactactgagctggggtagaactagaaccaacattacccaaacccatcttctgccccaacaatgttagctgctctacaaagtcaactccagttagcatttctgttgctccatatataatatgtttggcaggttgctgatgttgtgcaagctcttgcagactgcaatattcaacgtaattaccaccaccaatcatgaaca

SEQ ID NO: 11507 - DNA, 475 bp, Glycine max
  unsure (1)..(475): unsure at all n locations
  Clone ID: jC-gmfl02220131g02a1
ttgggagcttgcttagggctttaggaggcttgggtggagcaactcatcacctctttttctcctctcttcgcatagttcaacttgagaaattcggcggtgggaactgatggtggctctgagcttccagggtgggcgggcaagtcctgcccaaccncaacacccatcattgtgtagtggaagagccgctggagtcatcaggattcggtgtgggatagctgagccatctggtgaacctgctcctttaggacaaaagacgcggtaccatgacggcatttttgagaaggccttcatgactctctttgcacgtaagatggagaaattttcagatccaccagcaggaaaagctagagagaataaggcttggtgggattggggttatgactatgagagtttcgtggatgtgtcaaggagggtaatgcagcgtaagtctcgtatccagcaacaacaagtggttcgagaggttctcctgtctatg

SEQ ID NO: 11508 - DNA, 495 bp, Glycine max
  Clone ID: jC-gmfl02220131g02d1
acaatctggcaataccgatatttgacactataattacaaatttacatgaagtatttgtagacaatgttctctcgtttgggaatgtaatgactctatgaaagaagtaaaagcctagcaaggctggtattaatattattacacatgaaaaatgaaattttctgaagctagagcgggaagagcacctcgggtcgaattagaagcttactagacatgtatatagatttggataccctttgtacccaccacatattaaatatatatacttatctttgctgatttaaaaaaaaaaaaagcttactaaacactaattctgcaatggaaaattaaatccgaaaggaatgccttctcatgcctgtagtttaggacacacactagagcttggttttgccataagacatatatccgcatagcaagggtgttttgaaacagggtcctctttaaatgtaagtggggattggccatcaccatatcacaactcatattttaaaattagga

SEQ ID NO: 11509 - DNA, 557 bp, Glycine max
  unsure (1)..(557): unsure at all n locations
  Clone ID: jC-gmfl02220131g03a1
cattaatttaccttcatctttctctcagcttcaccttcaccttcaccttccgaattgtatcaaacctcaaaaaatggatcatcaaaacaaacacgtagcagtctttgctttcccctttggcagccaccttatgcctctcttaaaccttgtcctcaaactagctcattcccttccaaactgttcattctctttcattggcacacacaaatccaatgcaatccttttcccaaaaccccacatcccaaataacatcaaggcctatagcataagtgatggaatcccagagggtcacgtcctaggcaaaaacccaactgaaaaattgaatctttttctccaaactggtcctgagaaccttcacaaaggtatagaattagcggaagcagagacaaagaagagagtcacatgcatcattgcagatgctttagtaacctcttctctcctagtggctcagaccctcaatgttccttggattgcactttggcttcccaattcatgctcactctctctctatttctacactgactngattcgccagcactgtgcaagccgtgctggga

SEQ ID NO: 11510 - DNA, 503 bp, Glycine max
  Clone ID: jC-gmfl02220131g03d1
aaacttgataaattagatatttgtttgcttataatatttctttgctcgatacaaatcgccgacttattttaggatcttgtcggggaactaattcacaaacaaaacaaaaagcataaagttaactacaaacacaactaacccgagaatctattcaagttatacatcattttaatagttttgaaataaaataacccatgcaaacaaagaagtgctattaagatctagaaattacttccaccagagtgttgaaatcttgtgttgcttgcccttcaggcctacctgcatcttccacagtcttcttcaccctaagagcattgtctctaatcttcttcccttcttcatgcaccagaatcaaattcaagctctttaccaatccatttttggcgaacatcttaccttctatcatcatcccaatcttccaaacatcttctatcactcttgcagccaccccttgatctccaaagaatgggctgcagatcataggaacaccacttgaaacactt

SEQ ID NO: 11511 - DNA, 292 bp, Glycine max
  Clone ID: jC-gmfl02220131g04a1
gtaacattcctcagacctcggccctggctgtgattcatgtcgacttctatatccatgtgacaaatatgagttactggcaggtgcacagtctttataatgcagatgcgctacctactccttagccctcatgctcaacggcgttttcggcgtagaccgctccggattggtgcacgcgtacaacccgctggtccctgggctgaactagccttaacccgcaacagttgctgccattgcgcttgacatcgttggtcagcataggcttaacgtgttaggcccatgagcatctggagac

SEQ ID NO: 11512 - DNA, 181 bp, Glycine max
  Clone ID: jC-gmfl02220131g04d1
ataacaaactttttacgggaggggatcaaaaacagcaaatggacatgagtgacacaactagtaaccaagcagctcttgatagacatgtagcttaataataggtcaactttggcgacacgaaaaacatggcgagcatagcatatggggaggcacccctcttttggggtactattagtagaac

SEQ ID NO: 11513 - DNA, 458 bp, Glycine max
  Clone ID: jC-gmfl02220131g05a1
cagccaattctcgatccatggccctggcttttcttcatgttgatttcagtttctatatgcaaaatgggggagaccgaatgatgcaaaatatttataatgtagatacgtcactaaccacctaagccatgaacacaaccttgttctcgtcggagactactgcgaattggtgcatttgttcaaccctctaggccctgggcggatctgcctttggcgtgcaagagttggggcaaaagggctgtacttagatggtattgacaggcttcaagtgtgagccacatgaagaactggaaacggcacaagcaaatttgcaacagtggcaacaagttggagagaaggctatcgcttggggagcatcaccgagcagagtcatggcctaagtattgggtgtcaccagtggctgagatctagggtgaatgagaagaggaatggagtgcacatatgtctcagttgctcattgg

SEQ ID NO: 11514 - DNA, 267 bp, Glycine max
  Clone ID: jC-gmfl02220131g05d1
gaaaagattacttgttttcttaaaattaaacaaactttggggacgattagatcaaatatacgaccatgataaaagccacacaactaataagcatgcggctattgggagacaagtatcatactatatagcaccactttgcaggtacccaaagcatagcgcgcattcaattcggggatacaccccaaaattcagcaactattagaacaacacggaccacaagtcttcaaataatctagggtcacttgccatgatccacatgatgtacct

SEQ ID NO: 11515 - DNA, 599 bp, Glycine max
  unsure (1)..(599): unsure at all n locations
  Clone ID: jC-gmfl02220131g06a1
ggaatacccgattgatccatcgctgcctgatataaagaacagtatatatgcgactgatgagtttcggatgttttcgttcaaggtgagaccttgttcccgggcatactctcatgattggactgagtgtccttttgttcatcccggagagaatgctcggaggagagaccccaggaagttccattacagctgtgtgccgtgccctgattttagaaaaggggcttgcaggcgtggagacatgtgtgaatatgctcatggggtgtttgagtgctggctgcacccggctcagtatcggacacgcctctgcaaagatggcaccagttgcaatcgaagggtgtgtttttttgctcacactgcagaggagcttcgtccgctgtatgtgtccactggatctgctgccccttcgccccgttcatctgcttcaggtcctaatgtcatggacatggctgctgccatgagcctttntcaggatcgccttcatcgggctcttccatgtcgccgtcccactttgggcagccaatgtccccatctgcaaatggcatgccactgtcttctgcttgggctcagccanatgtgccggctcttcattaccaggaagcaat

SEQ ID NO: 11516 - DNA, 411 bp, Glycine max
  Clone ID: jC-gmfl02220131g06d1
gggtagctgccgtaaatattcaacagggcggatcatccttaattattcccttaaaaagaaacaacttcaaccattggcaacagtaaaacattgacttgggttaacttagggaacttcaaaaaaatcttttaaaacaaacgcaggctaataaggggttttggtccattttaaaccaaactagcttgcttgatagggaactcaaaaatcaagtgaaatatccaggggaaaaattctgaaacggggccgttttggaagaaaaattgataacctcgacaggatttttctcctactattggatttcaaccccaagagagagagctttttcaactcttttgaaactttggagaaaaataatggatggccatttttatttaaaaaaggaagaacaaattgaatatccttcaggtaact

SEQ ID NO: 11517 - DNA, 598 bp, Glycine max
  unsure (1)..(598): unsure at all n locations
  Clone ID: jC-gmfl02220131g07a1
ctttatcctacgccctcctccctacttatcctgcgcatatttcgccgttttctcgccgagatcttgaactatctcctccgtgttctcactttctcaactacacaatattcttattgaattccagcggaaagaatcatgagttgcttcggctgttgtgaggaagatgactaccagaagactgctgaaagtggaggacagcatgtggtaaaaaactcaacaggaaatgatggaaacagtcgtgcatccgaaactgcaaagcaggggactcaagctgttaaaattcagcccattgaagttcctgaattacaagtggatgaactcaaagaaatcaccgatggctttggagaaagttctttgattggagagggatcctatggaagagtatattatggcgttcttaaaagtgggcaggctgcggcaatcaagaaattagatgccagtcaacagcctgatgacgaatttttagcccaggtttcaatggtttcacggctgaagcatgancattatgttcaattgcttggctattgcattgatggatactcccgagttctggcttatgagtttgcatctcatgggtctcttcatgatattttacatg

SEQ ID NO: 11518 - DNA, 495 bp, Glycine max
  Clone ID: jC-gmfl02220131g07d1
gcaatgtaaacaatgggatatataaacatgttcaagcaaatttccatccgcttctgaagcagtcactttcttatatctcacgtgcacacttatgcacatactcattgatacagatataaatatagacaaagattagtttggagtttcaccagcaggcccatgtcttgcattcaataaaggttgaagagctttgactacaatgctcatgtttggtctgaaatcagcttcatattgcacgcacagggcagcaacagcggccatcttagcaacagctttgggtgggtattctcctcctagtcttgcatctacacactgtctgactttatcctcactgagtcttggtgtagcccaagtaaccaggctctgctgcccacgtggtagtgtatgatcaacaggcttccttccagtcaaaagttccagaaggacaacaccaaagctgtatacatcactcttggcattcaattggccagtcattgcatattctggtgcatgata

SEQ ID NO: 11519 - DNA, 454 bp, Glycine max
  Clone ID: jC-gmfl02220131g08a1
ctttatcctacgcgctcctccctacttatcctgcgcatatttcgccgtcttctcgccgagatcttgaactatctcctccgtgtcctcactttctcaactacacaatattcttattgcattccatcggaaagaatcatgagttgcttccgctgtcgagaggaagatgactaccagaggactgctgcaagcggaggacagcatgtggtaaaaaactaaacaggatatgatggaaacagtcgtgcatccgaaactgcaaagcaggggactcaagctgttaaaagttcagcccattgaagttcctgaattacaagtggatgaactctgagaaatcaccgatggctctggagaatgtactatgataggagaaggatcctatggaagagtatagtatggcgctcttaacagtggacaggcagcggcattcacgaaactagatgccagtaaacagcctgat

SEQ ID NO: 11520 - DNA, 475 bp, Glycine max
  Clone ID: jC-gmfl02220131g08d1
gtaatgtaaacactgggatatataaacatgttcaagcaaatttggatccgattctgaagcagtcactttcttatatgttacgtgcacacttatgcacatactcattgatacagatataaatatagacaaagatcaatatggagtttgaccagcaggcccatgtcttgcattcaataaaggttgaagagctcagactacaatgctcatgtttggtctgaaatcagcttcatattgcacgcacagggcaacaacagcggccatcttatcaacagctttgggtggatattctcctgctagtcttgcatctacgcactgtctgactctatcctcactgagtcttggagtagcccaagtaaccaagctgtgctgcccacgtggaaatgtatgatcaacaggcttccttacaggcaaaagctccagaaggacaacaccaaagctgtatacatcactcttggcattcaattggccagtcatt

SEQ ID NO: 11521 - DNA, 440 bp, Glycine max
  Clone ID: jC-gmfl02220131g09a1
ctttatcctacgcgctcctccctacttatcctgcgcatattcagtcgtcttctcgccgagatcttgaactatcacctccgtgtcctcactttctcaagtacacaatactcttattgcattccatcggaaagagtcatgagttgctgccgctgtcgagaggaagatgactaccagaggactgctgcaagcggaggacagcatgtggtgaaaaactaaacaggatatgatggaaacagtcgtgcatccgaaactgcaaagccggggactcaagctggataaagttcatcccattgaagttcctgaattacaggtggatgaactctgagaaatcaccgatggctctggataaagtactatgataggagagggatcctatggactagtatattatggcgatcttaactgtggacaggctgcggcaatcacgaaattagatgcca

SEQ ID NO: 11522 - DNA, 305 bp, Glycine max
  Clone ID: jC-gmfl02220131g09d1
ttttgttttttttttgcattgaaaacatttgtttatataaacaagttgaagcaagtatggaggggattatgaagccctcacttacttgaatggcccgtgcactctatatgacatactcatcgaaactgtcattgttatagaccaagaacattttggacctttaccattaggaccctcaattgcattcgacctaggtcttttaggccagaaggctatgctgcgcttcggctttatatgaccgttccgggctcccctccagacgtctagagtgagagagagaccaccactttcctggggagagaacc

SEQ ID NO: 11523 - DNA, 305 bp, Glycine max
  Clone ID: jC-gmfl02220131g10a1
ctttaacttacgcggtcctcgctacttatcctgcgcatattcggtcatcatgtcgccgtgatcctgaactatcaactccgtggcgtcacttcttcaagtacacaatactctcatcgccttccatcggaaagagtcatgagttgatcccgctgtcgtgaggaagatcactaccagaggactgctgcaagtggacgacagcatgtggtgaaacactaaacgggatatgatggaaccagccgggcattcgtaactgcatagcagggaactcaagctgtagaaagtcatcccactgaagatcctgaatt

SEQ ID NO: 11524 - DNA, 282 bp, Glycine max
  Clone ID: jC-gmfl02220131g10d1
gtaaacattggtttatataaacatgttaaagcaaattgggatgggattattaagcagtcacattcttaaatgccacctccactgttacacacacactcatcgaaactgtcattattattacacaaagaaaaatttgaaccctcaccattatgcccatgatttgcatacaacataggttgaccaactcctacggccatccttctgtatagccttaaatcagcaggaaacaccactcacagggcagactcagggggcatctgaacaaccgtttttggtggatat

SEQ ID NO: 11525 - DNA, 334 bp, Glycine max
  Clone ID: jC-gmfl02220131g11a1
ccttgactctggcggtcatcgttacttatcctggacgaagcagatgaccttgaacatcttgacctgaactaccaactctgttgcatagcagctctaagaaaacatcaatatcatcgccggccatagacagcacaggttagtagtagacgctgtccaacgtgcggtaacgttcagcggactgcaacttgaggactaccgcacaggagatgcctacagcatacggagtgtgattaccatgtgagctatcactacatcaaagtataggcacgcacaacttagatatgaacccgactggccagaatatactcgtaaatgatgatcgctgagacaccgt

SEQ ID NO: 11526 - DNA, 311 bp, Glycine max
  Clone ID: jC-gmfl02220131g11d1
ctacagaatctggcaatgtagacgaggctgggaacaacctacaatgctcaatccttattaaaagcattccttgtacatatacaccgcttaacccagacatgatctttgaccaatcaacatgtcctagggggcaaagggtattaagctctgccacaaccatagcaactgctcttcgaatgcgctactcccttaaaggcctcagagtcttaaggatcctctctctctggtacatatccatatatgctgaatgagcatgcgctcacctgtacttgtgtaataagaggccccggaatggaagaccgcttatttca

SEQ ID NO: 11527 - DNA, 337 bp, Glycine max
  Clone ID: jC-gmfl02220131g12a1
cctcgactctgtggatcatcgcacctcatgctggaagatgctgatgaccttcaagatggtgttcggcatgaccaacccgcttgcggcgaagctctctgacaccgtcatcatcctcataggctccatgcatcacacgttatgagatagaccagggccatactgcggtaagtttcagcatacatcaacttgatgcacgccgcaccgttgcagcctactccattcggggtgtgcgtaccatgcagcatgttatacatcatggtgtcggcatccacagctacgataggacactgactgggcataccacagctcctcaatgatgtacgctccgacaccgtcg

SEQ ID NO: 11528 - DNA, 406 bp, Glycine max
  Clone ID: jC-gmfl02220131g12d1
ctcatattcttttttttcaaaaaaatatcaccatttaatagagtggagaagaaacctttataagcacaaaggttgggttatgctagtggacctgtcactatccggagaactaaacgcttttttgtgattggaatttttgtaaagtggcgtctttagaactaaagaagaccaccggggccccccctttgtggactgctgaagaaggcgcctaagttggaaaatggatgctgcatacgggaagagaacataacacctcttctgatgcgattcacaggacccctaagtgggacggtacgcgggcagttatttacattggagcaggaaattataatgtgcaaccctaaatttagacaaccaagactcttgtcacctttgttggagtaccacagaaaatgccacacttgac

SEQ ID NO: 11529 - DNA, 513 bp, Glycine max
  unsure (1)..(513): unsure at all n locations
  Clone ID: jC-gmfl02220131h01a1
gggttttagggcattttttcgcaaccagaaaacccccaattctctttccaaggcttcgtcaattctccttccaaagcttccaaatgcttcgctccaatggctttaggctccttcgatcgctgcccgaaaaactcctccgccacgccaacgaacccatatatgatggagtgtgccaaaggggttataggacattgagttctggtctttgtaatccatccagagttattgggaatttttctccaaatgttggaaatggtgttaatttgaagaacttgttgctttttggagccgcggatacatattgggggacatctagatccgttcatgggtcagcatcattggcaagggactattacgaagtgcttggtgtgagtaagaatgctagttcttctgaaataaagaaagcatactatgggcttgcaaagaagctccatccagacacaaacaaagatgatcctaagggctgaaagaagtttcaagaagtttcaatggcatatganggtttgaaggatg

SEQ ID NO: 11530 - DNA, 532 bp, Glycine max
  Clone ID: jC-gmfl02220131h01d1
gatcaatagacagatgaatatatatatagtttcatgttgacactatgcagaaattatattctagtttacccatggtccaatgataaaggctcctcctttatgtgacgtgatagtaggaaaaagaatcacattgagtgacttgcgccctttcttatgttataaggaaactatatacagcactgactagaattctagcctagaggagcatgaggggattgccttctaagttctaacaaaaaaaattttgaattgtgatcatcccttgggacgagaaataaatattacatacactcgaaaaagtggaaggaattaagaaaagaattaccaatccttaatcctacaaaacttcaacaaccgcctagttgagcatatgattttgataataactcttgcaatgttttcaaccagaagcagatgcaactctctgtttatcaaaatctccttgctcttccttggcaaactctttaatcaattcccgctgtctctctgtcagattgtttggaatgctgacgttaaaatgaacatattgatc

SEQ ID NO: 11531 - DNA, 467 bp, Glycine max
  Clone ID: jC-gmfl02220131h02a1
ggcatcattggcatgcaacacgtttattgttagcagcacgttaagatcagttgttactcgtgcggaaccacctaaacctggtcctcttttcgatcttagttcattcaatcgccacagctttccggcaggcttcactttcggggcatcatcttccgcgtaccagtttgaaggtgcggcaaaagaatatggtagaggaccaagtatatgggatactttcatcaatcaacatccaggtaagatagcagatggaacgaatggagatcgcgcacttgaccaatatcaccgctacaaggaagacgttcagatcatgaaaggtatgaatttggatgcatataggttctctatctcttggtcaagaatcctcccaaatggaaaacttagtggaggtataaatcgagaaggaataaattattacaacaatctcatccatgaattgcagactaaaggtttaaaaccttttgtgaccc

SEQ ID NO: 11532 - DNA, 374 bp, Glycine max
  Clone ID: jC-gmfl02220131h02d1
ggggaaaaatcccaacctttaataattcataggtaaatttattaccttggtaaaagttaccccattcaaagcagtccattttggaaaaatttccggaacccttttgcagaaagttttggaaatcgggtcaaattatttttgggatccccaaaaatcaatcccaatcgggggttataacccttactccattcaaaggagtccagccgggacccgacaaaaaatccctttacttttacgccatcccttattggataatcaacattcaattgatgaccattatggtaatcaattctggaaaaacccctaagagattccccaggggatagtggtggaacctctaaatcatttattccacttttcgggttttaaaacca

SEQ ID NO: 11533 - DNA, 512 bp, Glycine max
  Clone ID: jC-gmfl02220131h03a1
cgttcgagcagctggggcaacacctgaggtgagggatggcatgcgctttattgaagtagacctggtagaaccagaaaagcaagttgttgcattagcagatgcatatttcttccctcctttccaaccatcactgctccctaggacaaaaggtggacctgtgattccaactaaacttcctccaaggaaagcaagactagttgtttacaataaaaagtcgaatgagacaagcacatggattgttgaacttagagaagttcatgcaacaactcgaggtggacaccataggggcaaagtgatttcatctacagttgttcctgatgttcagcctccaatggatgctgtggagtatgctgagtgtgaagctgttgtaaaggactttcctccctttcgtgaagcaatgaagaagagagggattgaggatatggatctcgtgatggtagatccctggtgtgctggatatcacagtgaagctgatgctcctagccggagatcttgctaaccactaatctttt

SEQ ID NO: 11534 - DNA, 478 bp, Glycine max
  Clone ID: jC-gmfl02220131h03d1
aagttaccaagcattaccatgcaacaaacgtacatacaagttatacagtacaaattacagtaataggcgtttcttaaatatccagccaggttgaaaccagcacaaacagttgtattgaatattttatttaataatttgaacataaccacgtagagaggcagatcctcctcattttttatcctttcaaagcttggcaattagcccattctgaataggcttggctggcaggccattctctttgtcatccaaatcactttggtttggtggaacatcaacagcaggcgagcaattgaaaaacccatgcggcataagcatgaaaccaatgcgttccacgggcataacaggccagtcttccaatctaggaatgtgtgtcactccaaatacgtaccaaagaactatatcagcttcctccagtgatcgattttgcttaacccaagtagccaaaccctcttcaacacgtggattttgattagggaac

SEQ ID NO: 11535 - DNA, 573 bp, Glycine max
  Clone ID: jC-gmfl02220131h04a1
ctcgagccgaatcggctcgagggcggctttggtgccgagtgattcccacgcgccgcatgcaaatcggaagctgaagattggcgtggttctgtccggtggccaggctcccggcggtcacaatgttatttctggaatcttcgattacctgcaagaccttgcagaaggaagcacattgtatggtttcaggggtggtccagctggcatcatgaagtgcaaatacgttgaacttacctcagactatatttatccttacagaaatcagggctggttttgacatgattcgcagtgggagggacaagattgaaactccagagcagtttaaacaagctgaagaaacagtgcagaagctaaacttggacggccttgttgttattggtggagatgactcaaacacaaatgcatgcctccttgctgagcatttcaggagtaaaaatatgaaactcgtgtgactgggtgccctaaaccattgatggtgatttgaaatgcaagaagttccacaagtttgggtttgatcagcatgcagatatatgcagaatgattggcatgttatgatagatgctcgataactggaaa

SEQ ID NO: 11536 - DNA, 552 bp, Glycine max
  Clone ID: jC-gmfl02220131h04d1
gaaacaggaccatttggttttccatatcttatgcaaacacaatccaccttaaaattttctcactcaggtactcatgtctcaacctcctatttacatcactattaccgtacctaaatgacgagacgattaaacattgaactaaaagatcatggaacgacatattcccaaaacataaatataagtcgatgatgttgataaagcataaactattctctagcaaagttccaaagtgaaaaacacaatcacttgactaatctccggtctattatatttgtagtagttcccaaaaaacatgaattgccaccatcaaaaaggcttcagaatgtcttaagcttgtgcaccaagctccaagagtaaagtgtgattaattgcatcagatcctgggccagtgaattgaattggacctggactaatgtagcaattttagggcccactcatccctcaaggaggcaaactttttgaagggtgccccttcaagctccaccattgccttcttgatcacaggcttgaatttaccatgtctcctcttcacgtccatcaatgaagtgagtg

SEQ ID NO: 11537 - DNA, 576 bp, Glycine max
  unsure (1)..(576): unsure at all n locations
  Clone ID: jC-gmfl02220131h05a1
ctgagatggcaaagaatgtggggattctcgctatcgacatctacttccctcccacctgtattcagcaggaattgctggaggctcatgatggtgccagtaaagggaaatatactattggacttggtcaagattgcatggcgttttgtacagaagtagaagatgtcatctcgatgagtttgacagtagtttcttcccttcttgaaaagtatgcgattgatcctaaacaaattggtcgtctggaagtaggcagtgagactgtgattgacaaaagcaaatccatcaaaactttcatcatgcaaatctttgagaaatatggaaataccgatattgagggcgttgattcaactaatgcatgctatggaggaactgctgctttgttcaattgtgtcaattgggtggagagcagctcatgggatggacgctatggacttgttgtctgcactgacagtgctgtctatgctgaaggacctgctcggcctactggtggagccgctgctgttgccatgctaattggtcctgatgctcccatttcttttgaaagcaaattgangggaagtcatatggctcatgcctatg

SEQ ID NO: 11538 - DNA, 284 bp, Glycine max
  Clone ID: jC-gmfl02220131h05d1
ggataatggatgtctttcttttttacgaaatgaaaagaaataatcagagtaactggaaactgggacccccttcgttaacagaataccggggactcaaacttataacgtccaatcctttacagggctttacattttcaaaagcataattgctagaaacaattttgggggggatcatttaaacttggagagtttcggaaaatttttgaactaacaacacctggctgctacagatttcataattgtgcgcttggcttcccttaagaagaagctaattcaaacgagaa

SEQ ID NO: 11539 - DNA, 540 bp, Glycine max
  Clone ID: jC-gmfl02220131h06a1
ctttatcctacgccctcctccctacttatcctgcgcatatttcgccgttttctcgccgagatcttgaactatctcctccgtgatctcactttctcaactacacaatattcttattgaattccagcggaaagaatcatgagttgcttcggctgttgtgaggaagatgactaccagaagactgctgatagtggacgacagcatgtggtaaaaaactcaacaggaaatgatggaaacagtcgtgcatccgaaactgcaaagcaggggactcaagctgttaaaattcagcccattgaagctcctgaattacacgcggatgaactcagagaaatcaccgatggctttggagaaagttctttgattggagagggatcctatggaagagtatattatggtgttcttaaaagtgggcaagctgcggcaatcaagaaattagatgccagtcaacagcctgatgacgaatttttagcccaggtttcaatggcttcacggctgaagcatgacaattaggttcaattgcttggatattgcattgatggaaac

SEQ ID NO: 11540 - DNA, 320 bp, Glycine max
  Clone ID: jC-gmfl02220131h06d1
gcaatgtaaactttgggatctataaacatgttaaagcaaggagggatccgattcagaagcagtccctttcttatatctaacgtgcacacttatgcacatactcaatgatacagatataaacacagacaaccataactacggagaaccaccaacaggcccatgaattgcattcaataaaggttgaaaagctcagactacaaagctcatgtttggtccgaaatcacctttaacttgcactcacagggcaacatcagagggcatctagcaacacatattggtggatattctactactagactggcatttacacactgtctgac

SEQ ID NO: 11541 - DNA, 594 bp, Glycine max
  Clone ID: jC-gmfl02220131h07a1
gtggaggtggagaaggatatgggtttctacgagacaccggtggttcctcacatgggcaggtgcacgtgcacactacattctctgcgcttaaacttgcatgaagagacatgtactctctgcttggatgcacactaacatactgactattggcaattctgacccacattcacgtgcaactggatctaatctctcgaacaggacctcaatatgctgacagatctgaattatgctcagggatatcaacgccataatgagatcagatctgaaaccctcagaagttcatggtagggtatgctagtgttcatgttatcagaagcatcaagcatgccgatcgcggagtggagcgtactcaatgggaatatgcggatgatcacagacattgaatttccacttaaaggagtatttcacgtctggggaatgcacgtgcagaactggagatgatactcctttaccgtgatgcttatgatgatcagcgacatgtgtatcatgtatatctggctgactacgacatcattaaggaggcatatgatgctgttgatctcgggatcaatcagtatgatacagaccagtctgcaagatacgtgaataatactc

SEQ ID NO: 11542 - DNA, 399 bp, Glycine max
  Clone ID: jC-gmfl02220131h07d1
gtactacggttggaaatgatttatcgtacttttgaagatctactgctctctgaggagaaccatatagacacaagaaattctttgttataagatgcttataacaataggatcaatgacacttatcaacatagtagacacccgacattcattaactaatacattggttaaactattgaaagaaaattgggataagacagaccacctatgagcaaatgagttaatgaacttgatatagaaccatgtttaagccactgttcccagtccccatggttcatatgcattcttcaacgcaatcagtaaagcgtactgtgaatgagtgcgcaaaatcagtgattgcccttggatcatatgatccccctttacattattaaagcagcctatgccatggcgcaggcacca

SEQ ID NO: 11543 - DNA, 544 bp, Glycine max
  unsure (1)..(544): unsure at all n locations
  Clone ID: jC-gmfl02220131h08a1
cggagtggaatcccgagaaggacttgctcgccatggtgactgacgattctaagatcttgctccatcgtttcaattggcaacgcttgtggaccattactccaggaagatgcataacatctttgtgttggcgtcctgatggaaaagcaattgctgttgggcttgatgacgggacattgtcactgcatgatgttgagaatggaaagctattaagaagcttaaaatcacattgcgctgccattatatgtctcaactgggaggaggagagtcagctaattacagatgactttggtcacacttccaaatatgaagatagaacctctcgtttctttcctcctgctccaagagttcctcggatgcctggattggtatctggggataatggcttcatggatgatagcgaagattcatttcaggagctgtcaaattcttctcaccaacgattcaacatcctatgcagtgcagataaagatggaaacatttgttttagtatatttggcatcttccctatagggaaagtntacatacacaaccttacttttcctac

SEQ ID NO: 11544 - DNA, 523 bp, Glycine max
  unsure (1)..(523): unsure at all n locations
  Clone ID: jC-gmfl02220131h08d1
acctcaaacaattagcaaattattattaatgggtactaaactccagtactttcggtcttttactctgtttgatcttttttacttttttgggcttaactgattacttctatcttaggaaaaataattaaattaattacgtgttcaagtgaacactaataagggatatggacattctacaacaatgtgtttcaaggaccattatgaaaatggcaaatgattacaacccctcaaccacagccaaaacaaaagcaaaaaatgaaaaataaattaaatagcaaactattctacatccgagacctcatcttcatcttcctccaaaatgtagactagagcacgctttgttgcagcaaatacacaagccacgcctcttgatgcactaactgccaagggagcaattacagaatgacgaatggtgcgagatttctcatccccaatattcaggtaagcgacagaatcctttagttctggtaacctncaaacatctatacaagcagatcttgacatagagacatatggcagatca

SEQ ID NO: 11545 - DNA, 464 bp, Glycine max
  Clone ID: jC-gmfl02220131h09a1
cggcttgagctcagatggcatttactttctgaagtcgaattagtgcatggagaaaaggggaactctgcttatttatctccattaaagacagcacctatgccagctttgcctccacctgatacatataaaccaatggagaaggaaagtcgctgtgaaaataaagacacccctcagaataccttttcaagcgtaagagatattgaattgctctttattaaagcttcagaatctggccaagaggttccaaagatgcttgaagcaaacaacgatcactttcgtccaatattccaaggaactgaaaatggttctctggtgtcctcgtttttgaaggtatgttgctcatgaggagaggacccaagccaagatgcataacgtaatttgagtcattacaactgttcatctttgcattttcccagacattgctgaccttgatgagtccattgcccgtcttattgactggtaat

SEQ ID NO: 11546 - DNA, 262 bp, Glycine max
  Clone ID: jC-gmfl02220131h09d1
ttttgttttttttttgcttctagaactttcatactacagtattaaaaaaggctgctgggggcggcatggctctgtatgccccatccaagcctggaaaagccgtgaagctgggcccatcagccgcccaaacctgtatggtgaccatgaggaagaccgaaaccaagcaggcctccttcggtagcgcttagttctttcaataccgcgtcaagcactctggcccattctctggcgtgcccccaggctacctcactggcgagtctcc

SEQ ID NO: 11547 - DNA, 295 bp, Glycine max
  Clone ID: jC-gmfl02220131h10a1
ctttaagatcttccatgcccgctactttgcgtaggcgaattatagcatgttgacccggggaacttgagactatcaattccctttcatcactgttcctatgccacatatgtctcatcgtgtgccatatacacgaatgctgagtggactgccgctgtctgaagccagacaactttcagaagaccgttgcatgcggacgagatcttgaattgctctactttacacctcaagaacatgcccaataggctccaaaaacgcttgtaccgagccacgcacactttcgatcagtatcccactg

SEQ ID NO: 11548 - DNA, 372 bp, Glycine max
  unsure (1)..(372): unsure at all n locations
  Clone ID: jC-gmfl02220131h10d1
tgccatagatgcgnatagatncttacgaaataagtcctcggaagcacccgctcactagccggggatcgcgcttgagttggatgattgttccttttattttgacgacccggagggatgggatgtcctggggggcccggattcacctcttgcttttggtcaatccaaaaccaagtttcaaatggaacccaacaccggagcgacattttatgatgatgctggggtggatgaagccaagccagactttatggaggttgtggagtttctaatcaatcctgcaaggctcactaccggataaagctcgcataccgagaggacatgtcctagcagttactccaagaactgtaaagacactgccagccaacgctattgatg

SEQ ID NO: 11549 - DNA, 465 bp, Glycine max
  Clone ID: jC-gmfl02220131h11a1
gtttttgttgctgagtgtgcgttaaactgtgtaagagagttatagcagcaggtggaggagctcctgcacctacgatcgatgatccacaaccttatcctccgacggatcagttaccgaatgcttcttactgcattacgagtcctcctccatggcctgacgccatacttattggttctcaacattatctggtgatgctcggaacaactgtgcttattcccactgctcttgttccccagatgggatgtgtcaatgaggagaaggcacaagttatacagactctactttttgtaactggaatgaacacattgctgcgaactctgcttggaactcgattgcctgcagtaattggagggtcttatacttacgttgctacaacaatatctattattcattatggtcgattcagtgctgagccagatcctatagagcatttccagaggataatgcggtcaagccaaagtgctc

SEQ ID NO: 11550 - DNA, 361 bp, Glycine max
  Clone ID: jC-gmfl02220131h11d1
gggcacttaacttctttttattaactttcccaattccaagtcagcgtggacataaagaaaagccatttccccaatgctataaaatcttgtacagcccaagaggtcttcttgtcccgattacctggcatcagaccccatctcagctcacaaaaagtctaagtgcgccctttcagcctcgcttgggactcactttggcatgaactgaaaccccctttttttattagataagaccgcacagtgacacaaaatgggaagcatttgttgaggcagaacggcagtgaataaaactctccacttgttgagcccaccatgaaggatctgtgctttgaccaccaatgctttcctgtatctatccgaatat

SEQ ID NO: 11551 - DNA, 260 bp, Glycine max
  Clone ID: jC-gmfl02220131h12a1
gttctagatcgtgatctagagctagaccggagttgggatttataggaaccctcctatgcgttcatttatcgatccacgtccatccacatctttcttctcctattgtctctgtactgtatgcttcttctctgcatgtgagagtacgactccatggacttgagcgatgctgattgagaatcaagggggactgcccatgctctgaactccggggcatatcggatctgcgctagtgggcgatactgtatgcgtgaatgtacctt

SEQ ID NO: 11552 - DNA, 303 bp, Glycine max
  Clone ID: jC-gmfl02220131h12d1
ggtcacttattttcttttttttaactttttgaattgcaattaggtggggacgaaaaaaaaatggatattaccacggccatagaaattcgtataatccaagacgaccttatttccctattacctgccaagatacccaagctcttgtcacaaaaagtctaaccttgacctttgagacacgctagggactcgctggtggatgaatggcaaccccctatttttctggagccacccccgcacccacagacatgggaattattctttgagacggaaacgccgagcataaatctctttagttcccgggcc

SEQ ID NO: 11553 - DNA, 509 bp, Glycine max
  Clone ID: jC-gmfl02220132aa01a1
gctgggtggactgaaatcggtggagaacgcgcacgatgattcggtgtgggcggtcacctgggtacccgcaaccgccaaccgaccaccgctcctcctaaccggttccctcgacgagaccgtcaggctctggcgctccgacgacctcgttttggaccgcaccaacaccggccactgcctcggcgtcgcctccgtcgccgcccaccccctcggctctgtcgccgcctcctcctccctcgacagcttcatccgcgtcttcgatgtcgattccaacgccaccatcgccaccctcgaggctcctccctctgaagtttggcaaatgcgcttcgatcccaagggtgccattctagcagttgctggcggaggtagtgcatctgtcaagctttgggacacttcctcatgggaacttgttgccactctgtcaattcctcgtccagaaggacagaagcccacagacaaaagtggcagcaagaaatttgtgctatcagttgcatggagtcctgatgggaaac

SEQ ID NO: 11554 - DNA, 524 bp, Glycine max
  Clone ID: jC-gmfl02220132aa01d1
acagcatgtacatccatgcattttcttcaattcaaaatcaatttgtagacaaaagagtaaataacattccacaaagagtacaaatacagcacacaatatctaaatcaggaataatcatacagtgatatgctcttgtcatctgatacactggcaagtcgaccacctcgcacatcactccctccaggtggtctaaatgcgactccccatacctggtctgaatgattgctcattgtctgcacagatgccctcatgttaagatcccatagccttacagatctatcacttgaacctgtagcaatggctgccccatctgggctcacgtccacacacagtacccaactagcatgacctgacatggtcccaattaaagcttttccctcagcatcatacatgttggacgtttccatcatccgaagctgtaaacagcagccttggatcataaggagaataaacaagagatcgcccaggcatgaagtgaccttccaggtgatgcaaaaatttggcgcggggcacatcaaaaactg

SEQ ID NO: 11555 - DNA, 487 bp, Glycine max
  Clone ID: jC-gmfl02220132aa02a1
agagtaaccaaaaggagagtgcaataactcgttgtacattcctagtgtgtgggagagacatggctaagatgtgtgttttggtgttggttcttgctctggctgtggccacaagtgccagaaacgttcccaaccccaaggatgctggtcttaaggaccagaagaacttcatcagctatggtggagttggtggttattccgggattgggaacaatggactgccttttggaggagctggtgccggaataggtggtggttttggcggaggtggtggacttggtggtggcctcggcggtcctaccggtgggatcggagggtttggcggtaccggtagcggtgtcggtggcggtattggtggcggcgttggaactggcgttggtggtggcagcggtgttcttcctttcccttgaaatgatgaacatgcatgcatgcatgcatatatgctccgtcacgtttctttgattacactagtctttatttttcggtcggg

SEQ ID NO: 11556 - DNA, 369 bp, Glycine max
  Clone ID: jC-gmfl02220132aa02d1
agtaaataaatggaactcatatattgagggcattagttccatgctaaatatgaaatattccatatgtaaaagaaccacgtttttgagtgactatggctgtcacaaaacctaagcgaatgatagacccagaatgacacattacaactattttttactttccacaggcgaaagaaacactagaacaaagcttgaacgattaacgacacgtacaagcacaaaccacaattatttcccgaacgaaaaataaagactagtgtaatccaaagaaacgtgacggagcatatatgcatgcatgcatgcatgttcatcatttcaagggaaaggaagaacaccggtgtcaccaccaacgccagttacaacgccaccacc

SEQ ID NO: 11557 - DNA, 435 bp, Glycine max
  Clone ID: jC-gmfl02220132aa03a1
cttagctgaaccctcacctcaatcttgcgtgctagctagctttattccaattcctacagaaccaaattattctgctagctagctagtacgtcaaataaaataaaataatcaaatatggcattcagcgggacccaacagaaatgcaaggcttgcgacaaaactgttcactttgtcgaaggtttatctgccgatggagctgcttatcacaagaactgcttcagatgcagccattgcaatggccttcttgcgataagcaattactcatccaccgaaggagttttgtactgcaaggtgcactttgagcagcttttcaaggaaactggaacctaccccaagaaatcccagtcgtctggaaagcctccactcgagctgaatagagcaccaagcaagctttctgccttcttctctgggactcaagagaaatgttcaaaatgc

SEQ ID NO: 11558 - DNA, 491 bp, Glycine max
  Clone ID: jC-gmfl02220132aa03d1
ataattaaggagagttgtatagaaaagagattgcttttgtaatccatcatcaattcagacaatagaatcttctttttctactctgatatctgtttcttaatacacagaatgaaatacatctgaaatgactgaggcctggcttgcactttggcttgagaaagtcatgtacatgccccaaagaacagagaggcttaacctactgattgtttgcaaattatggaacacataatactgtaatagcccttttgtgggaatgatacaaggccacgacccaatcaatcaggaacttcaaaatgtcccaaatgaaatggggatttacttgtagccagaaagatcaattttactcaaagacacaagtgaagacccccgcttgcaaaaattaatgttccatcaatcaatctagtgctcttgctcagagtgatcatcatcagcttgttcagcttcctttgctgctgttgtcgtgtctggctctgactctgagcgatcatcat

SEQ ID NO: 11559 - DNA, 358 bp, Glycine max
  Clone ID: jC-gmfl02220132aa04a1
gagtacttgttttgggatgcttttcatcctactgaagctggcaatgttgttgtggctcagagagcttacagtgctcaatctgcatcagatgcttaccctgttgatatccaacgcttagctcagatatgatctctgaacaatcaacatgttctagtgggtagtggctattaagctctgccacaaccatatttaatgttcttcgaatgtgctactccttttaaggcataagagtcttaagttttctctctttctcttacatattcatatatgctaaatgttcatgggttcacaagtacaggtgtaatttgtggtaaagttttggaagattgcttatttaattatagtgaataatagtatg

SEQ ID NO: 11560 - DNA, 363 bp, Glycine max
  Clone ID: jC-gmfl02220132aa04d1
atggggaaacattatactatttttccctttaaataaataagcaatcttacaaaactttaccacaaattacacccgtgcttgggaacccctgaatcatttatcttttatgaatattctagagaaagagagaaaacttaagacttattatgccttaaaaggagttgccctttcgaagaacattaaaaatgggtggggcaaaacttaatagccactacccactaaaacatgttgattgtctcaaagatcatatctgagctaaccgttggatattaacagggtaagcccttgatgcaaattgagcacttcaagctttttgagccacaacaacttttccagcttctgttggaataaaagctttccaaa

SEQ ID NO: 11561 - DNA, 535 bp, Glycine max
  Clone ID: jC-gmfl02220132aa05a1
gtgcattgaattggtgctgcatttactcaacgaattgaacaaggtggcatgatgcgatgagttggtgttctatgagggtattctcagtgtaacactctgaatttgaagcaaaatgttcagtccaagcatggattctgcaagggatgcgagtggtgtggcagggaccgtgctcattcccatgcggtttgtgtggccatacggaggaagaagtgtgtatctaagtggttctttcacacggtggtctgaacttctacaaatgtcgccagtggaaggttgcccaactgtgtttcaagttattcatagcttgatccctggtcatcatcagtacaagttttttgttgatggagaatggcggcatgatgaccatcaaccttgtgtatctggagaatatgggatagttaacactgttttattggctactgatcctaatattgtacctgttttaactccagaaatagtttctggatctaacatggatgtggacaatgaggcttttcgatgcatggtcccgatgacagacagtacattaaataat

SEQ ID NO: 11562 - DNA, 501 bp, Glycine max
  Clone ID: jC-gmfl02220132aa05d1
gcccatcaccacttgacaatgccaattacgcactatccatcgggaactaaagatagtcaacaaaacaagagtttttcgaatatgggcctcccaataatttccccccccggaatttggatcttcacaatatgaaacgatttcagacagacattgggcactcccctttgcttgggtatctataacaggggcccaacatatttgaacataatatgactgggggtgagatgaataaatttggggcaatcagactaaaatttacaggcctttttttctcaagcctaaaatcttaaaacaaggcaatgaaccaagaggtcaatccaattgtatttcaatgaaataaagatcaaatcaccgggtaaaagctctggaatctctttttaggggctgggcccaaatggttgcctgactatatgcataagtgtcatgacccccacactaactggtataacccaggaagaagttgaatatgtcactcaatgctatgaagccttttacgcgctt

SEQ ID NO: 11563 - DNA, 470 bp, Glycine max
  Clone ID: jC-gmfl02220132aa06a1
ttgtgtttatttttttcttcctttttctctttttataatatcagcccccaaactcccttgtgtacagtgatcgatctcaagaagaaagactcaaaaaatggaggggaatctagagaagaagttgctgagcaaagaggaagtgtcagaagaagataatttatcattggtgaagagggtgtgggaagagagcaaagagatgtggatagtggcagcaccagccatattcacaaggtttacgacctttggcatcaatgttataagccaagcttttattggtcatattggttcaagagaactcgctgcctatgctcttgtattcactgtcatcatacgtttcgcaatggtattctgttaggaatgtcaagtgcgttatcaacactttgtggacaagcatacggtgcaaaagaatatgacatgatgggagtgtatcttcaaagatcatcgataggttttgttcttaactgcactct

SEQ ID NO: 11564 - DNA, 577 bp, Glycine max
  unsure (1)..(577): unsure at all n locations
  Clone ID: jC-gmfl02220132aa06d1
agcaactacttatataattttattaatttaagaaatatttgagagagaatatactgataggatggtactatagtataataactatcaagcaatcccctgaatgtataacgtacaatagccaaacaaacaatgatgatattgataaataggagtctgaaactaattatctgatgtacttgtttcaggaacaagtccaccttataccacttactaatacgattacgggctatagttacctgctcatcccaattagttttgtaggtgattatagttaggactatagtttgaactagtgtcccaaacaacattccaatccaaatacccttgacttccaagtgaataatgttaccaagtactattccaactggaatacctatgaggtaataacaccctatgttcacatacgctacagtgctctgccaccctgctccaacagccacccctgttgaaatcatacaatttcatgactctcagactccccaattgacaaattaattntggctttatcatgcataaacaattgggttcaaatcttaaacatattcattaaaccaagacaccaaaagtatatagcata

SEQ ID NO: 11565 - DNA, 377 bp, Glycine max
  Clone ID: jC-gmfl02220132aa07a1
caaacatggcaatgaagaagttcttgtgggttgttctgtccctttctttggtccttggagtggccaatagctttgattttcacgacaaggatttggagtccgaggaaagcctgtgggacttgtacgagagatggaggagtcaccacacggtttcgcgaagccttggtgacaagcacaagcggtttaacgtgttcaaagcgaatgtgatgcatgtccataacaccaacaaaatggataagccttacaagctgaaactaaacaagtttgctgacatgaccaaccatgaattcaggagtacctatgctggctcaaaggttaatcaccatagaatgttcagagacatgccacgtgggaacgggacctttatgtatgagaag

SEQ ID NO: 11566 - DNA, 567 bp, Glycine max
  Clone ID: jC-gmfl02220132aa07d1
gtaataagcataaatatattgatggatacactggcattgaatctgagatactaatagaaaacaacaaccaaagctaattagagtatgattttgtgggaagcattcaaacttcaaagttcatctttaggagatgatgaaggtcctgttggattattggaggagtttttgattgcgtaggaagccaacatagctatgccacatagtccctgctttttagatatgttcctttgcattctgatgtaaccctgttctccccattctggtccccaagagttcctcactatccagtaactagtcccatcaacagttgctccataccccacaatcgccacaccatgatttagctccgtgctacaatcaccagtaaatactccctcggagtagaactggaaatcagatcccccggcatcaatggctacagaaacaggttggttggcaacagctttgagcaatgcattttcatcgttaccaggtacattctcatggccatcaattgatacagctaggtcatttgccttggatgcatcacatgttccatcttgagctgtgtcagggtaatagctttct

SEQ ID NO: 11567 - DNA, 551 bp, Glycine max
  Clone ID: jC-gmfl02220132aa08a1
gacgcagcaagatctattcaatgccatgggatcgatgtattctgcaatcctcttcattggtataacaaatggcacagctgtccagcctgttgtttccgtggaaagatttgtttcttatagagaaagagctgcagggatgtattcagctttatcatttgcatttgctcaggttgtgattgagttcccttatgtgttcgcacaggctattatatactcttcaatattctattccatggcttcctttgtctggactttcgataggttcatttggtacttattcttcatgtattttacgatgttatattttaccttctatggaatgatgacaacggctgtcacaccaaatcataacgttgctgccatcattgctgctccattttatatgctgtggaaccttttcagtggttttatgattcctcacaaggtatggaaaccgatacttcattggtactcaattgataattttttgtcattgactgcattcatccatttgctcccaatagacaataacttcttgactatcttgatgtcaaaagtgtatcatcgggtat

SEQ ID NO: 11568 - DNA, 594 bp, Glycine max
  Clone ID: jC-gmfl02220132aa08d1
atattacttattgaatattattcactttcaccaaaatgtgtcattaccaaccagtaatctgatttcatgtctaacagaaaccctataaaccaatagtacgtcactttacaacaatttgtccctgaatttttgtaaaccaaaaataatttggataatgtattcttattagtttacaaaccctaaaagcacactagtgctatgctataatcatatcgctatacagatgtcacgcttatttttatgaggtatcgaagatctaacatacaatttggttacaatgtctctagtggctagcaagtctcatcccatcatctcctttggaaattgaaggatttaattgcaaaggcaaatataattgcaaaaaatatgcagaagccagccaccataacagcagtaacgcacaagaaatcatgcctgtacccaaacacgtgtttgagtacctctcttatagtcatcgagtttccattagagagcttcactaaatgagtttcaccaccatactgtgaagttaggagaccatacagactccaggctacaggtttcgcccagtaataccatcttcaccaaatagggattctctgagaattaaagaag

SEQ ID NO: 11569 - DNA, 524 bp, Glycine max
  Clone ID: jC-gmfl02220132aa09a1
actcgttatccctctttctttcctcttccaaactcaacttggaattctccaatttccaaacaaagcttttctatcaacatatcgttctcgtaactctgctcaaccactagtccacttcagcgacgcaagacgaataacattacataatcgaatttacattcgacacttaaaacgccgatccgtacatttctctagctgtgtcgttttgactgatcaatgaatggtattccgagacacgagcgccgatgggcgtccgacagcgttccgggaaaagcgaccgtcagcgccggaacttcgccgggaactgagtccaactccgccgcggaggagtttgtggaggtgactctcgatcttcaagacgatgacaccatcgttctccggagcgtcgagccagcctccgtcattaacatcgacgacagcgtcgcaggcagcggaaaccaaactccggcgtcggtttcgaggtctccgacgatccgtcggagctcgtcgagaggattccggcagttctcgcaggagctgaaaag

SEQ ID NO: 11570 - DNA, 517 bp, Glycine max
  Clone ID: jC-gmfl02220132aa10a1
atcatggtggccgtaacccgcctcgcgaagcgcgcgtcaaccttctcaccccagatgaggaggtgcctgagctcctccgaagtcaaatcccacgcgccgtcgcacgacgccgcgtccttccgcccgtttccgcggcgcgaagatctgagcatgcggtgcgtgcagtgggcgttcctcggctgccccggcgtcggaaaaggaacgtacgctagtcgcctgtccaacctcctcggcgtccctcacatcgccaccggcgatctcgttcgcgacgaactcgcctcctctgaccccctttcttcccaggttctcttcttcttcctcttcactttgaattaactagattaatttttgtaacgcaaatttggtcaaggttattgaaatttctgcgtacggcgcagcgcttagacagaaaaatgggatgataattattattttaaaaaatataaaaagttgtcatctaatcacaaaccgttaccataagttgttcgtacaaatgttctgacacttgatcccttac

SEQ ID NO: 11571 - DNA, 496 bp, Glycine max
  Clone ID: jC-gmfl02220132aa10d1
attcaaataacatgaaacatcatattaaataatttttttcctggaagttactccagtaaaaaagccttccctaaatcacgagcatgtgatgatgtgttgatgtaatagaataagttcatttcacatttaatttacaacaatagtgatgatgcaccaatcctatcgacgttgattcctgaccaactatctttctagcaatactgggatatattattcactcttcacaataacattatatgctaggaaacccttcccatataaccaaattatacgaaaacaaaacgcaacactaccagtcttatcagattacaacacttacaaatatcatcattggtccaaaataatactagcagagaagttcccttgctttggttctctgtcctgcaaaattgccaagcatgcaatataagcacgcaaagaatgaaatacttactgttatgatacattattatatctttatgctgcagcagatcgtttgtccttgtaatcatcaaga

SEQ ID NO: 11572 - DNA, 525 bp, Glycine max
  unsure (1)..(525): unsure at all n locations
  Clone ID: jC-gmfl02220132aa11a1
gtcctgacactgacggcattggctgggtagaggaaccatacatatgcacagccccaataaagtacaagtatgccaactactctaaccgaaactatgcaaagaccgggaaagctattttgaagttccagttgatcaatcaacgtgcagatttctcatttgcactattttcaggtggattatccgatcctagacttgtggcaatttcgaattccatatcatttgcaaatcctaaagcacctgtgtatccgcgccttgctctaggaaaatcttgggatgaaatgacagttacatggacaagtggatatgacataaatgaagctgtgccttttgttgagtggggaccaaagggaggaaagaaaacacgatctcatgctggaacattgacatttaaccgaaacagcatgtgtggtgaacctgcacgaactgttggttggcgtgaccctggttttatacacacaagtttcttaaaagaactgtggccaaattttaggtacacttacangttgtggcatatgctgtctaacg

SEQ ID NO: 11573 - DNA, 542 bp, Glycine max
  Clone ID: jC-gmfl02220132aa11d1
ggacaataatttattttatttcaagtccatatcgggtctacacatagacacaacataactcatgttgctagagtagttttctcacaaccatcgtgcacacaggccaaaacatctctgtagtctcttgaaatgggtaaaggagtcgtagacctctccatcactacttttcttgtactcaaacaagagatatgaatgattgaaagcagtcaatttgccaaacccatagtcaacgtccctataaagactccaaatagggggtgatggtgtgaagtctgacaggtgacttcccccttcaccaacaaccacatgaattgttccattcacagtgccagagtagtgatgcttttcttcattcacacattgattctgataaatggggcatactctttcatagttatggacatgaccataaaatccaatgtctactttgtacttttgccaaagcttctgcaaactttcccttcccatgggctcttcaaatgaaccctccatgccataccaaagattagaggagtagccaaggggacgatgagctgaaaaga

SEQ ID NO: 11574 - DNA, 567 bp, Glycine max
  Clone ID: jC-gmfl02220132aa12a1
ggatctctgcattggaaatttgtttcaatttatatgttctaaacacggcttaggaaacctggcatgggagttgttactgtttctaccttagctgctaggacgccattaagattgaatacaaggttgaccagtcatcagcaggtgcataaaagacctttaattgtagcttttaaaggaaataaattgaataaagccgctttggtttcacctcaggagcaaattcctctacccatagaaacagcaaagaaagaccaaaaaagggtaggaaagactagtgagtctctgaagagagtgagagctgtctctattgttgaaacctctccatgcaccttggatatggactacaatgaagctgcagccaaacttgaaaatatatataaactcagccctgtatctgatacctgtaatatggaagatattgatagtaaagtcgagagagctttgtggaggaggaggaaggtctggtaatgaacatgatgatgaacattgtgatattgtggttagaaaccagaatatgaaggccaaacgattgagtcttgattagaggattacattgaaaaataatgc

SEQ ID NO: 11575 - DNA, 518 bp, Glycine max
  Clone ID: jC-gmfl02220132ab01a1
cattattctcgaattagggttttccactgatctccgagcacacaccactactctgttcctcagattcaacaccaccttgcgtggcgccaatgggaaaagccttcgacatcggagccgttccgttcaacgccgacgggtggggtccgccggacaacgcgacctcaggcagcaacaacaacaacctccctctgaacgtccccttcgcccccttctcccgctccgacaaattgggccgcatcgccgactggacccgcaacttcaacaatccgacccgctccaagaaccccgccgatgccgtcttcgacttcgccaacgacgactccttccccgcctccgccgacgacgacgcctccttccgcctcgtcgacggaaagcccccgccgcgccccaaattcggccccaagtggcgcttccagcagcagcgccagctccctcagcggcgcgacgaggaaagtcgaggccaagaagcgcgagcaggagaaggaacgagcccgcagagaccgtctctaccacatgaa

SEQ ID NO: 11576 - DNA, 389 bp, Glycine max
  Clone ID: jC-gmfl02220132ab01d1
aaattaatgttggtagcttgcgaatctcaacatcactctgccgacatggaaatttgtaaaccataaaataataaccctaagcccaaatacaattttgaaagatgttgctttggtgcttccacttaaatatgctaaggtctgtaaatcataaacagctgtagcatagaaagaaaataaaaaactcaggttttgctttaaacttttggtccaaaggaacatcacattgcaaaattttggccgacaaagcagtgttaaagaaaatcattctgagtgcgatctgatcacatatgatcggccacatctactccaataaacatgtgaccttttaagcttgaccatctatctgcttgtcttccacatcattagtagtagcggctgcttctcccccc

SEQ ID NO: 11577 - DNA, 396 bp, Glycine max
  Clone ID: jC-gmfl02220132ab02a1
ctcaaacaagaagaggatcaggatctggacgaaggtgcatggaatattgcaatggcaggtggtacatgccttggtttagttgcccgtactgttggagatgatattgtgccgctggtaatgcccttcattgaggagaatatcacaaaaccagattggaggcaaagggaggcagcctcttatgcttttggatctatcttggaggggccttcacctgacaaattagctcctcttgttaaccatgccttaccatttatgcttagtgctttagtgaaggacccaaacaaccatgtgaaagacaccactgcttggactttgggacgaatgttcgaatttcttcacagttcaattgttggtacaccaatcattaatgaggggaaattgccaacagattattac

SEQ ID NO: 11578 - DNA, 434 bp, Glycine max
  Clone ID: jC-gmfl02220132ab02d1
agaacttggaaaactgccaatgaaagtggccaaacaacattatacaattttatcttagtaacaaaaagaaagattcacgtgaccaaataaaatatacaggaaacatgacaaaattcacaaacttttacttagacaagagaaagataacaccaatagtaagctaaactcagacgactccttccaacaattgaaacaacaatccaccacactaaagttcttttggtatcatcacagtatatggcatgtttcttctgtatgcccaggaatagccaatatatgatttacatatgcatttcagaacaaaggaatttaacggctgatgattttcatgaatgcatgatgatttttgacctacgaaaccaactgacatgtaaaaaaatgcataatgctaggatgtaatctttcccatcctgggtcaacaatcacaattgatc

SEQ ID NO: 11579 - DNA, 406 bp, Glycine max
  Clone ID: jC-gmfl02220132ab03a1
gccataatagccacaaagagagagagaaagaaggcatgagaaaatgaatgaatgatctccatcatcattcccttccccatgtgatgtgccactcctctctctagggttttcaatcccccaatttcaatcgcagcccaacccaaagcttttccacctttcccattcattcgcacaattcccttcgcccttttccttttcggccaaaagggtctccggcgcttcgcctctctttgaccgttccgggctcgcctccccaggcctcttgagagagagagaaaactgcttttctagagagagaaagtcaccatgggaatgtagagtggagcttcttcccttgttgctgctgctgttggtgctggcgaccgagcaatgttggaaatggagaaggattttgattccaagctga

SEQ ID NO: 11580 - DNA, 334 bp, Glycine max
  Clone ID: jC-gmfl02220132ab03d1
acatagaattgccagattacacctatgttatttacagatagccaagggccaaattatccatttgaaatttcaagatggtttcactgtttaaccacgggctgaagaaaccattaaaggttgggcaatttcaatgattcatacattatgacaactagaatgatatcatcttccaactcataatatttaatatataattaaaaaaccattttttttcttacaaagtattgggtccatcctcagacatagctacaattagaacttccacattttatcgtcctttcaaagcttgaaagaggatggaaaacctcttcccaaattaaacctgggttgggga

SEQ ID NO: 11581 - DNA, 575 bp, Glycine max
  unsure (1)..(575): unsure at all n locations
  Clone ID: jC-gmfl02220132ab04a1
agctgatcaagataagatcatttctgcaattaaagaagcaggaaatgttaagaagttctatccatctgagtttggaaatgatgtggaccggactcatgcagttgaaccagccaagtctgcatttgcaacaaaggccaaagttcgccgagctattgaggctgaaggaattcccttcacttatgtgtcaagcaacttctttgctggttacttcctgcccaacttgtcacagcctggagccacagctgcccccagagacagagttattatcctaggagatggaaaccccaaagctgtttttaacaaggaagaggatattggaacttatacaatcaattctgtggatgatccaagaaccttgaacaaaattctctacattagaccaccagcttaataccttgtcgtttaatggagcttgttactctctgggagggaaagattggtaaaactcttgaaagaatctatgttccagaagaacaactcctgaagcanattgaagagtccgcaccacccgtgaatgtgatcctgtcaattaaccactcctcttatgtaaaaggggatcatactaactttgaaat

SEQ ID NO: 11582 - DNA, 561 bp, Glycine max
  Clone ID: jC-gmfl02220132ab04d1
gcatgtaataaaggtatcatagcatatagcatagcataggtatttcatacattgttcttttgaggagcacatgcagcaattcagtcttactacatgattctctttatttagaaaacaaagttttaccaattaaaccaacttaatcagctaggctttgcaccttagacaaactgattaaggtactcatccacagtgatgtatttcacatcaggatatagagctgaagcttccactccaaaagaagactcaatttcaaagttagtatgatccccctttacataagaagagtggttaattgacaggatcacattcacgggtggtgcggactcttcaatttgcttcaggagttgttcttctggaacatagattctttcaagagttttaccaatctttccctcccagagagtaacaagctcattaaacgacaaggtattagctggtggtctaatgtagagaattttgttcaaggttcttggatcatccacagaattgatcgataagttccaatatcctcttccttgtaaaaacagctttggggtttccatctcctaggataataac

SEQ ID NO: 11583 - DNA, 558 bp, Glycine max
  unsure (1)..(558): unsure at all n locations
  Clone ID: jC-gmfl02220132ab05a1
aaagaaaactagtaatatggcttcaagaactatatgttttaccattcaagtgactcttgtagtagcttttctaacaacaaaggttgttttatctgatgacactgtgccaattcccgcgaacaaagcacaattaggtgaatggtataatactaatgtggggcctttagatcaaagaaagagcaccgtggacccagcattggtgactgctgaagaaggcgctaaggttgtaaaggtgatgcaagatggcagtggggaattcaagaccatcactgatgccattaaaagtatacctagtgggaacactaagcgtgtaattatttacattggagctggaaattataatgagaaaatcaaaattgagaagacaaagccttttgtcaccttgtatggngtaccagagaaaatgccaaacttgacttttgggggcactgcacaacaatatggcactggtgatagtgctacattgattgttgaatcagattattttgtggcagctaacatcatgatctcgaacactgcaccgagacctgatccaaatacgccaggaggtcaagcagt

SEQ ID NO: 11584 - DNA, 613 bp, Glycine max
  Clone ID: jC-gmfl02220132ab05d1
ccacaatacaaatcatctatttcatataaaattaaataaattaaaatacatttcccattttcatgaatttatagggacatatattgactacattatgtccttttaaaagcttgaagctagaacaataataaatttccaaaatatttttaacaaaggtgttatcatagtgcacatgaacaccaaaactcacttaatcaaaatttacaaggatctcacttaattttaaaatgccaagactaaagcaaataaattacaagacaccaaaactcaacaactcgagcaatctagtattgaattggaataccattttctaattcaccatccactaaaacatggggtgcattattcctcaagccagacaaaaatgtggtaattaattaaaccttgggagttggaggaggaagtagccatttggagccttcaatcatcgcaagtgttatgtaaggtttaacctccgtttcacttagttgcttagttatagtagcacgccctttggggtctgcaccaggtcccgagttctgatactctccaaaacgaacagttttgtcatgttcagggtgactggtgttactccaccctaatttatttacaatgtcactcatgctgctgtatg

SEQ ID NO: 11585 - DNA, 479 bp, Glycine max
  unsure (1)..(479): unsure at all n locations
  Clone ID: jC-gmfl02220132ab06a1
ggaagatgtaacacaaactcacgacttccaatagaagaacagtttcttctagagaggacatgggacctttatgagcgaaaggaattggttggactggtggatatgtcactaaatggggaattcgatgctgagcaggcttgtaagtttctgaagattggccttctttgcactcaagaatccccaaagcaccggccatccatgtcttctgtggtcaagatgctcactggaaaaatggatgttgatgacagtaagataacaaaacctgccttaatttctgatttactggacctcacagttagagggaacgaagaaagtagtattgatatgaagaattcatctatgtatacaacctttntcttcagacatccatgatactacctcgtcatttgccacaactacatccttacagcataatatgatgaaagcgtgtaaacatcgatcgatagagatttgtcctttaatcaaaaaaatgttttgat

SEQ ID NO: 11586 - DNA, 533 bp, Glycine max
  Clone ID: jC-gmfl02220132ab06d1
ggaaatgaaaagattttcaaatttatcatcgaacacaagcccggtttatatttacaggacagcacatagcaacttcctagtcatggaggactacatccaggaaacaaaaccactctcaaaaagtatgaaaaaggttggatttttacattagatacatgcctaacaaaataaaaacatttttttgattaaggacaaatctctatcgatcgatgtttacacgctttcatcatattatgctgtgaaggttgtagttgtggcaaatgacgaggcagtatcatggttgtctgaagaaaaggttgtatacatagatgaattcttcatatcaatactactttcttcgttccctctaactttgaggtccagtaaatcagaaattaaggcaggttttgttatcttactggcatcaacatccatttttccagtgagcatcttgaccacagaagacatggatggcctgtgctttgtggattcttgagtgcaaagaaggccaatccttagaaacttacaagcctgcttagcatcgaattccccca

SEQ ID NO: 11587 - DNA, 426 bp, Glycine max
  Clone ID: jC-gmfl02220132ab07a1
cagatacaagagtttgtttgtactcgctttttggctgagtttcccgtttttgacaaggttgatgtgaatggtgacaaggctgctccactgtacaaatatctaaaatcaagcaaaggtggactccttggggatggcatcaaatggaacgtctccaagttccttgatgataaagaggggaatgatgctgatcgctatgcacccacaacttcttctctgagcattgataaagacttgctgacattgctggatgcatgacattatgaatgtttggagttgccaataaataaactatgactaagaaatgctctgctgatgctgctgcaatttcctgtgtgccttatatgtaccgaaacaggtgctcttgtatctctgacattagattcataaccatgagactgtgtacttattattgtgtgaatgtaaagt

SEQ ID NO: 11588 - DNA, 438 bp, Glycine max
  Clone ID: jC-gmfl02220132ab07d1
aaaggaagcttaattttacattcacacaataataagttcacaatctcatgggtatgaatctaatgtcaaagctacaagagcaactgtttcggtacatataaggcacacaggaaattgcagcagcatctgcagtacatttcttattcatagtttatttattggcaactccatacattcataacttcatgcatccaacaacttcagcaagtccttctcaatgctcagaggagaagttgtgggtgcatagcgatcaacaacattcccctctttatcaacaaggaacttggcgaagttccatttgatgccatccccaaggagtccacctttgcttgattttagatatttgtacagtggagcagccttgtcaccattcacatgaaccttgtcaaaaacgggaaactcagccttgaagcgagtacaaacaaactcttgtatctg

SEQ ID NO: 11589 - DNA, 374 bp, Glycine max
  Clone ID: jC-gmfl02220132ab08a1
gggtcaaccgtgacgccacaatcgctcttgcgcgtttcaatcgccttcgacttctttgcaacgggatcaggtgctcgtccttcacgatggcgggaactgaagcaaaaaaaactgaatccaaaaaacctgccgctaagcaatccggtgggtaagaagaaggaggtgaagaaggagactggcttatgtctcacgcatcggaaggcggagaacttctgagagtggtattccgaggttgttgttaatgccgaaatgattgaatactatgatatttccggatgctatattctgaggccttggtcaatggcaatatgggagatcatgcaagagtttttcgatccagagagattatataacctgttggagatcatctaaaa

SEQ ID NO: 11590 - DNA, 340 bp, Glycine max
  Clone ID: jC-gmfl02220132ab08d1
ctggatcgaaaaactcttgcatgatctcccatattgccattgaccaaggcctcagaatatagcaaccggaaatatcatagtattcaatcatttcggcattaacaacaacctcggaatacccactctccgaagttctccgccttccgatgcgtgagacctaagccagtctccttcttcacctccttcttcttcccaccggattgcttagcggcaggttttttggattcagttttttttgcttcagttcccgccatcgtgaaggacgagcacctgatcccgttgcaaagaagtcgaaggcgattgaaacgcgcaagagcgattgtggcgtcacggttgaccc

SEQ ID NO: 11591 - DNA, 449 bp, Glycine max
  Clone ID: jC-gmfl02220132ab09a1
atcatggtggccgtaacccgcctcgcgaagcgcgcgtcaaccttctcaccccagatgaggaggtgcctgagctcctccgaagtcaaatcccacgcgccgtcgcacgacgccgcgtccttccgcccgtttccgcggcgcgaagatctgagcatgcggtgcgtgcagtgggcgttcctcggctgccccggcgtcggaaaaggaacgtacgctagtcgcctgtccaacctcctcggcgtccctcacatcgccaccggcgatctcgttcgcgacgaactcgcctcctctgaccccctttcttcccaggttctcttcttcttcctcttcactttgaattaactagattaatttttgtaacgcaaatttggtcaaggttattgaaatttctgcgtacggcgcagcgcttagacagaaaaatgggatgataattattattttaaaaaatattaaaa

SEQ ID NO: 11592 - DNA, 515 bp, Glycine max
  Clone ID: jC-gmfl02220132ab09d1
attcaaataacatgaaacatcatattaaataatttttttcctggaagttactccagtaaaaaagccttccctaaatcacgagcatgtgatgatgtgttgatgtaatagaattaggttatttcacatttaatttacaacaatagtgatgatgcaccaatcctatcgacgttgattcctgaccaactatctttctagcaatactgggatatattattcactcttcacaataacattatatgctaggaaacccttcccatataaccaaattatacgaaaacaaaacgcaacactaccagtcttatcagattacaacacttacaaatatcatcattggtccaaaataatactagcagagaagttcccttgctttggttctctgtcctgcaaaattgccaagcatgcaatataagcacgcaaagaatgaaatacttactgttatgatacattattatatctttatgctgcagcagatcgtttgtcctcgtaatcatcaagattaagagcatgtagcaact

SEQ ID NO: 11593 - DNA, 547 bp, Glycine max
  Clone ID: jC-gmfl02220132ab10a1
catcatatagaaaccctaatttgttacacctacaccttcttctctcattttctcatcatcaccaatcaacaacaacatggctaatttgcaaggagggcctgactttgacaaaatcttccacttcctctccatttgcatccttgctttcatcaatgaaggctcttcctccctctcaagtgcattcatgaacgagccatggtcatggggcataagcattcccattagtttgtacgtgaaatttgcacttgagatccacactcaccttggaatctgtgttggggttggagtaccctctttggtctattggggtgccacacgtggtgccattgattggtactgggaagcagcattgaagttcaaccatgagatcttcaaaacatgccttttcaatgttgttattgggttgctacacttgttggtgtcaaagcttgctcattacatcattgagtgggtgaaggatcacaagccgatgaacacaagggtttgttgtctcattgctagtgcttgcacacctggacttggaagcactctctaaacaccctttact

SEQ ID NO: 11594 - DNA, 598 bp, Glycine max
  unsure (1)..(598): unsure at all n locations
  Clone ID: jC-gmfl02220132ab10d1
gagtaaataatttatgaccattttggtgttatcaaagaaacacactcatttcttaaactacaaccaactctacatttaaatgtagctcaagtaaaataagaaattatagaacaaattgagacagtcctcatacatgaaaacattgacaggattaacaatccatgcacatacttaacctttattccctaactcatgtctacctctagacaacatcaaggaatgttttcaacatttagtactcatatagcactaacatgacaagacacatatatatatatatacaaaagatagatcatcactcattagtcattacaattgactgcttaagactatcatccaattccaccttcacctcattgagtcacccattgacaccactactcatccctcaacattctgatgagcagattaatgcttgatcatccttggtctccacactttgaattggagaacaattatcctcttccgccaccttcatgcatggcttctcttcaagtggttcctgttgtgttcctcccagttccctgaccaaagactngatccacacaaacatggaacttcccagctaacccaagaaatagccttaccaacctataac

SEQ ID NO: 11595 - DNA, 427 bp, Glycine max
  Clone ID: jC-gmfl02220132ab11a1
ggatctctgcattggaaatttgtttcaatttatatgttctaaacacggcttatgaaacctggcatgggagttgttactgtttctaccttagctgctaggacgccattaagattgaatacaaggttgaccagtcatcagcaggtgcataaaagacctctaattgtagcttttaaaggaaataaattgaataaagccgctttggttttacctcaggagcaaattcctctacccatagaaacagcagagaaagaccaaaaaagggtaggaaagactagtgagtctctgaagagagtgagagctgtctctattgttgaaacctctccatgcaccttggatatggactacaatgaagctgcagccaaacttgaaaatatatataaactcagtcctgtatctgatacctgtaatatggaaagatattgatagt

SEQ ID NO: 11596 - DNA, 575 bp, Glycine max
  Clone ID: jC-gmfl02220132ab11d1
acacgtaacatgtattgggttgttatttcttatgagcaataactccttcatatacaaattacatgacaaacgattatgattttggatgcttaaataatccttatataaattatcaagggcatggctataggtaacgtacgtgggactatcatgacagcaatggaactatatatatttgttaatttatacaacataacgacgaagataatccaaccgtgctggatgcttaagcttcatgagagccttgacttcatgcttccgaaccatttccctagaaatattcaagttcccagcgatttctcccaatgtcctgtcacccttgccatcaagtccatatctctgtctgatcactaggctctcctttggcttcaaggaatcaagcacatcatcaagagcaagtcttagaacagcaagttgcctcctattatcaccattaacaccatcaacatcagtaatcccattaatatactccttttgtgtggatatatgtcttgaatgaagggataaaatgggttttgatgccttcattacttcataatatctatcaggtgagatcccaatctttctactaactc

SEQ ID NO: 11597 - DNA, 457 bp, Glycine max
  Clone ID: jC-gmfl02220132ab12a1
gtaaattaactatgaagcctaccctactattatccctttccttcctgcctctctttgctttcctggctctttcagaagatgttgaacaagttgtggacataagtggcaaccccattttcccaggtggcacatattacattatgccatcaacttgtggcgctgccggtggtggattgaaactacgccggacaggaaactcaaactgcccagttactgctttgcaagattactcaaaaatcttccgtggcacaccagtcaaattcagcatacctgggataagccctggaatcatctttacaggtactccacttgaaatcgagttcgcagagaaaccttattgtgctgaatcctccaaatgggtggcgcttgtggacaatgaaatccaaaggcatgtgtgggtataggtggtcctgaaagtcatcctggtcacatacatttagtggcacatttagcattc

SEQ ID NO: 11598 - DNA, 494 bp, Glycine max
  Clone ID: jC-gmfl02220132ac01a1
gcgattcattcgtcctacaggattgcggttcactaaagctcatgtcactcacccagaacttaaatgcacattcaatctagaattaattggagtgaagaaaaaccccaatggccctatgtacacctctcttggtgtcattaccaggggaactataattgaggtgaatgtcagtgaacttggtcttgtcacacctgctgggaaagttgtgtggggtaaatacgctcaggtcacaaataacccagaaaatgatggttgtataaatgctgctctgcttgtttaaggtcatagcaaccatcagggttccagcttgatttcaaaggcagaggtcaagtccctctcctatgatttttgtggtcttgaaccccaatcttcaagggagaatcttacaaactttgttggtaccagagagaagattgtctgagaaaatagtgaagcatttttgctttcttgtttggatagtcaatgcaattatctgatctagcacttaacattta

SEQ ID NO: 11599 - DNA, 379 bp, Glycine max
  Clone ID: jC-gmfl02220132ac01d1
aattccaattgtacatcatgttatttagataatagatttgggcgggcatattacccgaaccataaaaaaatacagctactcaaaatgctggggcttgtaaataaattacataaagttatgagacttgcatgcctcacctcgggctgcacaataattatcttaaatgttaagcgctagatcagataattgcatggactatccaaacaagagaacacatatgcttcactattttgtcagacaatcttatttctggtaccgacaatgtacgcgagactttccaatggaaaactgaggtagaggaccacaaaactcattggagagggactcgaccaccgcctttgaaataagctggaaccttgatggtcgtatgaccttaaac

SEQ ID NO: 11600 - DNA, 484 bp, Glycine max
  unsure (1)..(484): unsure at all n locations
  Clone ID: jC-gmfl02220132ac02a1
ataacacaaggcagaaagcaagctcatcctagagttttaaaaatggcagcagcctcctccatggctctctcttccccatccttggctggcaaggccgtgaagctgggcccatcagcccccgaagtcgggagggtcagcatgaggaagaccgtcaccaagcaggcctcctccggaagcccatggtacggcccagaccgcgtcaagtacttgggcccattctctggcgagcccccgtcctacctcactggcgagttcccaggtgactacggctgggacactgctgggctttcggccgacccagaaaccttcgccagaaaccgtgagctcgaagtgatccactccaggtgggccatgctcggggccttgggctgcgtcttccccgaactgttgtcccgcaacggggtcaagtttggagaagctgtggggntcaagggcggtcccagatcttcagcgaggtggggctgactacctgggcaacccaagc

SEQ ID NO: 11601 - DNA, 342 bp, Glycine max
  Clone ID: jC-gmfl02220132ac02d1
tttacctattttctgtatttttttttttgtttgtttttttatttttttattttttatggggggtggaaaaaagcaggtaacacataattggatggggaggcacatgatacgtctgtttttctgaaacaccttggtgtaaattatatttttcgcaaaccgaacttcaaatactttaaagagccaccaagactcctttcttttgatgcccaattcccggggaccaaacttgtggcttatgaccacacattgtggctgaatgggcccgcaaggggaagggcatggtttctccaatgggcccttgccggcgtcaatggggcgtacaaagaccccatacacagggaa

SEQ ID NO: 11602 - DNA, 354 bp, Glycine max
  Clone ID: jC-gmfl02220132ac03a1
ttggaggattgttccttctctcgagacgatccggagggatgggaggtcctggtgggcccggatttcctcttgcttttggtcaatccaaagccaagtttcaaatggaaccgaacaccggagtgacatttgatgatgttgctggggtggatgaagccaagcaggactttatggaggttgtggagtttctaaagaagcctgagaggttcactgctgttggggctcgcataccgaaaggagttcttcttgttggtcctccaggaactgggaagacactgttagccaaggctattgctggtgaagctggtgttccatttttctcaatatcaagttctgaagtttgtgagatgtttgttg

SEQ ID NO: 11603 - DNA, 316 bp, Glycine max
  Clone ID: jC-gmfl02220132ac03d1
acccctaaaatttttttaaaaaaaccccccggggggaattgggaaaccccccaaaaagggaaaaggggggggaaaacccttaatccttcccaaaaaggggcccaggctgaaaggggccctctgtattttaaaaaaaccccttttaaagggggcccaaaaggggtataaaaaaaggggggggcccggggggcaaaggggggccccgggtttaaacgggaatttcaccaaacccaaaaaaaaatgccgggaattcaatccggggcaggggcccctttccaaaaggggcctggaaaatttgggaaaccccccccggggg

SEQ ID NO: 11604 - DNA, 561 bp, Glycine max
  Clone ID: jC-gmfl02220132ac04a1
ggattttgcgtgttacaagccagagccagagtgcacttgcacgagggagattttcatgaacaggtctgtggaaactggtgtgttttcagaggagaacttggcctttcagaagaagatacttgagaggtctggtttggggcaaaagacttacttgcccccagcaatattgagtgtcccttcaaacccttgtatggctgaagcaaggaaagaagctgagcaagtgatgtttggagccattgaccagcttctggagaaaactggggtcaaggctaaggatattgggattttggtagtgaattgcagcttgttcaatcccacaccttctctctctgcaatgattgtgaaccactacaagctaagagggaatatccaaagttataatcttggtggcatgggttgcagtgctggactaatctctatagaccttgccaaacagctcctccaggttcatccaaactcttatgccttagtggtgagcatggagaacatcactctcaactggtattttggcaacaacagatcaatgctagtctcaaattgtctattcagaatgggtggagc

SEQ ID NO: 11605 - DNA, 329 bp, Glycine max
  Clone ID: jC-gmfl02220132ac04d1
atgaaaaatcgtgtaataaatgttctcattggacaataattggatgcacactcttacaacttgaacacactagcagaagatcaaatcagctgggagtaatcttcctcttctaaattttgcacaccttcctaagattaaccatgaaaaccttaatttaaattcctaatgcaagaggttttaacttaggaaccaatggttgccactttgggcacatgaacaggaaactcgtgaatctcatccatccaaggatttttctcctttgctggattaatggtcctcaatgcacgccacacagcactggtggacttggacccttgacccaatggcat

SEQ ID NO: 11606 - DNA, 509 bp, Glycine max
  unsure (1)..(509): unsure at all n locations
  Clone ID: jC-gmfl02220132ac05a1
agaaaatggcaagaatatcaaattggtctcttgtcttcctcctcatctctacactactgcacatagagcccagcctctcaagcccaagcccaagcccaagcccaagcccgttcataaaatcctcctgcagcagcacccagtacccagccctctgcgtctcatccctctccgtctacgcctccagcatccaacaggaccctcaccaactggttcagacagcactctccctctccctgaaccgcacccaagccaccaaaaccttcgtggctaactgcaacaaattcagaggcctgaaacccagagagcacgctgcactcaaggactgcgccgaggaaatcagcgacagcgttgaccgcctcagccggtcgctgaaggagctcaagctatgtaaggttacagggtgaggacttcacgtggcacattagcaacgtggagacatgggtcagttctgctttgaccgatgagagcactngcggcgatggattctncgggaggcgctngatgggaag

SEQ ID NO: 11607 - DNA, 590 bp, Glycine max
  Clone ID: jC-gmfl02220132ac05d1
agaaaaacacaacgttttatttcacatttaagaagcatgagaagatccatgtatctataaagactcacatatataataattacatagagcacataaaagaagaaaagtaaagcattaagcaaccaagatcattggtccccaactagtgttgtgcagcatagtggttaataagcgagagagcattgctagtaacctgagcaacattgagcatcctagccctaatagagtccttgatcttcccattcagcgccttcccggagaatccatcgccgcaagtgctctcatcggtcaaagcagaactgacccatgtctccacgttgctaatgtgccacgtgaagtcctcacccttaaccttacatagcttgagctccttcagcgaccggctgaagcggtcaacgctgtcgctgatttcctcggcgcagtccttgagtgcagcgtgctctctgggtttcaggcctctgaatttgttgcagttagccacgaaggttttggtggcttgggtgcggttcagggagagggagagtgctgtctgaaccagatggtgaggctcctgttggatgctggaggcgtagacggagagggatgagacg

SEQ ID NO: 11608 - DNA, 493 bp, Glycine max
  Clone ID: jC-gmfl02220132ac06a1
ccttcctctccttcttttctcttctttcttcttcttccatctctttttttctgcttaaggtctacaaaagttctcttcttcttctcctcctattgaactttggtcatcacacgagaaaacccacgtctggatcttctggtgtaaaggcccattagaagcctcttagaaattttcaaattgagttggtgtatagtgttgaagggggtgaaatttggagcccagtttgttacttcatttgaaaggtcatagtttgaaccctctttttctggagatttacctgggaaaagatgatgatgtttgaagatatgggattctgtggcgatttggatatgttatgtggttctcttggggatggggatattgctgtgagacaaactgaaccggatcctgtagttgaggatgactacagtgatgaagaaattgatgtggattttcctctgctgtagctaatggatccatggtgatcaacgattgcagtgagtatgatgttgat

SEQ ID NO: 11609 - DNA, 496 bp, Glycine max
  Clone ID: jC-gmfl02220132ac06d1
tttctttttttttttttttttttttttttttctttttttttttttttatttttttttttttttcaggggttcctttttttttacattcatttctttaatactcgctttccacctcttacacattaccagtaccttaacaaaaaccaaacaatattttgctttcccaaaaaccgcaccctgggccaaaaactaaaccaaacccttgaccacaacagaaaccccccctgttgcggattttctgccccaaccccccctgtacccaccccgggcaaaaaaaggggcccccttccatccggcaacgccaaaatcaaacaaccaaagggcccccccttcacctacggaaaaaagaaagaaacaacctgcaccttcaagggcccccttggaacaatgcccacttgacgccccaaaaagcacccagaaaaacctataccgcgcctgcaacgacaaacccctgtaaaaaaccaaaacccccctcttgactcaaaaaaaaccccca

SEQ ID NO: 11610 - DNA, 511 bp, Glycine max
  Clone ID: jC-gmfl02220132ac07a1
cacaagcataccataacctctgcttaaccacgaagaaaccgagacaacaaaacacacttttttgtgtttttttttcctccgtttctgccctgttctatccacgctgttcttcaccctttcaaccaaaacatgatccaccccattatatgttatcgtattccaaccctcaaatcctacatagagatcaacttttttcgaccctttatcaactgggtcaatcacaacaccgacagggtgtcacaccattagaagtgaaacatcttcagctctaatggcgacgtgccctgctaattccttcaacttcaacaccaccctctgagcgtgcacacccggtcacgtgctccagcacgtgaggaacacgtgcgtgctctacaaggggaattgaacaatgctgaccgacaccggcgtagactactacgcgctgagctttcccgagacgctctacacgttcgacagaatcaagaagatcacgccctcgcaggcggtgttcctggaagccacactcgatatg

SEQ ID NO: 11611 - DNA, 588 bp, Glycine max
  Clone ID: jC-gmfl02220132ac07d1
acgttctgaaggactattcattcacaacaataatgcctgtaagaacaagtggggtgctactctactgctactctactgtgcacaaaacaaatcaatagctgtacaaggttatgtgaaatgaatattgacaccggaaattaacatgaaagaaccaaaatcccttttatcaacaaatggtgatcacaatgctaagaagcttaaaatgttggaaggaatttctggccaggagaagtagaggtccatgcaccacattcttgcatttgcgttttgcaaagttttacaatctttagttccctttggtcagttttcattttcaatcaagaatcaacttccattgtagaacatccatgcttgctgtaaaaatcatggaacaaatctgaccagtgcacaccgataaagactcttgtttgaaaagatacctaagtttccttgcttactgaagaagtgtgcccagttgaggaagacttgagcagagattgtgcagctaataatttgttccttagcatgacattatactcgtacaaattgtttagattcttctgaatatcggacaagtccattttaaagccacctttaatttctagtgaa

SEQ ID NO: 11612 - DNA, 106 bp, Glycine max
  Clone ID: jC-gmfl02220132ac08a1
cgccagcataagatgacggcctcacagggtcgcaaagctgttttcagagccgcgcggtcccttgtgttcgattccaaagcctcccatggacgagcaagatggggct

SEQ ID NO: 11613 - DNA, 489 bp, Glycine max
  Clone ID: jC-gmfl02220132ac08d1
attataggatgaacacatcatcctcaagtgctttcaaaaggccaattaacccatttggaagtattggaatgataaatgtcacacatggtcttcacccggctaatatactctcaaaattattgcatttcctacaggaactattcttcattagcgcttatttgaggcttccacagttcattagtattgccgttgacatataattgacctcaaaaactcactgagcagttgctatagaaaacccaaggcctgagggacagaatcaactgacaccataaacccactttcctgcattgctggcgaaactaaccaactcctctggcttaaaccacaagtcaatctcatcctcggcagtctcaggaccgttactcccatgaatgatatgactttcgacaacaacggcaagaacacccctaagggttctaggctctgaattctgaggatctgaggctccaattagcttttgggccattggaaataactccttgacct

SEQ ID NO: 11614 - DNA, 456 bp, Glycine max
  Clone ID: jC-gmfl02220132ac09a1
aaatcttatcttagcaatagctacccctatcacaacaatactctattaggcaaaaacaccaaatgggagaggaaaaagagcagcctaagaatgaaaccgagaagaagcccgaggaggccgccgcagcccccaagaaagacgacggaccccatccctgtcgtttacaaactcgacttgcattgcgagggatgcgtcaagaagatcaaacgcacatgtcgccacttccaaggtgtggaaaccgttaaggcagatctatcgtcgaacaaagtgactgttaccggcaaattggatgccgagaagctgcgagataagatcgccgagagaaccaagaagaaggttgacatcatctcagctccgcccaaaaaagaagccgccgccacggaaaatccaccggagaagaaaggttgaagagaagaaaccttgagagaaaaaaccagaagaaaaacctaagagaga

SEQ ID NO: 11615 - DNA, 529 bp, Glycine max
  unsure (1)..(529): unsure at all n locations
  Clone ID: jC-gmfl02220132ac09d1
gaaacaatagtaaccatttattctgatattaaaaaaataaacaaaacaaataacaactcatgtgatgtgagttctggacaggattctccagccagccggccatcctctatctctattctctaaaacattattataatatcaaaattctaccatatcataaaatttctctatattaattttcaataacacggaatattgatatattatccacccctcattttttacacgcaggtcgatttttttttccagtttttttatttacaaattacaacgtgcgtgcatattccgtatcccgtattccgtccgtgtgtaagagtacaccgaaaacgaaaattaatcactgattatcacatgatggaacaagcattggggttctcatcgctgaacatctgtggcggaggtgcgtgcgggtgcatgtagtacggtagaggtggctgcagaggataaccctggttcacgtaccctggctccacgtaatgattattagcactagcaccatatcctgngtgaacctccatagcgtaatttg

SEQ ID NO: 11616 - DNA, 410 bp, Glycine max
  Clone ID: jC-gmfl02220132ac10a1
ggcgcacgcaacgtgccttttcccatacgaaggacaccatcacgccgttttctagtgcccggggttttggatccattgaaactgataccgtatccttctgccattagtttagccgagaatgaatcccaagacagccgtagcttgagctctaccgcgcgtcacggtcgttgtcttcatcggtgagagccggtaccgatcgccgggctacgccgagctctgagacgggggcagaaactgtacaacctggcacgccgccggccagaactcgacggagttcgagtgcaacagaatgctgaagcgcgccggtcgacaggagacccttgccgacaagatctaccggtttcactggacactgctcgtagaagggatcccgctacttctcagcagattcgaactctacgttatgccgt

SEQ ID NO: 11617 - DNA, 553 bp, Glycine max
  Clone ID: jC-gmfl02220132ac10d1
gtaaagattaactattatcacgaacgaaaccattaatagaaacaaaaatgaaatggtgttagtatcaccattttgttcgtctctgaagacaacatatatagaacatatatagatgcccttaatgaatcgaatgaatctttcaaaatcgcaaattagatgtttgtgaattaattacatatgaaaaataatgaagctataatctcccattatttctgaatcacagacccatatccaatctcagttcagcctgaaagttaatctctgatcatcatgaatgacagtatttcaccacaaaatcccggtgatgaaactcatgtgcccctagatttcagacaaatctaagcgatagtcccagtaattttacgcagatgacacagcttcaatggcgctgcctaggggccatgctgcctcaaccagggcatcgtcgtatttaactttcttcaccaatgtaatctcttgccatggatatataccaaacccatcaacgagtagtgtatactggtatataagatccatgcaaagatagggaaggttccccttatcaacacgagga

SEQ ID NO: 11618 - DNA, 489 bp, Glycine max
  Clone ID: jC-gmfl02220132ac11a1
atgctttgaagtctcccacaggagatgaagcatacaatgaaaatggtttagtgcctcgaacaatacgtttgctcaaggataagtacccagaccttgttatctatacagatgttgcattagatccttattcatcagatgggcatgatggcatagttagagaagatggagttattatgaatgatgagacagttcatcagctatgtaaacaagctgtagcccaggcccaagctggagcagatgttgtcagtcctagtgatatgatggatggtcgggtaggagcactgcgtgcagctctggatgctgaaggctttcagcatgtttctataatgtcctatacagcaaagtatgcaagttctttttatggtccatttagagaggcactagactcaaacccccggtttggagacaagaaaacttatcagatgaacccagctaattacagagaggctctgactgagatgcgggaggatgaatctgaggagctgacat

SEQ ID NO: 11619 - DNA, 570 bp, Glycine max
  Clone ID: jC-gmfl02220132ac11d1
cagcaccaacagagttacagtacgaaatattctgcaggtgagtgcacactttcattcatacaatgggttgacaatccacacgtaaagttacaattaacaccaaaaacaacggccaagtctttttctattatgtccttaaatatattaaatcaaacgaggccataatattttattatgaatgtctctctatacacaaacctccatgtccctcttaaacaatttacaataaccaaaatccagcagatactggtattataaactcttcaaccttctacatgaacaacgccctacataatcagagaacttcacctcttctctccacacaaacatctggcagcttgcagagcagaatatgtgaggatgatatcagcaccggcccttcggaggcacatcagtgactccatcataaccttttcttcgtctatcattttgagagcaccggcagcctttatcattgcatattcaccagaaacctggtatgctgcaattggcaaaggagaattatccctgagcagccttatgatatccaagtaaggaagaccaggcttcaccaagagaatgtcagctcct

SEQ ID NO: 11620 - DNA, 486 bp, Glycine max
  Clone ID: jC-gmfl02220132ac12a1
atgctttgaagtctcccacaggagatgaagcatacaatgaaaatggtttagtgcctcgaacaatacgtttgctcaaggataagtacccagaccttgttatctatacagatgttgcattagatccttattcatcagatgggcatgatggcatagttagagaagatggagttattatgaatgatgagacagttcatcagctatgtaaacaagctgtagcccaggcccaagctggagcagatgttgtcagtcctagtgatatgatggatggtcgggtaggagcactgcgtgcagctctggatgctgaaggctttcagcatgtttctataatgtcctatacagcatagtatgcaagttctttttatggtccatttagagaggcactagactcaaacccccggtttggagacaagaaaacttatcagatgaacccagctaattacagagaggctctgactgagatgcgggaggatgaatcttgaggagctg

SEQ ID NO: 11621 - DNA, 520 bp, Glycine max
  Clone ID: jC-gmfl02220132ad01a1
gttcaattatagcttctcatggaagccctccgcttcacgcaaaaatgtagtcaagaagaacagcttcatatcaagacagacatcgaatgaaggacaaagtttccttccaaaagaagaggaaatgaaatgggtgttccagaaatttgacaccaacaaagatggcaaggtttctcttgaagagtacaaggctgctgcaagggccttggatagggccattggggaagctgaagcagtgaaagcgtttagggtcatggacactgatgaagacggcttcattgacttcaaagagttcatgaagatgttcaatgaagagggtaggataaaagaaactgagatcaagaatgcttttcaagtgtttgattcgaacggcgatgggaagattagtgctgaggagttgtcccaagttctcaaaaggttaggagagagttgcagccttagtgcctgtaaaaaaatggtcaaaggagtggatgggaatggagatggttttattgacttgaatgagtttacgaggatgatgatg

SEQ ID NO: 11622 - DNA, 441 bp, Glycine max
  Clone ID: jC-gmfl02220132ad01d1
ggagctgacgtgaagcactagcacgggtattgcttgcgtgcgcgagctgctaactaggctggggacgccctttctcctctttctttcgtctcccttactcatcttggaatactacactttccacccagagcttttatatcaacatatcgttctcgtagctctgctcaaccagtcatccacttcagcgacgcacgactaagcacactacatatcgacaattgcatgcgacacttaaatcgccgatgcgtacatttctctagctgtgtcgttttgactgatcaatgaggggtgttcctagacacgagcgccgctgggcgtccgccatcgccttgggaaaagcgaccgtcagcgccggaactttgccgggaactgagtccaactccgtcgcggccgagattgtggccgtgactctacagcgtcaagaggacgacaccatttcta

SEQ ID NO: 11623 - DNA, 416 bp, Glycine max
  Clone ID: jC-gmfl02220132ad02a1
gtcttctgcagaaatttgcgccatcgtcgagagaagcgtgagagacttctcgtttatgatgagagctaagatagtttagttgtcaagtcataaatcagtatcatcactttaaatttcattagaagctgtcaaaatgtcacggaagggtttgatggagcaagacctgagtaagttggatgtaacaaagttgcatccactttctccagaagtcatatctcggcaggctactattaatatcggcactataggtcacgtggcccatggcaagtcaacagttgtgaaagcaatatcaggtgtccagactgtgcgtttcaaaaatgagttggagcgtaacattacaatcaagcttggctatgcaaatgcaaaaatatacaagtgtgaagatgaacgatgtccaaggcctatgtgctacaagg

SEQ ID NO: 11624 - DNA, 304 bp, Glycine max
  Clone ID: jC-gmfl02220132ad02d1
aggcaaagggcgtattgataaaaaaccatatattgaaaccagtgcttggtgaaattctcactcccagcctgaattcaatcccaggcttggatacaacttttattagaggtacacgggggaaacatacccaactctcggtgggaaacaaagtctgatacatgaatgaaaaaacgtttctttctccaccttacaaaaagggctcccaacaattgccagccttcccacatatccaaaactatgtcagtatcttattcctgctggggcttcttggaatcagtggtcaacacatctaggggggcgggag

SEQ ID NO: 11625 - DNA, 455 bp, Glycine max
  unsure (1)..(455): unsure at all n locations
  Clone ID: jC-gmfl02220132ad03a1
catcgtcttcgatgatgaactgttttcagttccagaaaccgtatcatcaccacgcgcagtacgtgaagatggaggagcacaatttcctcagcgcggatgaggcctgcaatttcttctcggatgaacaagcaccgacccttcaatggtactgtccagaacagtggagctgagaaaagaaacatggaaattaaaccgcttttagaaatttttgtttgaaggtagaaaatgaaatactgtgcaaaagaaaaagagagaacagagatcaatggctgcatggcgtggggtcggagatggaaggttgattattactactctcgaccgtgcggcagggggtaatattaataattattcaatccgaaagcaaaccatgctgtaaaaacaaatttccattcaagtatggaataacggngtagtacttnttttataaatgaacagaaccacagcaacggtgtact

SEQ ID NO: 11626 - DNA, 459 bp, Glycine max
  Clone ID: jC-gmfl02220132ad03d1
agtacaccgttgttgttgttttttttatttattaaaaaagtactacaccgttattccatacttgaatggaaatttgtttttacagcatggtttgctttacgattgaataattattaatattaccccctgccgcaccggccagtagtagtattaatcaacctttcatctacgaccccacgccatgcagccattgatctctgttctctctttttcttttgcacagtatttcattttctaccttcaaacaaaaatttctaaaagcggtttaatttccatgtttcttttctcagctccactgttctggacagtaccattgaagggtcggtgcttgttcatccgagaagaaattgcaggcctcatccgcgctgaggaaattgtgctcctccatcttcacgtactgcgcgtggtgatgatacggtttctggaactgaaaacagttcatcatcgaagacgatgctt

SEQ ID NO: 11627 - DNA, 416 bp, Glycine max
  Clone ID: jC-gmfl02220132ad04a1
gcaaaacatgtttatcttctcttttgttcacctgagtgaaggaagacataggcataccttgtcgctattgctgtacatgtcgccattgcaatagtaattgttattgttattgggggtgatcgatgagaaattatatggagcccttactcctacttccttcagcttcatcatccacccctttacctttcttaatctcaaacacactttcttgccatccaaaacccaaactttctaccatactcagttgcaccctacaaaagtcccaagcttggtgcacaaatttgagttgggtcccatcactatcacatcagggaagacctaaattggatgcagcgaggcccataatcacagcagctgtgataagaaggaatgagtttcccttccacaacgtcatccatagggacaagaagctcaaa

SEQ ID NO: 11628 - DNA, 355 bp, Glycine max
  Clone ID: jC-gmfl02220132ad04d1
tttattttttttttttttactacggccaaattttttattccagatactataaattaatatttatgggggcaaatcttgcaataaaatcacatccttacatacaaatataatcacaacctcaaccataggatcaaatccgtccaaaatacaggagatggataccaccatccattgcgtaatgcacctcccccaacaaagctccaacattatcacatatcaagccagatgctgtcttatgtgaacaccaccattgctctcttggacgaccattaggcattacaggaagaaggaccattcactcattctatcctaccattcgatcaatccaatttccttgacacatctccaaaagctc

SEQ ID NO: 11629 - DNA, 412 bp, Glycine max
  Clone ID: jC-gmfl02220132ad05a1
cctactagtacgtgtatactctcacttcttcgtcctacatctcttgtggattgcctgaggtctacaaaagttctcttattcttctactcctattgaactttggtcataacacgagacaacccacgtctggaccttccggtgcaatggccattagaggcccctgtgaaatgtccaaatcgagcagctgtatagtgttgaagggagtgaaatatggaccccagatagctacttgactagataggccataggttgaaccctctttctctgcagatttacctgggaaaagatgctgatgcttgaagatatggcattctgaggcgactcggatatgtaatgtgccactcttggggatggagcatatcgctgtgagacagactgaatcctatcctgtatgtgaagatgactacagtga

SEQ ID NO: 11630 - DNA, 275 bp, Glycine max
  Clone ID: jC-gmfl02220132ad05d1
gacatggaacattttttataatcttatataactaaatactctcggatctattgatatggaatacgaacagaataggcctttaagatcctccaataattaggcactgggagtacactgaattctatggtcctaatagtaaaatataaaatatgaatccccaagtgtgaaagaacaatttcatagcatatacttgggtagatcctccaatcaagcttactccaccccttttcgtagcattcttgcaaacagggacaagatataactgacaaattcta

SEQ ID NO: 11631 - DNA, 498 bp, Glycine max
  unsure (1)..(498): unsure at all n locations
  Clone ID: jC-gmfl02220132ad06a1
cttagctgaaccctcaccttaatcttgcgtgctagctagctttatgccaattcctacagaaccaaattattgtgctagctagctagtacgtgaaataatataaaataatgaaatatggcattcagcgggacccaacagaaatgcagggctggcgacagaactgttcactttgtcgaaggattatctgccgatggagctgcttatcacaagaactgcttcagatgcagacattgcaatggccttcttgcgataagcacttactcatccaccgaaggagttttgtactgcaaggtgcactttgagcagcttttcaaggaaactggaacctaccccaagaaatcccagtcgtctggaaagcctcctctcgagctgaatagagcaccaagcaagctttctgccttcttctctgggactcaagagaaatgttcaaaatgcacgaaaaccgtatatccattggagaagttgaccgtggaaggcgagttntaccacagatcatgc

SEQ ID NO: 11632 - DNA, 520 bp, Glycine max
  Clone ID: jC-gmfl02220132ad06d1
ataattaaggagagttttttagaaaagagattgctattgtaatccatcatggattcagacaatagaatctcctttttctactctgatatctgattcttaatacacagaatgaaatacatctgaaatgactgaaggatgccatgcacttttggcttgagatagtcatgtccatgccccacagaacagagaggcttaaactactgattgctagcaaattatggaacacataatactgtaatagccctttcgtgggaatgatacaaggccacgacccaattaatcaggaacttcaaaatgtcccaaatgaaatggggatttacttgtagccagaaagatcaattgtactcaaagacacaagtgaagacccccgcttgcaaaaattaatgttccatcaatcaatctagagctctagctcagagtgatcatcatcagcttgttcagcttcctttgatgttgatgtcctgtctggctctgactctgagcgaccatcatcggttgcagtagctttctccacagactc

SEQ ID NO: 11633 - DNA, 385 bp, Glycine max
  Clone ID: jC-gmfl02220132ad07a1
cgccaacatacgaagacggtctcacaggtgggcacatctgtttacggagctgcgaggtcacttgtctccgtttccaaagcctcccatggacgtgcgaatggcgctgctaggggtggttcatagagccgaaacatggctccattttacggacagagcggccatgtacatgatcccacttgatcagcatgatcatcatggagttaaggagcgcttgctcttcctggcggagcttacatgttccaagatcaggttgggccctcatctaagctggatcgcacattcatagacattaagcctgatgaaatgcagacaaggctgactcatgagattatatctccccacgtgcgggctgggtacaagcctgtggggattaaaggagggatta

SEQ ID NO: 11634 - DNA, 294 bp, Glycine max
  Clone ID: jC-gmfl02220132ad07d1
ataggattaacagattatcatagggggcttttttaaggcccactagcccatattgacgcatactacttgaaaatgttaatcaagaaatcaaacctgcaccaattatataggcttgatcgcattggcattggaccttatacaaaccaggtcacgtactcaggcacagtagtgaattacaaatgccgatgtcgaacagtagcctccaactcctcacaggactcattttataagctaccatgagcctgaggcacataagcagagtgcatcattgacaggatctcatgcacgggtggc

SEQ ID NO: 11635 - DNA, 542 bp, Glycine max
  Clone ID: jC-gmfl02220132ad08a1
ctcacactttcaaccccatccaatcctcacatgcatgctgtctctgccaaagtgccaagtcacataacatttccattgttaccattctttctttccatcacaaccacttattaagcctctgatcctcactttctctcacacaaaaacacactcaccatggatcatcgcaaaccattgctacccacttgctctgatgctggtccaaatccacacactcgcaaggaccttcttctagttatttgcggcttgctattactctcttcccttgttgcctttggagggtacagggcctccaacgcgccgcatgccgacgtggcatcggcaacatcgaacgatgagcaacgtagtccgacatcggtgccttctccgaaatggtacccggattcgcgaggtgtttcttcccgggtgtcagagaagtcatcaagcatgttggttgcggctaaagatggagcttcgaggcatttccatgggacaacagcatgttgtcctgcagagaactgcttttcatttccaccagagaaaactggatgaacgatcccatg

SEQ ID NO: 11636 - DNA, 425 bp, Glycine max
  Clone ID: jC-gmfl02220132ad08d1
ccatatgtaaatatggttagcctaaaatgggataacattaacatcaaatttctttgaacagattcttttgaaagcatcatttcccatgatatgataaaattcccaccaaaatttttgataaacattactgggcaaaactgaaggaatgcgctttgagcaagaaccataaccttatgtcggttattcaggggaggacattaccactggtaagtccaaattgccaacccaagatgtattccaatcctttgggactatagctcttctatctccaattcaaatttttaactcttctgaccaggggggaatgggcgtttaaatgcaaaattcatttgccaaacttttagggaggctgtcacaggggcctaggtagcattgatgaacaagaacaacctagcagctccatagattgccttcgttggataaac

SEQ ID NO: 11637 - DNA, 137 bp, Glycine max
  Clone ID: jC-gmfl02220132ad09a1
cgcaaacataccattccattctcacaggcgcgcacatccgaatacggcgatgagcagagacgggtaccattgccaaataaccctaaacgacgttcgagatgagctggtagggaaggttcagaacgccacaacatggc

SEQ ID NO: 11638 - DNA, 319 bp, Glycine max
  Clone ID: jC-gmfl02220132ad09d1
aacatagaaggctaggggggattatgaaggcactaaaactcataaggaaggagagaaaagaaaaattaggcggaggagatttccccggagtatggactacaggaatgatgcatcgtggaccagatatgacatggaacaggacatggttgagggcgcagctgctaaccatgattggctgggaggtatattcgacaaggagtactcgttggacatgtacggtagtcgaccctaggccagaagcactgaatccacagccattagatgcacaggcgcgtatagcgctggcgaagctagccaaaagaacaggctgaatcctgag

SEQ ID NO: 11639 - DNA, 512 bp, Glycine max
  Clone ID: jC-gmfl02220132ad10a1
gacgcaggcaacgtgcattttcccatacgaaggacaccatcacgccgttttcgcgtgcccgtcgtttcggatccatcgtcatcgtttttgtcttcttcttccattagtttagttgagaatcaatcccaagacaccgagctggagccttcgcccgtcaccgtcgttgtcttcaacggtcagatccggtaccgatcgccgtcctccgccgagctcttcgacggcagcagcaactctccgccctcgcacgccgccgaccagcactcgccggagttcgagtccagcaaaatgctgaagcgccccggccgccaggagtccctcgccgacaagatctaccggtttcgcgggacactgctcgtcgtcgcgatcccgctcctcctcatcacattcgtcctctacgtcatgccgtccagcacctccaacgagtacgtcggagactacgccctcgttaaccggataatgtcccccgaaaagagatccgtcggctcctacgccgtcatcttcgacgccggcag

SEQ ID NO: 11640 - DNA, 588 bp, Glycine max
  Clone ID: jC-gmfl02220132ad10d1
aaagattaactatgatcacgaacgaaaccattaatagaaacaaaaatgaaatggtgttagtatcaccattttgttcgtctctgaagacaacatatatagaacatatatagatgcccttaatgaatcgaatgaatctttccaaaatcgcaaattagatgtttgtgaattaattacatatgaaaaataatgaagctataatctcccattatttctgaatcacagacccatatccaatctcagttcagcctgaaagttaatctctgatcatcatgaatgacagtatttcaccacaaaatcccggtgatgaaactcatgtgcccctagatttcagacaaatctaagcgatagtcccagtaattttacgcagatgacacagcttcaatggcgctgcctaggggccatgctgcctcaaccagggcatcgtcgtatttaactttcttcaccaatgtaatctcttgccatggatatataccaaacccatcaacgagtagtgtatactggtatataagatccatgcaaagatagggaaagttcccctcatcaacacgaggaatagtggatttggcattctcaagttctgttggcatg

SEQ ID NO: 11641 - DNA, 395 bp, Glycine max
  Clone ID: jC-gmfl02220132ad11a1
gcgtcgagctcgggagcgacggaaatcgtgtggacgtggaaggagttgttgaagaagaaggaggaatcggtcgctaagagtcggagccgcctcgcgttcgcttggacattggtcgcattgagctgcggaacgcacgctttgcatattatgcacgtcttggggattgacattgctcacggaccgctcatggagattcttcataactcatacctgaaaggcggctaagctgtggggcctctattgggaccaggaccagagttactctctgatggcctaaacgcatgcaggaaggggtcgcctgatatgaactctctcgtgggattcggatctgaagctgctctcatcattagttcgatctcgctacttagccccggcctggcatgggaggcatcatt

SEQ ID NO: 11642 - DNA, 489 bp, Glycine max
  Clone ID: jC-gmfl02220132ad11d1
attatctattttttttttttttttctttgtggatttggtttttttttacaccaaaaagaaaatctggtgatgacaacataaatagaacatatatagatgcccctaatgaatccccggaatttttcaaaaggtgaaaaaaaatgccagtggaccgctacgtacgaactgaaggaagctattatcttcaaaatggctgaatcacagacctatatccacagggagggaaaccggaacgaaaagctttgaccgggatgactgacagtggcccaccacccaagggcggtgatgaaaactacgtgccggtagacaaaaggcaaaactaagcgatagttcccaggcccaaccacgaaaggacacaggtcccctggcgctggctaagggccatgctggctaaccagggcatgggccgaaaaaactttgttcacccatgaaatcactggccatggataaataccaaacgggtgaacgagaaccgcacactggggggaa

SEQ ID NO: 11643 - DNA, 492 bp, Glycine max
  Clone ID: jC-gmfl02220132ad12a1
atgctttgaagtctaccacaggagatgaagcatacaatgaaaatggtttagcgcctcgaacaatacgtctgctcaaggataagtacccagaccttgctatctatactgatgttgcattagatccttattcatcagatgggcatgatggcatagctagagaagatggagttcttatgaatgatgagacagttcatcagctatgtaaacaagctgtagcccacgcccaagctggtgcatatgttgctagacctagcgatatgatggatggtcccgtaggagcactgggtgcagctttggatgctgaaggctctgagcatgtctgtattatgtactatacagcaaagtatgccagttctttttatggtccatttagagaggcactagactcaaacccccggtttggagacatgaaaacttatcatatgaacccagctaattacacagaggctcttactgagatgcgtgaagacgaatctgaaggagctgacattc

SEQ ID NO: 11644 - DNA, 487 bp, Glycine max
  Clone ID: jC-gmfl02220132ae01a1
cccaaaaaaaacaagcagatatataaattaatcaaatactacttcgtgtgggggtgggaaaatgggccactctgaggaaaacagtgatgttgctgccaggcagaaggcaatcgatgattggcttcctgtcactggttcccgaaatgccaaatggtggtcttcagccttccacaatctcacagccatggttggtgcaggtgtcctcagccttccatttgccatgtcaaatatgggctggggccccggtgctaccgtgcttatcttgtcatgggttatcaccctctacaccctatggcaaatggttgagatgcacgaaatggtgccagggaaaagatttgataggtaccatgagttgggccagcatgccttcggagacaagctaggtctctggattgtggttccccaacaagttgttgttgaagttggcacgtgcattgtctatatggttactggtggcaagtcattgaagaaagttcatgataccctt

SEQ ID NO: 11645 - DNA, 420 bp, Glycine max
  Clone ID: jC-gmfl02220132ae01d1
tttatttttttcccttctttttattttcgctttaaccttctgtttttttttgctttggggtttgggtttcattttgaatttaatatgtactcttccttcttttatactacttgttctttcggccgcctacttggcgcgaatatcttaagcaagcggtgcgtgcactgggcgctcctcggctgccccggcgtctgaaaaggaacgtacgctagtcgcctgtccaacctaaaaggcgtacctcacatcgccaccggcgatctttttcgcgacgaactagccttctctgaccccctcttttccaagttctctccttcttcctcttcactttgaattaactagatcaattctcgtaacgcaaatgggggcggggacattgaaagtcctgcgtacggtgcagcgcgaagacagaaaaatgggggg

SEQ ID NO: 11646 - DNA, 463 bp, Glycine max
  Clone ID: jC-gmfl02220132ae02a1
aatcacttcatccttgggcaataaaaagctgattggatcatttgatctaaaaaagcttcaaccatcatattgttaattacttccaattaatatgggctgtgctatcattaaccttctcctaataatttttatatatgaagccagcgccgacacacaaactgcaacagaaccagaagtggtcagaacttcacaagacttccactactgctgtgattataagcaggctagaggaaactacgcagccaacagcccctatcagaccaacctcaacacccttttgtccactctcacttccaatacagatattgactacggtttctacaatttcacaaccggcgaaaaccccgacaaagtgtacgccattgtgctgtgcagaggagatattaatccagatgaatgccgtaactgcctcaaactttccagagccaatctcacagagctctgtccagttcagaaggatgca

SEQ ID NO: 11647 - DNA, 372 bp, Glycine max
  Clone ID: jC-gmfl02220132ae02d1
tggattgacgtcgaagcacaagcaccggtattgcttgcgtgctcgagatgctcactagtctgcggacgaccttggtttttttttttatttaacactctctcttatttattgaaacaatagatgaagaggtgactggccctcccctaaaacatatcacagggacaaacagtctgcaccaaactactactgactatatctatgagtgacaactcagaacatgccatgcttacagttgactgaaactcatatgactcagctgtattagaggactgtagctatgtgatacttttaactagtctgagtggctttcatccccagcggttaatctagtcgcaacctgcattgctgctctggcaccctactttggcaatt

SEQ ID NO: 11648 - DNA, 436 bp, Glycine max
  Clone ID: jC-gmfl02220132ae03a1
atttctcttcagcttctgggttctccattttccttcgtcttctgcatctgcattccgtagattcagttctcgtcggaaaatggacgttcgccgaagacccattcctccctccggcgatcgccgacaaacccagaagctgaagaacaccgccaccaccgattcgcagactcttctgcctctctacctcaccaacgccctcttcttcgcggtgttcttctccgtggcctacttcctcctccaccgctggcgcgagaagatccgcaccgtcactcccctccacgccgtcacccccgccgagaccgccgccatcgtctccctcgtcgcctccgccgtctatctcctcggcttcttcggcgtcgcctcccgcgcctccctcgacgagctctccgacgacgagatcatcctcaaggaagactcccgcgccccgggcccgtgc

SEQ ID NO: 11649 - DNA, 579 bp, Glycine max
  Clone ID: jC-gmfl02220132ae03d1
ggaaaacaaagagaaactctaatcccaaaagtgtggctcctgttgacctccaccctctaattcaagtacctctgtacaatctccataagagaaaatgcctcacacgaagcagatattcaatgaatgccaacccaccccaaggcttctggggagctggatttgcccatggaagatgccaaccatcactttatcttttacccccaccatcatcaataccaatttttttctcgttatttatgtctttatctgatggtttgcttattagaatattagtctctgacacaagtttaagtgtactgtggccagttcattggacaattgtagatatatccctgctagatctgttgtatttcatgtggctcttaacaagttgtccagctgcaatagcagacatgagcgatagctccccggcgaggactgaaccggctacaatggtggccagtagcctagaatttgcacccggagattctttgttggcacccttgacaccaagtaaattaagacatgctgactgagatgcgagttgtgtgccacctccacagtaccaaccttaatggagggcatggtcacggaaacatg

SEQ ID NO: 11650 - DNA, 324 bp, Glycine max
  Clone ID: jC-gmfl02220132ae04a1
cgaacacgttcgaatccattctcactggagagaacctcccaaagcggagatgggctgagataaacgcccttttcccttctcccgacacgctgtctgaatgcgattattgggaaaggtacagaaacccatatcctggctactgaatacgccctgagggtgcacctgactgatacagatcgatgagccggcttgcctggaagtgactcacaaatgtaactctccggcgcaccttagcaaatagggatctgtgagaccctacatctaagcctgattacgaaaccagagaacatcaggctgagaatcatgggaagaggcagagggaaa

SEQ ID NO: 11651 - DNA, 101 bp, Glycine max
  Clone ID: jC-gmfl02220132ae04d1
gtattaaaaggcttaccatataatgctatgtagggatctgacaacattagagctcctatggaaggagcacaacgaacacatacgcgaatctgcatgcacag

SEQ ID NO: 11652 - DNA, 555 bp, Glycine max
  unsure (1)..(555): unsure at all n locations
  Clone ID: jC-gmfl02220132ae05a1
ccttattcttcttaaccatgatcatatgcaagtctattctctgatggacatcagttgggatacatttccatatgctggaacaacaacaacatgtgaatctttatacatgggagttccatgtgtcactatggctggatcagtacatgcacacaacgttggtgttagtcttcttagcaaagttggactggagcatttgattgccagaaatgaagatgaatatgttgaattggctcagcagttggcctctgacatttccgcactacaaaatttgagaatgagtctgcgaaatctcatgtccaagtcccctctctgtgatggtgcaaaatttatcctaggtttggagtcaacatacagaaaaatgtggcaccggtattgtagaggagatgttccatctttaaaacgcttggaattgttacangaagttgctactggtgacctgtcaaataagaattctgagccaacaaggattgcatactcagnggaggacagntctgggtctgtcaaggcaatggatataatacaattcctgcatcaaagcttaacatacacactcgc

SEQ ID NO: 11653 - DNA, 471 bp, Glycine max
  Clone ID: jC-gmfl02220132ae05d1
agttaattaacttttttaattcttaaattttaaaggggtttcataaaatatttaaatctccttaaaatacattttaacccggcaatcttaaatatatccattcctgttctttatatgggggcattgcacaattgacagataaaaaaaatgccatgaaacaaattgataagctattaacaactattataatcgaggggggaaatatgccacagaccacggctaccaaaagaatgtgtaacagaatgcacctcaaggtagcttcacctcttggtcttggaacactctgcaccgaagggggctttataactaacctgctgcctatagcccccggccccaatggtactctattcaagttaactttgtgctgtgctgcggctgctttccagctttttccagtagcaaccatgcaacctagtagtaccactattgtaacggaattccacctgaatcactacaaaaggattcttggat

SEQ ID NO: 11654 - DNA, 99 bp, Glycine max
  Clone ID: jC-gmfl02220132ae06a1
cgcaaacattccactccattctcacaagctcgaacatccggacacggcgatcagcagagacgggtactattttcccctaaccccaatccatgtccaaat

SEQ ID NO: 11655 - DNA, 137 bp, Glycine max
  Clone ID: jC-gmfl02220132ae06d1
attaataggtttaacatagaaagctaaacgggggtttgacagcactttcactaatatgtaatcaacataattaaaaaagagaggaaggaggttcacccggataattgaatataggattcatggcatatttgaccaga

SEQ ID NO: 11656 - DNA, 105 bp, Glycine max
  Clone ID: jC-gmfl02220132ae07a1
cgcaaacgtaccactacattctcacaggctcgaccatccggtcccggcgatcagcggacacgggtaccatttccccctaaccccaatccatgttcgaatgaggct

SEQ ID NO: 11657 - DNA, 95 bp, Glycine max
  Clone ID: jC-gmfl02220132ae07d1
ctatgattaccacagaaacctagggggcattataacaacactagaacacattaggacgcaacgaaattaaaaatgagaccaaggaggttcccccg

SEQ ID NO: 11658 - DNA, 127 bp, Glycine max
  Clone ID: jC-gmfl02220132ae08a1
cgccagcttaccactccagtctcccaggcttgagcttccggacacggcgaccagcggacacggggaccggtttcccctctccctatgcgatgtacaactgcgggtggtaggagaggctcataacccc

SEQ ID NO: 11659 - DNA, 185 bp, Glycine max
  Clone ID: jC-gmfl02220132ae08d1
atataattatcatattaacataagggggtattttaaagcacataaaccaaaatatactcatcaaaattaaaaatcctaacaaagataatccaccggcacacttaaaataaaatttctcccatattcaacacaactaattttcaccaatcacatgtttcatacacagccatgaatcacaatttatg

SEQ ID NO: 11660 - DNA, 398 bp, Glycine max
  Clone ID: jC-gmfl02220132ae09a1
ggaaaacataacaatgcattctcacaaacccgagcttcagaacgcggctatcaactgccacgaggtctattgccccttaaccttaaaccctatccctatgctacttgttggaccgtttctgaaacccgaaacatggcgccgtcttccagcctgatgcgtgcttatgccacttctcaatggaggggcctgcttgttacgtagttatgcagtgcgatgactttcgggcccaggttgctgaatctggaaccacgttggaactaactcgaagcgtggtcacggagattgaggactccactggggtgacctatgccacagttatactccttcaccaatctcgtcccactcccgagcttatagagaccgtcatgcctaacggtaatgtgttaaagaagcagcat

SEQ ID NO: 11661 - DNA, 83 bp, Glycine max
  Clone ID: jC-gmfl02220132ae09d1
aacatatggggaactattaacacaattaaactaataaagaaacagaataattaaaaaccatacaaaagaaataaccccgccaa

SEQ ID NO: 11662 - DNA, 532 bp, Glycine max
  unsure (1)..(532): unsure at all n locations
  Clone ID: jC-gmfl02220132ae10a1
gatgaaattgatgctacaatcaacagatgtcatgcctttaaactttggtttcactggaaaagggaatagtgccaaacctgatgaactgcatgaaataatcagggctggagctatgggactgaagctgcatgaggactggggaactacaccggctgcaatagacagttgtttgacagttgcagaccaatatgatatccaggttaacatacatactgacaccttaaacgaatctggatttgttgaacatacaattgctgcatttaaaggaagaactattcatacttaccacagtgaaggagctggtggtggccatgctccagatatcataaaagtatgtggtgagaagaatgtgctaccctcatcaacaaatcccacacgtgcttatacacataataccatagatgagcatctcgacatgttgatggtctgccatcatcttaataagaatattccagaagatgtagcttttgctgcatcaagaataagagctgaaacaatngctgctgaagatattttacatgacaagggggca

SEQ ID NO: 11663 - DNA, 144 bp, Glycine max
  Clone ID: jC-gmfl02220132ae10d1
ttttttttttttttttttttttttttttttttttttttttttttttttttttttttttttttgggggcaccagaaaacaattcttctttttgggtatccaaaaattgaaaaaatatgggcatgctctgttaacgggttttgccc

SEQ ID NO: 11664 - DNA, 422 bp, Glycine max
  Clone ID: jC-gmfl02220132ae11a1
ctctggttgattcggatctagagtcttcagtttctcctcgttgttcttcgctttcctgttttcaatttcgattctttcgttaatttaataagatgtttgggagggcaccgaagaagagcgataatacgaggtactacgaaatcctcggcgtctccaagaacgcttcgcaggatgatctgaagaaggcttacaagaaagccgccattaagaatcaccccgacaagggcggtgatcccgagaagtttaaagagctggcgcaagcttatgaggttctgagtgaccctgagaagcgtgagatatatgatcagtatggtgaagatgcgcttaaggaaggaatgggtggtggcggtggccatgatccatttgatatcttttcatctttctttggcggtgggagtccctttggatcaggtggaagtagt

SEQ ID NO: 11665 - DNA, 483 bp, Glycine max
  Clone ID: jC-gmfl02220132ae11d1
aaaaagaacaacgaaatttagaaaagtttttaggatgccaaaacggaagttaccccttggacaataataaaaacccagggtgaacccctgtccaatttttcacaatcatttcataaaaccctacttatttttaagccccaccctacagttatggaacatcaacagttttatcatcatatcatcattttcatcaattcggaatttagcttccacacaaaggcatttcgggggggccccctgtaccctttgggccccaccaggcatggcatcatcctcaaaatatgcctcctgagcttggtgggggttcctccaagactcctcccccatgttgacatcatggaggggaatttcctcacattcatccagctccatgtttggcaattgggaaaaaggctttgggggcaaaacagcctccaagggcttaacttgacccgggtttaaagaatctggaaaccccacagggaagcgaatgtaaaagttccc

SEQ ID NO: 11666 - DNA, 521 bp, Glycine max
  unsure (1)..(521): unsure at all n locations
  Clone ID: jC-gmfl02220132ae12a1
gatcatggcagctatttctaggctaaaggctaaaattctatctattctgctgagtttgtgtgaagcagaaagcatttcttatcttgatgaagtagccagctcagtacgaagtttagatttggctaaatctgttgcattagaggtttttgacttgttgaagaaagcctttggaagagatcctgggcatctcactgctgacagaagtttcccaatggggtttgtacagctcaatgcaatgcgtctagctgacatcttctctgatgattcaaactttcgatcttacatgatactttgttttactaaagtcctgacagcaataatttcgctctcccatggagattttttatcctgttggtgttcatctaatctctcagagacggaggaggatgcangtattgaatatgatatatctgctgcagttggatggattttggataatacttcaccggatgtaagatatgctacaaatttggaattcaacctaaatccctacagcatgcctaaggcttcttatgcacatc

SEQ ID NO: 11667 - DNA, 504 bp, Glycine max
  Clone ID: jC-gmfl02220132af01a1
aatcacttcatccttgggcaataaaaagctgattggatcatttgatctaaaaaagcttcaaccatcatattgttaattacttccaattaatatgggctgtgctatcattaaccttctcctaataatttttatatatgaagccagcgccgacacacaaactgcaacagaaccagaagtggtcagaacttcacaagacttccactactgctgtgattataagcaggctagaggaaactacgcagccaacagcccctatcagaccaacctcaacacccttttgtccactctcacttccaatacagatattgactacggtttctacaatttcacaaccggcgaaaaccccgacaaagtgtacgccattgggctgtgcagaggagatattaatccagatgaatgccgtaactgcctcaaactttccagagccaatctcacagagctctgtccagttcagaaggatgcaattgggtggtacgaggacgacaaatgcatgttgcgctactc

SEQ ID NO: 11668 - DNA, 396 bp, Glycine max
  Clone ID: jC-gmfl02220132af01d1
ggacgactgaagccttgccggatttgattgcgggctcgagatgctgactagtctgcggacgccctttttttttttttttattcaacactctcaatcattcattgaaatgatagaacgagtactgactggcgctaccctaaaacataacacagggaccaacagtttgccccaagctgccaatgaatcgatttataagtgacaactgaccctatgccgttgtttacatacattgaaatgcatagaagtgaggcgtattaaaggaattcagcgctgggatactcttcaacagcctgattggccttattgccccgctgttgatctacataggtactggatcggtgccacgggatgacactctgctgatagagcactaccatcatagtacgcaggttctag

SEQ ID NO: 11669 - DNA, 401 bp, Glycine max
  Clone ID: jC-gmfl02220132af02a1
tttcagaagcctctttgggaatcaaatccgaagcatgatgcattgtgcgagcattgtctcggctccgtcctacgcgttcccttttctctctggctccgcttccactactccaactgcgatctcgctcactaagcgcagttggaagccacctccgagcatggcaaaaggcccagtcagagccaccgtttctatagagaaagagaccccggaggccaatcgtcccgaaacgtttctcagaggagtggacgaggcccagtcttccacttcggttcgggcccgcttcgagaagatgataagggaggcccaggacaccgtgtgcagtgccctcgaggccgctgatggtggggcccagttcaaggaggacgtttggtccaagcccggtggcggcggtggcattagca

SEQ ID NO: 11670 - DNA, 368 bp, Glycine max
  Clone ID: jC-gmfl02220132af02d1
ggcaaactataggatcttacatatagcaatggctcaaggatttttcagtcaaaagttttatatcaccttcaacagaattaccaatttactagcctgaggtgttgtgcaatactggcattaaagaaggctgccttctgttttcttacatgggattgaggagttacttgatcaaagaaccatggttgccattaggtatactacaaacccagcctgaacatttgtaattttctgcattttcacgctttacgcggatgactctagcaaaatacgtgatttacaatccacctaatccaacaagctagcattctgactcatcattacaggcacttgatatacccccgacacagaaactacgccccttattattg

SEQ ID NO: 11671 - DNA, 474 bp, Glycine max
  Clone ID: jC-gmfl02220132af03a1
atttctcttcagcttctgggttctccattttccttcgtcttctgcatctgcattccgtagattcagttctcgtcggaaaatggacgttcgccgaagacccattcctccctccggcgatcgccgacaaacccagaagctgaagaacaccgccaccaccgattcgcagactcttctgcctctctacctcaccaacgccctcttcttcgcggtgttcttctccgtggcctacttcctcctccaccgctggcgcgagaagatccgcaccgccactcccctccacgccgtcacccccgccgagaccgccgccatcgtctccctcgtcgcctccgccgtctatctcctcggcttcttcggcgtcgcctcccgcgcctccctcgacgagctctccgacgacgagatcatcctcaaggaagactcccgcgccccgggcccgtgcgccgcggcgctgtcggactcctgctcactccccacaac

SEQ ID NO: 11672 - DNA, 514 bp, Glycine max
  Clone ID: jC-gmfl02220132af03d1
ggaaaacaattttaaactctaatcccaaaagtgtggctcctgttgggctccaccctctaattcaagtacctctgtacaatctccataagagaaaatgcctcacacgaagcagatattcaatgaatgcccaccaaaccccacgcttctggggagctggatttgcccatggaagatgccaaccatcactttatcttttacccccaccatcatcaataccaatttttttctcgttatttatgtctttatctgatggtttgcttattagaatattagtctctgacacaagtttaagtgtactgtggccagttcattggacaattgtagatatatccctgctagatctgctgtatttcatgtggctcttaaccaagtgtccagctgcaatagcagaccatgagcgatagctccccgcgaggactgaaccggctacaatggtggccagtagcctagaatttgcacccggagattctttgatggcacccttgacaccaagtaaattaaaacctgctgactg

SEQ ID NO: 11673 - DNA, 514 bp, Glycine max
  Clone ID: jC-gmfl02220132af04a1
atggacggtaccaaaagcacagaatcaagtgaattttcaagtcctctgcttcccgcagaagcacaagggtatcgttgcaacaatggtgttgactgtgaaagaaacttggtcggtaccagctattcttattcttaccacccttgttgctgtctctggttcttacgttttcgggtctgctgtgggatattcatctcctgctcagactggaatcatggatgatctaaatcttggtgtggccaagtattcactttttggatcaatactgacaattggagcaatgattggagccattataagtggtagaatagcggattatgcaggtcgacgaactgctatgggcttctctgaagtattctgcatattgggatggcttgtcatagcattctcaaaggttggttggtggctttatattggaagattgttggtgggatatgggatgggccttctatcctatgtggtacccgtttatatagctgaaatacacccaagaatcttcgagggggattcaccacag

SEQ ID NO: 11674 - DNA, 613 bp, Glycine max
  Clone ID: jC-gmfl02220132af04d1
gttcaaacttccccttccaatttaatttatttgtagtagcaagttttaagtacatcatggaactgatattgaaatgctcttgaatgagggagagggaccataatgatcaaatctaggagcacaggttcaacccaacacaaaatctttgcatcataaacgtgatcaagcttgtttcataaaatctttaatttaattcataatctataatctggcacttaggaaattgtttctggattaattatgcatgcaattttgctactgggtcatgccaaattcatgtctttgttgaatatggattcagagatatatgcttgaacttcttctagagttctcccttgtctctggtactagttttgccacgaatagaatggtgaagccacatatgatggagaatatgaagaaagttcccgctgaactccaactcatgaggaagttaaaagcgtatgatacaatccaagaacacaaccagctagccaaattcacaagacttccagccgagcccttcacattaatgggaaaaatctcagacattataaccaaggggattccccccatgccaagcaagaatgatcctgtatatgccaatacaccaacatgcgtgagaatggaactt

SEQ ID NO: 11675 - DNA, 505 bp, Glycine max
  Clone ID: jC-gmfl02220132af05a1
ctcaccacttctattccattctcactcaatggaccctcccacatcctacatttcctccgatgagctccgcaagcacaacacgcgccacgacgcctggatctccatccacggcaaggtctacgacgtctcctcctggctccaccgccaccccggcggccccctccccctcctcagcctcgccggcaccgacgccactgacgccttcctcgcattgcaccccccgaactccgcctccctccttctccccggcttcgccaccccccacctactctcggaccactccgtctcccccgcctcctccgactaccgcaagctcttctccgacctctcctctctcaacctcttcaaccgcaagggccacaccacttccatgctcctctcccttatactcgtccttttccctctctccctctgtggagtcctgctctctgacagcacgtgcgtgcacgtgctgtccggagcattagtaggcttcctctggattcagagcggctggataggccac

SEQ ID NO: 11676 - DNA, 613 bp, Glycine max
  Clone ID: jC-gmfl02220132af05d1
gctccaaatgacaatgtattcaaagacataatacaaatggttatataataatatagagacccttgggctcataatgaaactgccaaaggccaaagcaggataaaccgttcttacattctcaagcatgaagtgctgagcattactaaaccacatatgacaagtgccagtagtttctttcttacccatttccaaaaggagattagccaatcccctgccaagacaatgagtaaccgttgcaaatcaattattctctcttcaaaaccaaggacacctacgggacaaaacttatatgcagtttcttggatgcgtttggttttttcctccaatcagatttgaagttttatgctggtaatccacataataatgatagaaaaactccaattctgataggagaacaacaccaagagcacctatgcaactatatataactttcatccctacctaccaatgcacctccatcaaaccatcaatgacagcaaaaccacaggaagctccactcaaatccccttcatccatgagtgttaacagcctaccaaaccaagttcttgggaaccggcttggaaccatctcttgcctgcaaagcagcattccctagagtctgaatcgtcagcac

SEQ ID NO: 11677 - DNA, 94 bp, Glycine max
  Clone ID: jC-gmfl02220132af06a1
cgcaaacgttccactccattcacacaggctcgagcatccgaacccggcaatcagcagacacgggtactgttgcgcactcactctactccatgtt

SEQ ID NO: 11678 - DNA, 95 bp, Glycine max
  Clone ID: jC-gmfl02220132af06d1
catattatgctaactgggggtcacaacacaattaaactcgtctgtactcatcataaacaaacatcctgcacaggagcttcaacatgaatattgac

SEQ ID NO: 11679 - DNA, 109 bp, Glycine max
  Clone ID: jC-gmfl02220132af07a1
cgccaacgttctactacattctcacaagctcgagcttacggtcctggagatcagcagagacgggtgcatttgctccctttctctaaaccatgttcaaatggtacttttt

SEQ ID NO: 11680 - DNA, 213 bp, Glycine max
  Clone ID: jC-gmfl02220132af07d1
caaatggggcatttcataatgaatattaccacttagtaagcattatactgaacataaacagtgacgatattcaacaagattattgtcttttgaactgtagccttttaaagccttaactactttgaatcacactatgaagtccggctctgcttttaaccatgacctactttgtaccatatttgtcattaaatggtcgctgtccatacgcgctaa

SEQ ID NO: 11681 - DNA, 346 bp, Glycine max
  Clone ID: jC-gmfl02220132af08a1
cgcaaacttaccactccattctcacaggcgcgagcatacggacccggcgatcagcagagacgggtaccatttcccactaaccctaatccatgttcgaatgcggctggtaggaacggtacagaacgccaaaacatggctcctccataccgcctggaggggcatatgcaagatccaagtggaggagcctgcgtgtcatgtagtcaatcacagagtggacttacgggcccagcttgcataataggcgatcactatggcaccactacatagaggggtcacgcagactgaggaactcaaccgggtgaaatgcggaccaggcagactcatactataatattgagccacgtac

SEQ ID NO: 11682 - DNA, 97 bp, Glycine max
  Clone ID: jC-gmfl02220132af08d1
atcatattatcataggggggatttggtcagcactagaactcataagtacgcagtgtaattaaaaagtcgagcaaggaggttccacctgattatttaa

SEQ ID NO: 11683 - DNA, 370 bp, Glycine max
  Clone ID: jC-gmfl02220132af09a1
cgccaactttctactccattcactcatgctcgaccatcctgacacggcaaccagcggagacggggacattttgcaactaaccgtaaatccatgtcccactggggctggtaggagacggttcttaaacccaaaacatgcctcctcctataggcctgctagtggcctacttcatggtgaccgttgaccagcctgtgtatatcgtatctatacacaaagaggacctacatgcccagtttgcatattccgcgatttctatggccccacatcttagaggggtcacgcagactgaggccctgaaacgggtgagatgcagactgcgcaaacatatactataatatagccccaagtacgctgtgacaaccaccctatt

SEQ ID NO: 11684 - DNA, 102 bp, Glycine max
  Clone ID: jC-gmfl02220132af09d1
gtaataacataattaacaaaaaaacataagggggatttaaaacacacaaaaaccacaatgaacacaactaaaaaaaaataactaggaaagaggttccacaag

SEQ ID NO: 11685 - DNA, 560 bp, Glycine max
  Clone ID: jC-gmfl02220132af10a1
ctccgattcctgagttgcgttggtcttggtggagttacaaactcagcagcagaagaagaagctcctcaattgtttaacctcaaattcgattcgaactatgtaaacgccactttcgtgtcgggtttgttgtctctgctttggtgcttggcgctgctactgttcctcagttcggatctcccaagcatgaatctcagcaacggaaagggatccatgtcaacgcttactgcaagcgtcgttatgaaatccggcgacgccgtctccgaccagtttccggcgggtctacgggttctcgtggtggacgatgaccccacgtgtctcatgattcttgagaagatgctccggacgtgcctctacgaagttaccaaatgcaatcgagcagaaactgctctctcactgcttagagagaacaaaaatgggtttgacattgttataagcgatgtgcatatgccggacatggatggatttaaacttttggagcacattgggttagagatggaccttcctgttatcatgatgtctgcggatgatggtcaacgtgttgttatgaagggcgcgactca

SEQ ID NO: 11686 - DNA, 201 bp, Glycine max
  Clone ID: jC-gmfl02220132af10d1
tttattttttttttttttttttttttttttttttttttttttttatacttatttattttacatggggtttcttttatattcaaattctatcctatcacaacgaaaacaacccaaacaaaaacggaccagactgacaccaaaaaaaaaacagacacaaacaaaaccccaaacctaaaaaaaccataaaacaaaatcgcaaaa

SEQ ID NO: 11687 - DNA, 486 bp, Glycine max
  Clone ID: jC-gmfl02220132af11a1
gatcatggcagctatttctaggctaaaggctaaaattctatctattctgctgagtttgtgtgaagcagaaagcatttcttatcttgatgaagtagccagctcagtacgaagtttagatttggctaaatctgttgcattagaggtttttgacttgttgaagaaagcctttggaagagatcctgggcatctcactgctgacagaagtttcccaatggggtttgtacagctcaatgcaatgcgtctagctgacatcttctctgatgattcaaactttcgatcttacatgatactttgttttactaaagtcctgacagcaataatttcgctctcccatggagattttttatcctgttggtgttcatctaatctctcagagacggaggaggatgcaagtattgaatatgatatatttgctgcagttggatggattttggataatacttcaccggatgtaagaaatgctacaaatttggaattcaacctaat

SEQ ID NO: 11688 - DNA, 528 bp, Glycine max
  Clone ID: jC-gmfl02220132af11d1
aaacagaatttacgttcacttgttccctgtaagttaaattcagatcttatcactcgttaccacagttccacatattgtacaagaccctaccaacatttttgctgcccattatgggctttggggtattatcctaaactaaccccatttcaatgggtgaacaaccctggttttcaacatagggggccttttctagtttctacccatccttggctaacaaactggactctttctattcggtattggtcttctcagccaaccaatctgctatcccttcagctaatgtttatggaaataaagaacatgcgcattcaaggaaccacatggaagattgacaacagattgcagctaatgaagcatgattaaactcattcaggtcgcaatgcaaaaactctgtttgaaccccataacacccttatgactcctaacttagtttcagcctctgcaaatgtgttgccagtggcttctgatggatagggtagccgcatgcctttatcagctttgagctcactaatatccacaacatgggca

SEQ ID NO: 11689 - DNA, 291 bp, Glycine max
  Clone ID: jC-gmfl02220132af12a1
gatcatggccactgtttctaggctaggggctaaacttctatctattctgctggatttgtgtgaagcatatatcattccttacctcgatgtagatgcccgctccttacgacctttctacgcgcctatgctcgtcgctctaaatgctatcgacttgacgtagaacgcctttggaggacatcctgggcatctcactgcatgacagcaagttgccaatgggagtgtgacaggctatcgcaccgacgagagtgtgacatcttctctgaggattcaagcttgtcagcttacatcata

SEQ ID NO: 11690 - DNA, 423 bp, Glycine max
  Clone ID: jC-gmfl02220132ag01a1
ccggctaccatgtctatgtctctttcttagtgcctgcctgccagaagttaaaatggccgaagaaactttcctattcacatctgaatcagtgaacgaggggcaccctgacaagctctgtgaccagatctcctatgctgagctccatgcatgcttgtagctcgaccctgacatgaagggcgcctgctaaacctgcaccacgaccaacatggggatggttctaggagagatcacaacccaggccagcgtggactatgagaagattgcgcgctacacatgccggaacattggctttgtctactgatgatgatggccatgactctgacaactgcaggggcctggtcagcattgatcaaccgagcgctgatactgctcaaggtgggcacggccacctcacctagaagcctgaagagattggagctggtg

SEQ ID NO: 11691 - DNA, 333 bp, Glycine max
  unsure (1)..(333): unsure at all n locations
  Clone ID: jC-gmfl02220132ag01d1
gtntaacacggggtggactcatgcaaatccccgatttagacttgcgggctcgagcatgctcactacgtctggggccgccctttttttttttttttctcttaatgttatgcttttctcctctgcaatagaacaggtatgcgggcggtggaatgagatcaccacagttttctagacttaaagttgaaggaacgttcctttaggttgcaacataaaacaaatacacggcctgaaaggaccaaatagcagttccaaaatgaagggggggcttggttgacagtcttcccctcatacttctcccttttgccttccagggtacgtaacacagactaaatc

SEQ ID NO: 11692 - DNA, 430 bp, Glycine max
  unsure (1)..(430): unsure at all n locations
  Clone ID: jC-gmfl02220132ag02d1
gaaaattatgggttgagctaaagccacgccncggatttagattgccggctcgacctcctcactcgtctgcggccgccctttattttttttttttttttatttttttatttttcttttcttcagaaaaatggcatgcgctctataatttgagatcattacatttttctagcctaaaacttgaaagaacatttttttttgcctcatcatataacatatacatggcctgaaagaaccccattcgagttcccaaaaaaatgggggaccttccttaaaattttccccaaaaaatacaccgatttgagttcgagggaaggaaacatagagaaaactctaccaaccagattataagaagcccgttggagtgcaaaagacccttgccaaaagtggtggaaccccctttatataaacaggaaccctttcccccttgagg

SEQ ID NO: 11693 - DNA, 390 bp, Glycine max
  Clone ID: jC-gmfl02220132ag03a1
ttcttcttcttcttcggtgagagttagagagagagagagagagagagaaggctctttttttcttttttgttggtttctcttgtttttttttgtaggtactgaggaagaaagaccaaaactttatccgcttgcttcacttagctcaagagcgtacaattcaggcaaaggccttgaagtcggagtgtgtgttaaggatttcttaggagttgcttctgtcttgactgaagaaatggaggtatatggcaaatctatggttgcaggtcctgcaaatgttatttttctgtcaagtattttgggccaagaaggtccagttcccggtcacaaatgcgactggaaatgtcaaaatgaacatgtttgtggaaacatgtatcgctgcaagctaactgggct

SEQ ID NO: 11694 - DNA, 636 bp, Glycine max
  unsure (1)..(636): unsure at all n locations
  Clone ID: jC-gmfl02220132ag03d1
agcttgtataaaacttgactattccaaatttcattaatgaaggtgtgatacaaaatgtcaaaagaatagaaacaagagatattcttacaagttacaaacctccggcattgatacaaacttacatctgccttgaatacaaaagcaaaaaactggcaaaaaaacattatcaaggtttaggagagtttactttcaagggaaaatcactttcaatcctccaataaagagggaaatgtatgcaggctggagtcatagacaatgctgataatcgtcaccagtcaatatcccaggacaggtcacttttatttgttcaatcattgccactgtccacaggctcttacagtggaagacaaattcatttggtcttatacttcaaaattcaaactatattgaaattgggtatgcaaactttttcaacttttcctagtgtgtcttgatcatccaccaaaacttgttgagagcatcataactgtcctttcctcaactgttacatctactccataccaggtaccagctgctaagtctcatcataactcgatgttcttacagccacatanaatggtgcctaaaattcagaagtggtatatctgagcatgaacagctaaacttatacctacaagaaaacgagaagtatcaata

SEQ ID NO: 11695 - DNA, 421 bp, Glycine max
  Clone ID: jC-gmfl02220132ag04a1
gaagaaatgggttccaaggcgaagaagaagggttcaccggaggacattctggaaaccctaggagacttcacgagcaaagagaactgggacaacttcttcaccctccgcggcgattccttcgagtggtacgccgaatggccccatctcagggacccactcctctccctcctcaaaaccatccctctccctctcccgcttcagctcctcgtccccggctgcggcaactcccgcctctccgagcacctctacgacgccggccacaccgccatcaccaacatcgacttctccaaggtcgtcatcggagacatgctccgccgcaacgtccgcgaccgccccctcatgcgatggcgcgttatggacatgaccgtcatgcagttcgaggacgagagcttcgtgcggtcattgacaaagtggactcgat

SEQ ID NO: 11696 - DNA, 375 bp, Glycine max
  Clone ID: jC-gmfl02220132ag04d1
ccccaaaaccaaaaaaaagattaaagggggttaaaaaaaaaaaaaaaaaaccatccccctcccaaaaatcccaaaaaagtcccccgaaaaagtttttaatttccccccaaccaatttttaccgaaaaaaaaccccccggggatagtttcaccccggaattttccccgggaagggtcccccaaaaaccaaaaccctaaaacggtgaaggcaccccccctttaaaaaaaggggggaagcccccccaaattttccccccgggctaaaacccccccaaccccagaaccccaattaaaaggacaacccttggggagaaaccccccccgcctttggaaaacccggctttcccatgccccccccgaaaggtccccggcccaa

SEQ ID NO: 11697 - DNA, 557 bp, Glycine max
  unsure (1)..(557): unsure at all n locations
  Clone ID: jC-gmfl02220132ag05a1
gtgcgtgcgattcttctgatattccaaggcgacgcaccgacaccggacccatctccggcgacatctcaccgatctccggcgaatccccggtccccactttcttccctcgaaatgaatcccgagtatgattatctgttcaagctccttcttattggagactctggtgttggtaaatcatgccttcttctgagatttgctgatgattcgtacatcgagagctacataagcaccattggagttgattttaaaatacgtactgttgagcaggatggaaagaccattaaactacagatctgggacacagccgggcaagaacgatttaggacaatcaccagtagctactatcgtggggcccatgggatcattattgtttatgatgtgacagatgaagagagcttcaataatgtgaagcagtggctcagtgaaattgatcgctatgcaagtgataatgttaacaagcttttggttggacacaagtgtgatctggaagcanatagagctgtgtcatatgaaacagctaaagcattcgcagatgaaataggcataccctttatgga

SEQ ID NO: 11698 - DNA, 331 bp, Glycine max
  Clone ID: jC-gmfl02220132ag05d1
cgaaaaaaactgcatttacatgaagcaaaaggggattattaacctggggaacaccttttcacttttcgggaacctatgtatcttaccgacggggcacccttctacgcagggccaccccaacaaaacaacttcggacgtgggccacctggggacatttaggaaagaaaacagcttccagggaatggggtccccaccgaagaggctccgagcccctacagtttcggaaaagaactcccaccctcttggggcacttgccattgccgccatagacccggtggcaggcccggctttaccctggggcgtgacacccactctccccttggggagcccc

SEQ ID NO: 11699 - DNA, 542 bp, Glycine max
  Clone ID: jC-gmfl02220132ag06a1
aaaatcaaaagagtctctcggagagggaagaaggttgttgatgaaagtgaagaaaaggagttaaagggcgattgggtggtcagaaaccagaacaagaacaagaaacctaaacgattgaatcttgatcagagaatttcattaaagaataacataagtggggacgaagtcattccaactcgaaagaaaagaaatgttgggaacaaaattgagaagattgaagaacttattcgggaatattcagtatcaactgattttgtcagtatggattggaaaagaatgagaatacctcccgttctttcttcttcagagcatgcttggttgttcaaattgatgcaacctatgaaggcactgcttcaagtgaaagaagatttacagcaggagttgacaagagaacctgcagatggtgaactagctgatgcaacatacatgagcattacacaagtaaggaaagcaatagatgttggtcaagctgcaagaaataaactcataaagcacaatctccggcttgttttgttcgtgatcaacaatatatttacagattt

SEQ ID NO: 11700 - DNA, 554 bp, Glycine max
  unsure (1)..(554): unsure at all n locations
  Clone ID: jC-gmfl02220132ag06d1
actatgtaacaagcataagcgcttatatactttgtgcaatgtcaagtatatcatatacaaattacatgagtatgattatgatagacggtatttaaatgaccagtaatacaaatcatcagtatactatataactgggtaaggtgtttatatacattagtcgtttatacaacataacggcgaagataatccaatctagctgaatgcttgagcttcataagagccttgacttcgtgctttctaaccatttccctagatatattcaagttcccagcaatttctcccaatgttctgtcacccttgccatcaagtccaaatctctgtctgatcaccaagctctccttcggcttcagggaatcaagcacatcatcaagagcaagccttagtagagcaggttgtttcctattatcaccattaacaccatcatcatcaacgatcccattaatgaactcctcttgcgtggttgtatgtctcgagttcagagaaagaatggattttgatgccttaattacgtcatggtatctttcaggggatatatgaactctntctattatttc

SEQ ID NO: 11701 - DNA, 623 bp, Glycine max
  Clone ID: jC-gmfl02220132ag07a1
ctgaaatcgagagggagacgaaaagtttatatcgagagagatgggaaaggagagtagcaaagatacggttccggtgacgcagtggctgaatcgaatggtctcagaaccttactacctcttccatttcttaaccttcttcttctatttcgtcgttcgcagctccgcaacccaaatcttagcgcctcatctcactcaccatctccttcgtcgcgaaatacaaacactgctagtgttcgcgatattggctttcatcaagggaataaaagaagaaacatgggaagcctttatagctgatgtgcttttcctggccaagatttgtctttttctcctagcctttacaatggatcgccgcttagccgattggtatattcttgtattcttagtgatacatatgttaacacaacaacctccattccaaggactaggtacgtctagcaagctaacaccgttgcagttggaaagcctgctgacagagggaacaactacaagattgtggctggtggaattccgttcttcatattcacctgcttgcattcgctcaagtcagcagtttcctgagctctcattacatattcaagcaaaatttatcatttggaaatagtgatcttggtctctttcccatg

SEQ ID NO: 11702 - DNA, 607 bp, Glycine max
  Clone ID: jC-gmfl02220132ag07d1
accataaaaagattcttcagacattatattcagacaatttaaaagaggtttatgacaacataatttcaactaaaatttgaattctctcgccaaattttttgactttcacttagaaccgatgatagattattaaataatggatcaaattataataacacctattgagatttaatctaattacacatacacccccgttgtctgaagacattactttgacccttgtgtgatggtgttaaacaaacgttaactttcaaagttcatttacgaaaatgtcctcctcagatatccggaaatccaaaattgccattctcagtgatgactaaatttcggacaacttgctccactaacatcctatttaccactaacatattcgagaaggtgccgatcaagctcaaaatgtcgagaaagaagcccctttgtaattttagggtgaaaatatgcagcttcaaaatccaactcaggaaagcgggcaacttcagctgcattctcaaataagataaatgttggaagctggcccatgcttccacttagagatattccaaatctttcagcagcattgtgaaagagaccaagatctacttttccaatgataaatctttgcttgata

SEQ ID NO: 11703 - DNA, 549 bp, Glycine max
  unsure (1)..(549): unsure at all n locations
  Clone ID: jC-gmfl02220132ag08a1
catatccccccctagctacagagcagccaaaggggaggaataataataagcctatattctaaggccggaaaaataaaaaaggaataacaaaaatgtctggaaaggtaattatctcggctgtttctctcatcctggtggttggagtggccataggtgtggtggtggccgtcaacaagaagggcgaggatcccacacttcaatctcaacaaaaatcagtaggggttatctgccaaaacactgatgaccagaagctctgccacgaaaccctaagctccgtgaagggcatggacaccgctgatccaaaggcttacatcgccaaggcggtgaaagccaccatggacagcgtgaccagggccttcaacatgagtgataggctcagtaccgagtacggaggcaacgataacggaaccaagatggcccttgatgattgcanggacctcttgcaatccgctatcgagagcctccaactcagcattgacatggttcacaacaacaacttgcaggccgtgcataaccaacaggctgacttcaagaactggctcagcgctg

SEQ ID NO: 11704 - DNA, 485 bp, Glycine max
  unsure (1)..(485): unsure at all n locations
  Clone ID: jC-gmfl02220132ag08d1
aatcaaagcaattttaaaaattttcattaaaaatatttccggtagacctccaaagataaatacaaagaataacaaattgtctacggactatgaccctcatcatcacactctctaacagtactcaattgatgatgcatggatatgtgtttgtgtaaattcaattaagccttcatgaagctaagtgcgtgaggaacacggagagctttcaaccagtcgcttccaccgttggctccagcctgtaggaactgggcaggggtgaattgggtagcttcttcgcggctaataagaccacggtaacccttccacttgatccttccgttaacgttagcaccaggtccatcgttgttgtattcagcatagtacaaggtgtcttcgaagtgttcaccggcccatgggcaccattctttcggggtgaaggagtcacccactgtggattccatcacacccgtcttgagaatngcttccatggccttccaagtatgact

SEQ ID NO: 11705 - DNA, 578 bp, Glycine max
  unsure (1)..(578): unsure at all n locations
  Clone ID: jC-gmfl02220132ag09a1
gagaaacaatactcatctttattacagggttgtgtgaactgaagagggagggtactggtttgcggaggcagtgacacttctgcaagcctagaatcctctctcctagttttttgtgaaaacagatagtgtggtgcttttggaggatccttttctcaaagcttgcatgtaacactatctacattttggtgatcagttgaagtgtggaaaaaatcttaagctaaaggcaatttgggaagctggaacaatgggttctgtttgttgttgtttgagttttgatgattttgaagattatgtaaatccaaatagtcctgtatataggaactgtgtgtgtctcagttgcttgatacagaaccttttgattgtgtattcttcaatattccgtagaggggatgcacattcaattccttcatctattcaaggggcagcatctataacttcagcagcatcactcgataattctctatctgacatgtatcgctctcctccaggccattaccatatgatgcagaacccagatatttccgctcgcaacgtgatggactagtttcaggcgtgagaagggtcangtcattcaaatg

SEQ ID NO: 11706 - DNA, 704 bp, Glycine max
  unsure (1)..(704): unsure at all n locations
  Clone ID: jC-gmfl02220132ag09d1
tgtagtcgacgtggtggattagtatcatcatcggaattaattttcccgggatcgacgacgcctcactangtgcgagcggctcgctcctttattttcttttattttattcttttttttacatcatttacacaagatttccatactaataattatgatagttcttgtgtgttctctcaccggttttgtggacattgcgggataactttttaacacacacaaacacatagtggggcattacgatatgacacctcacatacatatgggttacagggaaaactttttaataccttactattacattgactagacaccttaatactgtagtatgtcacatatggtctataacgcttatatctcttccatgccctcagttgcctgacttcatccacaacacagaccttgtaatcaagtgaaagtcgtttcatcgaataccatcacctttccacagacaggacagttgtcacttctctccatccactcataaatgcaaccaaggtgaaaatgatgagagcattttgtcattatctttggattctctttagtgtattcttcaagacaagttggacagacatcctcctcctctgatgatgcatagacaagaccaactccagttgaatattctgttgattgaagtcttagtgaggacttagaacggtattcctttgatccagcttcacaggcactttccttccatttgtctcctg

SEQ ID NO: 11707 - DNA, 387 bp, Glycine max
  Clone ID: jC-gmfl02220132ag10a1
ccgactcatttcatctctctatccactgccatatcgaaccaaagacggatggagctgcgtcgaaggcaccgtaagatgcatcagctatggaattggcatccaatctcggtggcaagaaagacaaagccgaagttctctctggcgttcataagtatgagaagtatcatgtcagctatggcggtcaagaggacgagagaaaagctaattataccgatatggataatgaatactatgatcttgataccaggtgttatgagtgtggctggggggaatctttccattttgcacccagatggaaaggagaatctcttggagagagcatcagaggacgtgaacacttccttgctctcacaacttggactgaagccagggcaaaatgttctggat

SEQ ID NO: 11708 - DNA, 414 bp, Glycine max
  Clone ID: jC-gmfl02220132ag10d1
aagacaaaaacagcaattccttgggaacaaagggaaagggcctttcggaattagggaaacccaaatacgggggggctctgcttgatctaaccacactggcaaatgaaacggttgaaacctacactatacgacgaaccctcaagaatcactagggacactgggccaaaaccaatcttagctcgtgattcacccgatcacaatatccgcaactgatgacaacagctccctatatggtcaaccaatttaattccaggacgaatcaagcttccgggccaagaagacttacattggtgcgaaaatatatgcattcactgcgtaaacgaggccagctgcaggctattataggaaagacttgaacccttagactaccctttggagccaggccaacatacttcagaacctggaccatgtttt

SEQ ID NO: 11709 - DNA, 331 bp, Glycine max
  Clone ID: jC-gmfl02220132ag12a1
gcacaaaacggagagcacatagctgcatttattttaaaacctgtccaaggtgaagctggggtgatattccctccaaatggttatttaaaagctgatagagatcttagctccaaatatactgtcttgatgattgctgatgaaactcatactgtgttagctagaacgccaatgatgctagcttgtgagtgggatgaagaacacccagaagttctgatactacggaaagcattgtgtggaggaggtattccctctcgtgcattgcttgcatacaaagatgcaatgccttgcatactacctgtacagaatggaagtaccttagatggaaatacga

SEQ ID NO: 11710 - DNA, 358 bp, Glycine max
  Clone ID: jC-gmfl02220132ah01a1
gttgggagactggcattatgggcctttagcgcggctaaggcgcggaagcaacttcatccaccgctttttctcctctttcttcctaagctcaacataggcaaactctcgcagggggtaactgctgctggctctgatcttccagagagtgctgccacgtgctgcccaacccctacacccatgattgtgccatggaagagccagtacagtcatcacgattctgtgtgagacatccgaaccatctggggaacctgctcctttaggacaaaagacgcggaaccatgacagcatgttggtgaatgcctccatgactacctatggacgtacaatggagaacgttcatgatccaccatcatgaaca

SEQ ID NO: 11711 - DNA, 393 bp, Glycine max
  Clone ID: jC-gmfl02220132ah01d1
tttatttttttttttttgatcaatccactttttattgagcggaccccaccggggaggcggtctggggacactatactttagagtgcccatggagcattggtaaaggatcctcctttatgtgagaagggtgtgggcctatgaaagacgttgaggtgctttgcgcccttctttatgtattagggcacctataaactggactttctcgaatcttacgcgagaggagcccctggggattgactaataacttccaacaaaagaaattgagaatggagaccgtctgttgccaccacaaataaaacatacatcccctcgatgcggggtaaagaataaaaaaaagctttcccaatccttaatccggcaaggcctaatgaaccggcaaggaaagcctttgat

SEQ ID NO: 11712 - DNA, 247 bp, Glycine max
  Clone ID: jC-gmfl02220132ah02a1
attttagtttcaaaaaaattaattaactcaagcatgctcaaagccattgccatggggggggccaatgaatatttttctttcccacaaaaaattcatccacggacctttctctgcgttagttctcacctgttcttatacaaaatagtctaaactatcccagaaatatggccctggatgttgcttgctaaaagtggcatacggctgcactttaaatgaaaacacgtgccgttattcaaaagagtgcatc

SEQ ID NO: 11713 - DNA, 352 bp, Glycine max
  Clone ID: jC-gmfl02220132ah02d1
gcgccctttgatgctacatttcaactagattttttgcttttttactttggggacaccggaaaaggggaccgggggcacgctgaagaactgcatgaaataatcagggttggagctatgggactgaagctgcatgaggactggggaactacacccggctgcaggatactagtgttcgacagttgcagacctacatgatatccaggttaacatacatactgactccttagacgaatctggatttgttgaacatacaattgctgcatttaaaggaagaactattcatactgaccacagagaaagagctggtggtggccatgctccagatatcataaaagtatgtggagagaagaat

SEQ ID NO: 11714 - DNA, 382 bp, Glycine max
  unsure (1)..(382): unsure at all n locations
  Clone ID: jC-gmfl02220132ah03a1
gaagaaatgggttccaaggcgaagaagaagggttcaccggaggacattctggaaaccctaggagacttcacgagcaaagagaactgggacaacttcttcaccctccgcggcgattccttcgagtggtacgccgaatggccccatctcagggacccactcctctccctcctcaaaaccatccctctccctctcccgcttcagctcctcgtccccggctgcggcaactcccgcctctccgagcacctctacgacgccggccacaccgccatcaccaacatcgacttctccaaggtcgtcatcggagacatgctccgccgcaacgtccgcgaccgcccnctcatgcgatggcgcgttatggacatgaccgtcatgcagttcgagg

SEQ ID NO: 11715 - DNA, 474 bp, Glycine max
  Clone ID: jC-gmfl02220132ah03d1
ccccaaaacccaaaaaaagattaaaaaggaacccaaaaaaaaaaaaaaacccctcccccccccaaaaaactcaaaaaggcccccccaaaaggccattcaattcccccccacaaaattttccccaaaaaaaacccccccgggataccttaaccccgaaattccccccgggaagggtccccaaaaaaccaaccccctaaaccggggcaccaacccccccttaaaaaaaagggggaaaccccccccaaatttccccccccctttttaaccccccccaccccagaccccccaattaaaggccaacccttgggggaaaacccccccccccttagaaaaacccggctttcccctcacccccccaaaaggccccggccccaaaaacaatccccggggggaaacccaggtccccttaaaacccggggccctttttgcccaccaaaaagggtcgccccccccccgggggttcaccccccccca

SEQ ID NO: 11716 - DNA, 398 bp, Glycine max
  Clone ID: jC-gmfl02220132ah04a1
cccaattcttccccctccacccacccagcatatctctctattcctatttattagcacccctcacattaccttgtgtcaccaactactttgactcctttaccataccattacaataattatcaaacctaaccagtaaaaatggtgaccgtggaggaaatccgcaacgctcagcgttcccatggacccgccaccatcttggccttcggcaccgccacgccgtccaactgcgtctcccaagccgattaccctgactactacttccgcattaccaacagcgaacacatgactgatctcaaagaaaagttcaagcgcatgtgtgaaaagtccatgataaagaagcgatacatgcacctgacggaggagtttctgaagagaacccgaacatgtgcgagtacatg

SEQ ID NO: 11717 - DNA, 555 bp, Glycine max
  unsure (1)..(555): unsure at all n locations
  Clone ID: jC-gmfl02220132ah04d1
caataacaaacacacgatcttgttcatattaaattattcttgtacaacattatgctacgataaatccacaagtgaaactagtaataataacaaactttccctggtatttccgagggttccttattgatcactcttaaattcactagtcaccgcatcagcatgatttatccctccaagggaacactgtgaagaacaacggtctcaacggttagacccggcccgaatccgaatagcaccccccactctaacccttctccagtggtactcttcccttcctccttagacttcttcctcatttcatccagaatgaacaaaacacacgcgcttgacatgtttccgtactcactcagcacatgccgggtggactggagtttctccggcttgagccggagcttctcctcgacttgatcgaggatcgcgggaccaccgggatgtgcgatccagaagatagagttccagtcgctgatcccgatgggctcaaaagcttcaacangactcttctcaatgttcttcgagatgatcccgggcacatctttcaagaggtggaacgtgagt

SEQ ID NO: 11718 - DNA, 474 bp, Glycine max
  Clone ID: jC-gmfl02220132ah05a1
aaaatcaaaagagtctctcggagagggaagaaggttgttgatgaaagtgaagaaaaggagttaaagggcgattgggtggtcagaaaccagaacaagaacaagaaacctaaacgattgaatcttgatcagagaatttcattaaagaataacaaaagtggggacgaagtcattccaactcgaaagaaaagaaatgttgggaacaaaattgagaagattgaagaacttattcgggaatattcagtatcaactgattttgtcagtatggattggaaaagaatgagaatacctcccgttctttcttcttcagagcatgcttggttggtcaaattgatgcaacctatgaaggcactgcttcaagtgaaagaagatttacagcaggagttgacatgagaacctgcagatggtgaactagctgatgcaacaaacatgagcattacacatgtaaggaaaagcatagatggttggtcaagctgc

SEQ ID NO: 11719 - DNA, 615 bp, Glycine max
  unsure (1)..(615): unsure at all n locations
  Clone ID: jC-gmfl02220132ah05d1
actatgtaacaagcataagcgcttatatactttgtgcaatgtcaagtatatcatatacaaattacatgagtatgattatgatagacggtatttaaatgaccagtaatacaaatcatcagtatactatataactgggtaaggtgtttatatacattagtcgtttatacaacataacggcgaagataatccaatctagctgaatgcttgagcttcataagagccttgacttcgtgctttctaaccatttccctagatatattcaagttcccagcaatttctcccaatgttctgtcacccttgccatcaagtccaaatctctgtctgatcaccaagctctccttcggcttcagggaatcaagcacatcatcaagagcaagccttagtagagcaggttgtttcctattatcaccattaacaccatcatcatcaacgatcccattaatgaactcctcttgtgtggctgtatgtctcgagttcagagaaagaatggattttgatgccttaattacgtcatggtatctctcaggggatatatgaactctttctattatttcttgctctgttggtgacctctngagctcaaatgttaactcagttttagctttctgaatttct

SEQ ID NO: 11720 - DNA, 546 bp, Glycine max
  Clone ID: jC-gmfl02220132ah06a1
agaagatggtgtccttgaagcttcagaagcgcctcgccgctagcgtcctaaagtgcggcaagggcaaggtctggcttgatccaaatgaagtcaatgaaatctccatggccaattctcgacaaaacataaggaagttggttaaggatgggtttattatcaggaagccgactaagattcactctcgctcccgtgctcgtcgaatgaaggaggccaagagaaaggggcgtcactctggttatggtaagcgtaagggtacaagggaggcaaggcttcccaccaaaatcctttggatgaggaggatgcgtgtcctcaggcgcttgcttcgcaagtacagggaatcaaagaagattgacaagcacatgtaccatgacatgtacatgaaggtgaaaggttatgttttcaagaacaagagagtcttgatggagagcatacacaagtccaaggctgagaaggcaagagaaaagacattgtctgaccagtttgaggcgaagcgtgccaagaacaaggctagcagggagaggaaacaatgctcgagggaggagcgct

SEQ ID NO: 11721 - DNA, 575 bp, Glycine max
  Clone ID: jC-gmfl02220132ah06d1
gacaaataaatcttatttttccattgataataccatggaaaatttcatcagtaatgcatatcataaaaaaaatatccgataaattctatgttagctatataaatgacaaacataggcagagtaactaaaagactaaaaccaacagaaagagacgtgacaaaaattacttgagcacggtaactgaagatgcccacatagataaagagccgccatccaccaaatctctgatcacacactcacttcttggatttcttcagtgcttgagctggctgggatgctgctgcaggtgtagtagtttgtgctgctgatggcctctctcctggaccttgggccaagcgctcctccctccgagcatttttcctctccctgctagccttgttcttggcacgcttcgcctcaaactggtcagacaatgtcttttctcttgccttctcagccttggacttgtgtatgctctccatcaagactctcttgttcttgaaaacattacctttcaccttcatgtacatgtcatggtacatgtgcttgtcaatcttctttgattccctgtacttgcgaagcaagcgcctgaggac

SEQ ID NO: 11722 - DNA, 547 bp, Glycine max
  Clone ID: jC-gmfl02220132ah07a1
catatccccccctagctacagagcagccaaaggggaggaataataataagcctatattctaaggccggaaaaataaaaaaggaataacaaaaatgtctggaaaggtaattatctcggctgtttctctcatcctggtggttggagtggccatatgtgtggtggtggccgtcaacaagaagggcgaggatcccacacttcaatctcaacaaaaatcagtaggggttatctgccaaaacactgatgaccagaagctctgccacgaaaccctaagctccgtgaagggcatggacaccgctgatccaaaggcttacatcgccaaggcggtgaaagccaccatggacagcgtgaccagggccttcaacatgagtgataggctcagtaccgagtacggaggcaacgataacggaaccaagatggcccttgatgattgcaaggacctcttgcaatccgctatcgagagcctccaactcagcattgacatggttcacaacatcatcttgcaggccgtgcataacccacaggctgacttcaagaactggctcagcgc

SEQ ID NO: 11723 - DNA, 491 bp, Glycine max
  Clone ID: jC-gmfl02220132ah07d1
aatcaaagcaattttaaaaattttcattaaaaatatttccggtagacctccaaagataaatacaaagaataacaaattgtctacggactatgaccctcatcatcacactctctaacagtactcaattgatgatgcatggatatgtgtttgtgtaatttcaattaagccttcatgaagctaagtgcgtgaggaacacggagagctttcaaccagtcgcttccaccgttggctccagcctgtaggaactgggcaggggtgaattgggtagcttcttcgcggctaataagaccacggtaacccttccacttgatccttccgttaacgttagcaccaggtccatcgttgttgtattcagcatagtacaaggtgtcttcgaagtgttcaccggcccatgggcaccatccttcggggtgaaggaagtcacccacggtggattccatcacaaccgtccttgagaattgcttccatgggctttcaaggtatgacttcac

SEQ ID NO: 11724 - DNA, 363 bp, Glycine max
  Clone ID: jC-gmfl02220132ah08a1
catataccaacctggctacatatctttcatagggtatgaatatttatatgtctatatcataaggccggtacaatcatgcgggtcttacataaatgtcggctaaggaaattatttcgtgtgttcctctcataccgctggttggtgattacatatgtgtggcggtggacgtcaacaagaagggctaggatcctacacgtaaatctgatgataaatatgtctgaggcatgtgacgttacactgatgaccaaatgctgtgccagtaatccacaagatacgggaagggcttgtacgccgctgatccaaaagattacatagtcaaggcggtgtaagccaccatggacagggtgaccagtgccctcatca

SEQ ID NO: 11725 - DNA, 407 bp, Glycine max
  Clone ID: jC-gmfl02220132ah08d1
gaaaaaaaagaatttttaaaaattattattaaacatatttgcggaaggccttgacagatgaatacaaagtataacagaattgtgtacaggctatgaccttgaacatcacactcaatcgcagtactgaaatgatgatgccttggatttgtgattgtgtattttcgaccaagcctttatgaacctaagcacgtgcggcacacggagagcttgcaagcagactcttacaccggtgtctccagcctgtaagatctgaacagggatgtattgcagaagctcttatgaggctaacatgacctcaagtgtcccttccgatagagcgttacgttcacgatatcaccagttacattgacgcagtatgaagcattgaactatgcgtctttgaacggttcacctgcccatgggcacca

SEQ ID NO: 11726 - DNA, 471 bp, Glycine max
  Clone ID: jC-gmfl02220132ah09a1
gagaaacaatactcatctttattacagggttgtgtgaactgaagagggagggtactggtttgcggaggcagtgacacttctgcaagcctagaatcctctctcctagttttttgtgaaaacagatagtgtggtgcttttggaggatccttttctcaaagcttgcatgtaacactatctacattttggtgatcagttgaagtgtggaaaaaatcttaagctaaaggcaatttgggaagctggaacaatgggttctgtttgttgttgtttgagttttgatgattttgaagattatgtaaatccaaatagtcctgtatataggaactgtgtgtgtctcagttgcttgatacagaaccctttgattgtggtattcttcaatattccgtagaggggatgcacattcaattccttcatctattcaaggggcagcatctataacttcagcagcatcactcgataattctctatctgaca

SEQ ID NO: 11727 - DNA, 630 bp, Glycine max
  Clone ID: jC-gmfl02220132ah09d1
catcattacaaagtttccatctaaaattagatattctttgtttcttcacggttttggacatgcggaaatttttaaacacaaaaacaagtgggattagaatgaactcacaacaatggttaaggaaacttttcatacttactatacatgacagacacttaatatgtagtattcacaatgtctataagcttatattcttccatgcctcagttgctgacttcatccacaacacagaccttgtaatcaagtgaaagtcgtttcatcgaataccatcacctttccacagacaggacagttgtcacttctctccatccactcataaatgcaaccaaggtgaaaatgatgagagcattttgtcattatctttggattctctttagagtattcttcaagacaagttggacagacatcctcctcctctgatgatgcatagacaagaccaactccagttgaatattttgttgattgaagtcttagtgaggacttaaaacggtattcctttgatccagcttcacaggcactttccttccattggtctcctgaatttaaggattctggatccacatctgcattacttttaaaggttctgttcctcatttgaatgacttgaacccttttaacgccttgaaacta

SEQ ID NO: 11728 - DNA, 214 bp, Glycine max
  Clone ID: jC-gmfl02220132ah10a1
ggaatatcatttcccttcaaatccaaaatacttcgacatcagctgctgaaatgccgctgtctctcagtgatttttgtatatatagttgtaaatgttgtacgtatacaattcatttctttcaattctggggtgatttgcctccatgtaactaataatttgtaaatttggattgtagatgttcatatttgattcatagcacttgctttgacccttt

SEQ ID NO: 11729 - DNA, 214 bp, Glycine max
  Clone ID: jC-gmfl02220132ah10d1
aaagggtcaaagcatgtgctatgaatcaaatatgaacatctacaatccagatttacaaattattagttacatggaggcaaatcaccccagaattgaaagaaatgaattgtatacgtacaacatttacaactatatatacaaaaatcactgagagacagcggcatttcagcagctgatgtcgaagtattttggatttgaagggaaatgatattcc

SEQ ID NO: 11730 - DNA, 374 bp, Glycine max
  Clone ID: jC-gmfl02220132ah11a1
ggtcaatacaggcaataggatattactttgactacaaagaatgtcacaggtgagtccgtgggagattaccctatgagaagttgaaaccaaacccagatatgtggaacctcttgctgagcctaccctatgagagacgtggaaagttgtacatgatcaatagagttgagcaatgatggtagatgggtaatgagatgagggagaggctgcaggtctgaatctctaaactgacatgtgtggcagaactatcatttgtcgatcataaattgcatacaatggcgcaagaccctactacctacatgaactgcatagaatctcctgagaccttatttcggtgtttcatgctgagatcttcacactctcagacagagtccatg

SEQ ID NO: 11731 - DNA, 541 bp, Glycine max
  Clone ID: jC-gmfl02220132ah12a1
ccaaaaccatgaaacattttcttctctttctcatcacattctccttcctctgccaaacacacctactcatacttctctctgccacaacaaccctgcccctccaactcgttgctctcctctccataaaatcatccctcctagaccctctcaataacctccatgactgggacccctccccctcccccaccttgtccaactccaatccccaacaccccatatggtgttcctggagagccatcacatgccaccccaaaacatcacaaatcaccaccctagacctctcccacctcaatctctccggcactatctgcccccaaatccgccacctttccaccttaaaccaccttaacctcagtggaaatgacttcaccgggagtttccaatacgccattttcgaactaacagaactgagaacactagacatcagccacaactccttcaattcaacctttccaccgggtatatcataactcagattcctcaggcacttcaacgcctacagcaacagcttcaccggacctctccccaagagttaaccacc

SEQ ID NO: 11732 - DNA, 414 bp, Glycine max
  Clone ID: jC-gmfl02220133a01d1
acaacatcaacccaatttgctatttttttgcgtattcctaaccttacatcaagaattgaggaacatgacaattatggtcctgcaacatccataaccaccatgtggcatacaatcaggatgcaaacttattacctgcacttgaatactattgaacataatgggttttctgtcattgaagaaccacctttgtcatattcaccacaggaatgtggacttggacacctgacactatacagtatgttactgagagagaagatattttcaacggatacgtgttatcgcaaatcaaatgatctatcaaggatgacatctaaataactaaagaaatggggatcacgaaaggggatcaaactaaaggatcttgatatccaagaggaagagattgatatctgtgtacatcttcatgccaaaact

SEQ ID NO: 11733 - DNA, 344 bp, Glycine max
  Clone ID: jC-gmfl02220133a02d1
gccggcaatgcatgacaccctctgctttgggtttttctccactactaattgggctaaaaaagacataataagggcgtgatcaccatgcttaatacagggggaaaaacactaaaaaaaagaaagttgctttaaagttcagaccttggcgaaaactgcataaggagaacaatatgctctacaaacataaatactaactttacgtctgaacacaccttcagaaatgtccctgaactaattgaactcgaagttttatcatcataattcggttccacataagcaagggaagggatccaaatcgtcactgccacttcagggggttaaattcatgtgaaaatttcttctac

SEQ ID NO: 11734 - DNA, 407 bp, Glycine max
  Clone ID: jC-gmfl02220133a03d1
actcccttttttttataatatattgctaggttatactcagctatggtgacaaactcccgggtgagtcatctattaaagtggaggctctccaacgtctcctatacaatgtccatatttctaacaagaacacaaagcccacatactcacttgtacgatgttaactcgtaaagagggaagacaccaatgtgtctgagatagcgattacgtatgactataatatcatttgtggcagatcctctcaataggctaaaactgagatcataatatctggatgtaactgttctttctgcagctctataggtggaactgcaatcgtgatattcacgcgtacctcaactaaagattaactccacttccatttcgttaccaaacctgaacttgcactttaaggattcacaggaccacga

SEQ ID NO: 11735 - DNA, 379 bp, Glycine max
  Clone ID: jC-gmfl02220133a04d1
ccagaaaattatcatgaatttcagaaaacgccagggatgcgactaaaaaaaaaaagctacaaccaacaactcgcaaatagaaccacgaaattatagctaattagctaattatccattaaacactgtcagagcaatccgaaaggaaaaaaagagaaaaaacatagccaactccgttccgcatgatataaaagtttaatcaacctcctccattttgctgccctgaggatcagtttcagcctcctcctccagtgggggcatataagcatcagcttcagctgcatcctcggcgatgctcagtccaagcttcaacattgtggggatcctgtttccaaaagtgttgggttcgtcaaggctgaaaccacaagtgagaagagcagtc

SEQ ID NO: 11736 - DNA, 361 bp, Glycine max
  Clone ID: jC-gmfl02220133a05d1
atcaaattcattttggaccaactttcctaattgcttgggcgcggtatatttttgcgaacgtgtacatattcttattgagactggaatctccattagaacatcaatgcctgtcatccatttgggatgctctccctttaaaaggaaaaaaatgatgttacattacttctaccagataatgaaacaaattaatttcttgcactttaagctttcacctgcatatcttagacgtccttaagggtaaggtatatatgcggaaggaggacaagtatttgccaatgtccaattaaagacttgcaactatcgaactctgactgcatctcaacatagagtcaacctaccatgttactctattgctagtgtt

SEQ ID NO: 11737 - DNA, 288 bp, Glycine max
  Clone ID: jC-gmfl02220133a06d1
gtatactgagccatcacaaacaaattttcactcttcatttacatttaacccgcacccaaacccttcggccgattgttcctttgtgcgtttcaaatgattgccggggaccgtttgttggaaaccttgggcagaatctggaacatcggaaccgggtccttttttttggctgttaattgaccgctaagccttaggcgtgaatttttggaatccgtgaaaccgaaaggggagcctcacgaggaactagaaagcgtgcattcccctggccgatatgcccaagctgggggcaag

SEQ ID NO: 11738 - DNA, 372 bp, Glycine max
  Clone ID: jC-gmfl02220133a07d1
ttttgttttttttttagcagtagattgctgatcattgttgagctactataatagcttgaattgctttttatgggtatcaagggtacgacatttggcagtcaacacgagatgactgataatcagcagcgagacattgttctctgaatgaagagagaacctggtttgaaaggatgaagatgacatcggactatagtagacggaactataatagggcgctatcacaaggatagtacaacactgaaccagtcactcaattattcgagaaggaaagtagaggcgattgacagtgcaggacatcctgcagggtgacgactgtcctcttatgctgctttggctagacgcttttcttcctccattctggctttgatgaac

SEQ ID NO: 11739 - DNA, 106 bp, Glycine max
  Clone ID: jC-gmfl02220133a08d1
agccctttgagttttttcttttcttattttcttattctttctctttagttctcttaccttttttattctgaacagcgtttcgatcgggaaacccatcttcaaacaa

SEQ ID NO: 11740 - DNA, 547 bp, Glycine max
  Clone ID: jC-gmfl02220133a09a1
atctagctcaaatagcatggcttccaatctgattagagtgagcacaagcttggttctggtagttttagtagctctcacagttcaaattttctacatttcacccatagatccagttttgctggatataaaacctgctccttcaaccaaagacaatcaattacagaatatcattaagcttggagaaggacttttgaaggaaccagaagatgttgttgtagataaagaagggactctctatacagctactcgagatggttggattaaaagattgcgcaggaataatggaaaatgggagaattggaagcatatagatagtcatactttgctaggaatcgcaacagcaaaagaaggtggtctcattgtttgtgatacttccaagggtttgctcaaggttacagaagaagatggttttagtgttcttgtttcacacgtaaatggttctcagttaaggtttgcagacgatgtgatagaaggctcaaacgggaatgtatattttagtgttgttagtacaaaatttgatcttcaagattggtatttggatgtgtta

SEQ ID NO: 11741 - DNA, 320 bp, Glycine max
  Clone ID: jC-gmfl02220133a09d1
tgccctttttatttttttttaccagtcaatttttcctttattagtgtgtcagtcaaaaacagtatactagttctaggactaacaaaatgtgaacagagaatatgcatcatggaacactattctgctacatgtgcttggtgtaaatcatacctatgcatcacgggatgcttctttcgcttgacccaagctgaggctcacgttggttcaaggaggggtaaacgtgactattgtatgcactatacattgggattcttgcaacagaggtggaattaagactaccaaggttaagggggtcctgaaactccacaggtgtagtcaca

SEQ ID NO: 11742 - DNA, 579 bp, Glycine max
  Clone ID: jC-gmfl02220133a10a1
aaatacttccagctctgttgtatctacttctaactcacaacctgtggctgtgcctccagtggtcccaacattgccagctgtggagagtttgccggtagtggtacagcaagttaaagagataaccccacccgccaaacgtggtcgtggaagacctaaaagaataacttcagataagtcaccagctgtggtgatctctccagtaacttctggaactgttgaagtagacacgcagttacagaaaggaattgggtctggacatttagcatcatcaactcctgattctgttgctcattctgctgaagttgtaggtgtgaatgcacccgtgcaacagtctgatccgggagtttctcctaactcacagcctgtcattcctatgccttctattccaccaaattctcaggtagctgctgttcctgtttctgtacctattcaagcaagaggacaagggaggaaaagtcatggtggtgaaggaattagacgtagagggaagaagcaggtcatgacttcatctccaatcccctgctggttctgtgttcctgatctaaggttaatgagaaatgggaagatacattgtcagtc

SEQ ID NO: 11743 - DNA, 206 bp, Glycine max
  Clone ID: jC-gmfl02220133a10d1
tgcccttttttcttttttttctggcgcttttttttctatctgactcacgactaactactccacagggttaccggctctgcaaggctaggattggagggacattcggagtgactttacccaacagtgaatctcctgatgaattctgggcctgaggactcatcttaggatccctgaccagaacagcctcaggaacaacaggtatcact

SEQ ID NO: 11744 - DNA, 587 bp, Glycine max
  Clone ID: jC-gmfl02220133a11a1
tacaaaacggaaagacaatctggtgaaacagaaagaagcactagtggcagtcatgccacaactagtgaacctgggaaatctgggcataattctttgacacagcaagagaagaaacctattaggccgttgtccccctggattactgatatattgttggcttcaccagttggtattagaagtgactatttccgatggtgcagtggtgttatgggtaaatatgctgcaggagaactgaagcctccatcaaccgcttcttcccgtggttctgggaagcatcctcaacttgtgccttcaactccaagatgggctgttgccaatggtgctggtgttatattgagtgtttgtgatgatgaagttgctcgcaatgagactactactttaacagcagctgctgtccctgcacttttgcttcctcctccaacgacagctttggatgagcatcttgttgctggattaccagctctggaaccatatgctcgtttatttcatagatattatgcaattgctactccaagtgctacacaaagacttcttcttggacttctagaagcacccccatcgtgggcttcagatgcacttgatgctgt

SEQ ID NO: 11745 - DNA, 306 bp, Glycine max
  Clone ID: jC-gmfl02220133a11d1
atgcccttttttttttttttttttttttttttttaatccaaacaataggaaatgacttccattacaagctaaatcaacataagcataacacaatatgagacaatatcgaaaaggacctggttacagcgtgtctcggtactgtacaagacatggctatcgagagcagactcacaagcaagttcaaggtgaaacttagtttagctacagtacatacatgatacaaaatgagctatctataaacatactagaattatgactgcagctcttttgaacaggactagcagaattatgctgatttgcaaaccc

SEQ ID NO: 11746 - DNA, 568 bp, Glycine max
  Clone ID: jC-gmfl02220133a12a1
gtgtcgcagcaaaaccaaaccacatattaacttgtttgctctaagtcatggctctgatcttgcacgcaaccaaagcaaacaagaatgctttcaagactctgattgcggcagagtacagtggcgtccaagtggaattggcccctaatttcgagatgggtgtctctaatagaactcctgaattccttaaaatgaatcccataggaaaggttcctgtcttggaaacgcccgatggtccagtctttgagagcaatgccattgctcgttacgttgctcgactcaagggtgacaacgctttgttctcatcttctgccattgataatgcccacattgaccagtggattgacttttcatccttggagatcgatgctaatattatgaaattatacctaccaagacttggatttgccccataccttcctccagttgaggagggtgcaaattctgcattgaagagagcatttgaggccttgaacactcatcttgcttccaatacatacctggttggccattctgttacccttgctgatatcataacgacgtgcaacttgtatttaggattcagccagct

SEQ ID NO: 11747 - DNA, 290 bp, Glycine max
  Clone ID: jC-gmfl02220133a12d1
tttgtttttttttttttttttttttttttattttgtttgttttaatttatggttttgtttgttgatgtttttcatagtttttttattagttgtatgagtggggaggagagagaaaacactggcccccacgcgggaaaaaagaatggtcacccgaggggtgactacaaaagaagaccaggggggctcaaaaagaagcccctaagaaagagggaagcgaagggaccgatagaaggcccagaaaaagtgaggaatgcgaaagctggcaaaaaagctggggccacggccgaaaa

SEQ ID NO: 11748 - DNA, 386 bp, Glycine max
  Clone ID: jC-gmfl02220133b02d1
ttaattttcttttttatttttttggctttatgcataaccttacatgacgaatggagtggggcgcgatgttgctcccggtccattgataacggactttgtaatggtcgaaggtccatgcttattacaaggtgaaaaacccactgaacataaagggttcctttgcattgatccattgccgaattctgaataaacaggaccatggggtcttcaaccatagatccatactctactgaaaatcacacctaaaattttgtcacagcactaattttactcgaagttttagccttttcattggggtcctcctgtgcaacttgaaagggccaaatcattactgccgatgaagctagaaaattttgttttcaaatttgttttaactcacctttaac

SEQ ID NO: 11749 - DNA, 490 bp, Glycine max
  Clone ID: jC-gmfl02220133b03d1
tttctttttcttttttttcttttcttttacatacgggacaccattctcttgggggcgggttttattttaaaggcctaacaattacatttaaactataaaaatccctgatttatgatgacctgtgtgacactaatctttcttattggcctgcccaaactcaaaaacatttatggtcaccaacttcttcaaatacatcgccaaagctaaattaaaagaatttaaccagtcagtatcaacatcgatatcccattttcataaaaaacggggggttctttacatggctggtttgccacatctaatttttgcacatattccttcattccatgacatccctgatgatactttacttccacacaactttgacttacccttccaaaagagtaccaaagtccctccttactttaagccctaaaaaaaatgttattttcaatcatttacggtgacttaccattctttcaatacacttcaagccttttttttttttttttaa

SEQ ID NO: 11750 - DNA, 494 bp, Glycine max
  unsure (1)..(494): unsure at all n locations
  Clone ID: jC-gmfl02220133b04d1
atgcgtggattgagtcanatacggaaaacggggtaccgggccccccctctaggccagctgactagtactccgccgcccttttttttctttatccttttttttttttttttaacgagangggccaacactgagcctagggttgatattaaatgcaaccagacttgattaccaatcattaaccgagctgactcctcaatattatgctatgcacaattaacacatggttgccgccactaatcaggtgattaacatgacattattttaatgtgtgtttttgcacatgatcaatctgtttacttgaacagaaatcgtactgctaaggccatattggaccttgttcactctgctgagaataactcattatgctatgatcatcttgcattcaagacatttggggtgaatggatatggaattgattccatggctagtttttttctggattatggctttacacaaagggaagagttgaggtttccaatcaaaatgttgagggc

SEQ ID NO: 11751 - DNA, 452 bp, Glycine max
  Clone ID: jC-gmfl02220133b05d1
tttttattttttttttttaaaaacaattggggaatttttattaccacgacgaggactgaccatgtatccggccgcacaggtcatattgtataaaccgtctctacactcaacacatgcttacagtctcgtcctctcacttcctttttttgctggatcagagagtacatatttcaatttccacaacatagagaattttaacgtttagtcataacccatgaatgctatagcatgcaaactgatgaaaattcattccgatattgtataacccacaattcattctgataagaaatctcttctatttagaggatgcacagctgcagcaatgttctaccgcaggttgaatttttttgcaattagtggccggacatcatcaacaccaaccaagctcttcaagaacggaagtgataatagcagctcttgatctgaacgatcatcagaccaactctcgaatg

SEQ ID NO: 11752 - DNA, 390 bp, Glycine max
  Clone ID: jC-gmfl02220133b06d1
tgcccttgtttttttttttttatagttttctaatatccatatttagtgatttccccctatgggttacatttatcgatatgaacaattctaattgttcgaattattgggaaacatttctacttatcaatactcaaccttacccttcctttaccgaacattcaaattacaactcccgaattatccgcaaactgatctattaacaacagcctatctagactacccggtgcaaattccccgcaacaaaactgcaacgcgtgagcaagcaccgtgcgcaccttcaaaacatacactgttggggactgtctacatactactaaagccttaacttacagaacagaccactcggcacgaattgtcccatttgtcgcagtgttaactgcaacacgaccc

SEQ ID NO: 11753 - DNA, 401 bp, Glycine max
  Clone ID: jC-gmfl02220133b07d1
tgccctttttttttttttttttttttttttttttttaatcaataagaagataattcttcataattaatcagccgaaaaaaatcaatcattaaggggctcactattgcaacatttcagtcacaacttcatcaaccaatgaattaaatattcggtccacaacctcagatccgaggtcagaagcatcaacctaatactctaaccatcttgtatataggcagctcatgtccttgaccacaagctcatctaccatagagtctcccattccactccaatctgagatctccttgcacacatctgacgacaaccatgcttggctttgcaccatctcaaaccctcggatccacatttaagatcctagccctacataacgcctgcatgtcaaatgcagacattcactcaca

SEQ ID NO: 11754 - DNA, 135 bp, Glycine max
  Clone ID: jC-gmfl02220133b08d1
tttgaggtgttttttgctgtttctgtttcttgttttatttgttgctttttttattgttttttctggaagtattgatgttttgatgccaccacaagagagaccctccaccagatactattgggtgcaggaccaaag

SEQ ID NO: 11755 - DNA, 540 bp, Glycine max
  unsure (1)..(540): unsure at all n locations
  Clone ID: jC-gmfl02220133b09a1
aaaaccttgttctctttttgtggttcatttctctcttccagatgccacttgccgttcgtcaccctcacgattttctcaggaaaaacccatctaaccagtaccagaccataatccctcactctcccaacatgaatcctaataagtctcatcggacttcccgaaaccgtaagaagcggcccgatccaagcccacaaggcgttgtcagcccagcccggctcacattatccccgaaaccccaagtcaaaaacaagccgcagcagcaactcgtcatgggtcaggtcaaaatactcaaacgcggccaacttttgacccaaacgacgccggatccaccgccgcagacggaaatcgtcgatcagaagttaactccgcagacggaaaccgtcgaaaaaaaggacttaacttcaatcgtagatggtttatatgcaggctattcgatgttggtgatgtctccacctcctagctccgttccgttaccggctttcatcactaagaagattgcggttgttagtgacgccacgagcgactngcggaaaatgttac

SEQ ID NO: 11756 - DNA, 418 bp, Glycine max
  Clone ID: jC-gmfl02220133b09d1
gctgcccttttaccttgttctctttttgtggttcattcatctatctctgatgccacttgccgtccttaaccctaccgtttctggaatgccctacccatctgaccagttccagaccataatcgctaactctcgcgacatgaaccctaatctgtctcatcggagtccccgaatccggatgatgacgaaccggcccatgtccactaagcgctgtcagcgcatcccgccgctcttcatacgcctatcccttagtcctaatcatgcggctgccacagctctgaatgggtcaggtccaaagactaatccgcgggctaccttggacgcacgggacgccggatccagcgccgaacactgagagcctcgctctggagacaagtccgtagacgggaaccgacgagagaaaagactgcacttcaatggc

SEQ ID NO: 11757 - DNA, 590 bp, Glycine max
  unsure (1)..(590): unsure at all n locations
  Clone ID: jC-gmfl02220133b10a1
aaaaccttgttctctttttgtggttcatttctctcttccagatgccacttgccgttggtcaccctcacgattttctcaggaaaaacccatctaaccagtaccagaccataatccctcactctcccaacatgaatcctaataagtctcatcggacttcccgaaaccgtaagaagcggcccgatccaagcccacaaggcgttgtcagcccagcccggctcacattatccccgaaaccccaagtcaaaaacaagccgcagcagcaactcgtcatgggtcaggtcaaaatactcaaacgcggccaacttttgacccaaacgacgccggatccaccgccgcagacggaaatcgtcgatcagaagttaactccgcagacggaaaccgtcgaaaaaaaggacttaacttcaatcgtagatggtttatatgcaggctattcgatgttggtgatgtctccacctcctagctccgttccgttaccggctntcatcactaagaagattgcggttgttagtgacgccacgagcgactngcggaaaatgttacggcttgattttccctaatcctgtggcggnttgtgaatgaacgaggatttg

SEQ ID NO: 11758 - DNA, 585 bp, Glycine max
  unsure (1)..(585): unsure at all n locations
  Clone ID: jC-gmfl02220133b11a1
ttctgcttctgcgtctttaatctaagcaaaacgacaacgtgtcattacttgcaacgcgaatccccaaatgcaaacataattcatttacatctttctttcttctttctgcaaatacttccatttcctgatttcctcaaaacaacaacacgtttaattttcatctccttccttttctatcctattcctctccctattattattattgttacatctttttcttcttcctctgatacaaagacaccatgagaggacaggaagatcagcaatctagggttttctgtgagctctcggctctggtcttcaaccttctccggtcaccgtcgatcgtgccggagcctccggcgaggcgttcgccggcgggggcgcagattactccggcggggttcgcgtcgctactgctagggatttcggtggcgctgatgctgtgtggatcggtgactttcttcatcgggttcatgctgatgccgtgggttctcggattggttatggtgttttacgtcgctggcgtcgtttcctctctctccgttctcgggcgttctattctctgttacgctacgccacgtaaggatcntcctggctaaatgg

SEQ ID NO: 11759 - DNA, 293 bp, Glycine max
  unsure (1)..(293): unsure at all n locations
  Clone ID: jC-gmfl02220133b11d1
attgaatatctgaagcctaatattcaaattttacttaagttatagttaagacaattacagcatttgtcatcaacagactgttgctgggtacaagtcctcaattcttggagctaggctatttgtaaataacaagagaagccatatccacaaaagcctgatatacatgactcctgcttctagtgtgataagntgagcaatcttcatagttctatgggcagcatgagcaggctggcacagaaccagtatagtactggtcaatgcgatcattgatctctcgatataagtctccactc

SEQ ID NO: 11760 - DNA, 599 bp, Glycine max
  unsure (1)..(599): unsure at all n locations
  Clone ID: jC-gmfl02220133b12a1
ttctgcttctgcgtctttaatctaagcaaaacgacaacgtgtcattacttgcaacgcgaatccccaaatgcaaacataattcatttacatctttctttcttctttctgcaaatacttccatttcctgatttcctcaaaacaacaacacgtttaattttcatctccttccttttctatcctattcctctccctattattattattgttacatctttttcttcttcctctgatacaaagacaccatgagaggacaggaagatcagcaatctagggttttctgtgagctctcggctctggtcttcaaccttctccggtcaccgtcgatcgtgccggagcctccggcgaggcgttcgccggcgggggcgcagattactccggcggggttcgcgtcgctactgctagggatttcggtggcgctgatgctgtgtggatcggtgactttcttcatcgggttcatgctgatgccgtgggttctcggattggttatggtgttttacgtcgctggcgtcgtttcctctctctccngttctcggcgttctattctctgttacgctacgccacgtaaggatctccctggctaaattgggcaaatctaccgt

SEQ ID NO: 11761 - DNA, 291 bp, Glycine max
  Clone ID: jC-gmfl02220133b12d1
tgccctttttgtttttttttaaagaatatcagaagcctaaaatccaaattttacttacgttatagttaagacaattccagcatttgacatcaacagacagttgctgggttcatgtcctcaattcttggtgctggctatctgtaaataacaagagaagccatatccacaaaagcctgatatacatgactcctgcttctagagtgataagttgagcaatcttcatcgttctatgggcagcatgagcaggctggcgcagaaccggtgttgtactggccaatgcgatcattgatc

SEQ ID NO: 11762 - DNA, 476 bp, Glycine max
  Clone ID: jC-gmfl02220133c01d1
atgcgatgtactgactcccgatagacgaacaccgacgttaaatgtttcccgactctacctgctactaggtctcgggcgccctcctttttttttttttatttttttggcgacaaaagcacagaatttaaccaaggggcggggacaagatcaattaagaacttatcctgaatgctgctttaatttcaaaataaaaaaaatgttttctcaggagtaagaaatgcaacaatttttgaattgcattactgatgagcctcattcaataatgctataaccgatacttcgtatataacactattcataaattattggtcaccaatatcatcaatggctacttttcaaatgcaacaagttcctcacctacctcatgaatcaggatcaccatgggacagttcttagcgagcacgcccactgacagcaacgtgtgaccccatgcaagttatagtcattcccaaaagatattgtatgcaccccaattg

SEQ ID NO: 11763 - DNA, 430 bp, Glycine max
  Clone ID: jC-gmfl02220133c02d1
aaggggtggatccgatgtccgctgacgaaacaccgaccttaaatacttcccgcctcgaccagctcactagtactcggcctccctttcttttttttttcattttttttttattatacaaacaaaacctgattttctgcgaacattaaatgtctatagccaactataaaaaaaatgtaaaccatttattcatgcttaacacaaaactgaccaaaaataaggctctcaaatccaagattcttccctacttgggccattcaaaatctaccttacacccaaataacattttttttacttgcccagtcattaaaccccattcgacatgaactttcactccccatcataaaaattatcctccgccaaatagatagttgccacccctgcaaccaacttaacctttcttttctaataaatcaacttcttaatggagtac

SEQ ID NO: 11764 - DNA, 371 bp, Glycine max
  Clone ID: jC-gmfl02220133c03d1
tccctttttttttttttttttttttttttatttttatttcttatcttttttttttggccgggcggaaacctataataacatttatataatattttttgattcctcttacttaaaccacttaatactacttcttccaaccagaaaaaatcccccatttattgcctttaaaaaaccacaatgaaaaaggtccgaaaataaattatctaaatctctttctcatatcccacaaacttcatgatgaccctctaaccatcccggtgtctccaacgcactaaatccatttaatacatgttttccccctcactaaatatcatccatcatgcttacaacacaccctctccttaataaaatcttcctacactttttattcc

SEQ ID NO: 11765 - DNA, 447 bp, Glycine max
  Clone ID: jC-gmfl02220133c04d1
atctattatcattccaattcattttattgaggtagtgatattatattcaaatgaaataaaaagatattaaaagatactaattataagaatttgaaagtgaaattataaagttattaaatgattaagcaatttttttctacctgtacctgtaaaaaaaagagtcccatttgttcttgaatagcttccttcaaaaggacttctgcttccccagggaatgtctaggaagaagatatgatttctttgaattgaggtttattcgcgtataagtaagcacgtaactcaacaagaaatttccttacctgtccaatttctaatgaatcaagataaccattcattccattataaatagttattatatgttcttccacgcgaagacgagctgattgggattgtttaagcaactcgagcaaacgttgaccttttgctaattgattttgagtcgcttta

SEQ ID NO: 11766 - DNA, 237 bp, Glycine max
  Clone ID: jC-gmfl02220133c05d1
atgcccttgttttgtttttttcatgaaggaagatttttcttatgactagttgtagtgaacacagtcaacggaaatagtctggaatataaaacagacaagtgtatagcataggcaaatctacaggagagaccttggagatacaaacgagcatagcgtaaatgcacatggcagacctttgattcagatcatgagagatgaacaaaagcattcaaaggcccattggttttcccgacgaac

SEQ ID NO: 11767 - DNA, 377 bp, Glycine max
  unsure (1)..(377): unsure at all n locations
  Clone ID: jC-gmfl02220133c06d1
catgtgatagctggctnctgnatacagcgagctaataattacagggtcgacgatgctcactaggcggagggctgcgcttttttagtctttttttttgttaaaggtatttattccataaatcagtctattataaagcttcaagtcttaaatcatgtggtgacagtatatatgtgcggttgtacaccagataccgaaactgagcccaatagctatctggcacattaaagccattctcaaacttctaaaaggcctatacaccggtccagggcttcctaaaccagaatgaatctgaaagcactcagtaacgggtaatacccagttcttgacagtgcatgctctcatgccaaggcccaattattcacagatcgtcactagct

SEQ ID NO: 11768 - DNA, 257 bp, Glycine max
  Clone ID: jC-gmfl02220133c07d1
aggccatgccctgtgatcttcgctttttttttttttttttttttctttcttctttagattaatttgtcaacttgggctattgcaaggagaataccccgaaattaataatttctatgttgaggagtgctagtgatctgtctatgcagaaccctaatttaggctataacgtcttttcctctcatcagctacaggtgatgggggtgttcggaagagaaggccaaaaccatgggggcatgcatcaaattgcagataagcat

SEQ ID NO: 11769 - DNA, 229 bp, Glycine max
  Clone ID: jC-gmfl02220133c08d1
tgccctttggtttttttctttgttttttttttttcttttctttgttttttggtttgtcatttgttattgggaaaaacttatgttccctaactgtgcgttgccgagggattccagcatgttgtttgttattggatgggttttgaatttgcaccgactggaaccctgaggccggggagtagccaacgatagctcctcaactggtcacttgttccttcctttgatgcaattc

SEQ ID NO: 11770 - DNA, 359 bp, Glycine max
  Clone ID: jC-gmfl02220133c09d1
tttttgttttttgttctttcgcttcacaggcatcaatttggtgtaaaattcaattatttccacatttgttcaagatctcaaggcgataaaagtcatcaatattgtacacttaacagcaactcaaacattgtcagatgaaaaaaaaaactgatgtaacaatcgcgtatgcatacagatcttgaaaagtcatgcgctggtcattgtatttatcattgcccaatgagacggatatggccgcaggctaggatctcatggaaaatttgaacgataaaggctttcagagctgaggctctcttgcatctcagtctcccatgggtccccattttcaagcagcttgtcctggtcatataaaagctgct

SEQ ID NO: 11771 - DNA, 546 bp, Glycine max
  Clone ID: jC-gmfl02220133c11a1
gaaagaacaaaccaagtccaaggaagggactgatgcaacaaagcaaaggcaatcccgggagcaggcaaggaggaaaaagatgtcaagagctcaagatggaatactgaagtacatgctgaaaatgatggaggtttgcaaggcacaagggtttgtttatgggataattcctgagaaggggaagccagtgactggagcatcaaacaatcttcgtgaatggtggaaggacaaggtcaggttctatcgaaatggtcctgctgccatagtgaaatatcaagctgataatgcaatccctggaaagaatgatggatgcaattccattggtccaactccacacaccttgcaagagttacaggatacaaccttgggttctctcttgtcagcacttatgcagcactgtgatccccctcagaggagattcccattagagaagggtgttcctccaccatggtggccaactgggaatgaagaatggtggcctcaaattggtctacctaaagatcaaagccctccatcttacaagaaaccacatgacctaaagaaggcatg

SEQ ID NO: 11772 - DNA, 325 bp, Glycine max
  unsure (1)..(325): unsure at all n locations
  Clone ID: jC-gmfl02220133c11d1
ctttgatagtacgatnctgatgatgatcgctccagagatcgattcctgcgcccacgatgctcactagtcgtcgggctcccgtgtttgttttttcttattacagagtttggactgttgcttcatgtcacaggcgttcttatgtgctggcaaggagcaacatgaggctaacagctaaagacagacttctgaagggcttgctgatggtaacacccgtgagctaggcacccaggattgagtaccacctgaccagtgctgccgagacatcaatgtctgtagcgtcctacacgattacatagtaggagaagggcatgaactggctttagag

SEQ ID NO: 11773 - DNA, 598 bp, Glycine max
  Clone ID: jC-gmfl02220133c12a1
gcaccgctaaacaaaacataaacctttgctaagaaagtttcttccttttttctcttctgctgtttgaatgtgaagacgcagcacagtgatgaagtgaagtgctgcatcaacctcaatgatctcagttttggaccttttggtttggctcaaaaggttgaatttcaaagaaattcttggttgatggttgatgctatgtctcatcagtgtgttctataagaagttggggttttgccatcgctatgtatgtagctagtcattgcatttgagaactgttggggatcttctccaacattgtagaaggttgagaagacattagttggtgggcatggttttgtgttcgagggatttgagctttggatgcagattgaagagggctaactgttaaatccataactcccatcaaggtttttgctttgtgtgtttgtggaaatagcataccctttgagctgctctgtctattttcttctggtgtcttgttctattttctggaaggttgcttcattggacccttgtttgatcttcaacaatgtcagagaagatcatggttcactcaagggttatattttgtgtgatgataattctatgttccttttgagct

SEQ ID NO: 11774 - DNA, 230 bp, Glycine max
  Clone ID: jC-gmfl02220133c12d1
gctgcgcgtgcaccgtttttcttaactttgactttcgctatgattgttatttgattttttctattctgatgtatgcatgtgttgacgctggactgagaggatgtgcagcgctgaatctacctgtatgttccaagcaatggacctgctggtagggcttcctaggatgcatatgccaggaagaggacattgatggaggttggcttggacattaagagagatctactagaagt

SEQ ID NO: 11775 - DNA, 428 bp, Glycine max
  Clone ID: jC-gmfl02220133d01d1
cttccccgtgaaagagcaagccaagtttacattccagggacaggtttttttcttcgttcaattttaacaacaaatggcaccacaaaataaaacttaaggcattaatgatgtttatggataaaccttctttttagtgcctccagaggtcagcataaaacgcaaagcaaccagtctggcacgtgcattggcatttacatgtttgaagcgttcaaggccattaccttacattgttcattcaatgcaagaagttgagcctctttcttgtcaagcagtgcattcaacctgacattctcttccataagtttgtgaacttcagcctctttctgcattttctcaccctctaattgagtagtctttgcaactagcttttcaaacagcctctcaatagtttgaaattgcttatctgaataaagcaaggtttctcttac

SEQ ID NO: 11776 - DNA, 355 bp, Glycine max
  Clone ID: jC-gmfl02220133d02d1
tttctttttttttttctttctcttgaaagagcaaaccaagtccacattcccggcgcaggtttctttcttcttacaatttaaacaacatatggcacccattaataaaacttaaagcctgaattatcgccatgtcctacccccatttccaataccttcccaagtattaataaaactcaaaacacccagtccggcacaagcattgactttaccatggcagaagtgggcccgccccctacctgaccttgctcattcaatgttaaaaaattaccccctatctattgataaggtgcatgcagccaaacattttatccctcaacttctgaaattcagcctctttatggatgtcctcaccctc

SEQ ID NO: 11777 - DNA, 342 bp, Glycine max
  Clone ID: jC-gmfl02220133d03d1
acagagcaaccacaactttttattgtacggcgggaaggcatattttttaaaaatcaagaaagtggtacaacgaatttgatttattttgatgatgaataaaccacaaggagaaaagaaaaataggtgtgaggtctcagcgcctgcactcaacaggaatgccttgtgggaatcgcttaagatcgttgcagtagttatagatcatgaagtacttatgaacccatctcagtttttttctgccataggcatcaagctcgttgctctgccattcagcatcaaataaggaattgtcggaaaactctgtggctttgaaattgcggtagtaggctgtaaagggtgccttgg

SEQ ID NO: 11778 - DNA, 435 bp, Glycine max
  Clone ID: jC-gmfl02220133d04d1
tcctatagtattttttttttacacagcaaccacaactttttattgtccggccagaaggggtattccttaaaaatcatgagcagtggtacaacgaacaggattgtatatagaacctaaataaaccacaaggcgaagagaaaaataggtctgaggtctcagcgcctgcactcaacaggagtgccttgtgggaatcgcttaagatcgtatgcggtagatatagagcatgaagtccttatgaacccatctcaggttttttctgccataggcataaagctcgttgctttgccacgcagactccaagaaggaatgttcgcacaagctctggggtataaaaatgcggtagtgaggatgtaaagggtgccttggaccaatcagctttgaccaaaccacctgtggcggcccagtcattaccgtttcacaggctagaatagaatc

SEQ ID NO: 11779 - DNA, 165 bp, Glycine max
  Clone ID: jC-gmfl02220133d05d1
tattgtgttttttttttattttttttgtttattttttattgagtgttttttttatttacgttttggattattatttttatacaatttatttaatattttaaagattaatctaattgtataataaagcataggggcaaacaccccagtatctggagcggtacaaaa

SEQ ID NO: 11780 - DNA, 306 bp, Glycine max
  Clone ID: jC-gmfl02220133d06d1
ttttgtgttttttttttattttttttgtttattttttattgagtgtttaattgaattacttttttaattattaattatatacatattatttaatattttaaagattaattttatagtataataaagcataaaggcattcactctagtatctgcagcggtacattattccaccaaaaaataaggggggcaactaaaaacatacataggaagtatatataattatttctttataaaatatttttaaaaactaagagtatgatataaaatgaaaatatgatattcttctacttttaaaactttttttaa

SEQ ID NO: 11781 - DNA, 195 bp, Glycine max
  Clone ID: jC-gmfl02220133d07d1
aaaaagttacaagttagggtttcatcaattcaaattttcgtttaacaacgatcttcaacttttttccggcgggcacaatcaaaaggattgccgctactgtttgatatgccgaaggggaaacaaacttgagtactgcctggaaaactgaccttcacaattgtacgggaaaaccttcgagaatcaatatgcctcact

SEQ ID NO: 11782 - DNA, 259 bp, Glycine max
  Clone ID: jC-gmfl02220133d08d1
caccaattcaaattttcgtttgaaaacgatcttcaaccgttttccggggggcactatcaaaaggatcgcctctagtgttcgatatgccccaggggaaccaaccttgagttctgcctttaaatctgcccttgtcacttattcaggaaaaccttccaggagcaatatgcctcactgaaaggatctgctaccttgagggcccccaaagtcttagccgttcatgcgtcaaccttacatcccttcacgctcccaaacatcgccc

SEQ ID NO: 11783 - DNA, 558 bp, Glycine max
  Clone ID: jC-gmfl02220133d09a1
gagaaaagtccaggtgaaacagagagttctggttcaatttcatctctttcagaaagattctctgatgaacaggtatatccaacccaagctggtttttctcctgaagtcacgtctaaggctgcaccgaatgaagaagttagtacccccaaaaaaagtaaagaagaagatacagatgtgaaaattattacagacaaattagctactgctctgctgacaattagtgcaaaagaagacttagtaaagcagcattctaaagttgcagaagaagctgtctcaggctgggagaaggctgaaaatgaagtgtcatctttaaaacaaaagcttgatgctgaaaggaagaagaactcaattctcgaagaccgagttggtcatcttgatggggcactcaaagagtgtatgaggcagcttcgacaagctagagaagtgcaagagcaaaagattgttgaggctgttgtgaatagttctcgtgactgggaatccaaaaaatctgaacttgagaggaaagttgctgaacttgaggctcaacttcaacagttaaagcagatgctgctgcatcaa

SEQ ID NO: 11784 - DNA, 549 bp, Glycine max
  unsure (1)..(549): unsure at all n locations
  Clone ID: jC-gmfl02220133d10a1
tgttttcggacggtataatgagttttttttttatccttgagagctttggtatagtaccctgtcagtgtttcatagatatgtaagaacctggttgcactacacgaacatgagtgaattgcaaaagaagtctctctaggcgtttcagtgaagactggtggcttacagttaatttgtaagagctggttatgagttttgtaaatttatttttgctcatggactgatttaatgcactgtttaattcatttagcatcacctcaagcactgtgattctctgcatctgcactcaatttcttctttgtgttggacaggaacccctcactaaaatttcagaaactagaaatgaagacattagggatgataaatttattagtcctgcaattgatgcacaagatgatgtctctcctaatcgttcaagttctgagactcgagatggaaagcatgctcaagctcgtacagatggtgtgggcaatggttatttggatcctaaatcttccaaaggggataagtggcagaatggggaacttggacattntaaaggtaatgagaaac

SEQ ID NO: 11785 - DNA, 122 bp, Glycine max
  unsure (1)..(122): unsure at all n locations
  Clone ID: jC-gmfl02220133d10d1
atgatgagagctaggctnctgnactgatgccagctccagaatcaattcccgcggcccgacagatgctcactatgtcgtgcggcctcccttgttttttgtcggttttttgagtttttttttta

SEQ ID NO: 11786 - DNA, 543 bp, Glycine max
  Clone ID: jC-gmfl02220133d11a1
aaagatgtttggaatcatcggaggaaacaagggtcacaagataaaggggaacttggtgattatgcgaaagaatgtgttggatatcaacagcattaccagtgttaagggtgtcatcggaaccggcattaacatcattggaggagtcgtcgacaccgttactgctttggcgtcccacatctccatccagctcattagtgccaccaaggctgatggacatgggaaaggaaaagttggaaaggctacaaatttaagaggacaagtgtcgttaccaaccttgggagctggcgaagatgcatacgatgttcattttgaatgggacagtgacttcggaattcccggtgcattttacattaagaacttcatgcaagttgagttctatctcaagtctctaactctcgaagacattccaaaccacggaaccattcacttcgtatgcaactcctgggtttacaactcaaaatcctaccattctgatcgcattttctttgccaacaatacatatcttccaagcgagacaccggctccacttgtcaagtacagaga

SEQ ID NO: 11787 - DNA, 204 bp, Glycine max
  Clone ID: jC-gmfl02220133d11d1
atgcccttttgttgtttgttttttttgtatgcaaacaggatttcttgattaacacttaacaggagacacgagaacattcaagtgccccaaatacataacttaaccatacatagggtgatgacggaaccatattccttatattcactttgatcgaaaaccagggaaaaggctggagcaaccatagagcccctaaatggagatact

SEQ ID NO: 11788 - DNA, 533 bp, Glycine max
  Clone ID: jC-gmfl02220133d12a1
gaaagaacaaaccaagtccaaggaagggactgatgcaacaaagcaaaggcaatcccgggagcaggcaaggaggaaaaagatgtcaagagctcaagatggaatactgaagtacatgctgaaaatgatggaggtttgcaaggcacaagggtttgtttatgggataattcctgagaaggggaagccagtgactggagcatcagacaatcttcgtgaatggtggaaggacaaggtcaggttcgatcgaaatggtcctgctgccatagtgaagtatcaagctgataatgcaatccctggaaagaatgatggatgcaattccattggtccaactccacacaccttgcaagagttacaggatacaaccttgggttctctcttgtcagcacttatgcagcactgtgatccccctcagaggagattcccattagagaagggtgttcctccaccatggtggccaactgggaatgaagaatggtggcctcaaattggtctacctaaagatcaaagccctccaccttacaagataccacatgacc

SEQ ID NO: 11789 - DNA, 296 bp, Glycine max
  Clone ID: jC-gmfl02220133d12d1
attagagagtatgaattgtttatttatgtcacagtcgttcatatgtgatagtaaggaacaacatagggctaacacataaagacacacattaaaagggctacatgatgggaacacccatgatttatgaacccataatatagtaccacctgaccagagctgccgaagcataaaagtatgtaacgacctaaacgattacatgggaagaaaaatgcattaactggctttagagtcaagggactgtcacatagtgcgttttaaagacacaataaaagcccttgatacacgagtatgccctc

SEQ ID NO: 11790 - DNA, 538 bp, Glycine max
  Clone ID: jC-gmfl02220133e01d1
agggctgcattgatgccgctggcaaacccgaccgaatatttcccgcctccaccagctcactagtcatcggcctccctatataattttttgtttatggcctgaatcatgcaatgaaccaattacatggaggggggggcccttatttgataaaaaaaactgttttctcacagatatggattggagttagaaacatgagtacgttgggtttgtaaatgtatccatgactgctttattacaaacatgtttattggagtgacctgtctactagaaacaaacatggggagggatgagctttcctggattcacgatatcgttgagatctaagactgcttttattttttttattggcctcaatgctaccacttcgatgtcttcttgagaatgctcaattgttgcagttacaacaccatgtttaccggtacaagtaacttctaatgacaaagcggcatgaaccataaactgggcgagtgtctctgactcccaccgttgttctatttggttaggatcaaatgaaataaccgtgtggaagttaccatta

SEQ ID NO: 11791 - DNA, 390 bp, Glycine max
  Clone ID: jC-gmfl02220133e02d1
aaggggaaattatggtctcctttattcattatgcgcgagaatgggtgtcgttaattgtataagaatcaagatgaccaatactacatttgtgtagcttaacataaaccacttgatcaatgaaagaaagattagattggcttcattatgtaacaagttgcacaaaaatgtgattagtgtctgattcttaattatctatggctaaaaaggcaagtgtctggatcaacactagtcggttttgaattaagaagtgggtgaagagctttgacaacaatacgcatgtttggcctaaagacagcttgatatggtacacaaagtgctgcaactgctgctaacttagcaatagccttgagtgggtatccattgtatacttggagatccacacattggttc

SEQ ID NO: 11792 - DNA, 447 bp, Glycine max
  Clone ID: jC-gmfl02220133e03d1
tttcttttttttttgtttactttatattttatattagggtttctttcatgggggagtgggtatattcgttctttttggtttaccacaaaaaacactttttaatgggaaaaatttaaagatctggctcccaaagtcaccgacccaaaaaattttgatggcctggggctgatattctatttctttcgggtccatagggctcctaacatgtttttcttcttcctgtgaggcaccgacaccatggcaggacatcaatagcggaattctaaggctccctgtgagcggggggatctggcccaaagccatcttcattttgggaatatagagccagaggggcctgagaaaaaattttccccttaaagatggggttgtcggggggcgcccctcgaaaccctgttagggattttcccttgccctccccctcttttgaaaaatggcggtccacatccc

SEQ ID NO: 11793 - DNA, 447 bp, Glycine max
  Clone ID: jC-gmfl02220133e04d1
ttttttttttttttttttaccttatattttataatagggatttttttatggggatgagggttatttgtttttattgttataccccaaacaacattttttatgaggaaaaagttatagattaggttcccttagacaacgacacacaatgttttaattgccttgggactggtccttcctcttctgctgctcctgaggattcctaaatagttatactacaccttggacacaacctccacttgtgcaggatatcaaatgtgaaatccatattcaccaaataactggtgggataattcttcaaccaatttatattttagaaaatcgagccaaggagtgcctctatgaatttttcaaacttaaaaatgttttttttggggggctccccttaaaaccctgtagggatttttcccttttttcccccctttttgaaaaaaaacggggtccaacccc

SEQ ID NO: 11794 - DNA, 234 bp, Glycine max
  Clone ID: jC-gmfl02220133e05d1
tgccctttctttttttttgttttaatcagacagcttgggttctcatgtcgaggttgaacgtacttagacaactgctattctcatacattgcaaccagtgggaggatacccgagactatattacaacaacagagccatatttataatgcgcatacataggtgacttcgagtacacaaaaaagggtgacttctaaaaatgacaatatttcagcacagtgcacatgaattcgagggc

SEQ ID NO: 11795 - DNA, 461 bp, Glycine max
  unsure (1)..(461): unsure at all n locations
  Clone ID: jC-gmfl02220133e06d1
catttgatgcagcgatnctggatcatgctnagctaataattacagggctcgacgatgctcactatgtcggaggcctgcccttttttttttttttttttttaaaaccatattgcataatagagatcaattcataaatttgtattcagcaagcaatttatggatacaaatgacggctccgattaaatttaatgttactaagcaaacatgggaaaattgttgcagagagagtcttccacgagataagagatacgcaagtcgatacgtatcataaaagattacagatgaaaaggaacagactctgctcaactatatcctatgagctgctgttggtgatgagctgggtaaccaggatatcccggataactgccatacatgtcaggatcctgtccagcaggagcttaaccataattgaaatatcctagagcagcatacccataagatccaccaccagaaccagcacc

SEQ ID NO: 11796 - DNA, 347 bp, Glycine max
  Clone ID: jC-gmfl02220133e07d1
atgccctttttttttttttttttttttttttttttttactatagccattctctttgggagggatgcttcctttcaacaaacggtcgatgatgattacagggaatgggaaagagaattaaaaagacacacactaggatgatgatcagcttttgagggaagggggttgtttacctagctgataagggctccgtcttttcgtttacgggcaggtgttgaagctccggctctgttgatggtcatgctcatgggattcatgtgcatgtggaattcctctgtcagccctggattaggagtcagcctggctgttccctaggaagtgccaggagaccagcttcaagagactcacc

SEQ ID NO: 11797 - DNA, 552 bp, Glycine max
  Clone ID: jC-gmfl02220133e08a1
gacaatcaacaattggggtcatacatatatacatgcataccatctttcattgccctcatttttcttaaaacaaaattggaaccaattccatccaattttaatgatgtaatctttttttgtgcttccctcttgcttatttcatttttcttttctaaacattgaaggatttgaattgtcaaattacttactcaccctgcttgacaattgaacaaggtttgctggctggccttattcaactttgcctcaattttccaaatgtttccatttccattcaattttttctttggaaaatgaggaagccaaaaatatggggttccgtatcttcaaattgattacttcaaaggaaaaaaaagagaaagtaaaggtctttctggataaaatcaaaatgccatattcatattatgatattgggaccagctctcactaacatgcgccgcagcactcattgcgttcacatgcgaatcttcaatttcggattttcatttcataaattatgtaaattagtaataataataaaaagacgcgtcttttacctttttgttactccccccc

SEQ ID NO: 11798 - DNA, 138 bp, Glycine max
  Clone ID: jC-gmfl02220133e08d1
tttcagcttttttttgttacaattcactttttcactcaactcaaacactccagtgcttacgatctgtagagcggacttcccacatagcgggttgcatttcaacagcataaccctgcgatcgaccccccgtggtaccta

SEQ ID NO: 11799 - DNA, 550 bp, Glycine max
  unsure (1)..(550): unsure at all n locations
  Clone ID: jC-gmfl02220133e09a1
ggcaaccgatgcctccgccaccgttcccatccctgacgtcatgaaggcctctatccggcccgacatcgtcaatttcgtacactcgaacatctccaagaacagccgccagccatacgccgtcagtcgtcgcgctggtcaccagacctccgccgaatcctggggtaccggccgagccgtctcccgtatcccccgtgttcccggcggcggaacccaccgcgccggccaaggagcctttggaaacatgtgccgcggcggacgcatgttcgccccgaccaagatctggcgccgctggcataggaagatcaacgtgaaccagaagcgctacgccgtcgtctccgccattgctgcctccgccattccttccctcgtcctcgcccgcggccaccgcatcgagtctgtcccggagctcccccttgtcgtcagcgactccgccgaaggagtcgagaagacaaaagaagcgatcaaagtcctcaagcagatcggagcattcccggacgccgaanaggctaaagacagccgcagcattcgtcccggcaagggaaaaatgcgt

SEQ ID NO: 11800 - DNA, 339 bp, Glycine max
  Clone ID: jC-gmfl02220133e09d1
ttgcttctgttgctttttaatccaagagatgctgtttctaatataagaaccagagtctgcactaaatggcgacttacaaactctcgaccttgtccgcatactgacgacgaccaccttacgccggaaaacaaactaaccaccgatccggatatgcagcccggatgagcaggacgaacaaaatcctaatacgaaagaatagatgatgaacgtcacagcgaaacacccaaccacttataaaaaaccgtcgagacctgcatgacgcgagtccgacaccatcgtgtgataccatgctttgccagcagccttgatgagcaacgctttctgcttagagacagtctt

SEQ ID NO: 11801 - DNA, 601 bp, Glycine max
  unsure (1)..(601): unsure at all n locations
  Clone ID: jC-gmfl02220133e10a1
cacggtcttcgcggtttcatcggccctagacatgtcgataatctcgtacgacaacgcgcacgccgccacgtcgcgcagcgacgaggagctgatgtccatgtacgagcagtggctagtaaagcacggcaaggtgtacaacgcgctcggagagaaggagaagaggttccagatcttcaaggacaacctgcgattcatcgacgaccacaactcccaagaggaccgaacctacaagctcggactgaaccggttcgcggatctcaccaacgaggagtacagggccaagtacttgggaaccaagatcgatcccaaccggaggctcggcaagaccccgagcaaccgatacgcgccacgtgtcggcgacaaactacctgaatcggttgattggaggaaggaaggtgctgttcctccagtcaaagaccaaggaggctgtgggagctgttgggcattctcagcaatcggtgcagtggaaggaataaataagatagtgacaggtgaactgatttcgttatcagaacaagaattggtggattgtgatacaggatataacgaaggatgncatggagggactatggactatgcatttgagttcattatcaacaat

SEQ ID NO: 11802 - DNA, 138 bp, Glycine max
  Clone ID: jC-gmfl02220133e10d1
aagcctccctttcttttttttttgaacaataatctattaagatggccatttggaattgcaatttgaatacaactaccgcgcatcactaatataaccatatgatcacagtctacatgcgactgatattagataccgaat

SEQ ID NO: 11803 - DNA, 560 bp, Glycine max
  Clone ID: jC-gmfl02220133e11a1
tttctctacttctttccctttccccaacccctcatacgttactctttaaatacgcacgacatcttcacgtgcctctcggttcttcagtccaaacaatggccatggttgagctctggtggattacgtgctttctctaactactgttttccacacttaacgaaccagaacacagtgagaaagacataatggcggtggagtacacatgctgctcaacggccttcttcgttcacatactggtcatcgtgctgctcgtgcttttcgcgggcctcatgtcgggcctcaccttgggcctcatgtcgctcagcctcgttgatcttgaagttcttgctaagtctggtactcctcaggatcgtaaacacgctgagaagatattaccagttgtcaaaaaccaacatttattgctatgtactctgctaatttgcaatgctgcagccatggagacacttcctatttttcttgatggccttgttactgcatggggcgctatcctaatttctgtgacattaattcttttgtttggtgagattataccccaatcagtttgttctcggtatggtttg

SEQ ID NO: 11804 - DNA, 256 bp, Glycine max
  Clone ID: jC-gmfl02220133e11d1
acaaaccatgatttgctgccttgctgagtatagcgccattgcgatagagacacgcatgtgcatctcaaaaccagctggctggtccgctgcatctcatcaacaatacgggcttacacgttccacagcacaactcacatctctatacagcagatagcaaccctgaaccgcagtatgtattgaactcttgctagaggtccaaacatgaaatatgaccttggaaggatcgatggaaaaaagccactggcatgagtcttga

SEQ ID NO: 11805 - DNA, 551 bp, Glycine max
  unsure (1)..(551): unsure at all n locations
  Clone ID: jC-gmfl02220133e12a1
tttaccttcatctttctctcagcttcaccttcaccttcaccttccgaattgtatcaaacctcaaaaaatggatcatcaaaacaaacacgtagcagtctttgctttcccctttggcagccaccttatgcctctcttaaaccttgtcctcaaactagctcattcccttccaaactgttcattctctttcattggcacacacaaatccaatgcaatccttttcccaaaaccccacatcccaaataacatcaaggcctatagcataagtgatggaatcccagagggtcacgtcctaggcaaaaacccaactgaaaaattgaatctttttctccaaactggtcctgagaaccttcacaaaggtatagaattagcggaagcagagacaaagaagagagtcacatgcatcattgcagatgctttagtaacctcttctctcctagtggctcagaccctcaatgttccttggattgcactttggcttcccaattcatgctcactctctctctatntctacactgactngattcgccagcactgtgcaagccgtgctggga

SEQ ID NO: 11806 - DNA, 310 bp, Glycine max
  unsure (1)..(310): unsure at all n locations
  Clone ID: jC-gmfl02220133e12d1
attaaacttgattaattagagttttttttgcttataatatgtctttgctcgatacaaatcgccgacttatgttaggatcttgtcggggaactaattcacaaacaaaacaataggcataaagttaactacaaacacaactaacgcgagtatctattcatgggatccatcattttaatagctttgatataaaataacccatgcatacaaagtagcgctattgagttctagatatgacttgcaccagagtgaggaaacctagtgttgcttgcccttcaggcctacctgcatcttccacagncttcttgaccct

SEQ ID NO: 11807 - DNA, 383 bp, Glycine max
  Clone ID: jC-gmfl02220133f02d1
tttattttttttctttttttttttttttaacctaattctaatattatatcttgatttgggttccccaaaggaacaattctccaaatttcataacgctaaacaagggtccccaccccccaagacatatgcttctagcgcaatacactatattttttcaaccaaaaaaaaaaatttgaaaagacatttaacttaaaaatttatacaaaaacggttgaatgttaataaatactatataacttggcccccaaagaagcttttatagaaccctccccctccatttcttttgaagcctacgttgttacaacagatcaaaaaaatttaacttctccttaacgctttttttttgcaaaagatttaaattaaaatgccacaccaccaaaaac

SEQ ID NO: 11808 - DNA, 158 bp, Glycine max
  Clone ID: jC-gmfl02220133f04d1
agagtggtcgagtcgctgacaaacccacctgaataattcccgcctcgacagctactagtcatcggccgccctttttttttttttttttttttttttttctatacaagggcttttttattttgggatgggtgcaaattttaattttcattttcaaccac

SEQ ID NO: 11809 - DNA, 154 bp, Glycine max
  Clone ID: jC-gmfl02220133f05d1
gctcccgtctctgtttgtgctttttgggtttttatattttcatttttattttttaattttgagttcgctagactctgatgctttgggaaaggctcacccacccgtgagcgctgcccacctccaagcctcttcgacggcgacaacaaaactcatt

SEQ ID NO: 11810 - DNA, 119 bp, Glycine max
  Clone ID: jC-gmfl02220133f06d1
gctgccctttctgtttttgcttttagggtttttatattttctttttcattttttaattttgagttccctagactctgttgctttgcaaaaggctcacccacccgtgagcgctgcccacc

SEQ ID NO: 11811 - DNA, 341 bp, Glycine max
  Clone ID: jC-gmfl02220133f07d1
atgccctttttttttttttttttacttcgacatgccttttggcattatttatttgattatacgatctcttgatgacattcatcacaagggatatacaacgaaacctagggaaatcaacaagaaaaacactagacatgtcaatggaacactaaagtcagatcactagagatggaacttttgcaagcaaaaagcagagaactgggggtatcccttcaagctgggcttgctatcctcatatgtgagcccgaatcaaactgggtaaccagcatgccattcaaaactgtgcgaaaatgaccatgcataatagcccttcaaatttacaccttgcttgatcgcttgaa

SEQ ID NO: 11812 - DNA, 509 bp, Glycine max
  unsure (1)..(509): unsure at all n locations
  Clone ID: jC-gmfl02220133f08a1
aaaatgaaaacccaaagtgcttctctcctctgtctttttctctctcttgctatccttgtggctagtggcactgctgcaagtgcaactccaactccaccatgtttcaacattcaacagaagcctttttccttccacttttctctttggaattggttcttctgcttaccaggcagaaggagcagcaagtgtagatgggagaggaccaagcatatgggacacctacactagacagcatactgaaaagatttgggatcatagcaccggtgacatgggagctgatttttatcatcgatacaagggtgacataaaaatagcgaaagaaattgggctggactctttcagattctctatctcatggtcaagaatattcccaaagggcaagggagcagttaacccccttggggttaaattctacaacaatgtcatcgatgagatcctagcanatggtttaaaaccttttgtcactctttttcattgggactttccacaagctcttgaagatgagtatg

SEQ ID NO: 11813 - DNA, 412 bp, Glycine max
  unsure (1)..(412): unsure at all n locations
  Clone ID: jC-gmfl02220133f08d1
gacatgccatttggcattatttatttgataatacgatctcttgatgacattcatcacaggtgatatacaatgaaatctagggaaacaaacaagaaaaacactagacatgtcaatggaacactaaagtcagatcacttgagatggaacttttgcaaccaaacagctgagaacttggggtatctcttcaagctggtcttgttatccacatatatgagcccgaatcaaactgggtaaccagcatgccattcaaaactgtgcgaaaaagaccatgcataatagcccttcaaatttacaccttgcttgatcgcttgaagatagaatttaagatggccatcatggtatctaatccttatactatccttgcgggcttcatagactggnattgagtcattacttgattgagccatgccat

SEQ ID NO: 11814 - DNA, 585 bp, Glycine max
  Clone ID: jC-gmfl02220133f09a1
ataatgtcccctcaaaattaagtgtgaactactcaaaggcttcaaaaacaaactatggtgatatttatagaacttaatgataaattttgtacaccacaaaaagcataacagtatatttaatttaatcacaaagaatacttctaccctttaacatactcaccttggatggatggaatggggattgtttctaatgtgtttatagggatgcctatttatatagattagattttatccatcataaaaataaaaactgattccataatatcaggatgtaaatatactttcaacaactttataattaaaactgaaatcgtgttaataacttggaatcgtgagaaaaattaggaccactttcatttgatttcaaaatcaaaactaacacttaaaggatacaaatgaaaaggaattttgaatagaaatataccattttgaaatcaatacgacttacaacgagacacccaaggatttttaagcaatgctagaagaaatatcaaaagatacttttgtttcccactaattagtttaaaacttacttgcatagtttatgattaatactgtgactatttttactcatgtctacaggca

SEQ ID NO: 11815 - DNA, 162 bp, Glycine max
  Clone ID: jC-gmfl02220133f09d1
aggccagcccttttttgttttttttttttttttttttttctttttttttgcttttttttcattcttttttgatttttttagaacaaaaagattaatcatgtacaccagtttaagccttacagtatattcaccataatcactgagaaaagtactaggatacaa

SEQ ID NO: 11816 - DNA, 565 bp, Glycine max
  Clone ID: jC-gmfl02220133f10a1
ataatgtcccctcaaaattaagtgtgaactactcaaaggcttcaaaaacaaactattttgatatttatagaacttaatgataaattttgtacaccacaaaaagcataacagtatatttaatttaatcacaaagaatacttctaccctttaacatactcaccttggatggatggaatggggattgtttctaatgtgtttatagggatgcctatttatatagattagattttatccatcataaaaataaaaactgattccataatatcaggatgtaaatatactttcaacaactttataattaaaactgaaatcgtgttaataacttggaatcgtgagaaaaattaggaccactttcatttgatttcaaaatcaaaactaacacttaaaggatacaaatgaaaaggaattttgaatagaaatataccattttgaaatcaatacgacttacaacgagacacccagggatttttaagcaatgctagaagaaatatcagaagatacttttgtttcccactaattagtttaaaacttacttgcatagtttatgattaatactgtgactatt

SEQ ID NO: 11817 - DNA, 79 bp, Glycine max
  Clone ID: jC-gmfl02220133f10d1
aattacaatctattttgatattcatggaactaaatgattaatcctgtacacaagagaaagccttgccttaaattcagcc

SEQ ID NO: 11818 - DNA, 560 bp, Glycine max
  unsure (1)..(560): unsure at all n locations
  Clone ID: jC-gmfl02220133f11a1
caaagcacaagtcatggaaagaataatggttggaagtgcaacaaaggttgctttcaccctcttggccactttcgccattgtcattccatgccttgaggctggcattgctgagtttgacgattttctcaaagcccaagctgatgaagcccataaaattgctcttgattcctatgtcccagagccccacgatgtcgcccatgaactcaatttccatgttcatatggcactggaaaactccacaaggagggaactaaggcagaggaaacttagaggaggaggcaaatgtcaagcctccaaccccattgacgcttgctggagatgcaataaagactgggccaatgaccggttcaggctagccaagtgcggcaaagggttcggaagacgggccaccggcgggctcggtggtcccatctatgtcgtcaccgataattccgatgacgacatggtgaaccctaagccgggaactatccgtcacgctgtcacccaaaaaggccccttgtggatcatctttcgacacagcatgatcatcagttngaggcaagagctgatgatttcctccg

SEQ ID NO: 11819 - DNA, 554 bp, Glycine max
  Clone ID: jC-gmfl02220133f12a1
caaagcacaagtcatggaaagaataatggttggaagtgcaacaaaggttgctttcaccctcttggccactttcgccattgtcattccatgccttgaggctggcattgctgagtttgacgattttctcaaagcccaagctgatgaagcccataaaattgctcttgattcctatgtcccagagccccacgatgtcgcccatgaactcaatttccatgttcatatggcactggaaaactccacaaggagggaactaaggcagaggaaacttagaggaggaggcaaatgtcaagcctccaaccccattgacgcttgctggagatgcaataaagactgggccaatgaccggttcaggctagccaagtgcggcaaagggttcggaagacgggccaccggcgggctcggtggtcccatctatgtcgtcaccgataattccgatgacgacatggtgaaccctaagccgggaactatccgtcacgctgtcacccaaaaaggccccttgtggatcatcttcggacacagcatgatcatcagtttgaggcaagagctgatgattt

SEQ ID NO: 11820 - DNA, 248 bp, Glycine max
  Clone ID: jC-gmfl02220133f12d1
atgcccttttttttctttttttgtttggatttttgtttttattttcatcttttgttttttttacttttttgttcactaaaaccagcgttattccatgcccaaaggctttcattgataaacaagaggagactatgtaagcccaagctgaagccgcccataaaaaaaagctagattcctatgggccatagccccacgatgttttgaaccaactcaacaaacatgttcttatggcaccggtaaactggcca

SEQ ID NO: 11821 - DNA, 359 bp, Glycine max
  Clone ID: jC-gmfl02220133g01d1
ctagccattaagaataccattgatatctatcagaaagggggcttgataaaccagtttctacttcctgcgcatgcttcttttcctaagtcacgctctatgcatgaccgacagaaaatttatacccgcactaaacgctattcatagataccctggtgaaaattgttccacacaaatttgctactgctttgctgactattagtgctagacaccactccatgaagcactattctaaatgagccaaataagctgtctcaagctcgcatattgcctaccatgatgtgctttctttaaaacaaaagcttgatgctctaaggaagaagaactcacatatcgtggacgggtgcccttattccctgggc

SEQ ID NO: 11822 - DNA, 105 bp, Glycine max
  Clone ID: jC-gmfl02220133g02d1
gctgcgggccgccactttttttctttttactttttcttttttacttgtctatccgccccataattgtaaaagagggtgaggggtggcgatgttaccagagtacta

SEQ ID NO: 11823 - DNA, 449 bp, Glycine max
  Clone ID: jC-gmfl02220133g03d1
agggtgtgcgattccgctgacataccgaccttaattattcccggccgacgagctactagtcatcggccgcccttttttttttttactgttctttttttttatcttaacatattgagtattttgggttttcgggacaaagaaaggtgagcatcaggacgttttgaactgtgaaatgtggaggaaatgaacaaaaatggttatggacttaggacattacccaatgcactgttcttacacaatccgcatttccagccgaatgagactcattccctactctgcacacaatctcaaagaggcacttgcttatccttaatggttgacatgacatgtcttcattgcaacgttcctagcctgtccatacgcacacaagcattcaacactgttgggtatgctgcccattaaaaagcttatgcttctgcagttggacacacttccaggatgtgcccctt

SEQ ID NO: 11824 - DNA, 340 bp, Glycine max
  Clone ID: jC-gmfl02220133g04d1
tgtatattaatatcctttaattatatttcattttaataaatgattatctttgggattgggataaacactctacaatgtggcgactacacctcacttctaccttcagccacccctcaagtcattaccgacatggaaggtaatgatctccacattgccgggaaagaaaccctgatgtctttttgggcccaaagggtccctattttagaaacccacccactgggaaagaatgattcgctaacacctaacgcccataatgtttatcacctgccttggggactgcatccctaatataaactccctattgccgttctgaaaaccccaactgatttcccgagaacat

SEQ ID NO: 11825 - DNA, 339 bp, Glycine max
  Clone ID: jC-gmfl02220133g05d1
atgcccttttttttttttttttagcagaattaggccatgcaacgccactctgtattatatctgtcatcatatttacatacagaaattcaaggtgaactccacacaatattaagattttcactttacagaaagtgcagtaatatttaaacacgtagaccattgtattgcatccataataccggaatgatggaaatttacacactactaaatgttccggatgacttgaaaaaactaatcatagggtcataaagaccttgttcggcttgcaagcttaaaacgaagccaacatgaccatagttgtcaagataaaccacttccggagcggatggcaatcccttg

SEQ ID NO: 11826 - DNA, 329 bp, Glycine max
  Clone ID: jC-gmfl02220133g06d1
aaaccggcaactgccatgatttgccaattatccatgcgtgtcggaacattatagacctgagctgatttaaatacataaaattatgcatacataaagaataactaagacagcttaataaaaaactagcggtactgaagttctgaaatacagaacaactgtggacacagtatgaatgtaaaattaaaacacgatgttttgaatgaggtcgctgaaccacgtataaacttcgggtattacaaaaccgttagtcatcctcaatagcagataacagagacttatccacagaatcggacattgaactcgagccacaagcgaaaccttgaaaattg

SEQ ID NO: 11827 - DNA, 421 bp, Glycine max
  Clone ID: jC-gmfl02220133g07d1
aaacaaagacatttatgtaattttattataatgtatatgtacgaaacaagtactctaatatgtgtcttcatcatccatgaacactcatttcagtatttatcttctatccgttacgaaattctgtccggaaatatccaagagtgtaaggattttggtcatctgaaaccaaaatcgcacgtctgcagatttaaaaagggcacacaaaacattattcccatgtcaggcaactggcaaggtccatgcttagcaaaagacggcaacattgacagacagtataaagttgaaattaccaccacacttctatttggcatccatggaaaagcgctctagacaagagcctagggaactctgtatgccaattccttcatagcatgaccaagcctattttcagactgaacactctgaacccaattggcattga

SEQ ID NO: 11828 - DNA, 382 bp, Glycine max
  Clone ID: jC-gmfl02220133g08a1
agggccgccctttttttttttttttttttttttttttactattttttttttttatatttgggtttggttaaaaaatatacccctaatattaaaaaatccaaattataatattaccatccttttatctaaaataaactgaccaaattacaaaataatttctcttcacttcaaaaaacattctctttattttaatccaaaaaacctatttttcaattaaaaaaaaaaaaccaatccttaaaaaactaaactctttcttaattcaacaataatatactttttctccaaagaaaaaacattccaaaataaaaattcctcttaaaaaaaaaaaataaatttacacacctcttaataaatataaattattcaattaacaacatactct

SEQ ID NO: 11829 - DNA, 607 bp, Glycine max
  unsure (1)..(607): unsure at all n locations
  Clone ID: jC-gmfl02220133g09a1
ttaagatcaaaggacttccttatttggaggctcatgcagaaccttacatgaggaatttagtaacacgcgatgttgtttccggtccattgataacgttttctggcatcgaaaaggttgcaaatatattgcaagctttgaatactactggacataatgggtttcctgtcattgatgaaccacctttctcagattcaccagagttatgtggacttgtactgaggtctcatttactagtgttactgaaggagaagattttttcaagggataggggttttgcaaatcaaaggatcttccaaagaatttctactttggattttggaaaggcgggatcaggaaaggggatcaaactagaggatcttgatatccaagaggaagagatggatatgtatgttgatctccatcccataactaatgcatctccttacactgtggttgagacaatgtcactagccaaagctgctattcttttccgacaacatggactcaggcacatgtgtgttgttccaaagagccaagggagacctncagttgttgggattctaacacgccatgattttatgccagagcantgtttgggacttcaccctgatatcatgcctcacaaatg

SEQ ID NO: 11830 - DNA, 298 bp, Glycine max
  Clone ID: jC-gmfl02220133g09d1
agcttaacaactttattcaagaatttaacaagccgcgagttcaagagatcattattaacttactgaggcaccttatttctgggtttaaaagtgtctatcggattgtatcatgctgacttcatgaaatagagattaacagtccattcgctgctgtcacttcttaagcagctttgttggattcaagtgttctgtgaataattattgcactctactgtgtataaaaacttcgatcaactaatgaatgcaacacttcgacacgtacagaagaaagaatatttggcatggagatccgtcattt

SEQ ID NO: 11831 - DNA, 614 bp, Glycine max
  unsure (1)..(614): unsure at all n locations
  Clone ID: jC-gmfl02220133g10a1
gaacgatgctgggacaattgtgaatgaacttgaagttcagcatcctgctgccaaggtgtttggttttggctgggaaggctcaacaagaggagattggggatggagctaatttaactatttcatttgctggggaactcctgcagggtgctgaggaacttatcaggatgggtttgcatccgagcgagatcatcagtggatacactaaagcgatcaacaagactgttcaaatattggatgaactggttgagaatggttcagagagtatggatgttcgtgataaggaacaggttgtttctagaatgaaagcagctgttgccagcaagcaatttggccaagaagataccttatgttcgcttgttgctgatgcatgcatccaagtgtgtcccaaaaaccctgcaaactttaatgtggacaacgttcgtgttgcaaagctcttgggagggggcttgcataacagtactgtcgttcgaggattggttctgaaaagtgacgctgtcgggattataaagcaagcagaaaaggcgaaggttgctgtgtttgctggtggtgttgatacatctngcactgagactaaaggaactgtcctcatacatacagctgagcagctagaaaat

SEQ ID NO: 11832 - DNA, 619 bp, Glycine max
  unsure (1)..(619): unsure at all n locations
  Clone ID: jC-gmfl02220133g11a1
gaacaacagcaacctctctgccttccaaacccacattctggaatttggttccaatgagacaatcttcttctccggggcacttggccttagccttagacaatccacgtagaacacttcacgtgtcttgtggctccacatcaccacatgcttcccagagatcatcaattcaggggggtgaagcttttttcaggggtgtgttggaaagtatgcaatctgtttacttgaacagaaatcgtactgctaaggccatattggaccttgttcactctgctgagaataactcattatgctatgatcatcttgcattcaggacatttggggtgaatggttatggaattgattccatggctagtttttttctggattatggctatacacaaagggaagagttgaggtttccagccaaaaagttgagggctttgtggttttctcctcctgctgattcactggctagcaatggcagtggcattaatgggcctttgccaagaatatttatatcagagctactggtagatcaaatgagtccacanactcagganataattaaaaaatacaccgaatcatctgtggatgggaacaagtatgcagcacttgcaagttcccttgacattaacatggg

SEQ ID NO: 11833 - DNA, 313 bp, Glycine max
  Clone ID: jC-gmfl02220133g11d1
atgccctttttttttttttttttttgctgttagacatatcccttacgattattgtatgtttgggttcgagttaattattcttttcgatattaatcaacccaaattattgatgcaacatccacatgattggaatggtatgaaatccaaacttacagtatacaactgggtataaattgtaatatatttccccaagggaaataaaggatacacattctgggtatggagtgagaagagcctcttatgagcctactctgctcaactgctccttggatgtgctttgaaatatcctgtcaacactcgctacctcaaaacc

SEQ ID NO: 11834 - DNA, 387 bp, Glycine max
  Clone ID: jC-gmfl02220133g12d1
aagtaatagtaatataatatcacttgctttatatgccacaagtaacagacgtagcaatccactatagccatcattgattgtacagaattcattgtaaactttctttcattggcttacctatgtttttccttatacaacttgcacagcaagagcctactagattcaggttcatatacttgtctaaacaccagttgccttctatcaagtccaatgaagctagacatataagagcatactagttccctcttaaaattgggcagaaaaatttattatataagagagttaatcatctttgaacttctgctcacataattagcggaggatattttaaatactttatcagctaattgatgttcatcttcttatgctctgaagaattcattcaag

SEQ ID NO: 11835 - DNA, 278 bp, Glycine max
  Clone ID: jC-gmfl02220133h01d1
tttatttcttcgtcacttttctttatgtgacccgtataaatgtcggcttttgggcagtggtatggaagatattgcggactcatgtgtggctgattaaacatgacgcttcatttgagattatgacaaggaaaattgcgacctgaaccgtgatctttctttgcagggcgtaatatcacgttgtcctcatgatccacggcggaaaggcccacctttcccctcaccgtgcctttcatgtcatatggcgccttgtgcaccaggtcgccctggccaagatctgg

SEQ ID NO: 11836 - DNA, 214 bp, Glycine max
  Clone ID: jC-gmfl02220133h02d1
acttgactcgtataaaattcggctatgggccaggggtctggaagatattgcgcactcatctgtggttgattgaacatcaatcatccatcgtggattcgagttgctaaaattccgacctgaacctatttctgtgtttccaggctatccgaatacggtgtcctcattatccacggccgaaaagcccacctttgcgccctacccatgccttccataa

SEQ ID NO: 11837 - DNA, 462 bp, Glycine max
  Clone ID: jC-gmfl02220133h03d1
tatcttttttttattttttttttttttttttcatacgccaaaagacttacccgtcattgattcttgccatagagcaacccattattcaattaaacaaaagatcattcattactcaacctaagtaagacaagaccccaaatgtcattgctctgttgcatttaaatggtatacatactacggaattctaaaagaaaatccaacttaaagttcctccccttttttttggatccacacataaattgaccccgcaatttattatttatcagactaaatattcacccaaaggctcggcgcaaaagaggtggcctatactatcttccaaaacttgccttacatttggccagactttactaagaagctatttttttctccatttgctgcaagggtatttgtggcgcaacttacccattactttttattggctgtaacaattgaaggggttgcatcacttttaacagctgg

SEQ ID NO: 11838 - DNA, 491 bp, Glycine max
  Clone ID: jC-gmfl02220133h04d1
tttcttttttttttttttttttttttttttttttagctcaaaagacttacccggcatggattcttgccatagagcaacccattattcaattaaacaaaagatcattcattactcaacctaaggcagacaataccccaaatgtcattgctctgttgcatttaaatggtatacatactacggaattgtaaaagaaaatctaacttaaagctcctccccttttttttggatccacacataaatggacccggcaatttattatttatgagactaaatattcaaccaaaggctcggggcaaaagaggtggcctatactatcttccaaaacttgccttacattgggccagtctttactaagaagctctttttttctccagttgctgcaagggtatttgtggcacaactcagccattactctttattggcatcaacatttgaaggggtttcatcacttttaacagctggagtacttgattgggcatcttcattattaa

SEQ ID NO: 11839 - DNA, 388 bp, Glycine max
  Clone ID: jC-gmfl02220133h05d1
atgccctttttttttttttttccttatcgtatacccataaaaagtacgtggaatctttttggaaacatatcctataatcaaaatccaatttgcattaattatttaagggaacttgaaacataccccggggaaatgattcatgggtaagttattcatttagtaattaaatcttcgtgaatcccccctttttttaattccagttaaatcccttatcacattcacaaatatacataatgggggaagttctattagaaacttgcgtattctgtttctttgtttttttaccaaacagggatcgaagtttgtcatataattcgggtgttagaaagattaccatatataacataaaacttctgcgccaattctttctaatcgagcctctcgatct

SEQ ID NO: 11840 - DNA, 352 bp, Glycine max
  Clone ID: jC-gmfl02220133h06d1
atgccctttttttttttttttccttatcgtatacccataaaaaggccgtggaatctttttggaaacatatcctataatcaaaatccaatttgcattaattatataagggaacttgaaacttaccccggggaaatgattcttgggtaagtcattcattcagtaattaaatcttcgagaatccccccttttgttaattccagttaaatcccttatcacattcacaaatatacattaagggggaagttctatgagaaacttgcgtattctcttgctttgtttttttaccaaaatgggaccgaagttgcccatatattgagggggtaaaaaatgaccccatatataacataaacct

SEQ ID NO: 11841 - DNA, 350 bp, Glycine max
  Clone ID: jC-gmfl02220133h07d1
tgcccttcttgctaatgtttttttttccccatacgccatgctacactatgtccaagcttgagattaatagcagggacacatgtccgctgttgtttaccactgatcaatactgctagccgagcccaacgaggggtgccctgctaacctggggcacatcaacactgtagactgcggccaacatggaatatctatcttctaaaaatcaggtccctgctttaatcgctccattagcatgagcgccctggctactattcatggcgacgacaagctattcagaattcacatgacagggagcgagattagatggggactgccagatgtcggatgctacatcctctaaactcatgcct

SEQ ID NO: 11842 - DNA, 492 bp, Glycine max
  Clone ID: jC-gmfl02220133h08a1
gcccttcaccagttcatagttcatagtccatattcatacaccgacactttgctctcgctgcctagcatggcatcaacttctctcttcaacttcagactccctctgttcaacttcaacccactgcaccatcgacggatacagaggccaaaatctctgctctcctctcctcgcaacagaccacgcctcgtttcttccattaacgaccatttggcgctcacacgtgtcacatatccgcttctccaatctcactctgctccgaagcgcacattccacgttggtgtacagaaagagtattctgatggggaaagctctgagtcgattgtttctgacgctacataccaagaggaattttcctggacttctgtagttcttccgtttctattccccgcattgcgtggcttgttatttggctatgatattggagccacctctggcgctacaatctcactgcagtcacccgagcttagcggtatatcatggatcaatctttct

SEQ ID NO: 11843 - DNA, 122 bp, Glycine max
  Clone ID: jC-gmfl02220133h08d1
ccgaaaacgtcatgctatgctatctctaagctcagagcttaacagctgggacacatgttcgctcatgaataccagtgatcaattctgctaacaaagctcatagtggggtccaatgctaccct

SEQ ID NO: 11844 - DNA, 578 bp, Glycine max
  unsure (1)..(578): unsure at all n locations
  Clone ID: jC-gmfl02220133h09a1
cttgttctcttcttcttcaacacaactagtcataatccagctcatctctctctccctggctctttgttctctctttctctttctccaaaatggctctaaactacccttttttaacctacttcatactactgctagtaaccataacccgtttgatattcactgtgggaaaaactgagcaatggaaagctccgattctaccagagcttgacattgataacatatcccacaaactccatgatgaccctgaaaccattcaaatggcttcaagggactatggccatttaacgcatgaattcccattagctgtgtttcgtccatcttctatagatgacatagtcaccttgataaaatcttcgtacaatagctttgccccttttgacatagctgcgaggggccaaggccactccactcatggacaagccatgnctcgtgatgggattgtggtggacatggccagcctaagaaaacaaagaaatggggttgcgattagtgtctctaaggaccctntgatgggtcactatgctgatgtnggaggggaacaaactctgatgatgtgctacatgccacactgatatgga

SEQ ID NO: 11845 - DNA, 301 bp, Glycine max
  Clone ID: jC-gmfl02220133h09d1
tgccctcttgttttttttttaagagaaagacagagtcgttaaacatttaatattggtggactataactcacagcatcttcaatatgatccgaatttgtccacacactatatagcaagttgggtgacagacagagcgagagacaacagagcttgttggacctaccatgtgcgacctatgtcagcctaacggatctatgggaatatgccacatattaggtgccaaaagttctcatgcagactttaaggcgacaccttatcaattcctctagctagcagggcctactggagcataccgaagcca

SEQ ID NO: 11846 - DNA, 578 bp, Glycine max
  unsure (1)..(578): unsure at all n locations
  Clone ID: jC-gmfl02220133h10a1
cttgttctcttcttcttcaacacaactagtcataatccagctcatctctctctccctgtctctttgttctctctttctctttctccaaaatggctctaaactacccttttttaacctacttcatactactgctagtaaccataacccgtttgatattcactgtgggaaaaactgagcaatggaaagctccgattctaccagagcttgacattgataacatatcccacaaactccatgatgaccctgaaaccattcaaatggcttcaagggactatggccatttaacgcatgaattcccattagctgtgtttcgtccatcttctatagatgacatagtcaccttgataaaatcttcgtacaatagctttgccccttttgacatagctgcgaggggccaaggccactccactcatggacaagccatggctcgtgatgggattgtggtggacatggccagcctaagaaaacaaagaaatggggttgcgattagtgtctctaaggaccctntgatgggtcactatgctgatgttggaggggaacaactctggatgatgtgctacatgccacacttgaatatg

SEQ ID NO: 11847 - DNA, 300 bp, Glycine max
  Clone ID: jC-gmfl02220133h10d1
tgccctttttttttttttttaagagatagacagaatcgttaaacatttaatattggaggactttaactcacagcatcttcaatatgatccgaatttgtccacacactatatagcaagttgggtgacagtcagagagagagacaacagagcttgttggacctaccagtgcgatctttgtcagcctaacgtatctaaggtaatatgccgcatattaggtgccaaaagttctcatgcagcctttaatgccccaccttatcaattcctctagctagcagtgcatactttagcatacaaaagcca

SEQ ID NO: 11848 - DNA, 573 bp, Glycine max
  unsure (1)..(573): unsure at all n locations
  Clone ID: jC-gmfl02220133h11a1
cttcatactcactagtcactatagctcacccttgaagaagtgcaatttcatcctctgactcttccaaatcatggctagctcactgcttgtcatgaaggttacaagctgcatggttgcggtgttgatggttagttttggacacataattcccttggcagaagctgaaattccatgtggcagggtgcaaatcacagtggctccatgcatagggtacctaaggggtcctggtggaggtgtccctgcagcatgctgcaatggggttaggagcataaacaaggaagccaaaaccaccccagatcgtcaaggggtgtgtaggtgcctcaaaaccactgctttgagcttgcctggactcaaccttgcaacccttgcagctctccctagcaaatgcggggtcaacttgccctacaagatatcccccaccattgattgcaacacggtaaagcactgagcagttgcacgagggtttatgcttgttgactttaacttgtttcgcagtaataatcagcaaagagagaacanagatggtttaatttcttccattgtctggatcccactaggagtatactttatact

SEQ ID NO: 11849 - DNA, 278 bp, Glycine max
  Clone ID: jC-gmfl02220133h11d1
atgccctttttttttttttttgatatatatcagtgatagaaaatccaatatgtcattggacaaccaacattattattataacattatggagatgcagatcatcatcatcctagtataaagtatactccctagagggatccagacaacggaagaaatcaaaccatcttggttctctctttgctgattattactgcgaaacatagggaaagtcaacaagcataaaccctcgtgcaactgctcagagctttaccgggttgcaatcaatggtgggggatatc

SEQ ID NO: 11850 - DNA, 442 bp, Glycine max
  unsure (1)..(442): unsure at all n locations
  Clone ID: jC-gmfl02220133h12a1
aaaanaaatgggtgatatctatctatacactacacgtttatgccacgtccatagcttggaaatcggcttgaggacaatcaacaattgaagtcatactttattcctccataccctcattcatttcccctgtttttcttaaaacaaaattgcccccaatttcctcccacttaaagatgtaatctttttttgtacttacctcttacctatttcatttttctttcctaaacattgcatgatttgaattgtcaaattactttcccaccctgcttgacaattgaacaacgtttgctggctggccttattcaactttgcctcaattttccaaatgtttccaattaccattcaatttttccttttgaaaatgtatgaaaccaaaatatggggttccgtatcttcaaattgattacttcaaaagaaaaaaaatagaattttaatttccttt

SEQ ID NO: 11851 - DNA, 306 bp, Glycine max
  unsure (1)..(306): unsure at all n locations
  Clone ID: jC-gmfl02220134a01a1
attttcttcctctaaaccctaaacaactctttctcttcttccttcgctcgttgttctccctcgcgtagatcgacaatggcggagacagagacgtttgctttccaggctgagatcaaccagctcctcagtctcatcatcaacaccttctactccaacaaggagattttccttcgagaactcatcagcaacgcctccgatgcttaggacaagattcgatttgagagttagacagataagagcaagctcgatgctcagccagagttgntcattcatattattccagacaagactaacaatacactgacc

SEQ ID NO: 11852 - DNA, 395 bp, Glycine max
  unsure (1)..(395): unsure at all n locations
  Clone ID: jC-gmfl02220134b01a1
tggcgccggcgttggcggccacggagccgcgcttcatgccgttgagtagaggttagaaaacagccattgaggtaagtgatgtggagggagggacatgtgtgtacagtggctgagttccttccaaagctcttttagccgagtgaggtcgtatgcgtgtactaaggagcgatcatcacttgaagtcctttggcttacaggtttctgctgctggctatgacagacaaggattcgctgatcatgctaataaccttgcttcgaaaatcctgaataatttgaccaactcaatgaaagcactaggagtagacatacttactggttntggaactattctgggtcctctaaaggtgaaagttggctcttcagacaaaatagtaactgcaaaaaatatcatcatt

SEQ ID NO: 11853 - DNA, 380 bp, Glycine max
  unsure (1)..(380): unsure at all n locations
  Clone ID: jC-gmfl02220134c01a1
caaagggcattgatagtgaatacgtgatatctcacaagagcctatgcgagggtgggattagctagggaacccgatcgaagtctactacggcaaaacgatagcgttaagcgtcgccaacttcttcgccaccgtcacgctgcgtccctccgaccagttaatcctncaaccccaccccctccacgatctccttcatttctcatcgctccctcaataggtcaacaggttgagctcccaaggttactatggaggcgtgcgatagcttatggctatttgcaatgtcttctacgcgtattgcagagagaacgccatcgatcttggcgacgacaatttcactctctcctacgacaccaatatccctcgccaggctggtctttcgggtt

SEQ ID NO: 11854 - DNA, 355 bp, Glycine max
  Clone ID: jC-gmfl02220134d01a1
ctctttcgtttctcatcatctgagacttacactccagtttccaaaccgagtcgaatgtgaatttcgatttgaattgagaatttcatttgtcaacttccctgagatgccttacacggtccgcgagtacctttcgatcgggatcatcggcgacgcggcggagattctcgaactcggcgccgtccagagcgtgacacacattctgtccgtcctgtgctccgcctccatgtccttcttctccgaatggaaaaccactctctgcattcaagccaaggagatcaccaaagtccacgcggaggacgccgccgacaaatcggcgctcccgccagagaagctgctctactgtctcgagtacgcc

SEQ ID NO: 11855 - DNA, 430 bp, Glycine max
  Clone ID: jC-gmfl02220134e01a1
gtcgagatagcgaagactgatccatgcttcagttgaagctactaagaaagttatatctggtaatcttgatgatttgatgccaccaccggagagacccatcttcagcttcaattccaagcaagagttaagcaagtggcatttgtattctgattctgaatttggaagtttgtcctctgcctctctgcagataactgagtcggaaaaaggagcaacttctggaatcttctccgggaacctttctctggatgtctctgaaggctctaaatggaacatcactcggagaggcttctgaggaatgcgctcaaaaaagttagatggctttatagattaggattcatatgatactattgctatgaaacttaaaggatatggaagatgttatatatctacgatctacacagagaattgggtcaattcacctggacagatg

SEQ ID NO: 11856 - DNA, 403 bp, Glycine max
  Clone ID: jC-gmfl02220134f01a1
aacgccgaaagttcatccaatctccgaaagccttcaccggattgcaaccatgtcgaggagaaaggttagagagccaaaggaggaaaacgtgactctgggcccagctgttagagatggagaacatgttttaggagtcgctcgcatctttgcctccttcaatgacaccttcattcatgtcactgatctgtctgggagggaaacacttgtccgcatcactggcgggatgaaggttaaagctgacagagatgaatcatctccatatgctgctatgcttgctgcgcaagatgttgctgctagatgcaaggaactgggcataactgctcttcatatcaagctccgtgccacaggtggaaacaagacaaaaacaccaggtcctggtgctcaatcagctcttcgagccctt

SEQ ID NO: 11857 - DNA, 308 bp, Glycine max
  unsure (1)..(308): unsure at all n locations
  Clone ID: jC-gmfl02220134g01a1
gcggagccgagttaccttcaattccaggctttgagttagaatttccttataacaatcaaatcaccctcacacacagagcatctgacaataacaacattgggtgaatcggaggtaaggtaacaaaaaacaaaaggcgcggtagtgtagagagttcctttntaatnaaacctcgaaaggatgaaacagctccacaagcaaacgagtctgaatcaccggagggaggaagagatgctggggagcagcgagacctcaccatactcccccaaatccatcaagcacaccagatccctccccagatccatcaacta

SEQ ID NO: 11858 - DNA, 389 bp, Glycine max
  unsure (1)..(389): unsure at all n locations
  Clone ID: jC-gmfl02220134h01a1
cttcttcttcttcgaccttcgattagggcccaacacaaacgcaccattggctccgatcactgcgcgacccaattccatggcggctggccctacaacaacatcaccctccgatcgacccaccatggtccctcccccaaagctcgtctccgactccttcgccaaggacgccatcctcgcctggttccgcggcgagttcgctgccgccaacgccatcatcgacgccctctgcgcccacctctccgcctcctccgcccacgattacgacgccgtcttcaccggcatccaccgncgcaagctcaactggatccccgtcctccagatgcagaagtaccactccatcgncgacgtcacgctcgagctcgccagactcgccgacagaaaccacaact

SEQ ID NO: 11859 - DNA, 316 bp, Glycine max
  unsure (1)..(316): unsure at all n locations
  Clone ID: jC-gmfl02220135a10d1
gaattatgtatgttcaggtcccaaaaaaattcaggncgacagctncacagccggcggccgcccttggttcattggaattaaaacaaacgcgggttaaaatattttttgacggcaaaacaaaaacagggggaacgtttgggataatttgatccggtatatatagaccaccaaaaagtctataaacacaaggggaagctaaattaaaccccaagaagaagaaaaacctagtaaaaaaaggcaaacaacggaaaacacctccaaacatggccacttaaacacaaattaaaaaatgaaaaggaaagaaaaaaaacaaaaa

SEQ ID NO: 11860 - DNA, 412 bp, Glycine max
  unsure (1)..(412): unsure at all n locations
  Clone ID: jC-gmfl02220135a11d1
ttgggncgaggcactataagcaacagaaacttaaagcttttttaacaccaaggaggcggcgacggggaaaaagacaaanggacagacccggaccagcaagaacaggagngaccaagacaccgaaaaaccaaaaacgcagggaaggagcactggggaaaacaaaaagcaaaagacccaacgactagccatctgggaagaggcgaagcacaatacccatgaacaagacaagggggacgtgcccaggaaagaccgagccctacccgcacacagattgaccagaactggcagcccccaacaaggaggcgggaccaggcaccaacaacaagccctgagatacccctgcaggtgaccagaggggcccccgagtgggccccggcaaccaccaaaagggcagccggaacccaccaaacag

SEQ ID NO: 11861 - DNA, 163 bp, Glycine max
  unsure (1)..(163): unsure at all n locations
  Clone ID: jC-gmfl02220135b10d1
gaangaggcgactccgatctcgaggcaatcccgggagacgagcancacaggcggcggccgcccggggtcagcgccaaaaacaaacacctgttaatattttacgccccaaaacaaaaaccagggggcaggggggaagaaaacaaacgggaagcaccaaaccccc

SEQ ID NO: 11862 - DNA, 437 bp, Glycine max
  unsure (1)..(437): unsure at all n locations
  Clone ID: jC-gmfl02220135b11d1
gaaggcgctcttctgattctggaggcattgcgggggaaagctcacagtcggggccgccctggtttttttttttataaaaacaaaacttttttaaatttgattccccacgagacccaggacaaggggcaggggcacaataaagacaagagaacctgcaaaccgaaaaagggaaacgcacgaaagcaaacccaaacaagaacaagcaccactcaaggggcaacgaccggacgaacacaagagcaaaagcacgcacacgganagaacacacgcacggatgaggcaacaacactcacagacggggcacatccctaacaggtagctattgcaacataaaataattgcaatgctagtgcaaagagctaacttttggacccccccttcctgatggacatgacaatgggatcagaaggaaacaataaccaatccattgaaggaga

SEQ ID NO: 11863 - DNA, 289 bp, Glycine max
  unsure (1)..(289): unsure at all n locations
  Clone ID: jC-gmfl02220135c11d1
ngggcncagcgcaaatacacacacacagttttttagtcttatcaaaccgccgaaaccaacaacaggggaacggagaaaaaacaacggccgcgacaacccacaccaaaaaaagggcggaaacgccggccaaaacacaccccaacgagggcaccacacacaaggaaagaaacaaagaccgagaaccaacaacaccccaaaaaaccaaacaagccgccccaaccgccaaaacagccggggggggaggcggcccccaaacacgaccggnccccccagcagcagagagaccaac

SEQ ID NO: 11864 - DNA, 382 bp, Glycine max
  Clone ID: jC-gmfl02220135c12d1
ttggctcgggacccttttaaaaacaccctttttttatatacaaccagcggaagcgaaaagaggggaaacggagagaaaacaaaggcgggaacaaaccccaacaaagggaggggggaaatgctcgccaaaacagaccccaacgaggtcgacctagacccggaacgaaacccaatcggcgaacaaaaaacaccctaaaaacctgccaaagtaatcgaacccgcctgagcagcagcggcggcggccagcccccagagacgacccgcccccccaggagcaaagaaacccaccctcgggccaggaggagcattaaacctcacggcacttgcacgcccaaacagcggaggagaccaccccccgagaggggggacaacggggcccaaag

SEQ ID NO: 11865 - DNA, 153 bp, Glycine max
  unsure (1)..(153): unsure at all n locations
  Clone ID: jC-gmfl02220135d10d1
tggggccatggcnctttcggggccaaacctttaaaacatatctcgcaagggacacgcagaaacgggcnnaggggtgacaagnccaaccccaccacaccggggggccaaaaacaagggaacccaagaagcacccaagagcgggagaagggacgc

SEQ ID NO: 11866 - DNA, 222 bp, Glycine max
  unsure (1)..(222): unsure at all n locations
  Clone ID: jC-gmfl02220135d11d1
gttagatgctatctgattcncgaggcagtagcgggtgacaccctactagccggcggccgcccttggttttttttttttttgaccccccactatattaacgtcattcgcaaaacanacacaggaaccggccaaagttgtacgacagcaacaccaaccatctgnnagcgcaagattcaaggcgttcatgggacattaaatgactggaggagatccccattgtgg

SEQ ID NO: 11867 - DNA, 358 bp, Glycine max
  Clone ID: jC-gmfl02220135d12d1
ttggtccaaaggattttttaaaccccaattttttaatgtcattagcaaaacaaccaaacgcagggggcaagggtagagacagggaacggaatcacccttcacagcgggaaggagagcgtagtctggacattaatggaatgcgagagaacacacaagctagaccatgcccaacgggaggcattatacgaccctcaaactggtccacaacagacaagtgcccgcaggaatgaccattaaccttagatccatgagaggaccctgcagtgcacaagggtattgacccaggccacccactgggggaggcgtgaccatttccccggctgtgacgccaaaaatatgaaaaaggtgagggccccaa

SEQ ID NO: 11868 - DNA, 500 bp, Glycine max
  unsure (1)..(500): unsure at all n locations
  Clone ID: jC-gmfl02220135e12d1
ttgtttttttttttttgaaactaaagactgttctaatatattagaacgccgacngagcatacaggggaaatgaagaattagaaaatctctattgaatgtgcacccacattcccttggctgcaggcaagccacggtaaacgacgaaaagcaagtagtatccaggaggagctatggcattggatggaggcgcctccactctaaccctgtaagacccttcttggccttgtacgtttaactcgtcaatcttgagaaacaaaagcctctgtcccatagagaagccatgagtagtgaagggtggagaatacatggacaccttaatgttattcttggttaactcagctccatcttccaccgagaaacttgcctcaaacaaaccaccatacgccaactttttctccgaagcattcctagacaattggtggcctatacttgacaaagttggcgtccaaattaggaggagagaaagcttcaactcttgtctcaattgggaaactatccac

SEQ ID NO: 11869 - DNA, 485 bp, Glycine max
  unsure (1)..(485): unsure at all n locations
  Clone ID: jC-gmfl02220135f10d1
ttgttttttttttttttcggggcaaaaatatcaaaatatatatgaccggcngccgacaaccccggggggcatggaaaaactttaacaggcggatagagcagcagccgcacgacccgttatatgatctaaatatgataatgtatcaacgggggacaaaatgaaagtccacaaaactggaagaaaaaggagtcaaactggcgatccccaaaaagagagggcacaccacgcgctcggtgggaacagcaacgaggcccggggatcttggagcgccgaggccgaacacgtcacccatgctcatgctactgggcgtcatgccatacggcaaaagccacgtgaagcagagaaggaggcgcgccaacgaaaaattgagcgcgaagagaccgaacaccatcccggggcgggacctgcgaccccacccgaagggcatgaacccgaagctgcacccttagaaatagggcacgcccggttaaagaaaccgggcgggg

SEQ ID NO: 11870 - DNA, 367 bp, Glycine max
  unsure (1)..(367): unsure at all n locations
  Clone ID: jC-gmfl02220135f11d1
ggttagcgtctgtctgattcncgaagcattacgggtgacagctcactagccggggccgacctggttttttgttttttaaacgaaagcctatgttaatatatttgaaagnccaacgaccagacggaggaaagggagaaatttaaaagcgcgaaagagggcgcacccacagacccagggcggcaggcaaaccacggcaaaccaccacgagcccgaagcagccaagaggagccaagcgccgggaaggaggcgcccccacactaacccagcaagacccaaaagggccacgggcgcggaacacgccaatccggagaaacaaaagcccagagcccatagggaaaacacgacacgggaacggaggcgaatacat

SEQ ID NO: 11871 - DNA, 359 bp, Glycine max
  Clone ID: jC-gmfl02220135f12d1
tttcttttttttttttgaaactaaagcctatattaatatattagaaccccgaccgagcatacagaggaaatggtgaattataaaatccctattgaatgtgcacccacattcccttggctgcaggcaagccacggtaaacgaccaaagagcaaggagtatccaggaggagctatggcattggatggaggcgcctccactctaaccctgtaagacccttcttggccttgtacgtttaactcgtcaatcttgagaaacaaaagcctctgtcccatagagaagccatgagtagtgaagggtggagaatacaaggacaccttaatgttattcttggttaactcagctccatcctccaccgagaa

SEQ ID NO: 11872 - DNA, 398 bp, Glycine max
  unsure (1)..(398): unsure at all n locations
  Clone ID: jC-gmfl02220135g10d1
tggggtcttacccctttaacaaccaccctgtaataacttttttcnggngacgacaaaaaaaaaaggggggacggaaggggccaaaaacgccaaaaaccccaacccccccaaaacccaaaaaaaaagcccacggaccagacaaaccaaacgannccacgnaaaggggcggggaaaaccacccccccggacaagcacaaaacacgcccagacccacccgacaaaaagaaaaggaacgcggcccgggaaagcaaacggggagaaaacaaacgacaacggggcccccgaagagaggcccaaccgcccacccataaaacataaaaaaagcttgacaacggaaaaacccagccgggtcacccgaccacggccaaccccacccggacagggggcagaacaaccaa

SEQ ID NO: 11873 - DNA, 116 bp, Glycine max
  unsure (1)..(116): unsure at all n locations
  Clone ID: jC-gmfl02220135g11d1
ttgggtcttgggcatttaaactaacgactttattaatatatttgaaaacagaccggccccacgggggaaacgtggaaanagaaagccgccaaagccccaccacccacacaaaacag

SEQ ID NO: 11874 - DNA, 202 bp, Glycine max
  unsure (1)..(202): unsure at all n locations
  Clone ID: jC-gmfl02220135g12d1
gaatgcttgatttccgaggcaatttcagggtaaacacctcacagccggcggccgcccttgatnttggggttttcaaaaaaccacctgtattaatttcttaaacnaaagaccgaccacacagggaaaaggggaaaatagaaaaccgcgaaagtacgagcacccacacaaacaggggggaaggcgaaccgggggaaacgaccaa

SEQ ID NO: 11875 - DNA, 419 bp, Glycine max
  unsure (1)..(419): unsure at all n locations
  Clone ID: jC-gmfl02220135h10d1
gataaaattctatccgcatttcganacattaaagacgacagctcactagccaacggccgccctttggtccaacgcttttataaaacccccatggtagtaaacctcttacccgcacaaaaanccacccggggcgccaattgtaaaatttaaaacccggtaattcccccaaaacaaaccaaaaaaaaacccctcctccccgcaagcaaaaacaacaaaaaaaaaaaaccaataatctggcacgccaacaacaaccacacgggaaaaaatattacaaaaaccaaacggcccaaaaaaagaaaaaagagtcccaaaacaaaaaacgaaaagggaggacgggggacaaaaaaaaaccagggcaaacaccacgctgtgcgaaaaaacccacccgataaaaaaaaaaaaaaaaaacagaaaggggg

SEQ ID NO: 11876 - DNA, 512 bp, Glycine max
  unsure (1)..(512): unsure at all n locations
  Clone ID: jC-gmfl02220136a01a1
gcaaggactggttcagaggatgccaagtgttctgattttttttcgngcatgtcctcaacaatgactacacccactggatgatgtacgcaattggtggaagctcagggccaacaattctgagccaaggaaaccgtttcatagctccgaacaacaacgccgcgaagctgatcacacacagggactatgctgaaccccaagtgtggaagaattggcagtggcaatcagaaatggacttgttcataaacggtgcacagttcatcccttcaggctcacccatcaagacgacctacaaaaagggtctcctcatgaagccaagagatggaactcatgctagtagattgacacgaaattccggtgccctaaactgcatagttggtaggccttgttagacaaattagttaacattaattgttgttgctgttggttttttttttcttcctccatttttttaaaatgttagaaagcatgcacccatgcatgcatgcacagaagattcatgtcagctaggatga

SEQ ID NO: 11877 - DNA, 126 bp, Glycine max
  Clone ID: jC-gmfl02220136a01d1
cggaaacggaaacactcaaacaaccaaagcctcctgaccagcaaccacgccggcagacgagcagggggaggatccggaacgaacagacgccgacgaaaacgacggggatccagcacgccacaggac

SEQ ID NO: 11878 - DNA, 559 bp, Glycine max
  Clone ID: jC-gmfl02220136a02a1
gcaagttccaagttccaagttcatgcacatccgatcttttcctctgagaagacgtgtcggtagctgaagcattttataagcctccactttcctgaactagttttaacatacaatctttcaagtacacctccccagcttccatttaagaatggagatcactagaataggccaatggttaagtcttctgatatgtgtactactattactgcagacagaaggggttcctgtgggaatcacttttgttgaaaatgcagtggcaaaaggggctgtttgtttggatgggagtcctccagcttaccacttccacaagggatctggagcagggattaacaactggatagttcactttgagggaggaggatggtgcaacaacgttactacttgcctttcccgtagggacactcgattaggttcatctaagaaaatggatacatcactttccttttctgggtttttcagtaacagtaaaaagttcaatccagatttctatgattggaacagaatcaaggttaggtattgtgatgggtcatcattactgggtgatgtgaaagctgtgatc

SEQ ID NO: 11879 - DNA, 553 bp, Glycine max
  Clone ID: jC-gmfl02220136a03a1
ggcaagaaggcaaagatgtttagattttcagctgtgaagcacaacagtggcaagtcctacaatcagttagcggaggagactggactcaccaacgtctatgttgctcagcttctcaggagacaggctcagctcaatccccaaactgcccctctacttcgggcagcgctgcccgacctgccccaagaccttgtttctgagatgatgagaccccctttgaggtcttatgaccctaatctcatccaagaccccactgtctataggttgaatgaagctgttatgcattttggggagagcatcaaagaaataatcaatgaggagtttggtgatgggatcatgtcagcaatagatttctactgctcggttgataaaattaaaggagtagatgggaaggatcgtgtggtattgacatttgatgggaaatatttgccacattcagaacagaaatctgagcacatggtttcaagaacaaggccactgggaaaacagtgagtatcttcattggaggaccaactacgcaatcttcaacaccagtctacctgcacatgaattatca

SEQ ID NO: 11880 - DNA, 330 bp, Glycine max
  Clone ID: jC-gmfl02220136a03d1
ccaaaaggttctaatgcacttacctaacgcctcctgtcactgacgcgcactgtcacaagactagcggcaacaattgcactgataatagtgctccgtgcacgagatgcaagccggacctcattggtcgagatcaccaacccaagaggacctgaaactgcttggagaggctcccacgcataagcaggagacgatgagaacgaacacagacgagatgcacgaaaaccactctagcctctggtacttcggctctagcaagagcaatgcacggtactgtaactccaagactgacagacgagaggggctagacatgtggctctgaagcacgcaact

SEQ ID NO: 11881 - DNA, 544 bp, Glycine max
  Clone ID: jC-gmfl02220136a04a1
gtcttgttggtaaagaaagatttagaatttatgaatcgaagacgaagatggaggacgcatcagcatcaaagttcattccacaccaaatcggaggggtccaaaacgacgcgcttcgattcggtctccatggagtcaagagcgacatcgttggttctcaccctcttcaatcttcactccaatctacaaggagaatggatgaagcgatgaagaggcaatgcaaagttaacctgtacggaactgcttttcccatgaaggaggagcttgacaggcaaatcctgtccaggttccagcggcctcctggaccaattccttcttcaatgctgggtttggagactgttacaggaagtgttgatcactttggttttgaggattgtctaaatgacccccgtgagtcagagactttccggccattagacatgcatcatgggatgggaagttcgccttggtctatctaagggaccagtgtacccaagtattatataattaaaattgactgttattctagtaccagaaaacagtattttgtgatcgaagcttcttgtta

SEQ ID NO: 11882 - DNA, 130 bp, Glycine max
  Clone ID: jC-gmfl02220136a04d1
cgttgacgtagacaccttaccaacccaagcctcctgaaccccatgcacgacctcacgcaagcaggggcaggctttgcaacggcccaacgccggtgaaaacgacggagatgctggccgtcaccggacggcc

SEQ ID NO: 11883 - DNA, 560 bp, Glycine max
  unsure (1)..(560): unsure at all n locations
  Clone ID: jC-gmfl02220136a05a1
aaccccctcaaataaacctcatttcattgtgtgaccaaagttattattacattgcataatcaaccatgtcaatgaagttgtacgcttcccttacctttgtggtgtggcttttcatggccacatcgtccctagcccaatacgttctcgacacataccgcgaacgcgtcgacagcgatgatgagtactacatccggccagccataacggacaacggagggcgtttcacattgatcaacagaaacaggtcgtgtcctttgtacgttggtctcgaaaacaccgacacgccactaggctatcctgtgaaattcacccctttttcccgcaacaacaacgatgatgacgacgacgacataagggtgaatagggacctcacagtggcgttcgatgaagtttcacaacgtgtgtgcaatccacagaatggagagtgggtgagaacgacacgaggagtggaaggaggcttattatcactggccgagacgaaaccacgggatcatacngtaactagtatagaattgtggagacagagaatgctggtatctataacattcagtggtgcccta

SEQ ID NO: 11884 - DNA, 128 bp, Glycine max
  Clone ID: jC-gmfl02220136a06a1
aaacgaatcccaacacaccgttctgaggctctgcactacttcatccatgacgcgtggttcttcaggagccagtgatgaggctccaaggaacttcatatggctagaggagcttgacaagggagagaaag

SEQ ID NO: 11885 - DNA, 319 bp, Glycine max
  Clone ID: jC-gmfl02220136a07a1
aaatcatccagttcctctactatcttggatgtccaatcagtgtgtcctggagatgtgattcttgatctgtctaacatgacaaaccagacaattaaacttggtggtggtctacgacaggactgtgatgcgatttctgtaatgaaggctggcagactaaggttctcaaagcctaataaatactgggttgaaaattctcagaagaggtatgtgccacatgcagaggattctgttcttggaattgttgtagactccacatcagataactttcttgttgacataaaaagggcagctttagcattttttcccatgcttgcatttg

SEQ ID NO: 11886 - DNA, 439 bp, Glycine max
  Clone ID: jC-gmfl02220136a08a1
tatttggttgggtttaatccctgggttgaatcgttgcagacatcacggctattctaagagtgtggggctctctcattcatgtcccaactgtacgacggaggacaggttgcgtaactgccaccaacccttcgccgcacggtgggcgtggtgctctgcctgctgaaggtggtagcccttgagactggctcttcttagctggcggtggctctgctgacttctagcttcttcttaactatgttttctttttactacttttaagctaccttgatctcaaaataacatacacaaacactttcttacttcataagatcacctttgcttgatcttgtacttgtccttcactaaaatgatgctcaaaatcaagagggttcccactgtcgtttccaacttccaaaaagacgacgctgcagactctcctcgtaccgtcagaagctgtgga

SEQ ID NO: 11887 - DNA, 429 bp, Glycine max
  Clone ID: jC-gmfl02220136a09a1
ttttgaactactcttcaaaatgaccaaggcatccaatgccgaagtgattgacgacagaatgattggtcacatgattagcataagtgacgatcattataaaacatatatagcatctcgatgtgtcgaacttgcagagcaactcgctcctagtgatcattggttaatacagaccatgaatacagtctatgagcatgctggagatcttgtgaatattcaggtggcccataatttaatgcgattgctcggtgaacgacttggagaggatgatgatgctgcatatagtcagttgagatcatgtgctgtagagtcatacctgcaacttattgcggagccaaagcttccgtcagcatttcttgaactaatccgttgggttctgggggaatctggcacagctgatggagagcattgtgctttctatatcactgggaa

SEQ ID NO: 11888 - DNA, 395 bp, Glycine max
  Clone ID: jC-gmfl02220136a10a1
gcatcgcgacgactgatcttgacgaatttgcacgctacgtcctcatctagaactcggctcgagcttccatgtatcgcgtctcgcctagcggccctcggctacgctgttgtcgctgtggtggcggcccggggaacttgcgctgcccggatctggttgcagattctcttctgaagcctacagtgcagagctgaagcaacgctcacattcttccaaaatgggctgtacagaacaaagttcttcacccagatactggatcacttcaatctcaatccccaaagcagtcgcactattcagcaaaggtatgtgatcaacgataccttgtggagcggtgccaagaacaatgccccaatcttgggctacactggcagcgaagggaacatgcaatcgcgcacaca

SEQ ID NO: 11889 - DNA, 455 bp, Glycine max
  Clone ID: jC-gmfl02220136a11a1
gttataaaatgatggggtttgaagctcgaacctcattgagaccaaggctagtgttcaccttccttgggatcactttaggctgggtcaatatcctactgaacagggctttaacaacggttctggcccagcctaagcacaagctactttcccataataaatgggctgtccggaagatcttgcaggcaggaactactgacccagtgggcactattatatacgagcaatatgacacattcatatcaggcaccattaacaaggcccctgggagggtgccgaaaacgatgcttcaatatcaggtacaccggcaatgaagggaacatagaatgggtcatacttgacatgctgctgctgtggattcatggtcatatactgcacgtacctaagaataccatcaggcctgcattagatgaaaaatgagacccatactactgaaacttaacagatgaatggctaca

SEQ ID NO: 11890 - DNA, 509 bp, Glycine max
  Clone ID: jC-gmfl02220136a12a1
ctctctctctctctctcgcgcgcactacaactaatgtcatgaaagcattttgttcatagaagaagaaattcctcttcctattagattagggtttttttcccattcaattcaatcatgcttccggcactgtctcaattcaaggtttaccatgtgggtgtggggttcaattcgtcccctaaccccattcccatgcttaccgcgctccgtcgcagccgctgtgttgtcctctttcgcctgcgatcctattcctccacagacttcaaaatcaccgcccacgtcgaaactgactccaccgttcacttggagcgttgctttaacgcgcccgtcgcttcccaccttccttccatttccatgaagggcggccagtatggtgccttcggtgccgttaccttggagaaatccaaacttgatatgtcgcaaaagcaaacaaggtctagccccgagctagacatctggggaggctggggagatatcggacagaaaatcaatcatggtggcggtgatgaagc

SEQ ID NO: 11891 - DNA, 490 bp, Glycine max
  Clone ID: jC-gmfl02220136b01a1
ctcaaacaaaaataatctttagcaactcttttctctttttttgctactccattctgaaactttctgataccgacacacagcaggaccatgatgcggtttgtgatgtcttcaagctccaaacgtgtgtctaagtgcttcatttttttgttcctggcttccctacactttggatccaacgctcaactcttaccacaagatgaagtgaaattgctacaagcaatatcagacaaggtagagaacctgaattggaaagttacacaacattcttgcaacggggatagaggatttgataacaggaacatttcaagggataagtctcaaatcataaggaatgtcacgtgtgattgctctttcaacaataacactacttgccatgtgacatcaattgcgctcaagggtctcaatatatctggacctatacccgatgaatttggaaatttaactcgactagaaatacttgatctcacttggaataatttcatggctcaat

SEQ ID NO: 11892 - DNA, 613 bp, Glycine max
  unsure (1)..(613): unsure at all n locations
  Clone ID: jC-gmfl02220136b01d1
ccaaacacgtacccttgattctagtcttatacattctttaccaaagtcttacagtgtggcttgtgagctcaatccttgtgtagtttgcacaattttttgtacatccccttttattcttataaataggtatcaaattgttcctgttctgctcatctagtggtttcttgatctctgtctcattgaacaagttactaagctatgttatacccttcccccttaaaaattcaagtttgaataagaatattatctggttcaattgttttaccattgtttatctttctctagcctgttcttttcttgaaattcttgaattctgtgtaaaatgtataattatgactatgttctttagtgaatagtgattaactctcaatatttgttattgtcgcatccccttcattgagtagcttgtagaaataagtcatccattttttcatgatatcttgcataattaccaaagctttntacaccttctcttcttttntaatgagtttcacttgacctacttttgcctttgctgtgcttcttatccttccaaaccttacatagctgatcacctgaccccaggtccttgcanaagagaaattatttgtatgctgatacgtcaaacatatac

SEQ ID NO: 11893 - DNA, 495 bp, Glycine max
  Clone ID: jC-gmfl02220136b02a1
ctcgagccgtttggttttggatgagaagatgaggatttgacacgagtgagtgagtgagaacaagacattgcacttgtcatcatcatcaagctctacatttctttatcatcagtcaacagacacgcatgcattcatttgttcagctgccaccgttctcggtatctcatgtgatcttcaaagtttgttgctttcagccttttcaagctgtccatttaagtttttgagagcaagcagttttttatgaggaccgaataaaagattcaaatttctatgacgtctatcaaatcattgagatggctgatgagaaaaaagagtggattgtctgatgggggtaaatcaagtttcaagatgaaacatctgccttttctggcagttttgtgcacgataatgttattcattgtgtatagaaccacaaagtatcagtatcaccaagaagagattgacaaaaaatggagtttctggggacaaccaaaggtgtatccttcaacttatggg

SEQ ID NO: 11894 - DNA, 578 bp, Glycine max
  Clone ID: jC-gmfl02220136b02d1
cattgactagaaatcccatattttccccccatactaactcacccaacccctctttctaaaaggcctcaaggatacactccggacttaattacgttattttgttagggtcaccgtttcgagatattctaaacttgtactgaaaaatatggagggaaaagaagaggacgtaagagttggagccaacaggtacggagagaggcagccaatagggaccgctgctcaggctaaagactacagagagccaccgtcggcgcctctcttcgaaccgggagagttgtcatcgtggtctttctatagggctggcatagcagagtttgtggccactttcttgttcctctacatcacagtgctgactgtgatgggatgtgttcaaatctaagagcaagtgttccactgtgggtatccaaggcattgcttgggcttttgggggaatgatctttgctcttgtttatttcactgctggaatctcagggggtcatattaacccagcagtgacgtttgggctgttcttggcacgcaagctctctctgacaagggcaattttttacataatcatgcagtgcttgggagctatatgt

SEQ ID NO: 11895 - DNA, 555 bp, Glycine max
  Clone ID: jC-gmfl02220136b03a1
atcgaaacctgcatggttactttattaatttttccaccttctactgcactccgagtaacaactcgcactatttatgttgcggtgacaatgttaattggcatatgtgttccgttctttggctctcttcttggatttcttggaggctttgcgtttgccccgacatcatattttttgccctgtatcatatggcttaagcttaaaaagcccaagaaatttggcttgtcttggacaattaactggatctgcattattcttggggtagtgttgatgatattatctccaattggtgctctaaggaatatcatactatcggccaagaactacaagttcttctcgtagactattgatgcaatcattgatttcccaactgttttaaaagttagatgggtgaaactaaataacaagaaagcatttacatacatgctttatgcatagaatatagataatagatagcttcataggatttgtagaagtgatagacacacaactagccttgcacaaaattgaagcaactatcttgctcactatgtagaatgtagatcatttatggagaca

SEQ ID NO: 11896 - DNA, 444 bp, Glycine max
  Clone ID: jC-gmfl02220136b03d1
gatgaatataaaatggactaatcttcggccgtcctgtgaactctctgtgaaaaaactaccctgtgagacaaccattgcaccaattcgtcagaattatggagtttacacacagagttacaacttactacaaatggaataacttgaatcctttgtggctgatgtctttctctcacctgaaatcaacttggaatctgcatgagcttctattgaagagatactttgatcaagatggatgggaaaaactctcttcaaataactagaagtggtattggtgcttatgatgacgatggacatgccaaaaggactgggaatttgcatagtgctgtagctcatatgattactgctggtatcggctctggcgatctttctcttgcatggagcactttccaattaggatggattggagggccatttcccttgctttgttgtgcaattgtcacctat

SEQ ID NO: 11897 - DNA, 535 bp, Glycine max
  unsure (1)..(535): unsure at all n locations
  Clone ID: jC-gmfl02220136b04a1
atttctctgttcatatatatattgcccattgtaattgtacatggaaggaggagtacctgacgccgatatctctgccttcagagaatgcctctccctctcatggaagaatccctatgtccttcgcctcgctttctcagctggaatcggtggccttctttttggctatgacaccggagtgatatctggagctcttttgtatataagggatgaattcccagctgtagataggaagacttggcttcaggaatctatagtgagtacagcaattgctggagcaataataggtgctgcagtgggtggatggatgaacgaccgatttggaagaagaaaatcaatccttgtagctgatgtcctctttatagttgggtcagcagtaatggctgcagcacctgtccctgctgttctcatcataggtcgagtttttgttggccttggtgttggaatggcttcaatggcatctcctctctacatttctgaggcttcccccaccaaagttcggngagccctngtagctctcacagtttcctcatcactg

SEQ ID NO: 11898 - DNA, 133 bp, Glycine max
  Clone ID: jC-gmfl02220136b05a1
aaacggctctcaaaacgctgattgcagtttttgcacgactgcatccataacacggggcggtgagcgagccatgggggacaaagaacttaaggggggactaaagaacagatcaagacaactagagcagacaaag

SEQ ID NO: 11899 - DNA, 473 bp, Glycine max
  Clone ID: jC-gmfl02220136b06a1
tcaaaaggttttcatccaattatcttccctttcttttcattggagtgcactttcacttgtggagctgcatcaactgcagtggaaattgtgctttgttcttgagatgtctggtgttcttctttgggtgagttgtggacccaaagagaacatcaactccttggtgagtttttcatgcaggagtagtagtggtggtgaaagaacacaaaagagattttctggaatcagttttgctagtggtacttctgctttttcaagtgcagtggcagctactgagacttcaagatcttcagaggagagggtctatgaagtggttctgaagcaagcagctttggtaaaagaacacaacaggggtacaaaaatagctctggatttggacaaagatgttgaggctgatttaacaatgtggatctgttgaatgcggcttatgatcggtgtggtgaagtttgtgctgagtatgccaagacattttactt

SEQ ID NO: 11900 - DNA, 513 bp, Glycine max
  Clone ID: jC-gmfl02220136b07a1
cggaggagttgaaatgaaatcatccactgtctgttgtggtttatctccgcactccgtcttcatgaatcagcatcaccaccgctccaacacaggggaaaatgagggagatccttcacgttcagggagggcaatgcgggaaccagatcggttcgaagttctgggaagtggtgtgcgacgagcacggcatagatccgacggggaagtacgtcggaaactcagatctacaactcgagcgcgtgaacgtgtactacaacgaagcttcctgcgggcggtttgtcccacgcgcagtgctgatggacctggagcccggaaccatggacagcgtgcggactgggccgtacaggcagatattccggcccgacaacttcgtgttcgggcagtccggcgcgggcaacaactgggccaaggggcactacacggagggcgccgagctcatcgactccgtccttgacgtcgtgcgcaaggaggccgagaactgcgactgcctacaggggttccaggtctgacactcgc

SEQ ID NO: 11901 - DNA, 333 bp, Glycine max
  Clone ID: jC-gmfl02220136b08a1
tgaaagagcagacttgaaattacccactgtccgtagccactgatctgcacactcacgtgtcaaggggcatcttcagcaccgctccaccacagatgaacatgaggtggatgctgcacgtccagggagggcaatgcggcaaccagagcagttcgaagccccggcgagtgtcgtgcgacgagcacggcatagatccgactgctcaccacgtagaatactcagatccacaactgcagggcgtaaacgtgcactacaacgagccttcctacagactgatagtcccacacgcagtgctgatagaccctaagcccggaaccatggacaggctgcggtccg

SEQ ID NO: 11902 - DNA, 471 bp, Glycine max
  Clone ID: jC-gmfl02220136b09a1
cttggatggaaaagtctaacaagctaaggcttctgataccgaatgcacgagatcagacaaactaggggaggctttcacaaggagtgacagtgttcaaggaactatagcatattgcatttacatcagtcatacatacgtaaaccataaggagtacagacaggaggttctacgtctacttgctacagcatagcaaaagcttacttcaccagattatctgagcattagccaatgtcgtatgacctcggatgagacatagggtgtagcaagcatactagagaagcgatgacattctgaaaacaaggatgatgcactatcggcatttcaaatagcatttgatctggtagagaatgagcaccatactgaactgtaaatgctagagatcgccttgcaccacctaaatactaaactttggaaactgcacagtcaaaacccagtgagacagctaccactcaaaatgccaacgcgaatgga

SEQ ID NO: 11903 - DNA, 491 bp, Glycine max
  Clone ID: jC-gmfl02220136b10a1
ctttagctcgtccgcttttctatgaacatcctccatacaaagcacaaaatccgcatactatcctgtggatctttacaacatgcacccgcgatttctacgatcccttcacatggtccattctgtgcacccttgccttaccgtaaagaaccttagcctgatatctcaacatgcgcttacgatttcgtctacaatggccgtggataccacttgctgcagaaccgactagatattaaaggactacaccgcccactgaaccgacatcggacgagctctctatcaagacgtggatgacttctaccgaccatgcgatccatataaggagaacttgcgcctgtatcgcatgcagagtgcttcatctgacgggacattatcggcataagaagttgctacatagcttccggagcctgcactcggaatcactagagctagggatggcatgaaccgctgggtctggactcctgtggcagctgcgcacagtgattcacggttgc

SEQ ID NO: 11904 - DNA, 521 bp, Glycine max
  Clone ID: jC-gmfl02220136b11a1
gaaccaagctctcgatctcacctagcggtcttctgctgcgcaagaagaagacgcatggcgactgggagaaacttgcggtagaatggacacggtcctacgccaacggaagcggccccagtggtgaagcgctatgctcctgccaaccagaagaaaccggtcagcgaacaggcgcatagcatgtgatcggcttgatcggacagacagaaccgggaatgactgagagaggaatcaagatgcttatccaggaggtgcacacattgcagatcacggagatgctggcagcaatcatggtggtaatgagaatcactagccaagagtaatagctgtagcagggcgaagttgtatgcgcagctggccacattgcaacaccgcgctggacctgagcccgacgatcacgggcccaaggctgcgattctcctcattgcacggaacaggcttcctttggaacaggtatgtgaagctcgctttaagggaagcaaccgcacatctgagaaacgtacactgcaagcctgagtgcttct

SEQ ID NO: 11905 - DNA, 596 bp, Glycine max
  Clone ID: jC-gmfl02220136b12a1
ctcgagccggtttgttttcttctttttcggttcctgatctgaactcgattcgattcgctattgccggaaaatgagtcctccggcaagtgtccggtgatgatcgctccctcgagaggttgttgaggttatcgttgttgttcttcgaagtcatggtttcgatctgaggtgctgtcagtgctcacagcgcgacgctgttgagttgaaatttcgctggttttgagttgctttgtgactatttttttttctcggcaaccaaacaggaggattcaaaatttgcactgattaattagtaaagttttggcgctctcgagttcgttttggtgaggattctgattaaggaaatttttcttttattcattcggaggagaagcgtctcaaactctctctctttctccctcggttgtttatttttgaaattttattttcctttatcttctatgtagtactgctttacgtgtgacatgtgaattggaatgcttattccagcttatacaaaacagagacggatctctttctattgttctcgctttggttctttagcagtagcatcatcatcatcaccataccttgttcagattctgctacttttaccacaa

SEQ ID NO: 11906 - DNA, 320 bp, Glycine max
  unsure (1)..(320): unsure at all n locations
  Clone ID: jC-gmfl02220136c01a1
agcaaatgagggattcggatttgcttcattaatggcatgcagtaacctctcttccaaatgttgtttagatggatactgcttgccattcatgaaccaaatgagggattcggatttggttgacaagtttttttttttttcttttttctttttgggggggttggggaggaaacaaactgtattacatttttaggttagaagctatttaaaagctttttactgggggttgacaagatttaacattatatcatgttaatatgttgtacagttctatatttgcaatgggaaatgccttcggcggtttttcaattnnnaaaaannna

SEQ ID NO: 11907 - DNA, 557 bp, Glycine max
  unsure (1)..(557): unsure at all n locations
  Clone ID: jC-gmfl02220136c01d1
gcaccacattcacctgaggcttccaaagcattggcttcccttgcagcatccactgctgctgcttcccttggcatgtcagaaatgcttggaaaccccatcaacttcagtggtgccacaaggccagctccatctgcttctagtcctgcctnctttaagactgtggctcttttctccaaaaagaaggctacaccaacacctccaaaaaaagctgctgctgctgctcctgccaatgatgagcttgccaagtggtatggtcctgacagaaggatcttcttgcctgagggtctcttggaccgatccgaaatcccagagtacttgaccggagaagtccctggagactatggttatgacccatttggtcttagcaagaagccagaagactttgccaaatatcaggcatttgagttgattcatgccagatgggcaatgcttggtgctgctggattcatcattcctgaggccttcaacaaatatggagcanactgtggtccagaagctgtttggttcaagactggagctctgcttcttgatgggggtacgcttgactactttgggaa

SEQ ID NO: 11908 - DNA, 483 bp, Glycine max
  Clone ID: jC-gmfl02220136c02a1
agcgaccacgctgtccattctttgccacctttaatttttgtcctttggcgacctccatccatccatgaacttctccgacaacctccttcggtagacattggagtaacataataagatggaccagcaaaaccaaaataacactccagatggttcaggagaggtgcctttgaagcgtaaacgtggtcgtccacggaaatacccaaagccagattcagaggagagttcctatatcctagttagtcaaaatagaaggcagaatcctgttcgtgctgaacaagctccagtacctcctggatttgaaggggttaatggaaatcaacagcttcaaaggggtcaagagaatcattcaaataatgcaatggtgggccagctagtttccggtgtaattgaggctgcatttgatgcaggatatttgcttagtgttagagttggtgattctaatactactttgagggggctaatcttcaagcctgggacgatacg

SEQ ID NO: 11909 - DNA, 602 bp, Glycine max
  Clone ID: jC-gmfl02220136c02d1
gttaaaaatgatggggattcaagcttgaacgtctttgcgatcaaggctagtgttcaccttccttttgatcaccgtatgctggttcaaaatcttactgcacagggttttaacaatggttctgtaccagcctcagcacaagctactttcccatatttatttgcagtcagtaagttcttgcaggcaggaacttttgaccttgtgggcactattatatacgagatagatgaacatccatatcaaagcaccttttttaatggcactgttgaggttgttgaatctggtgcttttcttagcatggaatccgtttttcttgttactcttggggttgcactccttgtcctcctggggctatggattcatggccaaatacagtacctatctaagaaaacaaagagggctccaaaagttgaagttgggactaagactactgatgcttcaacagatgaatggctacagggaactgcttatactcagtctctgtcaagcaagtcaaagaagaagaagtagataaacaatttctcacgttcagccactcactagactctaccatggatatggcatacagaatcctgtaactgactagggttgagtatgagagaaca

SEQ ID NO: 11910 - DNA, 464 bp, Glycine max
  Clone ID: jC-gmfl02220136c03a1
accaaagacagcacatgggattttaagtctcttgctgagttgcaaagccatcatcaatccaatgttgtgttactataagtatttaacagcatagacacacaccctttggttctggccaccctcaggtgtgaatacaataccttagcatgaaattcaactgtgtgggactacatgttgaagtttgattggtgaacgaggtgcgctaatgccttcttaagtattgcttttctgtcactttccctctgtgttggtttgctctgatcacttttgtctgcattacaacctgagcctcagatctgatctcttgatccacaaaaccatggctgagaaggtgaccatcatgaaactcaaggctgaccttgagtgtgagaaatgctacaagaaggttaagaaacttctcggcaagtaccctcatattcgggaccagaagttcgatgagaaggaaaacatttgtgttcatcaca

SEQ ID NO: 11911 - DNA, 212 bp, Glycine max
  unsure (1)..(212): unsure at all n locations
  Clone ID: jC-gmfl02220136c03d1
cgaaagagggcggctgatgcaaatagggactggacggaaaccaccaaagagggncgagaagcgcgttatagaaaacctgttgaccgggggagccctccataacccgagcgggcgccacagcggcggagcgggacctcttgagccccctagagagggggaaaagcgcgctcggggcaaacacgggcacagactggtcccgtgtgaaaaacggg

SEQ ID NO: 11912 - DNA, 572 bp, Glycine max
  unsure (1)..(572): unsure at all n locations
  Clone ID: jC-gmfl02220136c04a1
gtggttaggaggattggcaattttcttgatcttgtatatgcaaagggtatggaagatttgctggaaccaactcttgggttgtgtaaggcttttctagcacgttcagttagctgcacaaaaggcttcagctacacaacagaactaattctcttaggtgactgtcctcccgagttgagtggtggcgctgtcgatccccaacaatgcataaaagatatagcggactttggaagcaatgtcggtgtcttgctagagttgagtgcctctgcagaaaccagtattgctgatatagcttctgaatgtgttgtcttactgctcaaggcagctcctagagaagccaccactggtatactaaccaatctccccaaggtgactgtgatcctagagagctggagtagaggcattcctcacttgatcatccagcgaatgcttcacgctttaggctatgcttgcangcaatacttactgcatgcaatgatattatcaatatccaaacctgagatttcaagaactgaagtcatagtttctgaactcaaaaattcaggtgtaccagctttagccaagacagctgggct

SEQ ID NO: 11913 - DNA, 460 bp, Glycine max
  Clone ID: jC-gmfl02220136c04d1
cagtactgcacgcgccttacggaggcagcgcctcatcaacgcgaactcgacagaagagctggagcggggaggatgttgatgccgaagcggacggcgcgagctatactgacgcgaaacgtgtgcctggggtgaactacataggaccacccaaggctgaacccgaacaatcagatgtcacaacggagagtaagcaatgtctgacatggcttgatcaacaaccaagtagaagcgtgaggtacctgagttgtggaagccgcggatctggctcagtgtgacaactgagagaaatagcaagagggtgggagaaaagtggccacagttcatgatgggcagtgaagaggccaacacaagactacaaaacaaagcctatacacgacacaagaacagcaacaacaacaatggattccgagtagagttcatggttgccaagagggctcatcgagagaaccaatgacagggg

SEQ ID NO: 11914 - DNA, 197 bp, Glycine max
  Clone ID: jC-gmfl02220136c05a1
cggaggtgttgaaatccaactttttactgtgtgttggggtggatgcgcgctctcagtctaggtgaagcaggatgtgcaccggtccaacacagttgaaaacgagggagatcctggacgtcacgggagggctagggggcgaccagatcggatcaacagcctggtgagtggtcgacgacgagctcgggatacacccgacg

SEQ ID NO: 11915 - DNA, 138 bp, Glycine max
  Clone ID: jC-gmfl02220136c06a1
cggaagcgcaaaaaagcaacttttcacggtgtgaccgaccagaaccccacacccgggccacagggagcagcaagagcaccgaacccacacaggccaaaaagagggggaccccggacgcccagggaggagcaaggccgg

SEQ ID NO: 11916 - DNA, 107 bp, Glycine max
  Clone ID: jC-gmfl02220136c07a1
cgggggtgtagaaaaccaattttttactttttgaggggccggacgcccgcacccaggggaaagggagcaggcaaagcaccggacaaccacaggggaaaacgagggag

SEQ ID NO: 11917 - DNA, 556 bp, Glycine max
  Clone ID: jC-gmfl02220136c08a1
tgtatgtcaccattttactcggaggctgttcatccagactccaaagttagacagacgattcagtgcgttagttgtggttcaagcatgtggatcaatggtaacagaggagcagcctcatgccatgttaataccaatggagtactttctcatgggatatggcttgtacaagccatccaagctgagtgtcagcccaagaagccccttgagcccatcttgcatttctcccgagctttactcgccagagagtatgggtttgaaattgaaacccataaagacacgaatttctctggaaatctagaagtagatgaataaaaggctgggaaaatggtgccccttctcatctgttcatgaaagaacaagttcatgattgtatggttagtgggaatgaatgaggggatgccatgccagatcgttgtagatagggggagataaggaaataagaaatcaacaaaagaggaaagaaatgggaagcggttagtagaaatcaacatatagtgattctttcatttgtaatcaatcatagatcatagattttagtcaatgagtttcaaacctg

SEQ ID NO: 11918 - DNA, 485 bp, Glycine max
  unsure (1)..(485): unsure at all n locations
  Clone ID: jC-gmfl02220136c09a1
gccacaacgcgctattaggccatagacgaactacgcggcaaacacaccacgagacggcggccgaccttagatgttaaactttaaaaacccaaaccctcaaaagccggaaacngagaaacagacaacagggaaggactccagggacaagcaacccgagaaaacgacagaaacagacgaaagccacgcgaaaacgaccaccagagcccgcaaacagcaaggcccacggaccggcccacgaaaccaacagcacaccacccaacagccaggacgacgacgaagaagcaggacaccaaaggccgaagcacaacgagaaagacaaaccgaccaccgaacaaaaacgaaaccaccaccagaagatacagcctaaaaagccagccctccaacaccaccagcgcacacagaagagcaaccgggccgctctccccatccagaccgggcggcaaatccactcagaccgacaaaggggaaatgcgaacgaacccggg

SEQ ID NO: 11919 - DNA, 446 bp, Glycine max
  Clone ID: jC-gmfl02220136c10a1
gacatcaacggactgcttgatgctattgacagaatttgcacgcgtacgagcgcactaaacgcgggtcgagcgatgatggagagagatgaagagaaagatgctcctgaagcgagtgtgctgcacggcggtatgaggggaacgattgacgacgagcagcgcgcgtatatggaccggggaatcgtggccgaacaggatggaaccaaagccatcgggcaatatgctgaaaacccctgcagagccctctgatgtcaccgacagtaccgaagaactgagcggacatatcgtcactcccaggagaaagcaacacccacgttcatagctaccaacaaacggccagaggcacaccagacgatgtggatccaaagacctggctgcatgagcgcaactggccatacgaaacgaacatgagcgaacaagattcgtacctctctactttgctttgcggg

SEQ ID NO: 11920 - DNA, 404 bp, Glycine max
  Clone ID: jC-gmfl02220136c11a1
tttattttttatgtttttttaaccaaagtcctcttaaaccaaaaacgccaactcccgcaacccaggcgaccgttttaaggtctaaagcccaacacaaacgaccaagccacctttcgggccaagtaccacttgactaccaccaccgcccaaaccctaaaagcccacccgatgcaaaacaagcacgaaaaacataagaggaacacacagacgggaaaaacctaaaaactctgacaaggaaacgatctcatgctacaagaaaaagaaaaaagcgcccattcatcaatagcacttgcaaacggaactctagaacggtggcagacacacacagctctttgcaaactttactcagacttaacggtggggaaagcgagaggccaagccaagttcataagccttaaaaagac

SEQ ID NO: 11921 - DNA, 571 bp, Glycine max
  unsure (1)..(571): unsure at all n locations
  Clone ID: jC-gmfl02220136c12a1
ttttgaactactctacaaaatgaccaagtcttctaatgccgaagtgattgttgacagaatgattgattacatgattagcataagtgatgatcattataaaacatatatagcatctcgatgtgtcgaacttgcagagcaatttgctcctagtaatcattggtttatacagaccatgaataaagtctttgagcatgctggagatcttgtgaatattaaggtggcccataatttaatgcgattgattggtgaaggatttggagaggatgatgatgctgcatatagtcagttgagatcatctgctgttgagtcatatttgcaaattattggggagccaaagcttccgtcagcatttcttcaagtaatctgctgggttctgggggaatatggcacagctgatggaaagtattctgcttcctatatcactgggaagctatgtgatgttgcagaggcatattcaaatgatgaaactgttaaggcatatgccggtttcagcattaacaaaaatntatgcatttgaaatagcggctgggaggacagttgatatgctacctgagtgtctatcttttattga

SEQ ID NO: 11922 - DNA, 568 bp, Glycine max
  unsure (1)..(568): unsure at all n locations
  Clone ID: jC-gmfl02220136d01a1
ggaagaacatggctacaggaacggatctttgttgtttcatcctcccagaagccgaacttttccctacaaggttccaagtgaagtcataccttggaaggccatggaagcaattctcaaggacggttgtgatggaatccaccgtgggtgacttccttcaccccgaaggatggtgcccatgggccggtgaacacttcgaagacaccttgtactatgctgaatacaacaacgatggacctggtgccaacgttaacggaaggatcaagtggaagggttaccgtggtcttattagccgcgaagaagctacccaattcacccctgcccagttcctacaggctggagccaacggtggaagcgactggttgaaagctctccgtgttcctcacgcacttagcttcatgaaggcttaattgaaattacacaaacacatatccatgcatcatcaattgagtactgttagagagtgtgatgatgagggtcatagtccgtagaccaattgntattctttggatttatctttggaggtctaccgganatattnttaatgaaaatttttaaaattgctttgatt

SEQ ID NO: 11923 - DNA, 596 bp, Glycine max
  unsure (1)..(596): unsure at all n locations
  Clone ID: jC-gmfl02220136d01d1
ctgaggagttgaaattaaattatccactgattgttgtggtttatctccgcactccgtcttcatcagtcagcatcaccaccgctccaacacaggggaaaatgagggagatccttcacgttcagggagggcaatgcgggaaccagatcggttcgaagttctgggaagtggtgtgcgacgagcacggcatagatccgacggggaagtacgtcggaaactcagatctacaactcgagcgcgtgaacgtgtactacaacgaagcttcctgcgggcggtttgtcccacgcgcagtgctgatggacctggagcccggaaccatggacagcgtgcggactgggccgtacgggcagatattccggcccgacacttcgtgttcgggcagtccggcgcgggcaacaactgggccaaggggcactacacggagggcgccgagctcatcgactccgtccttgacgtcgtgcgcaaggaggccgagaactgcgactgcctcaggggttccaggtctgccactcgctcggcggaggaaccgggctccggatggngaccgcttttgattccaagatcagagaggagtaccctgacagaatgatgctcaccct

SEQ ID NO: 11924 - DNA, 289 bp, Glycine max
  Clone ID: jC-gmfl02220136d02a1
gggaagtgttcacagcaacatttttacctatagttgaagggcaggcgcgcgcgcggggacgagggagcagggaaagcaacgaacaaccccagacgaaagcgacggagatcctttacgtctctggagggctaaggggcatcaaaatcggctcaacgtctggtgggtgaacgacccccagcacggaatctgacccactgagctacacgaactaaactggcacccccagctgctgcgccgtgatcggggggacaacgagtgttattacagaatgtaagggcaacgcccgcag

SEQ ID NO: 11925 - DNA, 579 bp, Glycine max
  unsure (1)..(579): unsure at all n locations
  Clone ID: jC-gmfl02220136d02d1
gatccatgtagccgatctcacctagtgggattatgctttgttgttgttgttgtggtggtggttttgtgattattgggctgccatggatctggttggatcttctggtttgagtcctacagggtccaagtgaaggtcaaagtttcgttttttaatgggtgagtgattcagctgctgaatgagtttgaaatggtgggtcagttttagctgaaaaaaggggtgtgaggatagaaaatgaagcgcaaggtggttcagcacaagtggaagaagaagctttttgctttgatcttggtggtgttttgtttaggaagcttgttgtttatgcagacacgttaccatcatgttgcggggttggtttcattgcaacaccgttttgtttctgagcccgaggttcaagggcccaaggttgcgtttctcttcattgcacggaacaggctccctttggaaatggtttgggatgctttctttaggggaggcgatcgcaaattctcaatntttgtacactgcaggcctgggtttcttctcaacaaggcaacgactagatcaccatattttttgaatcgtcaagttaatgatagcgta

SEQ ID NO: 11926 - DNA, 233 bp, Glycine max
  Clone ID: jC-gmfl02220136d03a1
gggaattgttgacaccaaaatttttactgttagttgaggcgcaggcgcgccctcagggaagagggagcagggtaagcaccggaccaccacaggtgaaaacgagggagatccttgacgtctcgggagggctaaggggcaaccagaaacgatcaacagcctggtgagtggactacgcccagcacggaatatagccgactgagcagcacggaggaaaccggcatccacagctggtg

SEQ ID NO: 11927 - DNA, 515 bp, Glycine max
  unsure (1)..(515): unsure at all n locations
  Clone ID: jC-gmfl02220136d03d1
aaaacctatagcgaagagcgtgaaggcacctgctggcggccatgacattcaagcgcacgaacggaggtcgaaacaaacacggccgtggccatgtcaaattcatacgatgctccaactgcggcaaatgctgccccaaggacaacggncatcaagaggtttcttgtgaggaacattgctgaacaagctgcagtcagagatgtgcaggaagcctgcgtctatgaacaatacacgcttgcgaaactatatgtgaagatgcagcactgcgcttcctgtgctatccattctcatgatgtgagggttcgatcccgcactgataggaggacgcgtgagcctccacagagagttatcacgcgcatggtaacactttttatagccatctctatatagccaaatggagatgatatagagagtgacatttatgcactcagaagagtagttatggccgaatgtacagaatgtcatgccattattaggttgttgaaagatgacactgaatatgctatactctgacctta

SEQ ID NO: 11928 - DNA, 169 bp, Glycine max
  Clone ID: jC-gmfl02220136d04a1
cggaagagcaaacccccaaattttaagcgtcagcaggggagcaacaccacagccggggcagaggaagaagaaaaagaaccgaacaaccacaaccgaagaggaaggggaaaccgcacccacagggacgaggaagccgcaaccagaacgcaccacaacgccggaaagagga

SEQ ID NO: 11929 - DNA, 563 bp, Glycine max
  unsure (1)..(563): unsure at all n locations
  Clone ID: jC-gmfl02220136d04d1
ggtgaagtcaaggtttgtctcttctggtccgtcctgatcttctacgcagacacataacataacacagcgcacctcttcttcttcttctttcccttcaaatttcaacttcttcatccattttgtgctccaaacagcacaaacacttgaatcacaccgtcttcgctttctactcatctaaaagatagaggttcatgggttgctttggcttctgcaaaggagatgatagtgttacagttgctgacagaggacctttcatgcaaagcactcctactgggaaccccagttatcatggaagacacacagcagtaactgctcctcggactataaattttcaacctattgctgtcccttccatcacagtagatgaattgaagtctttgacagataattttggctcaaaatatttcattggtgagggtgcatatgggaaagtatatcaagccacattgaaaaatgggcatgcagtagtaataaaaaagttagattccagtaatcagccagagcaggaatttctttctcaggtctncatcgtatcaaggctaaagcatgataacgttgtcgag

SEQ ID NO: 11930 - DNA, 535 bp, Glycine max
  Clone ID: jC-gmfl02220136d06a1
attaattgcaagaacggcactttttcgcatggtgaagaccccacccgatctctacactctaggggttgcgatagaaagccatgccagagactaatatttttggcatgctgtttggccaaacactcccattccaagttcattgcgagatcttctaaagcctggccctgcaagtgttgaaatcgatgatcaccctatgcaaattgaagaaacacagtacccgaaaaccttcttctataaagaagaccttcatccaggcaaaacaatgaaagtacaattcagcaagcctccctttcaacaaccatggggtgttggtacatggttaaaggaaattaaagacactactaaagaaggatatagctttgaagagctatgcatcaagaaagaagccattgagggagaagagaagttttgtgcaaaatccttgggaacagtaattggttttgccatttcaaagctgggaaagaacattcaagtactttcaagttcctttgtcaataagcaagaccaatacactgtggaaggagtgcagaatctt

SEQ ID NO: 11931 - DNA, 556 bp, Glycine max
  Clone ID: jC-gmfl02220136d07a1
tgccatttcaatccccagtttcttcttcaatgccctcttacgagcagatcccaattctccttcccagtttcaaaccctaattccctcattcccatggcctcagaagagcccactgtcgcggtggaacccgctcccgaacctgccaccgtcgagcctcccccggaggagaaggaggagcccaaacctgaagccaaggctaagaaaaccaaggaacccaaacctaaaaaggtttccagaccacgcaacccttccactcatccttcctacgaggagatgattaaagacgcaattacctcgctgaaggagaaaaccggttcgagccaacacgcgattgcgaagttcatcgaggagaagcacaagcagcttccaccgaacttcaggaagcttcttctctaccatttgaagaaacttgtagccgctggaaaactcgtcaaagtcaaaggctccttcaagctcccacctacccgaccttctgcatcttcttcttcttcgccggcgaagaagaagaagcccgcacctgctaagccccaacccaagcccagcctaagcctaagcc

SEQ ID NO: 11932 - DNA, 528 bp, Glycine max
  Clone ID: jC-gmfl02220136d08a1
ctaaaaccctccttggtctctctctctacttgcagatcaagccgcaccaaccgttgtggctgtggattcggttggggctcggagtcgctatggcttcggcttcgtcttcgtcctccaagctatgcttcaattccgactgcaaagaagttgaagtccgaaagacctaataaagggcggagactccgcagcggagaactagccgagctttgtgatcgatgctgctctgcttttgaagaagggaggttctgtgaaatttttcactcaaatgcttctgggtggaggagtagtgagacttgtccaaagcggattcattgtgggtgtattgtttcaagtcatgcttttatgctgatggatcccggaggaattgaatgttatgcatgtgcccgcaaaagtattattttgccatctaacctgccttggccacagtcctttccccttcaaaatcgtttatcggatagacttagagacctatctggcaaggttggagtcagctaactggatcaggtactgttccatggaagcaagcac

SEQ ID NO: 11933 - DNA, 555 bp, Glycine max
  Clone ID: jC-gmfl02220136d09a1
tgaggagcctgctgatctttagaatttggggcaacgacatcactagacggcggccgagcttggaaacttttgtttgaaagcacaacaacttcgaaagaacaaaggcgaacgctgaaacgcaccgggggacatcaccacttacaaaagccaaaagcggggatctgaccgaaagaacatgatccaaaaagacgtcaaataaatactattgtacagacaaagattagtttacaaaagtcaatcctgtggcgcctttgagtgagtcagatggaattgaagtgaataaaagaattaattctggtcgtaataaccaagaaaggtcttggcagcatgcaagctagggaaataagtggggtcaaggaatatcttggtgaacccattattgggctcggagctacgcaccataaccgctacaacctgcttatacgcgtagaagaacctctccatggccacctcaatgccctgcatgcgctgcaaaacatgaacctaccctctctatgtctccgagtaaaccttgctggtgcggcgtcataatcgcggggccacccttggggtcca

SEQ ID NO: 11934 - DNA, 317 bp, Glycine max
  Clone ID: jC-gmfl02220136d10a1
ctttctgcttgcgtggtaacgaaagcaaccttccagacccgtgtcaaacattacttgacaagcgggggaagcttctgagcggccgcaccgcagtgggacaccaacgctaccactgtccttaccaacctatcaagataggacccattgccataaaccgtgcgacagtctgatcctcaccacgtgactgatatgtacgaatcagaacaggacgacatggatcaatctagcacgtgacgactgactcaacgacaatgactccagggagaggaggaggcagatgctgagtgcacaaagacggaaggtgaagatggagcact

SEQ ID NO: 11935 - DNA, 482 bp, Glycine max
  Clone ID: jC-gmfl02220136d11a1
ggaaaagatgactctaggccacggaagaacttgcggccaacagcacacagacggggccgacctttgatggaagatttaaaaacaattttctaaacgccaagtgctgcacggtggtacgagcgtaactatttacagaggagcatcgcgcgtatatacacagaaaaaagaaaggggaacacgaaaaaaacaaagcaagcggacaaactgaaaaaaatccccccagagaccacagaagacgccgacaaaaccccaaactgagcggacacaacccaaggcaaaaaaaaataaacacccacaaacagagctacaaacagggaaccagggggaaaaaaaacgaagaccaaaaaaggaccgggccgaacaaaaacacccggccaaaaaaacggacatgaacgaacaaaatgcgtacctaaatagggcccaaagagggatagaacccaaacactacagaaaaacctgccccgcggaaactgggggacaac

SEQ ID NO: 11936 - DNA, 521 bp, Glycine max
  Clone ID: jC-gmfl02220136d12a1
cttggatggaaaattccaacaagctatgggtactgctaccgaatgcaggatattagataaactagaggatgcatttacaaggagtgacaatgttcaaggaactttatcatattgcatttacatctctcattcctttgcaaaccttacggagtacagactggaggttctccgtctccttgttacagtatttcaaaagcttgcttcaccagattatctgagcatttgccaatgtcttatgttctcggatgagtcagagggtgttgcaagcatactagagaagcttttacattctgaaaacaaagatgatgcactttcggcatttcaaatagcttttgatctggtagagaatgagcaccaagcttttcttctaaatgatagagatcgccttgcaccacctaagtctcagcctttggaaactgcacagccaaaacccattgagacagcttctactcaaaatgctagtgcgaatggacaggatgatgttcagatgaccgatgatgattctgatcctatggtcaatg

SEQ ID NO: 11937 - DNA, 464 bp, Glycine max
  Clone ID: jC-gmfl02220136e01a1
cgggattgttcactggaacacccttactgtctattttttgccaggggcgcgcgagcaaacgaggcagaagggaaagtaaccaacaacccaacacgaaagcgaccgagattctttttctctctgtatgcctcattgtctatatcaatcggctcaccttctcaatgattgaacgacacacagtgaggaaactgaacccttgtgcttatccagctaaacaagcacaccatttttgtgtctgtgtactggggggatagcgatttttatcacagaatgtaagggtaacgtccgcagaacttcaggtttagcaatgaagactggtcccaagaatagctgcaagcgtgcatcacacaggctctgtaaggacacggcgaagaaccgcgaggatgactcgccactgatggttctggatctgcagactgctaggaaggagagccgcacggacgatgctgcggcgcttgacgagc

SEQ ID NO: 11938 - DNA, 505 bp, Glycine max
  Clone ID: jC-gmfl02220136e01d1
attataggtggcagttaggtactcacaagctacaactgctaatcactcactgaaatgcttttactggtacatggtcaatatcaagtacttaaatagtgaatctagtgacagtccccctaattatatatggagataccttatatcaagctttattaggttgcaacttctatcttcatttgctactggatccttttgttatactgtacaacttaattcgctatgtcataattatagcgccaattcttgttctctgatgatgctcttaaagaaatgcctagcatgatgggtgccacctattgggagttcgatagtgattcttgtcatatcaaaatgctgggatcaacaccagagccacctaaaggatcttaaagcagcattgattgtgattgctcttttgcaaataacacctgccatgtaataaggatgtcaatatcactgtatcttatcctgaatgctttgaactttgaagtagtttatgctacggtatgcattcggatatagctag

SEQ ID NO: 11939 - DNA, 541 bp, Glycine max
  unsure (1)..(541): unsure at all n locations
  Clone ID: jC-gmfl02220136e08a1
gtgaagggcccagacggccaccgtctaggtcagggtcagggttttaattttcgccacacaacagcaacagacactacctcactgcttccgtttacggatttcaatcgcttcgactcgcagctcccatggcaaaagctacttccggaaccgtcaatcctcacagccgtaccggagttcggattgtcgtcgccggagaccagggcaccggaaaatctagcctcatcatcacggccgccgccgaaaactttccggtgaatgtaccaccggtgttgcctgccacgcggttgcctgaagatctgtatccggatcgcgtgcctatcaccatcatcgacacctcttcccgtgctgaggatagtgataaagttgctgaagaattgcagagggctgacacagttgtccttacctatgcatgtgatcggcctgagacacttgaaaatcttagtatattttggctttcacatcttcgcaaactagaggtgaaagttccagttatagtagttggctggaagcttgatttgagagatgagaatcagcangtgag

SEQ ID NO: 11940 - DNA, 456 bp, Glycine max
  Clone ID: jC-gmfl02220136e09a1
tgcactccgggttattatttcattagacgaagtatgcacgcatacgccgcatcaaactcggctcgagctttaatacttaaatttaaaaaaccaaagcctcactaaccggaaaaacgaaagcccacaaaccgagcaacactttggagagacaaaaacgcaggagacaacgcctcgaaagctggaaggcccaaggaacaggaaaaaccaaaacgagagcagaaagacaccgcaaaaagcaaaagccaccaaacacggaaacacggacacaacgcaaaaccgaaaacagacgaaggaacaaagcacagacaaaaaccgggactaaaaaaaacaggggcaccccaattgaaccatacacatacagcggcacacaagtgagaccagttcccaaggaaccaagcctaatagggacataaggatgtacaacaccccacagggcataaacatactctccatgga

SEQ ID NO: 11941 - DNA, 612 bp, Glycine max
  unsure (1)..(612): unsure at all n locations
  Clone ID: jC-gmfl02220136e11a1
ganaactaggactcctgctattatgacgaacttgcaggcatacagaccctactaaactgcggtcgaccttttttttttttttttttataaaccatgacataccatataccacttataaaaacaatatattcatggggatcattcgttcggatttcatagagacatactagccaaacactaactaaaataaaaaagcaaatctaaagagaaaaatctacaaaccaataactagagaacatctaaacttattcatcttcactacttaacctaagaagaagccataattatctaacatcacggatggtgaaatattattctctaaacacaggttcaattcaaacttaatcaacccttctggggaggactcgccttgtcccaaaacttcaagtgcacagctctttcctccagcatttgctcaacttcttccattggaactcccttggttactggcacgaaaatgagaacgaagaagatgccaatgagagcaacagatccaaacaacatgaatgtccatgctgtcccaatagccacagtcaaagtcaagaaagactgggaaacaatgacgtttgaaacccatcaagttgtaaaagcaattcctccacataccccacg

SEQ ID NO: 11942 - DNA, 378 bp, Glycine max
  Clone ID: jC-gmfl02220136e12a1
cttagctgtgaaatttaaaaaaactcatgcctcacgaccaggatgcaacataacacttaattcggggaaagttttaaccgcgcctaacagtgttcataacatgggctataaaattaacaacctggtgaggtaattaatacccatagagcagttcaaggccagcggaataggcagacgacgcgaggcaggagatcatcaagattgaggaacgcataatatccacatgaacacaacataaccggatacatagggaatataaagggagccaacgaatacattaataaccgccctcatctgatattaactgacagctgcgacttgcttacgcataattctactgcccatacaaatagagaagccatactgacgttatcgtca

SEQ ID NO: 11943 - DNA, 575 bp, Glycine max
  Clone ID: jC-gmfl02220136f01a1
gaagtacgtttaccgacataaggaaactctctctctttttcgccagttttggactttgatccccgcacaatattgtgtaatcagactagtcactaatctctttgggtgacaataatagtcaaaataccagtgattgttgcacagaaaatttgcccatgtatttatacctcagcccaccatgaaattaggtaacaaactgtgcattttatggtacctgcaattggttgttttactatttccagctgacttttgtatttgttctttgctttgaaatgggttggactagtatatatttgtttggccatctggggtaacaagattgtgacacctgaaatggggatcatcgtatacatatattataaaattttttaggccgtggttgtcagttctagttgagggtcgattgtttcttgacccaattgttcagtgtgggttaaggatatgttctttctagttctttagaagccataataatataactatgctaatcagtggctcttcctatgattcacttagtgttaaatgggttgtgttttatgatccatctccttagttttagattctaacctaactaa

SEQ ID NO: 11944 - DNA, 98 bp, Glycine max
  Clone ID: jC-gmfl02220136f01d1
ctaaaacgtaaaaattcaacaacccaaggttttctaacccgaaagcaggacatcagacaaacagggggaggctttgaaacggaccgacggggctgaaa

SEQ ID NO: 11945 - DNA, 469 bp, Glycine max
  unsure (1)..(469): unsure at all n locations
  Clone ID: jC-gmfl02220136f02a1
gattagttaacaagttcccattttagggtttttctctctctgnctctctgactcttgtcttctgcacacaaccacatgccctggggggaaatccccaataatggacgaaggtgagggaggcgatcccatggatcagttccaccgtaacgaggctatatccgctgtagctgacgacggtttcttgggcgaggaggacgacgattacgaggatctttacaacgatgttaatgtcggcgaagggtttcttcaatcgttgcggaagaacgaggattcnggggtttcggaacgacgtcgtcgaggacaaaaagcccgtgcagcagcctgatcaagatcccgttgtcggggtttcgatacccggtgtcagtggtggccgtggaagtggaattgtggaaagcaaggtttctgggaatgttgatgggttacagaatcaagggtttagaaggggttattctggtggaggaggtggatc

SEQ ID NO: 11946 - DNA, 483 bp, Glycine max
  Clone ID: jC-gmfl02220136f02d1
ctctagcttgtccgcttttctatgaacatcctctctacaaccgacaacctccgactacatctcttgacagctttttaacgtgcacccgcgatttctacgatccgttcccatggtgcattctgtgcacccttgccgtaccgtaaagaaccctacgctgatatcacaattaggctcacgatttctcctacaacggaaagggctagcacttgctgcagcggcgactagatctgcaaggactacaccgcccactgaaccgacctcggacgcgctccctatcaagacgtggatgacttctaccgaccctgcgatccatatgaggcgaactggcgcctatatggacatgccagagcatcatcggacgggacatgaccggcataagaagtggctacatagcttccggaacctgcacgcggaatcactagagctaaggatggcatgaaccgcagggactggctttctgaggcaggtgcacacagtgcttca

SEQ ID NO: 11947 - DNA, 525 bp, Glycine max
  Clone ID: jC-gmfl02220136f03a1
acatttttaatctcatcccctttttgctcttactctctctctcagggcatcagatgagaagattaggatcggcatcaacgggtttggaaggattggccgtttggtggccagggttgcccttcaaaggaatgatgttgaacttgttgctgtcaacgatcctgtcatcaccactgattacatgacatacatgttcaagtacgacaccgttcatggccagtggaagcattttgatgtgaaggtgaaggactctaagacccttctctttggtgagaagcccgtcaccgtttttggaatcaggaaccctgaagaaattccatggggtgaggttggtgctgattatgttgttgagtcaactggtgtattcactgacaaggacaaggctgctgcttacttgaaaggtggtgccaagaaggttgtcatctctgccccaagcaaagatgcacccatgtttgttgttggtgttaacgagaaggagtacaagccagagcttgacattgtttgcaatgctagctgcactaccaattg

SEQ ID NO: 11948 - DNA, 553 bp, Glycine max
  Clone ID: jC-gmfl02220136f03d1
agaaaaaataatggcaattggctttcagtcttctctcacactcttctctctattttcggttccctgactcacttttgcttttgcccctatccttcccagatttccttcttcagcagttagtgcagagctgaagcaacgctcacattcttccccaaaatgggctttacagaacaaaattcttcacccagatactggatcacttcaatttcaatccccaaagcaatcacacttttcaacaaaggtatctcatcaacgataccttttggggtggtgccaagaacaatgctccaatctttgtctacactggcaatgaagggaacatagaatggttcacacaaaacacgggctttatgttcgaaaatgctccttcttttcaagcccttttggttttcatcgagcatagattttatggaaaatcaataccatttgggggaaacaagacggttgcatatgcaaatactagcacacttgggtatctcagctcaacacaggcattagctgattatgccgctctcatcattgatctgaagaagaatttgtcagccactgattc

SEQ ID NO: 11949 - DNA, 190 bp, Glycine max
  Clone ID: jC-gmfl02220136f04a1
cgggattgttcacaccaacatttttactgtctgttgaggagcaggcgcgcgcgcggggacgaggaagcagggaaagcaacgaacaaccccagtcgaaagcgacggggatcctggacgtctctggacggctaaggggcaaccagatcggatcaacagcctggtgagtgaactacacacagcacggaatcca

SEQ ID NO: 11950 - DNA, 224 bp, Glycine max
  Clone ID: jC-gmfl02220136f05a1
cggaattgtacacaccaaagtttttactgtctgaggaggggcaaccgcgccctcaggcatggggaagcatgatgagcaccgaaccaacacagtggaaaatgagggggatcctgcacgtctcgggacggctaaggagcaaccagagctgatccagagcctagtgagtggactacaaccagcacggaatacatccgacggagaagcacggagtgaacctagatcta

SEQ ID NO: 11951 - DNA, 288 bp, Glycine max
  Clone ID: jC-gmfl02220136f06a1
cgaaaacgcaaacacccaagttttccctgtctgaggccgagcagccgcgcccccggggaaggggaagcaggacaagcaccgaacccacgcagcgcaaaacgagggggatcccgcacgccccgggacggcgagggaacaaccagaccgcaacaacagcccaggggggtggaccacgcccagcacggaacagacccgaccgagcaacacggaggcaaccggcaaccacaaagcgagcgacgacacaggtagtagaacgagggcctgcaccgacagccacgccaacgcccg

SEQ ID NO: 11952 - DNA, 564 bp, Glycine max
  Clone ID: jC-gmfl02220136f07a1
gaattcgtaattatattattacacacatactcatatagtagaggaataaaacaaaggctctcatatcaaagcatacacagctagctattcacaatggccctgcgggttcatttctcaatagtttccatagcggttttggctctatgcacttctgcagattacttttcggctaattttagctatgctggtccaaatggacctgagtactggggaagcttgagtccatcttatgcagcatgctcacatgggaaatctcagagtcctgtggaacttatgaagactgatattgtcatcaacatgcagtcgaagaatctaaacagaaactaccttcctaccaatgccacacttgttgacaacatattcaacattggggtgcactttgaaggaaaagtaggggatattaatataaatggaaaaaattactccttaaaacaattgcactggcattctccatcagagcacatggcatatggtcgtatacatgacgcggagctccatctagtccaactgaccgaagatgatttacagcatagcagttgtggcagtgctctacaaattgggtga

SEQ ID NO: 11953 - DNA, 486 bp, Glycine max
  Clone ID: jC-gmfl02220136f08a1
gataaaccgggctgctagctgctatagagagtcgttcgcacgcgaacagcgcacactgaacaccggccgacctttagaacttacaatttaagaaaccaaaacctcctaaacaccaaaggggcaaacaaaaaacccggagcgacattttggagcaaacgaacccgagcaacaaaaccccgcccgacaacgctctaacaaggccaacaaagcaaggcttgcaaaaaaaacaaaagcaaacctaaccaccaagaagcaccagggcaagcacgcatgggggcatgcctaccaacattaaaaaaaaatggaggaagaaaaaaaaaaccaacagcaacaacaattaagggtaaccaacatggctaacaaggccaaccaactatgcacgcaaaggcaccggaaatcccaggcaaaccaccagccagagcgccacccctgggcatcatgaggagaccccatgagaaggccgcccagatgggggaacccgaaggg

SEQ ID NO: 11954 - DNA, 585 bp, Glycine max
  Clone ID: jC-gmfl02220136f09a1
gctatcgtgggtaattgattcatttaagaatttgcacgcatacagacctcactagaactccggtcgagctttgtttttttttttttaattacagatagcctcctttatcgataataaaaatgtcatgttcacaggggagacatttataatcctttatcaggttgcctacccttacactttggaacctttcaaatcatcaatcacagcttgttttttgatgatgcaacaatcgaacccatactttgatggtttgagatctcaaaccacaaagccatgagtgcaagtgacacatctcgttcaataaaaactagataactaataaagtatagtttgtagtaataaataaataagcatactcttttaaatgaatctatacgtctggacgctcattctgatcaaaaatacgattatggcaagttaggtcgcaagggtaggcacaatctatctcacggaagggccttcgatcataaaaccaatcacccactgcctttgcaattgatgtcttggccaccactggggagtcatttctcagccatgtctcttgaattccaaattggcaatgtgcatagcaaccatctataaaat

SEQ ID NO: 11955 - DNA, 401 bp, Glycine max
  Clone ID: jC-gmfl02220136f10a1
gatgaatataaaatggactaaaaagcggccgtcctgagaactctctaggaaaaaacgaccctgtgaggcaaccattgaagcaattccgcggaatcatggcggttacacacagagttacaaccgactacaaatggaataacttgagcgcctgggtggcgccggaccttctcttacccgatatcaacttgaactctgcatgagcatctatcgaacagatactatgatcaacacggacgggaaagactctcgtcaaagcactagaactggtatagcagcttatgatgacgagggacatgccacagggaccgggaatatgcagagtgcagtagcccatatgatgactgccggtagcggctcaggtggacattctatcgcatggagcactttccaattaggatgga

SEQ ID NO: 11956 - DNA, 461 bp, Glycine max
  Clone ID: jC-gmfl02220136f11a1
gacacagcgggtgctaggactatgacgaagttcgcaggcagacagagcacactaaacggcggtcgagctttgttgcactcgcttttacaaagcaatcctcataaaccgaggaaaaaaaaagaggacccagggagcaatttgaaggaaaagaccgcggagacagccataacgaagcaaaacaggaaagcccgaggggcaacacacaaacagccaaacccgaaaccggagaatcaacaacaccaagaaagagaaagcgacgccgggcacgacaagaagaacacccaataaagagaggaacagacccgaacaggagacccacgagaacgcaaacggaacgagagcaccgaggcaaagccaaaggtgccaagacaactggaccgggtaaagcagggacaccgaaaaggccaagtcaagacactaagactacagctattgacaacccaagaacggcaaccgcaaca

SEQ ID NO: 11957 - DNA, 136 bp, Glycine max
  Clone ID: jC-gmfl02220136f12a1
ttaaaaaacacactttataaccaaacacacctcatggacagcaaccaaatccggccattcaccgcggaggacttctctcactcctacagcctatacgaagacacagactctaacaacagtctgaacaatcacaaca

SEQ ID NO: 11958 - DNA, 611 bp, Glycine max
  Clone ID: jC-gmfl02220136g01a1
tggtgtatctaattcgatgaccctatgccgcgtacgtagctcggattcgtcagtacaaactcagtttccaattcaccatattacattttttgatctagattggcaaacaaagatggttcactccaacatcatgcctccaatgtcccccaaactctctctcccggatcataacattccaatcccaactttgcaactcccccttcgccaaaacgacatcaccgcagcgtcgtctcctatctgcgctgcatacgacaactaccttcgtctccctgagctcagagccctctgggcctccaaggacttccccaattgggccaacgagcccatcttaaagcccgccttacacgccctcgaaatcaccttccgcttactcgcaaccgttttctccgacccgagaccgtacatcaacaaacgcgagtggacccgacgcgtcgagtctctcgccacggcccaaatccagatcatagccatgttatgcgaagacgaagaagaaaaccccgagacacgtggcaaggcacccgtgactgacattaacggctttaccggtcaaagcagaagctacagcgaggaaagcctgctcccgcgcctcgccacgtggcagaaatccaagg

SEQ ID NO: 11959 - DNA, 364 bp, Glycine max
  Clone ID: jC-gmfl02220136g01d1
gaaagagaacgacacgtcaaaaacaataacgggcagcacccacaacgggaaccggcgcgctggaaacccccgtgggaaaccaaacctcccaaaccaagacggaccaaccgaagaagcaggggagaccaccggggcacggagaccccaaaactcccgaaccgaccgaaaccaccaagcccagcaacaaaccccacagcaaagagaccaaaaccaaaaaaccgaaacaggacgaagaccccgcagcgcagaacgagccgaacacggagaacgaggcaacgcagcagacgaagaaggcaggccccgcgaaaaaaagcactcaaaagcaacaggccgaaggagaagcgagacccaacgaaagcggaga

SEQ ID NO: 11960 - DNA, 414 bp, Glycine max
  unsure (1)..(414): unsure at all n locations
  Clone ID: jC-gmfl02220136g02a1
ggaggcagcgaagaggcggtgttagtaatttaatttgcattattgaattgaattcctctgttctattcgattccatgcgagacagagacagaagaaaagaataaattataaaagcagcagcaaagagtcttgatcttgatctggtggcaaacgatggcgtttcgtggtctcggtgtgttgttggtgttgttgtttgtgattggcgcgggcgccgacgatgccaaacgcgacgacgacagggctcccaagtcggaatcctgcaataaccccttccaactggtgaaggtggagaactgggtggatggtgaggaagggcatatntataatggcgtcagtgctagatttgggtctgtgttgccggagaaacctgacacagtggtgaaactccagcaatattcgctgatcccttagact

SEQ ID NO: 11961 - DNA, 499 bp, Glycine max
  Clone ID: jC-gmfl02220136g02d1
ggttgatggagagagttgaagagaaagatgctcttggagcgagtgtgctgcacggtggtatgatgagaacgattgacgaggagcagcgagtgtatagggacgggggaatcgtggttgaacatgataaaatcaaagcaatcggacaatctgctgatatccttgcggagttttctgatgtcgccgacagtattgttgatctgagcggacatatcttactcccaggatttattaacacccacgttcatagctcccaacaaatggccagaggcatagcagacgatgtggatttaatgacctggctgcatgagcgcatctggccttacgaatcgaacatgagcgaacaggattcgtacctctctactttgctttgtgggattgaactcattcactccggtgtaacctgttttgcggaagctgggggccagcatgtttctgggatggctagagcagttggcttactgggtttgcgagcttgcttaacccaatcaaccatggactc

SEQ ID NO: 11962 - DNA, 345 bp, Glycine max
  Clone ID: jC-gmfl02220136g03a1
cgccgagtgactgacacgtcttttacccttgttcttcacttgcacttgatgctaaagagccttactagattataccaagaggaatgcacttgcgacttgtgtctttcaccaatggcgttgactctagatctatacgagggtggagctggtggagtcgctgtcatcacgatgggcataccacccaagaatgctggagacaatacaactagcatgggggagacaaacagatcagatgatgcatctaggaggagtgatctgagaacgctatgggagactgtgaaaggaaggacattatctggtggatttgatatcagtgatatgcagcaggtgcaccggactaaggac

SEQ ID NO: 11963 - DNA, 620 bp, Glycine max
  unsure (1)..(620): unsure at all n locations
  Clone ID: jC-gmfl02220136g03d1
gaattcaactcttctctttctctttctctcttcttctgtcgaagaagaagaagcagaagtagttagcagaaacatgctggagaatcttcaggctcctccgccaacggaatcggccccagtggtgaagcgctatgctcctcccaaccagaaggaaccgttctgccaacaggcgcaaatcatctgatcggcttgatcggacaaacagtatcgggaatgacttagaaaagaatcaagttgcttattcaagaagtgttcacattccagatcacggagatgctggtagcagtaatcttcttaatgagaatcactattcaagattaatagctttagaaggggtagtgtancctgcancctgcccagctgcttaatgatcgttggacagctgcactacaatcctacaataatcccaaagattcatctgaaaagccagttatgtattcgagtgggacatcaggatggactccgttcagacctccttaacaggacttgcttggagaacttgcgaggcaaatgcacagtgcttattctaggtttaccacatgatggttggcttggattgtctaattaagcctttggatgatcgtggatttgctgaatgctttatgaacactttgatgctc

SEQ ID NO: 11964 - DNA, 591 bp, Glycine max
  Clone ID: jC-gmfl02220136g04a1
taaaattaagccaacagtgttttttggatttttgggacaaggaagaacttttactaaagaagtgattgaggcaatggcttctattaacaagagacctattattctttctctttccaaccctacgtcacagtcagaatgcactgctgaagaagcttacaagtggagccagggacgtgccatttttgcaagtgggagtccatttccccctgttgagtacgagggcaaagtgtttgtgcctggccaggccaataatgcatacatattccctggatttggtctcggtttaataatgtctgggaccattcgagtgcatgatgacctgcttctggctgcctctgaggctttggctgcacaagtgagccaagagaactttgataagggactcatatacccaccattcaccaacatcagaaagatttcagcacacatagctgccaatgttgctgctaaggcttatgaacttggcttggccactcgccttcctcaacctaaagatttagtgaagtttgcagagagctgtatgtataccccagcctacagaagctaccgatgaaaagtgataataataaataggcgcctttttctttttca

SEQ ID NO: 11965 - DNA, 530 bp, Glycine max
  Clone ID: jC-gmfl02220136g05a1
tggtcggctggttatgtaccgactttcctcccatgctcgtccactctcaagacctttctccctctcttcgctccttctctcacaggcccatttctagaaccaccttctctctctatcctctccttttgaagccctccaaatggctccacatagagcccaaatccaggacttgccatgccctcgtcgccgctttgtctgcagaggtccaagtgcccgaaactttcgacgacacggaggaggacgacggtgctgatggctccaccgccaccaacaccgtccccaccaccaagcctaagaaaggcaaggccgcattgcctctcaagagggacaggacgagatctaagaggttcttggaaattcaacaattgagggagcgtaagatagagtatgacttgaagacagcaatatctttggttaaagaaacagctaaaccaagtttgtagaaacagtagaagcccatttccgcctcaacattgaccctaaatataacgatcaacaattaagagcaacagtaaatctgcctaagggaa

SEQ ID NO: 11966 - DNA, 531 bp, Glycine max
  Clone ID: jC-gmfl02220136g06a1
caaaaccctaaaccctcactttttttttgtcttccgacgagaatggccggcggcatcgacatgtccctagacgacattaagaagcgttcagccgccgccggggcttctcgccgccgattcacggttgttcacaacccggccagaacgactccgtacccgattccgcaggtaaggcaacagagcatggttgcattatttccagaaatggttttggaggagacaggcgcggctaagattgaaagtggcaccaagctctatttatctaacttggatcatggagttaccaacgatgatatcaagctgctgctctcggaagagggtgaattgaaaagctacactattcattatgatcagaggggaagatcaaagggaactgcacaagttgtgttcgtgaggcattctgatgctttattagccatcaagaaatacaacaatatgaggcttgatggaaagccattgcacattgagctcgttggaacaagtttggctactcctgctgacgctcctctctgtcaaaataacttgatggga

SEQ ID NO: 11967 - DNA, 470 bp, Glycine max
  Clone ID: jC-gmfl02220136g07a1
ggacagattctcatcgcacaagccaccgcttagtcagctgtgacaaagtttcgactgaagcggagggacagatgctatgagaaaaaggggcgatatcaaagccggaagagattggcagagcaacgcccccgggtgaaagggcagtttgttcgccaagtacatgatgatcatccagtagcagatgtgggtggcggttcctgaaattgttttgtttcaagttaccttcatcattgaattacagtctgacttgcaaatctgatttggctttctcgacaaggattaactgtagggtctagtttgtctggtgaaattatgtttcctcttagcgttgttagtattgtcttctggcttgatatattggctaggtcttacaatgtaagattgctagtattctgcatgtgttggttagaagttgagattttacctcgtgtatatgctatgttgatcggatactcatatagggctactat

SEQ ID NO: 11968 - DNA, 463 bp, Glycine max
  Clone ID: jC-gmfl02220136g09a1
agaataatggtggtagtgctacgacgaactcgacggcatacgcctcattaaactcgggtcgagctttgactagaaatcttatatttgaacgatactctaactaactaaaccaactattctaagcggccggatggattctcttgggacttaaatgcgacatgtcgatagggtcaccggttcaagatagtccaaacctgggctgaaaaatatggacggtaatgaagaggacgtaagagcagtagccaacaggtacagcgagaggcagccagtaccagaccgctgcataggctgctgactacagagagccaacgtcgacgcctatcgtctaaccaggagagttggcacagcggtctctacataaggctggcatatcagagtccgtggccactttctagcccctgtacatcacagggccgactgcgacgggatgtggcaaatctaagagcaaagagtaccactgtgg

SEQ ID NO: 11969 - DNA, 172 bp, Glycine max
  Clone ID: jC-gmfl02220136g10a1
gtcacatgaacgctgatgcaatataagactctacggaaaaaaccacaacagacgcgagacgcccttgaacgaaaggcttttgccaaccggaccctccaaaaccacaacggacacccccgacaagcaggggcaccttttgtaccctaaaccgagggctaaaaagcccacctga

SEQ ID NO: 11970 - DNA, 450 bp, Glycine max
  Clone ID: jC-gmfl02220136g11a1
agcacgcggctgtacactatgacgcctcgccgcaacagcgcacggaactcggctcgagcttgaatataaaatggtctaaacctcgaccctccagagaacgctctgagacaaaacgaccctctggggccacctttgaaccaactagaccgaattatggagtcatacacacagagccacaacgtactacaaacggcacaaacagtgcaatcacaccggcttatgactttcactcacctgaaagcaacatggaaactgcatgagctgctatcgaatgaggacatgaaacaacaaggatggcaaaaactcactccaaataactagacgcggctacggggcacacgatgacgatggacataccaaaaggactgacaaatcgcagagtgctgtagctcatatcattactgccgctatcagcacaggcgatcaatctaatgcttggagcactaacca

SEQ ID NO: 11971 - DNA, 131 bp, Glycine max
  Clone ID: jC-gmfl02220136g12a1
cgcaaaagtacaccttcaactaactaacgcctcttgaaccagatccgcgctatcagtcaagcaggggcatcctttggaacgcccaaacgccatggaaaacgatggagctgctggccgccaccggagggaca

SEQ ID NO: 11972 - DNA, 528 bp, Glycine max
  Clone ID: jC-gmfl02220136h01a1
attctttgaagggtgaaaaaccttgatcatgaattgtatcattaatcttcaaccatggccacacccttggcctaccaagagcaccttccggcggcacccagttggctgaacaaaggtgacaacgcatggcagttaacagcagccaccctcgttggtcttcaaagcatgccgggtctcgtgatcctctacgcaagcatagtgaagaagaaatgggcagtgaattcagctttcatggctctctatgcctttgcagcagttctaatatgttgggtgcttgtgtgttaccgcatggcctttggagaagaacttttacccttctggggtaagggtgctccagcactaggccagaagttcctcacaaaacgagccgtagtcaatgaaaccatccaccactttcataatggcactgttgaatcccctccagaagaacccttttaccctatggcctcacttgtgtatttccaattcacttttgctgctattacccttattttgttggctggctctgtccttcgccgaatgaacatc

SEQ ID NO: 11973 - DNA, 578 bp, Glycine max
  Clone ID: jC-gmfl02220136h01d1
gtttagtactcaatgtcggtcatccttaccctgatgagcctcatactttatatactgtcagtctgggctcttgtagtatccatatcagcagacacatcatccatttcacaatcccaatccctcagccttggaagaaccatcgtttgtacacatgagcctcagaacctggattcttcaatcattgaaatccacacagacgctacctcgggatttggttcacgaatattccgtctcaaaacattgttcgggtcgcagactgtggcaacccaattaacgactcctttgccatcttgagcctaaacagctctggccatttggaccttacacacaacaacactgttgcttgctccacatgttctctaagagaaacacagaatgcagtggcctagctcttggattctgggcaatccgtgataacggacgaaaacgaagtgattcaagaggcatatctgcggcacagttttgattatccttctagtacaaggttatcaggaatgaagattggatggcacctcataagagatctcagtattcaccctacagcttgtaagagtgatgatgatccaaccgcgggagac

SEQ ID NO: 11974 - DNA, 549 bp, Glycine max
  Clone ID: jC-gmfl02220136h02a1
gaaaggagagggtccagcggtgttgttcctcctcggcttccctgagctctggtactcatggcgccaccagattctctctctcagctccctcggctaccgcgccgtcgctcccgatctccgtggctacggtgacaccgaggcaccaccttcaatagacagctacacttgctttcacatagtgggtgatctcgttgcgcttatagactctctgggtgtccaacaagtgttccttgtggctcatgactggggagccctcatgggttggtatctgtgcatgtttcgccctgagaaggtgaaggcctacgtctgcctcagtgtccctttcatccccagaaaccccaacgtcagaaccgtagatggcttgcgtgctatgtatggagaagactattacatctccagatttcagaaaccaggggaaatggaggctcagatggctgaagttggcactgagtatgttctcaaaaacctccttacaactcgcaaaactggtcctccgacctttcccaagggagagtacggaactggattaatctcaatatgaccgatatc

SEQ ID NO: 11975 - DNA, 577 bp, Glycine max
  Clone ID: jC-gmfl02220136h02d1
gtggctgcttgtgtggaaacgaaggctaccataatcaacccttctcaaacatttcttgatttgttggagaagggttgttgtggctgctcgcgtggaaacgaaggctaccactgcccttctcaaacaaatcaagaaatgtctcagtctcagaaacattgtgacagcctcagcctcaccaactacactgatttggacacgtcatcatcggacgacattgatcagaatagcactggcggcggactcaaggacaatgactccatggagaagaggagaaagagggtgagtggaagaagttggaaggtgaagataaaggacttcattgactcacagatgaggaagctggtggagaagcatgaggagtggttggataaactcacaaagacactggaacagaaggagacggagagggtgttaagagaagaagagtggaagagacacgaagctgcaaggttggagagggaacacacattttggtgccaagagaaagcatggattgcagcaagggatgctgctctatggaggctttgcacaaattaaccgggaacgggatcatatagagtactcattctactgatgg

SEQ ID NO: 11976 - DNA, 268 bp, Glycine max
  Clone ID: jC-gmfl02220136h03a1
ctaaagtaagccaacactgtttttgggtttattgccacaccgaaaaacctctcctacacaagtgaatgatgcatcggctattatatacaagagacctctaattacctttatctcacaccctacgttacagtgcgaatgcactgcgctagatgcttacagctggagacagcgacccaccacttgcgcttgcggacgtacatcctgatacgacgagctctaagaccgagagggaggccctgctctatgcactaaggcatacagatgtgcc

SEQ ID NO: 11977 - DNA, 133 bp, Glycine max
  Clone ID: jC-gmfl02220136h03d1
cttaccagttgacgtcttgctaaccaaagcctcctggaccgcacgcccgaaggcacgcatgcaggggcagcatttgcaacggcccaacgccgtcgaaaacgacggagccccttgccatgcccggaaggcatgg

SEQ ID NO: 11978 - DNA, 513 bp, Glycine max
  Clone ID: jC-gmfl02220136h04a1
cttttaattagaaaactatcattttgttttcatatctaaaagttgttttcactagtttctatacaaatctttgaaaactggaaataaattgaaaacaaggtaacaattttataattaaaagtaaaaaccaaaaaacattttgtcaaagtaaacggaccctacgctttaaacttgtttgttctgttttgaagtctagccatagtattagtaggtccttcatttctcttgtacatgcctagaggttgctgttttatcaaaacgctgaaaaatattactcttttgattgtgttctatttagtcttctcgtagaagaattcagaattgcagcctgatacagtcgcaacaagctgcatataatggtttccaaagatgaagatgcaagactcttgtttttaaccgtttttgtttggttttgttaaagtagaatttgaatatagtttttgtttgattatggtaactatgtatatgaatttcatacattgaaaactgatgtcctttagcaaaacacattcg

SEQ ID NO: 11979 - DNA, 179 bp, Glycine max
  Clone ID: jC-gmfl02220136h05a1
cactatcgtagaccctcacttttttaatctgttcccgcaacaatggccccttaacgatgcctgtccaggagtgacaccaccacacgggaaagaagcacacactctggagacccatgttttgcggcatatcgcaattcggccagatcgagtcgctaacagattttataggtagggcaaca

SEQ ID NO: 11980 - DNA, 533 bp, Glycine max
  unsure (1)..(533): unsure at all n locations
  Clone ID: jC-gmfl02220136h06a1
gaaagttgcaagcacacagatgataagtttttgatgacgtcatcgcgtccccctccgtcgaaatccgtggatctggacctaacaatcgtgtcggcgaagcacctgaagaacgtgaactggaagaacggcaatctgaaaccctacgtggttntctgggtggacccggagcggcgcctcgccacgaaatccgacgactccggcaacacctcccccgtctggaacgagcggttcgccctccctctccctctccccctccacgactccttcctcaccctcgagatctttcactccaaacctcccgacacccccaaacccctcgtggccaccctgcgccttcccctcaaagacctacacgacctgcacgactccacgcgctctcgcaagtttcccctctatggcccctgtggccgcccgcacggcaagatccacctcaaactcggtctcctcggccgcccccaattcgattacgcctgccccaaccctgaccctaaccctaaccctagtcctaatttcgtctgctacagaggatacac

SEQ ID NO: 11981 - DNA, 541 bp, Glycine max
  Clone ID: jC-gmfl02220136h07a1
gggtacggcgtttgtataagcttaagacggcctctggcccccatccccaagctcggaatccggttcaggtccaaggtactcatgagcctgacctgtcttttctacacttgtggtggagactctaatgcttgcttacactactagtaaatctgtgacatataataagatacacctcttaactatgagggatacacctgctaaattcataccaccattctcggcgacccacttaccagtgcttaaagaactggaatcacggacgatgataacaccatgtatcatggcatggcgtagcatgctgcgaaatgggagcccctgatacccgatgacgtatgataaagctgcttagctgggacccttagacacatagcgcatgcttgatgggattccatgtatgaagacttaggctcgatccaatagcttggacacattgatctttccaacaacttcctgaatggctctctaaccaacactatcttgaactcttcttaactataagctcttaccctatgaaacaatgctatctccggtgaactacctc

SEQ ID NO: 11982 - DNA, 435 bp, Glycine max
  Clone ID: jC-gmfl02220136h08a1
tgtacacacgaatgattgatgcatatgacgaagtatgcacgcatacggccgcatagaactcgggtcgagctaccacattcaccgttaggctcccaaagccctgctcgacccgtgcagcatccactgctgcagcgtgggtagacatgtcacaaatgctgggaaacccgatcaccgcagtggcgccacaaggccaactccatctgctacgagtcctgcctccttcaagactgtggctcttgcctccaaagcgaacgctacaccaacacctacaaaaaaagctgctgctgctgctcctgccaatgacgagcttgccaagtggtatggccctgacagaaagatctacttgcctgagggtcactaggaccgatccgaaaccccagagtacttgaccggagaagtccctggagactatggttatgacccattcggtcttag

SEQ ID NO: 11983 - DNA, 194 bp, Glycine max
  Clone ID: jC-gmfl02220136h09a1
tgtctaactgatgattatgcatatacgaatttgcacgcatacgtctcattaaactcggctcgaggttaaaaatgatggggatccaaactggaacctcagtacgatcaaagatagggtacacctgactggggacacctcttgcaggtccaaactctaacggcacaacaacataaccatggatctgaagctgcctt

SEQ ID NO: 11984 - DNA, 548 bp, Glycine max
  Clone ID: jC-gmfl02220136h10a1
cattgactagaaatcccatattatcccaccatcctaactcacccaacccctctttctaaaaggcctgaaggattcactccggacttaattacgttattttgatagggtcaccgtttcgagatattctaaacttgtactgacaaatacggagggaaaagattaggacgtacgagttggagccaactggtacggagagaggcagccaatacggaccgttgctcaagctaaagactacagagagccaccgtcggcgcctctcttcgaaccggtagagttgccatcgtggtctttctatagggctggcatagcatagttcgtggccactttcttgttcctctacatcacagtgctgactgtgatgggtgtgttcaaatctaagagcaagtgctccactgtgggtatccaaggcattgcttgggctactgggggaatgatctttgctctagtgtattccactgctggaatctcatggggtcatattaacccagcattgacgttcgggctgttcctgcacgcaagctttttctgacatgggcactttttacata

SEQ ID NO: 11985 - DNA, 420 bp, Glycine max
  Clone ID: jC-gmfl02220136h11a1
gatccacgggtggctagctacataagacgactcaggcggaacagcgcgctcggaaaacgggtcgagcgtgacaggtaaacctcagaaccaagcctcaaaaacacgagcagagccgaagatcaccatgggggaggcaaacgaaagaacccacacggcaaggccgaagaagagcccacaggcccagggaagcccacgccggaaccagacaccgacgaaccccccccggatgagaaagaagaagccagacctgaagccaacggggagaaaaccaaggaacccggacctaaaaagggagccagaccacgcgacccagcaacacatgctgccaacgaggagaacgacaaagacgcaagtgccacgcacaaagacacaaccgctgcgagccaacacgcgatagcaaagcacagcgaggagaaccac

SEQ ID NO: 11986 - DNA, 370 bp, Glycine max
  Clone ID: jC-gmfl02220136h12a1
cttcgaaggtcccattctgccaccgtccgcctcttggccaggatcttcactgtcggcccacaagggggacactctgtacctcactgacgccgttgacagcgatggagctcctggactcgccggtacgatggccagagctacttgacggaccgtcaatcctgacagacgtaccggaactagcacggacgccgcccgacaccacggcaccggacaatctagcctcatcatcacgggcgccgccgagaactgtacagcgaatgtaccaccggcgtggactcccacgctgctgcctgacgatcactataccgctggcgctggtatcaccatcatagtcacctgttccggtactgaggacagtgcgaaagctgct

SEQ ID NO: 11987 - DNA, 139 bp, Glycine max
  Clone ID: jC-gmfl02220137a02a1
ctctaatgctagctaataccaaatttgcaatactcaagaaggaccaacccaaaagacagggcgggtcataatcaagaaccacccccctgcatacagcggcacgacccacccaacacgggtaaacaacaacgaggaaagc

SEQ ID NO: 11988 - DNA, 139 bp, Glycine max
  Clone ID: jC-gmfl02220137a03a1
cccaaccgcagcccacaaccaaacctgcaatacccaacaaagaccaccccaaaagacaggacagggcacaatccagaaccaccccccagcagccagcggcaagacacagccaacacaaggcaacaacaacgaggaaggc

SEQ ID NO: 11989 - DNA, 142 bp, Glycine max
  Clone ID: jC-gmfl02220137a04a1
ctcaaagacaacacaaaagcgaaccgccaatccctttcaacgagcacaccacacgccaccacggggcacaattaagaacgacgccaccgcagagacagggacgacccgaacgacacagctcaacaacagcaaggacggcacg

SEQ ID NO: 11990 - DNA, 139 bp, Glycine max
  Clone ID: jC-gmfl02220137a06a1
cccaaacacaagccaaaaccaacctttcattacccaacaaagaccaccccacaagacaggacagggcataatccagacccaccgcacagcagacacaggcacgacccccccaacacagctcaacaacagctaggaaggc

SEQ ID NO: 11991 - DNA, 656 bp, Glycine max
  unsure (1)..(656): unsure at all n locations
  Clone ID: jC-gmfl02220137a07a1
ngcactctcgctgccactcgagtgctattcacatcatatgcatctccacccccacctcggcattcaactcgagttcaactcggctgctgctctattgcacttctcctatatcattgatggatattaatttaatgatcttgtgatggtcaccatggtcctaaggtatggaatgcaggccaagttatctcaaatggctttccttttgtccttgatttgacgaatcagataatttcaagttatctcaaagtacctttactgttctaggctagccaggtttctcagacctagaagattgcagagaaggtccattcatgttcttgatgctcgctctatgggtgaagttagcaggaaacaatccaacttgtgtagcatcatcttggatggcctagacatgtacagggaaagtcatggaagacactagtaaagaaaactagattgcatggttttcatcttggtgaaaaggagcacagggagatcaagaagtacttgagcaaaagtcgttaaaggaggttaagggagatctcatggtaaataatattcctaaagctttagttcttaaccaagttgaacggcatcaagtcatatgatctatgtagccgactacgcttaatggaacaagactctgctgatgctattgtcttaataattactccatg

SEQ ID NO: 11992 - DNA, 651 bp, Glycine max
  Clone ID: jC-gmfl02220137a08a1
caactctgcagtttttgctttatcaaaaactgcactattaggaaataaaacagactttttactaaggtgatataaccagaaatgctgacaaatcaatgagggtgaccgacaaatctagtcaacataagaaatgctgctgctattcgcttactcaggcaaaaacaaaaagtcacataacaaccctgcaaagaacaggcaatcgacatgagaactattatagatatattggggaatgcgaacatggcaagactgtgtttgcgctttcttactaacatcatccaaaactgctactggagacattatcactgttagaccaccttctgaaggcatccggtactaaatttctaccagccaaaaacccaaaccttgatcttaacattgtcattcggttgttattattacttgaagaagcctcagcctcggccacggtagtttggttgatgatgcttggtagaaactctaccgtattatactgagctaccccatccccatcacttgcacccccatgcaaagcttcaaattcactatcatcataattaaacgccatagagaccctctgttctctcacacactctacgcctttaccaggtatcctgttgcactacttgagcttaagcttaccaaattgggacaccccgaagctagagcccc

SEQ ID NO: 11993 - DNA, 233 bp, Glycine max
  Clone ID: jC-gmfl02220137a08d1
ttgttttttttttttaaaaaaaacaaaccattattaaagtttttggaaaaaaaaacccaaaccgggggaaaaaaggggaacaaaaaaccgcgacaccccaacaaaaaaaaaacaaaaaaaccaaaaagcagggggagggcaaaaaaaacgaaaaacgacaccaaacccgccaaaaacacacgcacaaacacccaccagacggcaagagcaccaaaccacaggcaccaacccac

SEQ ID NO: 11994 - DNA, 597 bp, Glycine max
  unsure (1)..(597): unsure at all n locations
  Clone ID: jC-gmfl02220137a09a1
gttgaaggttaccaatcgatcaatgatatgttaatttctaaagccacgggtccatgggggaacagaattaccttcttgcatgttccaataccgaaattaaatgaaacaagaactacaaaccctcttgaatttatttgggacacacctttacatattcaagaggaagaaacaatctctaggagttgtactcaccgggacacttttgaagatagagggcaaattgaggggacaagaggcagtagctaaacgcattcgtggcacattgacaaaatcaagtgcagtgatttcaaacttggctggaccaatacaacaaatggctttagctaaccatcctgtgaaaggcttgtatttcacattggccggtggacctgaaagtctagtcatttcagttatgagctatatgggagtcctaagtgttaccctcaaaacggaaaaagacttcatagacgaacataaattgaagttgtgcatgcaaagtgcatttgagataattctccaagcagctatggaaattcctcaggaaaccaaaccttagtatttggtttggatgattggaacagcttattacgaanattagagagagagagagatatggag

SEQ ID NO: 11995 - DNA, 126 bp, Glycine max
  Clone ID: jC-gmfl02220137a09d1
ccgcaatactttgtgaaaaaaaacaccccattataacactttttggaaaaaaaaacccaccccaggggaaaaaggggcaaaaaaaaagcgacacaacccccaaaaaacaagcaacaaaaaccaaac

SEQ ID NO: 11996 - DNA, 607 bp, Glycine max
  Clone ID: jC-gmfl02220137a10a1
tcttcttcgtctcaaacctcttcgttcccttgattttttccatttcttccaaaatggccaaagacccagttcgcgttctcgtcactggagccgcagggcaaattggatatgctcttgtccctatgattgctaggggagtgatgctgggttcctgaccagcccgtgatcctccacatgcttgacattcctccagcagcagagtcgttgaatggggttaaaatggaattggtggatgctgcattccctcttcttaaaggtgttgttgctacaaccgatgtggttgaggcatgcactggggtcaatattgcagtgatggttggtggattccctagaaaagaaggtatggagaggaaggatgtgatgactaagaacgtctccatttacaagtcccaggcttctgcccttgaaaagcatgctgctgccaactgcaaggttcttgttgttgctaacccagcaaacaccaatgcattgatcttgaaagaatctgctccatctattcccgagaaaaacatgtcttgcgtgactagattggaccacactagggcactgggccaaatttctgagagactgaacattcaggattctgatgtaaagaatgtcattatct

SEQ ID NO: 11997 - DNA, 467 bp, Glycine max
  unsure (1)..(467): unsure at all n locations
  Clone ID: jC-gmfl02220137a10d1
aacnaacaccttatattttttattaggaaaaaaagcccccttttattagaataaggatcattttcagttcaattaaacacccctattcttacaaaaggggaaaaaaagaaaacaatataaagtttataacccaaaaattagttaatctttttctaaagagaaaaaaaattgacacccccaagagccttggaacgggttttccttgggtctactacccgcctttgacttttccaagcccaaggggtctatttacatttctaccaccaacaaaaacgggtatcaccattcaccaccactggttgaataaaatactattctcccaccactctcacagtagcagggagccactcttgggagccccggcgatcggagtaaccatcatttttgagcctaaacagcatggaagagtcatggccacgggggcttgaaataaaattctttttcagtggggggaaacaaggaaccaa

SEQ ID NO: 11998 - DNA, 379 bp, Glycine max
  unsure (1)..(379): unsure at all n locations
  Clone ID: jC-gmfl02220137a11d1
aagaagagacgtttattttttttttgcaccaccaggangggcccaaggggaggggggtgcatttaattattaaaaagctgtaggatttttcctaccattaagggcacctaaattttggtcaaagggaaacatacaatgttcgggtgaacagaaaatttcccaaaactgggaatttaaacgccgaaactggcccggaataaaccggaaccaaaatataggccggcaacttatcactggctgggactaacaaaaaaaaagccttttttgcccgaaaaagtgacttaatgaaaagatcactcataccattaggatgagcaaacatgggaccagaaccttggggttcatgatagagaacccagggaagcttttgcgctttgta

SEQ ID NO: 11999 - DNA, 397 bp, Glycine max
  unsure (1)..(397): unsure at all n locations
  Clone ID: jC-gmfl02220137a12d1
attaaaggtttattggaaanaanccccccagagcgcacagtgggaagactcactcaagaancagcccactcccagacattcacaacaacaaacaactggaataaaaagaacatatacgaacgaaatttgtcagcgggcaaaacgagaattcacaatttcacaccatctggacccaaataccgcggcttggaacttcttgatggaccacaaacagcggatagaaacccggtggcgcaagaacagcggaagccggcgcggtaacttcaacctcgtgcgttgattctccaaccccactcaaatggggcgggttcagcaccaacagcctctgattcatggagaacgagtgcgtgttaaatggcggcgcccgcatggtaacagacaccgaatccccaaccaa

SEQ ID NO: 12000 - DNA, 143 bp, Glycine max
  Clone ID: jC-gmfl02220137b02a1
ctcaaacgctacctcaaacggaatctgcgatactcaacaaggaccagcccaaaagacagggcagggcataatctagagccaccgcacagcagacacagccacgacccagccaaaaacaggccaccaaccacgaggaaaacgca

SEQ ID NO: 12001 - DNA, 193 bp, Glycine max
  Clone ID: jC-gmfl02220137b03a1
gcaccaacctgcccgtatggaggctaacgacgcgcacgcacgcgcacgcagcacggaactcggcccgagcgcaacgaacaacagacgggcctgcgttaccgaccaagaccagcccaccaggcagggcagggcacacacgagagccaacggacagcagacaacccgacaacgggccgagacaccggaacccacc

SEQ ID NO: 12002 - DNA, 150 bp, Glycine max
  Clone ID: jC-gmfl02220137b04a1
ctcaaacgcaacccaaaacgaaacctccattacccaacaaagaccaccccacaagacaggacggggcataatccagaaccaccgcacagcagacatagccacgacccaaacaacacagctcaacaacagctaggaaggcacagaatgccc

SEQ ID NO: 12003 - DNA, 355 bp, Glycine max
  Clone ID: jC-gmfl02220137b05a1
ctctaatcctagctagtacggaatttgcattatacaacaaagaccactccacatgacaggacggggtataatccagacccaccgcacagcagacaggtgcacgaccctcatgaaacggctcaacaacagctaggaaggcaccgaccctcgtgaccgattgcaacgagccagctccaatggtccgccagcctccgatgcgatgaggccgatcaaaagaacagctgacgtcaatcaaaacgatgcgggcaccatctggaccgtcttaattgcccgttccagtggttacacgtgcttcaggctcaagaccagcgctcggcatgcatctcatctactgtaacgagctatgccgacagag

SEQ ID NO: 12004 - DNA, 451 bp, Glycine max
  Clone ID: jC-gmfl02220137b06a1
actggctctcactgaaacttgttcgcactctctctttgatctaactaagttatcgccatgaatcgccaccacgatcccaatcccttcgaagaagaagaagtcaatcctttttcgaatggcactactgctcctgcatcaaagtcacgtatttccaccattagcatctgagtcactgggctttgggtcaaggcatgatgctacagttgatattcctttggatactacaaatgactccaagaaaaaaggtcaagagctagcagcttgggaagcagatttaaaacggagagagaaggaaataaaaagaagagaagaggctgtttctagagctggtgttcctgttgatgataagaattggcctccatttttcccaatcattcaccatgatattgccaatgagataccagttcatgctcagaaggcttaatatttggcctttgcaagttggttagga

SEQ ID NO: 12005 - DNA, 604 bp, Glycine max
  unsure (1)..(604): unsure at all n locations
  Clone ID: jC-gmfl02220137b07a1
gctgtggcaagtgggtaaaactctctggtatagattatttgcctggtgatgttgtctccataggtcgctcttctggtcagaatggggaggagaagtctgtaccagcagacatgcttctattggctggaagtgtgattgtgaatgaagcttattctgacaggcgagtctactcctcaatgggagatttcaatcgcgggtagggcgatggaggagacattgtctgcaaagcgagataaaaaccatgtgttatttggtggaactaaaatattgcagcacactccagataagagttttcctctaaaaacacctgatggtggctgcttggctgttatcttgagaacggggtttgaaacaagtcaaggaaagttgatgcgaacaatcttattctctacagaaagggtgactgctaatagctgggaaagtggattcttcattntattcctggttgtatttgcccttattgctgctggctatgtgctcgttaaggcgttagaagatcccacaggagcaagtatanacttatctaagttgctcacttatggctacttctgtgatacctnctgagttaccaatgngaatatcaatagctgttaatacttctctg

SEQ ID NO: 12006 - DNA, 602 bp, Glycine max
  Clone ID: jC-gmfl02220137b08a1
gctagaacggggcgcaagttggtggtggtttcgtttaccccattaccattaagaaaaatattcatggaattctaaatgctgtgagttggggcgttctgtttccccttggagtgatcatagcaaggtatatgagaactttcccatctgcaaatccagcttggttctatcttcatgttggttgccaggtatctgcttacgccattggggttgctggctggggaactggcatgaaacttggaagcgaatcagcggggattcaatatagaagtcatcgctatattggaattgccctcttttgctttgcaacactacagatttttgcattgttcctgaagccagtgaaggatcacaagtataggtacatctggaacatatatcaccacagcgtcggatacagcatagttatcctgggaatcatcaacatcttcaggggctttagcatcttgcatcctgatcagaaatggaaatcaacttacactgcagttcttattgcacttggtgcagttgccttgttcttggaagtgatcacatggattgttgtgttgaagagaaagtcttacaagtgcaccataacctatgatggataccacaatggacaatct

SEQ ID NO: 12007 - DNA, 175 bp, Glycine max
  Clone ID: jC-gmfl02220137b08d1
ttggtttttttttgtaaaaaaaacaccctattattcgactttttgaaaaaaaaaacccacccaaggggacaaaagggcgagaaaaaagcgccacacccccccaaaaacaaaccaaaaacacaaaacagccggagagcgccccacaaacccaaaaaccagaccaaccccgcccaaa

SEQ ID NO: 12008 - DNA, 343 bp, Glycine max
  Clone ID: jC-gmfl02220137b09a1
ctcacaccaggcgcacgttagcacaaactatcatgtccacggcaacagcagctgccacctcgtcctttatggggactcgtctcctggaggctcactccggagcggggcgagtgcacgcccgattcggcttcggcaagaaaaaaggctcccgccccaaagaaagcctccaggggatcgggccgagacaccgacagacccctttggtatccgggcgccaaagcgcccgaatacctcgatgggagtcttgtcggagactacgggttcgatccgattgggctagggaagcccgcggagtacctgcagttcgagctggactcgctggaccagaaccttgcaaaaacgt

SEQ ID NO: 12009 - DNA, 69 bp, Glycine max
  Clone ID: jC-gmfl02220137b09d1
ttgaaatactacaggaaaaaaaaaaaactattcgaaaactttttaagaacaaaaaaccacacaaggggc

SEQ ID NO: 12010 - DNA, 100 bp, Glycine max
  Clone ID: jC-gmfl02220137b10a1
gagccttaaggtcctgcgttgcatgcatcctcctttacatgaacgcgacataaacgcagatcagggcagggccatattacacaggaccgcccggcacaca

SEQ ID NO: 12011 - DNA, 179 bp, Glycine max
  unsure (1)..(179): unsure at all n locations
  Clone ID: jC-gmfl02220137b10d1
ataccaaacaaccgatagtgattgttaggaaaaaaacagagccaccacgggccagggtttgggatcaaaaacacgcggcctccccncccccacaaagcaaaaccaagaaaaagcagcagaaacacaccagaccgccaaaacacacccaccaaccccaacacacacggaaaaggcccagc

SEQ ID NO: 12012 - DNA, 365 bp, Glycine max
  unsure (1)..(365): unsure at all n locations
  Clone ID: jC-gmfl02220137b11d1
tggncnnaggnanacaaacgaancgaagatttctatttgtttaaaacacgaagacacccaacagggcaagaggtaagaataagaaacgcgaaaaaccaaanccgctatgagacgcacactaaagacaaattcggttatagacgaatgaataaaaatactcggcaaacaatggaaagttggccaccacgccggacagatgaaatggaatgcccggccagatggctgagcagaacaaaggagcattatcgcctgtcctttgggtcggatccaaaagagaacttgcgaaaggagcatagccttgtatagaccgtttgttgttcccgaatggagtgacgctgcaaaacatctagcttggggcgaggaaa

SEQ ID NO: 12013 - DNA, 517 bp, Glycine max
  unsure (1)..(517): unsure at all n locations
  Clone ID: jC-gmfl02220137b12d1
gagagatactatcatttgttnatgaaccaaggaaaggatgtacatataattacaaggatggtaatctgaatgcaaaagtggaaaagccttaccagacctaaacccgtcttaaatttgatcaactttcttcctttcttccttccaaacccaggcaattacattaaagcatgcatatttattggatgcatctctctaaaacctcacaacctatgacaatccatactgaaaggcccctgaatgcctgtgagcagcaacagctactgcagcagcatcgacagcaccaaattgagattgtgcctgcagcagtttcgcatcaatggaagcaacaggatcatttaagtgatcgctcttcccctgcatgctacactgctgggatgggagtggatgtttgtcttgttgtgaaatacccttatatgtttctgaggtagtttttatgttagtgggttgctgcactctatggaaacaatgtggagagacgaatngaggaagcgacccttctgtcataagcgtcttttat

SEQ ID NO: 12014 - DNA, 144 bp, Glycine max
  Clone ID: jC-gmfl02220137c02a1
ctcaaaggcaacccagaacgaagcttccgatacccaacaaagaccaccgcaccagacagggcggggcataatccagaaccacgccccagcagacgcggggacgacacacccgacacggctcaacaacagctacgaaggcacccc

SEQ ID NO: 12015 - DNA, 152 bp, Glycine max
  Clone ID: jC-gmfl02220137c03a1
ctcaaaggcaacccaaaacggaactttcgatacccaacaaagaccaccccaaaagacaggacggggcataatccagaagcaagccccagcagacacggccacgacccacccaacacggctcaacaacaactaggaaggcacaggaagtccga

SEQ ID NO: 12016 - DNA, 151 bp, Glycine max
  Clone ID: jC-gmfl02220137c04a1
ctcaaagacaagccaaaacggaacctgcaatacacaacacagaccaccccacaagacaggacggggcaaaatccagaagcaccgcacagcagacacagccacgaccccgacaacacagctcaacaacagctaggaaggcacagcaggcccg

SEQ ID NO: 12017 - DNA, 141 bp, Glycine max
  Clone ID: jC-gmfl02220137c05a1
ctcaaatgcaacccaaaacgcaactttcaatacccaacacagaccaccccaaaagacagcacggggcataatccagaaccaccccacagcagacatagccacgaccccgccaacacagctcaacaacaactaggaaggcac

SEQ ID NO: 12018 - DNA, 460 bp, Glycine max
  unsure (1)..(460): unsure at all n locations
  Clone ID: jC-gmfl02220137c06a1
ggcttttaggtcgttgtgggtggcttcaactcggatcacatccctgcttgcgtcgttcctttctgtctctaccttttcggtctctctctctctctctctttccaagacgcagagctgaattaatcggcattcatcacatcacagcgacaccagccctgatttatctttttctgcctttgtacctgtataatatgcacagagacagaaagaagggcagtaagtatcctcccggngagtcttctaatcctcaatcatcagaaaaagatgatcacaataatgatacaaatcttgctgaaggatctagtaaaccagagctgagtaacaagaatactccacaatcactgaaggccaaatctaaaattgttaagaaatccaacggtggtaagttcaagaccataataaataaaggttctcaacagattgngggaaagagaagacttagaaagaacaaanaagtagt

SEQ ID NO: 12019 - DNA, 512 bp, Glycine max
  unsure (1)..(512): unsure at all n locations
  Clone ID: jC-gmfl02220137c07a1
aaaatgaaagttgatcctatgcctcttgaataaggttaagttgctgaagagggaatggatgcgaaaaggtccataaaagggttctcccaagtgtttgactctgaaagctcaaccagtaagcagcagcatgggaccgagagggctcttcttgagttaattcttccttgcatagatcaaagctctgatgaatctcgtaattcctttgcaagcgatttgatcaaacaattaaattatattgagcaacaaataactttagttactcgaggaccaagtaagccaacagcaagtactcctgtgactgaaggtcagacaaataaagtaaatagccgcaaaactataagaggtggcagccctgggttagccagacgaccaacacctgcaccagattcttctccactttctcctgctgctttgcgagcatcaatatctntacgtgtgcagttactcatgagatttcttcctattctttgctcagacggggcagtcttctgcaaggagcatgagatacatgc

SEQ ID NO: 12020 - DNA, 202 bp, Glycine max
  Clone ID: jC-gmfl02220137c07d1
aaaaaaaacaccctaatagttaacatttggaaaaaaaaaacccacaccaagagaaaaataagaaagaaaaaaacgcgagacccccccaaaaaaaaaacaaaaacaccaaaaagccggaggaaggcacaaaaacgccaataccaaacaaaccccgcccaaaaaaaacggaaaaagtacaaacaaacgccaagaacaccaaacc

SEQ ID NO: 12021 - DNA, 567 bp, Glycine max
  unsure (1)..(567): unsure at all n locations
  Clone ID: jC-gmfl02220137c08a1
gttaaggatcaaattggaacttacttctactaccttaccaccggcttgcaacgcgcagtgggtggcttcgggggtttaaggatcttcagccgtctgttgatcccagtgccctatgctgatcccgccgatgagtactgggtgctcatcggtgactggttcggcaagagccacactgccttgaaacatacattggacagcggacgcagcattggcaggcccagtggggtccacatcaacggcaagaacggcgggctcgaggccctctacaccatggagcccggaaagacctataagtacagaatctgcaacgttgggctcaaggaagccctcaacttcaggatccagggccaccccatgaagctcgttgagaccgaaggctcccacgttgttcaaaacacctatgactccctcgacgtccacgtcggacagtgcttcaccgtcctcgttaccgccgaccaggagcccagggactacttcatggtcgcctccacgcgcttcacgaagaaggttataactgccacgcgcgtgattcgttactcgaatggcgtcnggcccgcatcccctctt

SEQ ID NO: 12022 - DNA, 131 bp, Glycine max
  Clone ID: jC-gmfl02220137c08d1
ttggatttttttagtaaaaaaaacaccctattatccccctttttgaaaaaaaaaacccacacaaggggaaaaaggggggagaaaaaaccgcgacacaccccccaaaccaaaaaaaaaacaccaaaaagcaa

SEQ ID NO: 12023 - DNA, 140 bp, Glycine max
  Clone ID: jC-gmfl02220137c09a1
cccagctgctagccactacggaaccggctttacttttcaaagaccactccacaagacagcacggggcaggattcactcgcaacccccagcagagacgggcacgaccccgccaacacggctcaactacagctaggaaggca

SEQ ID NO: 12024 - DNA, 145 bp, Glycine max
  Clone ID: jC-gmfl02220137c09d1
acgaactttcatcacacgaaaaacaacaccattatgcaaagttttggaacaacaaagccaaaccagggcaaaaaagggagaacaaaaagcgaaaacacccccaacccacaaaacgaaagggacaaaaaaccacagcaccgcccac

SEQ ID NO: 12025 - DNA, 606 bp, Glycine max
  unsure (1)..(606): unsure at all n locations
  Clone ID: jC-gmfl02220137c10a1
gctgtggcaagtgggtaaaactctctggtttagatcttttgcctggtgatgttgtctccataggtcgctcttctggtcagaatggggaggagaagtctgtaccagcagacatgcttctattggctggaagtgtgattgtgaatgaagcctattctgacaggcgagtctactcctcaatggaagatttcaatcgcgggtagggcgatggaggagacattgtctgcaaagcgagataaaaaccatgtgttatttggtggaactaaaatattgcagcacactccagataagagttttcctctaaaaacacctgatggtggctgcttggctgttatcttgagaacggggtttgaaacaagtcaaggaaagttgatgcgaacaatcttattctctacagaaagggtgactgctaatagctgggaaagtggattcttcattttattcctggttgtatttgcccttattgctgctggctatgtgcttgctaaggggttagaagatcccacaaggagcaagtataaacttatactaagttgttcacttattggtacttctgtgatacctnctgagttaccaatggaattatcaatagctggtaatacttctctg

SEQ ID NO: 12026 - DNA, 144 bp, Glycine max
  unsure (1)..(144): unsure at all n locations
  Clone ID: jC-gmfl02220137c10d1
tgatcctgggcggaaccagaagcaaactatantgcctattagggagaccaaacagagcccggcgagaacagggggacaacagaaaacccgagacacaccccacaccccaaacaaaacccacaaaaaacgagccggaagccaaaa

SEQ ID NO: 12027 - DNA, 467 bp, Glycine max
  unsure (1)..(467): unsure at all n locations
  Clone ID: jC-gmfl02220137c12d1
tgnngnannannnaattttattgaactttatttacaacgaacagcccacgaggggaccaacggggcaacccgaagcgggacaaaacggcgcaaggaaaaaaaccgggggccaaagaaacaaaaaacggaaatgctcttcccaaggccaaaaccaaagggggaaaaaaaaaggccccaaagggggagggccaggggacacccaaaggggcacccaaaacaacccaaagagaccaggccgggaaaagccggaagggggaacacagaaccccacaaaagcccacaaagcgggacggccangccaaagaccccaggccctgggaccagggaaagagccagggccctcaaagcaacccaaagggacaaaagccccccccgggtgtttgttcttccttggggccccaggaatgctcctttggggccccccaaaggaaatacccaggaattcaatggcccaaatgggggggtgg

SEQ ID NO: 12028 - DNA, 139 bp, Glycine max
  Clone ID: jC-gmfl02220137d02a1
ctcaaacgcaacccaaaacccaactttcaatacccaacaaacaccaccgcacaagacaggacggcgcataatccagaaccaccccccagcagacacagccacgacccaaccaacacagctcaacaacaactaggaaggc

SEQ ID NO: 12029 - DNA, 138 bp, Glycine max
  Clone ID: jC-gmfl02220137d03a1
ctcaaacgcaagcacacacggaattttctatacccaccaaagaccaccgcaccagacagggcggctcataatctagaaccacggcccagcagacatggccccgaccccaccgacacggctcaacaacaactacgaagg

SEQ ID NO: 12030 - DNA, 138 bp, Glycine max
  Clone ID: jC-gmfl02220137d04a1
ctcaaacacaaccaccaacgcacctttccatacccaacacagaccaacacacaagacaggacggggcacaatccagacccaccccacagaagacataggcacggccgagccaacacagctcgacaacaactaggaagg

SEQ ID NO: 12031 - DNA, 392 bp, Glycine max
  Clone ID: jC-gmfl02220137d05a1
cgcgacgatacccagagtgacacttttccgtacaatcttcctttagataaaaacgaagagctgaggggcgcggaatgggcactctgcaggctgccgacgcatcgccgagccgacgggatgctcgtgacatagcgggggacccctgggtaacgcgggaccctaggtctgacagagtcgaggatactgacggctcagaggccgtaacatggcgctgcggggcaacccactgcgctacgctctgtggcaagtcaagcttgcaaggcgagaacgaggagaggatccaccgaaaggcatcggaacctgactatgaactctgagaaaggacatcttcgcaggacatgaatgacatttagaatctcatcactgctgaaccgggcatgatgcatttcatg

SEQ ID NO: 12032 - DNA, 565 bp, Glycine max
  unsure (1)..(565): unsure at all n locations
  Clone ID: jC-gmfl02220137d06a1
ctttcttcaacgtttccatcatacacagattccatttctctctcaagccctaatttcccctcatttccatggctcacatgaagaagcccacctggtcgtcggctggaatccccngtctcccgaaccctgtcctccgctcgatccccttcccccggaaggaagaaagggaaggaggcaccataaccctgaaagccaagggcttaagaaaaaccaaggagcccaaacctaaaaaggtttccagacctcgcaaccctcccactcatccttcctacgaagagatggttaaagatgcaattacctcgctgaaggagaaaaccggttcgagccaatacgcgattgcgaagttcatcgaggagaagcacaagcagcttccaccgaacttcaagaagcttcttctctaccatttgaagaagctcgtcgccgccggaaaactcgtcaaagtcaaaggctcgttcaagctcccacctaccagacctgctgcatcttcttcttcttcttcttcgccggcaaaagagaaaaagcccgcagctgccaagtccaagcctaagcctaagcccaagcccgc

SEQ ID NO: 12033 - DNA, 482 bp, Glycine max
  Clone ID: jC-gmfl02220137d07a1
gttccggccaccggtgaccggcaacacctctacttttattccggggagcccttaccataaccctaaccactaacaagctcttttcatattcatggatcctccggattctcagtcccaggaacaggaagcgcccaagaagaacggcgtcggtttttgtcattctgcgatggatcctcgcgattctttttcttttctcctctttctctcgattccctttctgcttggcttactggttctcatgttcgccgatttctccatccccaaccccatttctctcccctcacagtgcaaaatcgtctccactggtgttgatattaggtcatctaagatatgtgaacttggattgttagattataaagcacaggatgtgttccatcattttgaaagaagcaaatttcgctgccgttatgattactattgggcttcagtattcaaggtggaatataaagatcacttttctggtcagcacaagttgcatttgc

SEQ ID NO: 12034 - DNA, 133 bp, Glycine max
  Clone ID: jC-gmfl02220137d07d1
ttggtttttttttttaaaaaaaaaaccctaatattacaatttttgagaaaaaaaacccacacaaggggacaaaaggggaagaaaaaaacgccaaaaacccaccaaaacaaaacacaaacacacaaaaacagga

SEQ ID NO: 12035 - DNA, 138 bp, Glycine max
  Clone ID: jC-gmfl02220137d08a1
cccagcggcaacacaaaagcgaaccgccaatacgctacacagaccagaccgcaaggcaccacagggcaggatcaagaccgacgccacagcagagacagggacgaccccaccgacacagctcaacaacagagaggaagg

SEQ ID NO: 12036 - DNA, 365 bp, Glycine max
  unsure (1)..(365): unsure at all n locations
  Clone ID: jC-gmfl02220137d09d1
ggggaggaagataggaagagaaaaagaaagaggaaagggaagaaagaaggggaggaaaaggaagaagataaaaaataagaaacagacataatnnncacaaggggnngaggagatgagcgtccgaaaacccgggngagagcngatagggggcgggcgacctgggaanttttatagaggaaaaaaaaaaaattaggggagtttatggaaaaaaaaaggaaaaaaggggaaaaaaggggggagaaaaaagggagagaaaaaggggaaaaaaaaacaaaagaggaaaagaggaggagagaggaaaaaaaaaggaaaaggagaagaaaagagaaaaaaaaaaagggagagaaaaggaaaaagaggggaag

SEQ ID NO: 12037 - DNA, 139 bp, Glycine max
  Clone ID: jC-gmfl02220137d10a1
ctcagacgcaacctactacgcgaccggatttacgtttcacagacgacaccacacgacagaacggggcaggatgcacacgcaacccccagaaaacaccagcccggccgagccaaaacggatcaactacggctacgaacgc

SEQ ID NO: 12038 - DNA, 155 bp, Glycine max
  Clone ID: jC-gmfl02220137d11d1
tttttctttccggttcctacaagcgcactatcttttttcttagggagacgcaaaagaaccacgcgggcacgggggagcttaagaaaaccgaaaacgaacacacaccgcaacaaagacacacaaaaaacgagccggaagcagaaaaggagaaaccc

SEQ ID NO: 12039 - DNA, 52 bp, Glycine max
  unsure (1)..(52): unsure at all n locations
  Clone ID: jC-gmfl02220137d12d1
tttnttttttaacacaatttattaacaatttttctannccaaanaaaaacgg

SEQ ID NO: 12040 - DNA, 342 bp, Glycine max
  Clone ID: jC-gmfl02220137e02a1
tggagccaattcaatggttatggcttattataatgtagcatgtcttgcaattgttgatggagggacagagcctagaatgtcgttcgttaaagcttcaattgttatcggtggatatcagttggaggacaatcttttggagtttgatgtgggcttcctccaaattaaagcttcagctcatcgctggtgctccacaatgccacatgttcacgtacttgaatgtcatagccttatagccttattacgtgttgaaattagccactttcaattatctagtagcttctatatctttcaatattaatattatataataaaatatttaattaagtttgctatgttgtaagc

SEQ ID NO: 12041 - DNA, 497 bp, Glycine max
  Clone ID: jC-gmfl02220137e03a1
caaacgcactcagagagagagagagtgagatcgaccaccccaagaggaaaccaccacccacagcctaacggtgagcgaagaagacaatggccaccgccacagccaccagcagcggcaccggaagcggcagcggcaccgacagcaggtagccgcaaattacaatggataccgacagtaccacccgacaacgccagctcgttcgtcgtcgtcggcgtcgttcaaaggatgctgttgctgtctgttccttctattctcgttcctggcgctgttggtgctagcggtggtgctggtaataatcctagcggtgaagccgaagaagccgcagttcgatcttgagcaagtcggggtgcagtacatgggcatcacacccaattccccctccaccgcttccctgtctctcaccattcgcctcctcttcgccgccaccaacccaacaagggtccgatcaggtacggccagtccagcttcacgtcatgtaccgcggcatccccctcgga

SEQ ID NO: 12042 - DNA, 575 bp, Glycine max
  Clone ID: jC-gmfl02220137e04a1
gagatttccgacatacctggaggatttgattcttttgagaaagcggcgaagttctgttacggcgttaacttcgagatcacggttcacaacgtggcggcgctgcactgcgccgctgtgttcctccagatgaccgacgagtattgcgaacggaaacctcgccggaaggacggaggattttctctctcaggtcggcctctccacgctccacagcgccgtcgcggttctcaaatcctgccaaaagattctccccttcgccgccgaggtcaacgtcgttgaccgctgcgttgaggtcatcagctgcaaggcttgcaacgaggcgaattttccgagccagtcgccgccgaactggtggacggaagagctcgccgtgctcgacgtggattccttcgcgaaggtgatcgccgcgatgaagcagcgtggcgcgaagtacctaaccgtcgccggagctttgattacgtacaccgaacgcgcgctgagggagctcgtaagggatcactccggcggcggaagaaggatccggtcaccggaatccggagactccgattcggagtcgaaagaagcgaacagcgcgagct

SEQ ID NO: 12043 - DNA, 649 bp, Glycine max
  unsure (1)..(649): unsure at all n locations
  Clone ID: jC-gmfl02220137e05a1
aatttggaaagccgtaaaggaaccttttattctgcctacttgtgccttgctattggcttccttgggctgacttggactgctgttgtggaaagaaacatacgttcaatattgtttcttgtttgtgcaattatttgtggctatatatatcaagtgtccaccatttcggttaagctaccaggggctgggagagcccttgtgctttgcagcatttgggccttttgccacttgtgccttttatttattacatggcagttcaaggttacctcagctacctaattagaatgtcttataatatttgatttttcatggttttgatatggaatgatttggacagtgtgatgaaccatttccccttaagtggaacggttctttcagcatcaattcttgttggcttcacaacatctcttatcttgttttgcagtcatttccatcaggtggaaggagacaaggaggttgggaaaatgtcacctttggtacctgcactttctttaaattgaacttttttctaatccatgttaatgatgtgaatctacctatgttacttattntccatttctctttcangttagacttggcacttaaaaaggtgcanaggtagtgaaaggggcagtctttatgctctatgcttctttgggtgctttggtctaat

SEQ ID NO: 12044 - DNA, 467 bp, Glycine max
  unsure (1)..(467): unsure at all n locations
  Clone ID: jC-gmfl02220137e06a1
cctctctctctccctgtctttctctccttatccgctcttatgcttcaccctttcatagatctgcctgaaaaaaacccctcaattccaaacccttgcgatccgatccaggtcaattaatttctctctctctctctctctctctagaatggttttcccaacgcgcagatctagcgtgcccgatctttcccggagcccgatgcctncgaaatcgaccacttcgaccggttaccggactcgctcctccttttggttttcaacaagatcggcgacgtcaaagccctaggccgctgctgcgtcgtctcgcgccgcttccactccctcgtcccgcaggtcgaaaaccgtcgtcgtccgcgtcgactgcgtcatcttcgacgacgactcctcttcctacgncgccgncttcgacaagtcccgcggccccttctggaacctnctccgnctcgtcttcggcggaatcgtgaaaccca

SEQ ID NO: 12045 - DNA, 650 bp, Glycine max
  unsure (1)..(650): unsure at all n locations
  Clone ID: jC-gmfl02220137e07a1
cttcttgggagtgattatactgaaggtgtatgtttttttggcattgttaatgctattgaggttgtgaatgcattccctgaggaagatggcctcctgaaattccggcaatgggttgagtcaccggatcccaccatccttggaaggttggaatgcaaatagtggttcaaattccagaaagaaaggggtcaaaaattgaagaaaagatgaattcctcaagttgcaatgttaaagagtctgcggtgatgcaaaacatctgccatgctcaggagcaaaatgagttgtcagattacatccaagaaataaaacaaactttcttcaataagcatagaaatgttagcaagaattggcacattccttcttcttttccaagtgatactgttatatctgcttactattctccccatgttgataaatccactgagccattcacatggggaaagccagatcatcttgttcttcgaaaattgtgctgggagaaatttgggtggactggccagaaagcagatgaatngatcctaccagtcttaaggagtataaccagcgtgagactcaattgcggttggaagcattttacaattttaatgacagatttgcacaaaatcgtagtaaaagaattaagaaagcgggtaaaaggaatcactggtaagcag

SEQ ID NO: 12046 - DNA, 180 bp, Glycine max
  Clone ID: jC-gmfl02220137e07d1
tgtgaatttttttttaaaaaaaacacccaaataattccctttttgcaaaaacaaacccaaacaaggggacaatttggaaaattaaaaacgtcaaatccccacccatcaaaaacccaaacacaaaaaactctcacctacccacaaaaaactcaaaatcaccacaaaccaacctcaaaacaa

SEQ ID NO: 12047 - DNA, 141 bp, Glycine max
  Clone ID: jC-gmfl02220137e08a1
cccagccgcaagccaaaaccaaacgggcaatacgttacacagaccagagcacaagacaccacagcgcaggatccagaccgaggccacagcagagacgggcacgacccggccaacacggctcaacaacagcgaggaaggcac

SEQ ID NO: 12048 - DNA, 83 bp, Glycine max
  unsure (1)..(83): unsure at all n locations
  Clone ID: jC-gmfl02220137e08d1
aggacgatccatccgaagnttcacgggcgacgagctcacaggcgccggccgcccctggaatcactcaagaacaaaaacacacc

SEQ ID NO: 12049 - DNA, 615 bp, Glycine max
  unsure (1)..(615): unsure at all n locations
  Clone ID: jC-gmfl02220137e09a1
ctcgagccgattcggctcgaggggggtagttgattctctcattcacctcccatcatcattataatcattcattccaacctacccttattcttcttcttcaatttcacacccatcatggaccgttttccgatcctctttctcgtcggcacccttcatcaccctcgcctccggtgcccgccacgatattctccggttaccctccgaagcttccaggttcttcaaagcacctgctaatgccgatcaaaacgatgagggcaccaggtgggccgttttagttgccggttccaatggctactggaattacaggcaccagtctgatgtttgccatgcatatcaactactgaggaaaggtggtgtgaaagaggaaaatattgctgtatttatgtatgatgacattgctttcaatgaagagaacccacggcctggagtcattattaacagtccacacggaaatgatgtttacaagggagttcctaaggattacgttggtgaagatgttactgttgacaacttttttgctgctatactnggaaataagtcagctcttactggtggcaatggggaagctgtggatagtggccccaatgatcatatatntatatactactctgatca

SEQ ID NO: 12050 - DNA, 247 bp, Glycine max
  unsure (1)..(247): unsure at all n locations
  Clone ID: jC-gmfl02220137e09d1
ctggtcttgtgagattaaaaaacaaaaccaatttcattttgaagaaaaaaaaaacccacacaagggcaagggggagcaaccaaaacccganacccccccacaacccaaaaccacagcaaccaaaaagccgaagaaagcggaaacaacccaaaaggacacaaacacagcaccaaaccaaagccaaaagcacaaacacacccgaagagcagcgaaaacacacgcgcaaacccaaacccaccaggggcag

SEQ ID NO: 12051 - DNA, 142 bp, Glycine max
  unsure (1)..(142): unsure at all n locations
  Clone ID: jC-gmfl02220137e10d1
ttgctttttttttttttaagggataacctattgttctttttttggccaaaaaaaaaccacacacgggcacacgggcggcctaaaagaaccgccacccgacagccacaaacgaaangacngaaagcgcagcgacgaacaggaa

SEQ ID NO: 12052 - DNA, 165 bp, Glycine max
  Clone ID: jC-gmfl02220137e11d1
tgggtctaggcctgtgccacaaggacacttttttgatttttaaggggcaaccacaaccaccacaggggaagggggggacagaaaaacacgaagacgaccaccacaccgaagccagagacaccgaaaacgggaagaggggccaaaaggaccaaacacagggcaaac

SEQ ID NO: 12053 - DNA, 487 bp, Glycine max
  unsure (1)..(487): unsure at all n locations
  Clone ID: jC-gmfl02220137e12d1
ccgnnannaanncncaagatttttaaaatttttatccagccgggagcacacaaggggaaggatagggggaaataaaccacgccaataccctacattcgtgttgagacttcaattatttgacctattcctgtgctacatgacagcaagcttcgaaaattttcaaagtaatgtaaatggggacagataccacttgcaatggaaaaaaatgaaaactaaaattttaaacataaaaataaaaggactgaagagccttctcagaaaacttttcagccaatcctgagaaatatctgaatctaccccatgctcccccgcctttgaaaggaaaatatcatagaaaaagggggaaagtaccaattagcaagaattctgtttcaagggatgaatcaatgttgtgcaactcattggatctgaagcatcaaattgcggtgagaccctcacaattcaattctttaacatgccaatcacagcacaattataggacaagttg

SEQ ID NO: 12054 - DNA, 140 bp, Glycine max
  Clone ID: jC-gmfl02220137f02a1
ctcaaatgctagacaaaacgaaactttcaatatccaacaaagaccaccccaaaagacaggacggcgcataatccagaagcaccccccagcagacacaggcacgacccagccaacacggctcaccaacagctaggaaggca

SEQ ID NO: 12055 - DNA, 141 bp, Glycine max
  Clone ID: jC-gmfl02220137f03a1
ctcaaatgcaagccaaaacgaaactttaaatacgcaacaaagaccaccacacaagacaggacggcgcataatccagaagcacgccccagcagacacaggcacgaccccgccaacacggctgaacaacagctaggaaggcac

SEQ ID NO: 12056 - DNA, 356 bp, Glycine max
  Clone ID: jC-gmfl02220137f04a1
ctcaaacccaacgcacaacgaaactttaattaccaaagccacaggaccacggaagaccggacggggcataatgcagacccaccgcccagcagacagggagacgacaccgacaacacggctcagacaacagctaggaacgcacagaacataggcaagaggaggaaacaggcgctatgaccgcgctcagcgcgacactagcgaagatagagggcacatcgacgggacaagacggcatagctaggcgcatacgcggcacagggacaaaaccaagtgcgcagaccacaaactagactggaccaagacaacagacggctgcagcgaaccatactgagaaacgctaaggtgccacaccggcc

SEQ ID NO: 12057 - DNA, 622 bp, Glycine max
  Clone ID: jC-gmfl02220137f05a1
ttacagagcaaaaagctgattgatgttgattctttcaagaagctcttgaaaggcctgacagaaaaggtgtggtggcagcaggatgcagcatcagcagtggccagcacagtaacacaatgcaaactgggtaatggaaaaagacgcttccaagggtgacacgtggttactgttcgtgggtcctgacagaattggcaagaagaaaatggcagcagctctttctgagctggcatctgggtccaacccaataataatacccctggcgcaacgccgtggggatgcaggagactctgatgcccctcatctccgtggaaaaacagcacttgatcgaatagcagaggccataagaaggaacccactttctgtcattgtgcttgaggacattgatgaagccaacatccttcttcgtgggagcataagaagagccatggaacaaggccggttcccggattcccacggccgtgaaatcagtcttggaaatgtcatgtttatcctcactgctaattggttgccggaggacttcaggtgcctctcaacgagtctctactggatgaagaaaagctttgaaaattagcccaaagagggtggcaattacgcatatcagcaggtaagagagcatcaaaac

SEQ ID NO: 12058 - DNA, 584 bp, Glycine max
  Clone ID: jC-gmfl02220137f06a1
tgaacttttaagggatgaacagaaagatgtttctttagctgctgtagaatttctttccaaatactgccaatgggctgttgtaacattgggtgctaatgggtgcattgccaaacatggaaaggagatgatacaagtcccggccattgggggaaccaaaggcaaccgatgctacaagaagcaggggacctttttgcaagtggatttttgtatggagtggtcaagggtttgtcactagaagaatgctgcaaagtaggcacatgcagtggtggatctgttatccggtctcttggtggtgaggtaacgtcggagaattggcaatggatgtacaagcagatgcagataaacggactgcccacgccttccggtttatgcaaatgaatagtagcaaccgttgcccccttaatttgtgctgtcttatattttactggatttaatgttgtttttcttattctattgacttctattattcatttcacacaatagtatggaagctagatatttttcagggaaattcagcgggtttgagtctttaatgtacttgtgcttgggataagtatgaactgtctcctaattaatgttaacac

SEQ ID NO: 12059 - DNA, 623 bp, Glycine max
  Clone ID: jC-gmfl02220137f07a1
gtgagtgtgttgttctctctgcgaaatgcgtatgtttttcgaagaagctcgatgagaatgcgagagttagggtttcaggaacgaaggtcgtggaggcggagaggcggcgacaccagccccgactccgtcatcttcactctcgaattccaccttgagcctcttctccttcgccttcgccagcgtcgaccgctgctccttcgcctccgacgcgcacgaccacgactccttagcctccgaaatctcactccatttggcagcacaggatcatgacggtgatttcgctcatagcgaaagctggagcggtccagatccggatctggatccgaataaacgacaacaacaacgacatgcagatacagattcagatgcagcacacacgaagcatcgccgaaatcgtttctccgggaaaggagagaaagcgaaagttcaaaaggaagaagacagtgacggtggtgacactgaggacggaaatcaacacttggaatttgattcggccagaaactctttctctctggctctcaaagatgccaggatcggaggtcaagatctgggcgttattcaagaagcacgatcggcgaaagcctgcttcgtagatctgaacatgcccattgcatggcatgttc

SEQ ID NO: 12060 - DNA, 158 bp, Glycine max
  Clone ID: jC-gmfl02220137f07d1
ttggtttttttttttaaaaaaaacaacctaatattcaaattattgaaaaaaaaaacacaacccagaggaaaaaaggggaagaaaaaacccccacaccccacccaaaacaaaaaaaaaacaacaaaaaccaacagaaagccacaaaaaccccaaaccca

SEQ ID NO: 12061 - DNA, 155 bp, Glycine max
  Clone ID: jC-gmfl02220137f08a1
cccagcggcaagccacaacgcaaccagcaatcccctacaaagaccagaccgccagacacgacggggcaggacccacaccaagcgcacagcacagacagccaccacaccgccgagacggccgaacaccagagacgcagggacgaaccgccgggaac

SEQ ID NO: 12062 - DNA, 126 bp, Glycine max
  Clone ID: jC-gmfl02220137f08d1
ttggtatatcacggcgaacaaaacaacctattatccccctttttgagaacaaaaacccacaccaggggacaaaggggggagaaaaaaacgcggaaaccccgacaaacaaaaccaaaaaaaaaagaa

SEQ ID NO: 12063 - DNA, 477 bp, Glycine max
  Clone ID: jC-gmfl02220137f09a1
gtgattcatcacagcatattgactctgatatacatttttgacatcagcactggtgcgtaggaacatcggcatccactactacaagtctgcttcttcttggactatgttgtctcgccattcctcaatcctcaaccctctctctgtgactttgacttcatgtcatagccaaggtgttgcaggcgacgcattgccatcttacatgcatggacctgagcatagcgaacccaacatgcctctcaccatcgaggcatctaacatgcctcgccccaaggccggtgcagttctcatcaaaaccaaagcctgtggagcatgccactctgatctacatgatatgcaaggagaaactacgctcgtcagaccttgtgatgcagagcatgacattaccggtgaggctgtagcacatggagcactcactgacagctaaaccatagaaaggctgccagtcggatctcgagtagatgcagccttcatcatgcc

SEQ ID NO: 12064 - DNA, 176 bp, Glycine max
  Clone ID: jC-gmfl02220137f09d1
ttgttttttggttttaaaaaacacaaactataataatttttaagggaaaaaaaaacacaaaccggggcaagggaaggaaagaaaaaaccgacaccccccatcaaccacaaaacaaaaacaacacaaagaagcaaaaggccacaaaaatgccaaaccacaccaaacccgcccaaaaa

SEQ ID NO: 12065 - DNA, 221 bp, Glycine max
  unsure (1)..(221): unsure at all n locations
  Clone ID: jC-gmfl02220137f10d1
atataaaacacactataatttttttttagggaaaaaaaaagccacaccgggggaagggtgggaatgaaaaaaccgacacccccccacaaaaccaaaccagaaaaaccaaaaaggnagagcaaggggccacaacgccaaagcccacaaaccaggcacaaaaagaagcggaaaagcacaaacacacgggaaggggacgaaacccaatgaaacaacacccaccc

SEQ ID NO: 12066 - DNA, 350 bp, Glycine max
  unsure (1)..(350): unsure at all n locations
  Clone ID: jC-gmfl02220137f11d1
ggggnntaaaggaaaccatgacattctgtaacngctctcggaagaaaaatncccggacgacgaccccacaagccggcggccgccctnaaaaanaaaanaaaaaattaaaacacctattaaaagaaaacaaaacacaaaagccaccataaaagaaaaaaaaaacccgccaaaaccccccaacaccaaaaaaaaaaaaaaaaaaaaaccaaaaaaggggaaaaaacaaaaaaaacaacaaaaaacgaaacacaaaaaccaaaacacccaagacaccaacaaaaaagcgcaaaaacaaaaacaaaaacaccaaaaaaaaaaaacacaagaacgaaaaaanacacaaaaaaaca

SEQ ID NO: 12067 - DNA, 370 bp, Glycine max
  Clone ID: jC-gmfl02220137f12d1
aaaatgtattttgagacgagaggccccaaagagagcgaggggggaaaataaacaacacaaaaagccaacctccgcgcggagactccaagcagaagaccacccccagggccagagggcaacacgcgccgaaaacaggcacgacacggagaaaggggcccgacaccaacggcaagggaacaacacgagaacaggaggcccaaacaacaacaacacacggaccgcagagccaaccacgaaaacaccacaaccaacccgcggaaatagcagaccgcaccccaacgtcccccgccccagagaggaaaacatcaagcaaacagggggaaagttccaattaccaagaaacctggctcaagggatgaaaaaatagttg

SEQ ID NO: 12068 - DNA, 151 bp, Glycine max
  Clone ID: jC-gmfl02220137g01a1
ctcaaaggctagccaaaacgcaatttgcaatatgcaacacagaccaccccaaaagacagggcagcgcataatccagaagcaccccccagcagacagagccacgaccccgccaacacggctcaacaacagctaggaaggcacagaatgcccg

SEQ ID NO: 12069 - DNA, 139 bp, Glycine max
  Clone ID: jC-gmfl02220137g02a1
cacaaacgcaacccacaacccaacttccaatacccaacaaagaccaccccaccagacaggacggggcataatccagaaccaccccaccgcagacacagccacggcccagccaacacagcccaacaacaacaacgaaagc

SEQ ID NO: 12070 - DNA, 147 bp, Glycine max
  Clone ID: jC-gmfl02220137g03a1
ctcaaatgctacccaaaacgaaattttcaatacccaacaaagaccaccacaaaagacaggacagcgcataatccagacccaccgcccagcagacacagccacgacccgaccaacacaggtcaccaacaactaggaacgcacagcata

SEQ ID NO: 12071 - DNA, 138 bp, Glycine max
  Clone ID: jC-gmfl02220137g04a1
cccaaacgcaagccagaacgaaccttccaatacacagcaacgacaaccgcaacagacaggacagggcatactcaagaaccaccgcccagcagacgaagggacgagagagcacaacacgactcaacaacggccaggaaa

SEQ ID NO: 12072 - DNA, 145 bp, Glycine max
  Clone ID: jC-gmfl02220137g05a1
ctctaatgcaacctactacgaaactttaaatacgaaacacagaccaccacaaatgacaggacggcgcataatccagaaccaccccccagcagacatagccacgaccccgacaacacagctcaacaacagctaggaaggcacatta

SEQ ID NO: 12073 - DNA, 615 bp, Glycine max
  unsure (1)..(615): unsure at all n locations
  Clone ID: jC-gmfl02220137g06a1
ggcaatcacaaagcttctgaacaacaacagtaccctatgtttgccacttaggggaacaatcacagcatctggtgatcttgttcctttgtcctacattgctggtttgctaactggtagaccaaactccaaggctgttggacccttcggtgagattctgaatgccaaagaagccctttgaatgggccaacatcggtgctgagttctttgagttgcaacctaaggaaggccttgcccttgtgaatggcactgctgttggttctggcttggcctcaattgttctatttgaagccaacatcattgctgtcttgtctgaagttatttcagcaatttttgctgaagttatgcaaggaaagcctgaattcactgaccatttgactcataaactaaagcaccaccctggtcagattgaagctgctgctattatggaacacattttggaaggaagctcttacgtgaaagctgctaagaagttgcatgagattgatccttttacaaagcctanacaggaccgttatgctcttatgacttcaccacaatggcttggtcctctgattgaagtgattagattctctaccaagtcaattgagagggagattaactcagtcaatgacaacc

SEQ ID NO: 12074 - DNA, 547 bp, Glycine max
  Clone ID: jC-gmfl02220137g07a1
caaaatttagaaacaaaaacatgttggtgatggtgttcggtccaacctatggagcccccaagagggtgctggtgtgtctgattgagaaggaaattgagtttgaaacagtacatattgatctcttcaagggagagaataagggacccttgagttcctaaagctgcagccatttggatcactttctgttattcaagatggtgattatactctctatgaatctcgtgcaataatcagatactttgcagagaagtataaagaccaagggacagacttgttgggaaagacaatagaagaaaaaggtctagtggaacaatggcttgaagtagaagctcataactttcacccaccactctacaatttggttattaatgttctgtttgccccattaacgggtgctccttctgaccaaaaagtgatagaagagagtgataaaaagattgagaaggtgctggatgtttatgaggagaggctgtcaaagagcaagtacttggctggtgactttttcaggcttgctgatcttagccaccttccatttggtcactatttg

SEQ ID NO: 12075 - DNA, 162 bp, Glycine max
  Clone ID: jC-gmfl02220137g07d1
aaaaaaaacaacctaatattacacttattgggaaaacaaacccacaccgggggaaaaatggggaagaaaaaaacgccaaaccccacccaaaccaaaaaaaaaaaaccacaaagctggggaaacccacaaaaaaggcaaaacccaacaacccccgcccaaaaa

SEQ ID NO: 12076 - DNA, 449 bp, Glycine max
  Clone ID: jC-gmfl02220137g08a1
cccagaagcaagaaagccgcaaaggaacctttatttttgccgaccagcgccaagcacacgacagcccaggactgacacggaccgccgaggaggaaagaaacagacgcgcaaaacacgagccagcaagagcaaggataggaggctatatatatcaagggtccaccatggcagataagccaccaggggctggcagagcccacgcgcattgcagcaacaggaccagcagccacctgcgccgtagagccactacatggcagcacaaggttaccgaaactacctacaaagaatgccacatacataaggagcaagcacggacatgatatggcacgaactggacagagcgatcaacgcacgccccgaaagcggaacgagagcctcaacatcaagtcccgacggcaacacaacaactcttaacgagccctgcaatcatcaccatcaggcggaacgag

SEQ ID NO: 12077 - DNA, 103 bp, Glycine max
  Clone ID: jC-gmfl02220137g08d1
tttttttttttatggaaaaaaaacaacccaataaaacaaaatttaagaaaaaaaacacaaacaggggggcaaaaggggaagaaaaaaaggcaacaaccccccc

SEQ ID NO: 12078 - DNA, 593 bp, Glycine max
  unsure (1)..(593): unsure at all n locations
  Clone ID: jC-gmfl02220137g09a1
ctcattttcaagctgtttggtgtaaagatgtgacatgtgcttggttgtgttcaagtgaagcagtcaactgttgccgtcaaggaatgtttcgggaagtacgatgatgttcttcaacctggttgccattttgtgccatggggtcttggcttgcgatgtggctggtgtcctttctacgcgtgtcatgcagctaagtcttcgttgcgaaactaagacaaaggacaatgtgtttgttaatgtggttgcctcaatccaatatcgagcattggcagaaaaggcatcagatgcttactacaaactcaccaataccaaagcacagatacaatcctatgtctttgatgttatcagagctactgttccaaagatggaacttgatgctgtttttgagcagaagaacacaattgcaaaagcagtggacgaagaacttgggaaggctatgtcagcatatgggtacgagatagttcagactcttattgtggatattgtgccggatgagcatgtgaagaaagccatgaatgagattaatgctgctgcaagattganggtggctacaaacgacatagctgaagcatagaaaataatgcagataaagcgag

SEQ ID NO: 12079 - DNA, 451 bp, Glycine max
  Clone ID: jC-gmfl02220137g09d1
aactccacagtctaatttttttttgggagccagaaaacaaacaaaggggagcaagtacaaactaaaagacgccacgaccacgacccaacagagaaagaaccagcactaaaaaaaaaaaagacccagaaaggagagacgacccacaaactgcagacggagctattatgaataacaatcaccgtgacagatccacacaatgtttttgtgggaaggttctactcgctaactacagaacttaacttatttcaacaggtctttggcagacttagtaaactctcgccccgcctcctgcggtgccacctagaaaaccttgaccgtcatcgagcgcttctcctgaatgccctcctcccgaccctgcattctgaaaacaaactttttgttgccggtcaccctaaagtgcaaaataaattgccaccgcctgtaactttgccaacaccgccgctaccgaaag

SEQ ID NO: 12080 - DNA, 182 bp, Glycine max
  Clone ID: jC-gmfl02220137g10d1
ttgttttttgtttttagaaaccccacaccatatagctttttagggagacaaaaaacaaaccaaggaggacggggaggaaagaaaaaaccgcacgcccccgccgaacccaaaaaagaaagaccacaaaccaagacagggacccgaaaaacaaaaacgacagcaaacccgcacgaagaagaaaa

SEQ ID NO: 12081 - DNA, 137 bp, Glycine max
  unsure (1)..(137): unsure at all n locations
  Clone ID: jC-gmfl02220137g11d1
tgttattttannnncacaaataacaacatttattacaaaacaggaggccacaaggggaacgaaaggggaaaaaaaaaaccgcaaaaaccgcccaaccgcgancaaacagaaaaaaaaaaaacaaaaacagagacaga

SEQ ID NO: 12082 - DNA, 137 bp, Glycine max
  Clone ID: jC-gmfl02220137g12d1
ttggttttttttctgacgactaacaaaatttaaaacaaaacaccagagaaaaagaggacagaaggggaaaacaaaacagcccaaagcgcccaccaacacacgcagacagcaaaaagaagccaaaacacagaaacaga

SEQ ID NO: 12083 - DNA, 141 bp, Glycine max
  Clone ID: jC-gmfl02220137h01a1
cacagacgcaaccaaacacccaacctcccatacccaagcaagacaagcacaaaagacagggcggggcataatccagaaccaccccaccgcagacagagcaaacacacccacaaaacagcacaacaacaacaacgaaggcac

SEQ ID NO: 12084 - DNA, 355 bp, Glycine max
  Clone ID: jC-gmfl02220137h02a1
acggtgaatgacgatcccatgcccgcagaataacgattagctgccgaagagggaacggacacggggcggcatttaaacgggccctcccaagaggaagacgccgaaagctcaaccaatgagcctactgctggtgaccgaaaggcactttttgaaccaataccttcctggccacagcaatagcttcatgagcctagtgcatcacttgcaagccatttgattactccatctgactacatggagcaacgtctagagctagcaactcgaggagcagatttgccaccgacagagactgatgtaactggaagagaagaggctgattctagagctggtgttcctgttgaaggtggcaatcgtg

SEQ ID NO: 12085 - DNA, 139 bp, Glycine max
  Clone ID: jC-gmfl02220137h03a1
ctcaaaggcaagccacaacgcacctttcaatacccaacacagaccaccccaccagacaggacggggcataatccagaagcaccccccagcagacgcggccacgaccccgccaacacggctcaacaacggctaggaaggc

SEQ ID NO: 12086 - DNA, 138 bp, Glycine max
  Clone ID: jC-gmfl02220137h04a1
agccaagcccggcaatgcattgccatgcgacaggacacgctcgccaccccaaccccggcacgcaactcgagccgagcccaaacacaagacacaaccagccataccttacccagaccagaccaccgcacaaaacagggc

SEQ ID NO: 12087 - DNA, 139 bp, Glycine max
  Clone ID: jC-gmfl02220137h05a1
cccaaacgcaagccacaacgaacctttcaatacccaacaaagaccaccgcaacagacagcacagcgcatactcaagaaccaccccccagcagacgcagccacgacccagccaacacggctcaacaacagctaggaaagc

SEQ ID NO: 12088 - DNA, 566 bp, Glycine max
  Clone ID: jC-gmfl02220137h06a1
cgaaacttggttttgcggaaaaacaaagtatcacttttacacagcatccgatattacacacatattctgcttcttcttcttcttctctctctctctctctctaaatatttttctctctcttcagcgaattcgtttttctcttcaagcttccggctatggcgtctggatcctcgggtcgcgggaaactctggctccaaaggcttcgatttcgcttccgatgacatcctctgctcctacgacgactacgccaaccgcgattccacttccaacggcaatcacaccgatccggattttcacaaatcaaggatggcaagaacatcaatgtttcctactactgcttataatccacctgaagattctttaagtcaagatgtgattgcgactgtagagaagagtatgaaaaaatatgctgacaacctaatgcggtttctagagggaattagttcaaggctatcacaattggaattatactgttacaatcttgacaaatctattggagaaatgaaatctgatataaatcgtgaccatgtggagcaagattcaaggctgaaatctcttgaaaacat

SEQ ID NO: 12089 - DNA, 310 bp, Glycine max
  Clone ID: jC-gmfl02220137h07a1
caaagctaaagcactgccagggagaaagtgtgcgatggcccagcagcagaagaaaccaccaccaacaggctatcagggatcgaaccaaacgatcggcacccacacacacaccatggcaaggcacaccaaagacgccaactgcacaccaccggattgaccggaaagcacaacgcagaccgactgaaccacgagacatcaccagctcagccgtggacctgctggacgatcagaggacgcagaagccgaactgagcacataacatcggacccggagccgcacgatgccagcgtcaggaccgggaaacagccca

SEQ ID NO: 12090 - DNA, 532 bp, Glycine max
  Clone ID: jC-gmfl02220137h07d1
gtcagagaacttgttaattaagaaaagcccatgaggataccttacccactcattggatgtactttacagtttacacgttgttccgcagatttctgtcttccaagagaagtaacctattccaaataaaattttggcaaaattctttgagaaaaatgttaaatgtccctaatttgatatctattccaaaacctttttcctcaactttgcagtttaacaatttgttgtgactcctccaataaccattctaaattccctctaacaccccatccccacccaaattttctctcactcctttcccttctcatttcttccttaaattagtcgaataaaccgagggtcaagtgagaaattgagtggaagataaggacattgatactgccaccaagaatgatatcatcaaacagtcaatccatcgaacccacactgcttgtaagtcagagattgctttcttggactgatcactatagcacaatccaccgaaacctgaacagcaggagaatcgaagttgatgacgcggatcttggcagcaacg

SEQ ID NO: 12091 - DNA, 360 bp, Glycine max
  Clone ID: jC-gmfl02220137h08a1
cccagacgcaaaccaaaaagcagcgagacgtacattctaaagagaagcccacgagaggccacagcgaaggcgccagatggaacacggagcacaccgcggcagcgcccaacagagccgcacaaggaagacagaggaccggacaaggacgccacagggacgacacatgggagcacgatcgaggccacagacacagtcggcactaagcacgccgcaagagccagcacagagccggagaccgggcccaacacaacaacaatacggcaggcgcaacaccgggcggacgcaggagacacggacgccagccacatgcccagcaaaacagcacacgcgccaagaccagacgccgacaaaccgaaccca

SEQ ID NO: 12092 - DNA, 531 bp, Glycine max
  Clone ID: jC-gmfl02220137h08d1
attataattctcatttttttatattttttctaggatggtcctatatatccagatcaaatggatcttaacatacagatatgaacaaatctaatttaagaaatccaatcacgtctcacttttttcttaattaccaattggcactttcatgaaaaaaattaacaatcaagagagaaaacgtaattacttcaaaaaaatttaaaattctttttgacaaagcttggaattgactaaggaaagcaaatctaggaaatggagaaccttctctttctgggcttggtcaagtccacaggggcatcgtcgatgtgtgacgtgtccttagacccattcttgaacgggttcaacttgctcagtttcttggacatggacgagaagaacgtgggctttttagtgggcccaatattctccctcccagacgacgacgttccgtgaacattcttctgcaaatcggaaatgaacattttcattttatcagctccgaccgcagctcctcgttctccctcaccaaggacacgtcagcttgcagctgttttt

SEQ ID NO: 12093 - DNA, 464 bp, Glycine max
  Clone ID: jC-gmfl02220137h09a1
ctgaggttctacagtgcgaaatacaacctctactttttaccgacacgtgcgttgcggatgaaagcatggaactcaatgccactgcgattgcccttcgtaactatcaggctcatagcgatctaggacgtgccaggacctgagcatatgtccttcccgtagccaatacactcggacagatgccagaatgattcgagatgaccaagtgctcaggagcaagcggacactgtgcatgcagcccctgataactgacgcgactgcattcacttgatggctcacggtgctaatatgaacgttatacaaggacgggtcagacccaggtatatgacactacgggttcgacagtagggtgcacatttgcggcttaaatgcagcgggtctcaatcgtggaaccggcaccacagaatatcttgtcaagacttgagatgtaaaaagtcatgcaaatggtgctaggtacgacggacatg

SEQ ID NO: 12094 - DNA, 481 bp, Glycine max
  Clone ID: jC-gmfl02220137h09d1
ttgttttttttttctttcactttcccccttttctttttttttaggaggggggaaaaccaaactggggggcggataaaaaagaatcaacccctgggggccgatttcacaaaaaattctttgcagcaaatgttttcgtgccgctaatcaacaacgggttattgggggaagataaaatgaggcgcctagataggggaaccccttcctgacctgttcaaattgatgagggaagcctgctgcacacaacccttgattggtttcaggggcatgcagtttctttcaagcctccccttaatgcaccacattacttcctttttcgaccagccaatctttaactcaatattggccctgatgcaaattttgtatttttagccagcactattcctaaagccagggcacctccaaacaatgcttgaagcctcacaccgaagtacttacccatgaaaatcctatttttgttcttggaattggcttccacaaaact

SEQ ID NO: 12095 - DNA, 153 bp, Glycine max
  Clone ID: jC-gmfl02220137h10d1
ttgtttttttttttgacgacccccaaaatttatacctttttgggagagaaccaaacaaccaacggggaaagggaaagaacaaaaagaccgccccaccccaagcacacagcaaaaggaagaacacaaacggaaacaggggcccacaaaaccaaa

SEQ ID NO: 12096 - DNA, 381 bp, Glycine max
  unsure (1)..(381): unsure at all n locations
  Clone ID: jC-gmfl02220137h11d1
ttgnnttttttnnnnacgactatcaaaatttataacaaagcaccacagaaaccggggacaaccggggaacacaaaaaaccccaaagcccccccaaacacaaccagacagcaaaacgcaacccaaacacagaaacccacaggcaaaaaacccaaaaacacaacaaagcgcacgccaacaaccgaacaaacaacccacagcacgggacaaaaaccaccaaaaagccgacaacaaagaaaaagaaaagacccaaaacaaccccgcggccaaacaccaccagcacagagaggacaacgaacactcgaagggcaagccccggcgaaaagcccagacacaccacagcaggagcggcaaccgacgccggcaccaacaaacccaccacc

SEQ ID NO: 12097 - DNA, 335 bp, Glycine max
  Clone ID: jC-gmfl02220137h12d1
ttggttttttttttgacgcctatcaaaatctataacaaaacaccacagaaaccgagaacaaacagggaaaacataacaccaaaaagaccgcccaaacacaccgagacggcaaaaggaagccaaaacacagaaaccgggagacaaacaaccaaaaaaaagaaaaaaccccacgcagaggcggacaaaaagccccagaagggacagaaaccaataaaacccccaccacaagcgaaagcaaaaacctaaaacaatccgcaaaacaaaaaccaccaaaacagcgatgacaacgagcactcgacgggcaagccctggcgaaatgccgagacaaaccacag

SEQ ID NO: 12098 - DNA, 410 bp, Glycine max
  Clone ID: jC-gmfl02220138a01a1
attcaacttaagagatcaatatggccacttttaccaagcctccttctaatatatgtttcctccttctgttgcttctagcacacttccatttgggccaaagccaagttgagttgaattactactctaaaagctgcccaaaagctgaagaagatatccaggaacaagtcacacaactatacaacaagcatggaaacactgccgtttcgtgggtcagaaatctcttccacgattgcgtggttaagtcatgcgatgcatcactactgttagcgacggtgagcgatgtagtgtcggagcaggcgtcggatagaagttttgggatgagaaacttcaagtacgtaaacaccatcaaagcagcggttgagaaagaatgccccttgacggtttcatgcgctgacattgttgctctttct

SEQ ID NO: 12099 - DNA, 151 bp, Glycine max
  unsure (1)..(151): unsure at all n locations
  Clone ID: jC-gmfl02220138a01d1
agcttagcnntcnnnaggggnnnncgggnncccgcaaagaaacgtaatagaanncncntnnnggtngngcgctactcgncggcggccgccctttntttntttttttttttttttttttttacctttttgatggggggctttgttngctggg

SEQ ID NO: 12100 - DNA, 542 bp, Glycine max
  Clone ID: jC-gmfl02220138a02a1
gaaccataggtgtagtagtatgtggtttgttgtgtttggtggagaagaataagcacataagtgctttagggaagagttctgggacaagtgaggataaggatgagtcagaggaagtgcttcaggccacaattgagaagagtaagaaggttcttgctttgcaaagggaattgcttcaacagatttctgaaagaaggaaactggtttcttcaataaatagtgaaagcactcctgaaatagaaggagacagcatttcttatgagcacagtgacgaatccttgtcaagtgactcaattccgcagaaaggttcagccaaaagaggcagtgctgttgagaacgaaaatggtgttcttgtttcaagcaattatgtccaatctattgagaaggaaataccagatgtctcatttgtaggcattgatctcggtttggacaaaggtgaagaggaagatgataatctgtctcctgttgaaaaggcttcacctaggctatattttgatgaacagttgaatagcaggagatatgagacaataacacctgataccctg

SEQ ID NO: 12101 - DNA, 626 bp, Glycine max
  unsure (1)..(626): unsure at all n locations
  Clone ID: jC-gmfl02220138a02d1
ggttcaggcnnncnnnaggggnnnnnggggggncggaagatgtactgaaactgaanntncgtgnnnggttngnngcgcncactcgncggcggccgcccttnnnnnnttnttttggccantnnngtttctnnctttattttatntattgctggattggggttttagctcccttggtntgtgcccgacctgacatatataacaagtgtattattacataatccttagtttaggggcaaaaatgttcctccaggacctgcaacatgaaggttttaacaacttgaccaagtcctttccctgcacagaccttgatatcactcagcatgagagcactccatattgatcagtctgcttaggtagagtagaagccaagaatttaccattggtacttagcagcaacaagaacctcctcatactgctgagcagcattgtcccaactaagatcctgcgtcatccctcgccgttggagcccttcccagctctgcttatactgcctgaaggtcaacaagcagttccctaatgcatttattaacttgttaagtttctgcactgtcaaatgtccacccaaggcccgactcttcaaatggattaaaaggcttcactgtatccctcaatccaccgacagcatg

SEQ ID NO: 12102 - DNA, 534 bp, Glycine max
  unsure (1)..(534): unsure at all n locations
  Clone ID: jC-gmfl02220138a04a1
ccttctcctccctctttccccatctcacatgatcgcgatgcacctctagggtttctccctctccctggttcgaaatttcgattcccgtacatgccatcggtggaggaagaagatgtatagcaatttcaaggagcaagcgatagaatacgtgaagcaggccgtgcaggaagacaatgccggaaactacgcgaaagcgttccctctctacatgaacgccttggagtacttcaagacgcatctcaagtacgaaaagaaccctaagatcaaggaagccatcacgcagaagttcaccgagtacctgcgccgggccgaggagattcgggccgtgctcgacgacggcggccccggtccggcctccaacggggacgcggctgtggctgcaaggcccaaaaccaagccaaaggacggtgaaggcggtggcgacggcgaggaccccgagcaggccaagctccgggccgggctcaactcggccatcataagggagaagcccaacgtgaagtggaacgacgtcgcanggttggagagcgccaaaca

SEQ ID NO: 12103 - DNA, 518 bp, Glycine max
  unsure (1)..(518): unsure at all n locations
  Clone ID: jC-gmfl02220138a04d1
ggtctagtaanntnnaggggnnnnnnggnnnnccggcttgaatctgantgttanntnccctnnngnggtagacgcgcncaccagncggcggccgcccttnnnnnnnnnnnnnnnnnnnnnnnttttcagcattacacaagnnattttttcaaatcggttcagggtctgttatacacaatttagaagaagaaaaatgagtatcgacctttataaatccacctcggtacaaaaggggcctttacatccccaaaaatgaaaaagaggcatttcattggcatccaacggctaataaattacaaattataacaatatatttgaaaccaggggggaccttcaaagggaaattccatcagtattaaccttcctctccaaattccttcgggaatctctcgggaacatcaagggcggctttgcttactgtgggcctttgtctagcgagtaccttctcaaaatctgtcctcctaatagggggcggaaggatcttagaagcaagtccttttgcagcaagctcttgcatt

SEQ ID NO: 12104 - DNA, 500 bp, Glycine max
  Clone ID: jC-gmfl02220138a05a1
acatcacatccatcctccaggacccctcctgaacctgactgcatccattcccatttgcggtttcgtatgcatgttcccaccgtgtaaaaaacctatcatagcgacaaaacggcgtcatgcttgggaagtagcatgcaaaggctaccctagagataggagggacattccgatcggacttggaggactctatggtgctacaacaagtctgacatgtgacaacactggtactgcatatggcgctgcattgacgcctgcagatccaactaactgcgttcaaccggacccagaaaaagacccttgttgcccaccaccccccttcaaagactactagctccctgcacaccatgacaagacattaccggtccgaattagaccagatgatcattcgggcactgatgattacatagccatgtacgaggcagccgtgaggcgcatgcaagaccttgcagctgatgatactcgcagtgtcatgcaacaggccaatgttcaccgtgcctact

SEQ ID NO: 12105 - DNA, 546 bp, Glycine max
  unsure (1)..(546): unsure at all n locations
  Clone ID: jC-gmfl02220138a05d1
nnnggggcggggttggaactttagcatnctcgntnngggtaagggcgctaccagtcggcggccgccctttttttttttttttcatatgaagctttcatttttttaatgtaggaaaatcacactacacactttggcattacacatggctagctcatagccctgaaattaactcgatacatggccaagctaataataccatatgatctaggcatggtatttttgatcatatacatgataatacatgtggaaacttgagatcctccaagacaagaaattgaaggtgatgttgatttgggcggtggtgtggtgtcagaaaaaacattgttgtttattatttcattcacaccaagcatctttggtcgcttttttgttcagttccaccaatgctttggcgcaccttggatgaaatggaggatagtgaaatgggaaaaccagggtgttcagtgtccctaatcacattgtaagaccaagctgctaaaaccgccccagtaataggtccaacataatatacccaaagtcccttgtagtattgatgtcgcaattgca

SEQ ID NO: 12106 - DNA, 521 bp, Glycine max
  Clone ID: jC-gmfl02220138a06a1
ctctgggtgggtaaagatggaagtgttccagtagagtcttatgcttgtttctggcggcatttttgtggtttaatgctcaacatgcttttgtaagttgtgctttgacatttgagttgcaaagcaaaattgctaaagccaaccaagagggaccttacctaggtttaatcataccaaattcttttgaactagaccctcttcttcagaatcctggctacacagctagtgacaccatcatagacttcgctggaaggagatttcgctttggagccattggtgacaagcctgttatactggtcatgacaggattgagcgtgataaatgcagctataacgactcagcttctgctgagtttattcacggtagaaggagtggtgcattacggcattgctggaaatgcaaacccgttcttgcatattggagatgtagctattccccaatactgggctcatctagcactatggagctggcagaggtatgggctagggcctgatgacacattacccttggaagacaatggagac

SEQ ID NO: 12107 - DNA, 521 bp, Glycine max
  Clone ID: jC-gmfl02220138a06d1
aaaaatcaatttttttagttattatcactccaaagtgcaaatcatcctcaatggaacaacattaaggctgttgcagttgagaagggtcacaactctgggtggatatatatagcataggggggtgagattaggggtttaagattgatgcaatacccctaagtatgggaccatacaaaggccttatttggaaagaagttccctcttattctgacattcttgagccttgaagcaacttggggaaatctgtaaccgtggctgtcctagacatcaggttcaggatcattattgaccagtctctaacttgagacggttaaaaatgagtacataaaataaatcttgggtcatgtacagtgatagtttggaaacacagaaaatggaaaaagacccagatactaagaaactaaaactacaattttgatatggaaagaaaggatgtacactgcaactatctggacagattaattcagtcattgtactaataaggaaagtgaaaaaaggatgagaaaaaatggtaatgctca

SEQ ID NO: 12108 - DNA, 443 bp, Glycine max
  Clone ID: jC-gmfl02220138a07a1
tttccttcaaagcaaaacaattccttgttgaatcgggcgtcgcagctttcgtgataatgatcttggcgctgcgaatcgattgcatgggtttggagaatgccggagcttcgtagtggaccgcgacgacgtcgcgctccggttgctcgtaaaagctacgaaccaccgtctacggccgggagatacgtcaagactcgcgctgcagccgccagagaggcagcggctgtggagaggccaagaactcgtttggcggccaaaaaagaggagaatccccttataataatatccgatcacactaagaaagacgacgctgccgccatggccgacgagagtggtggcttgagtgcagacaagggcgttgctcaagacgatgacaccaacgcagctccttttacggagagggttcaagtcggaggatcacctgtctacaaagtagagaggaaact

SEQ ID NO: 12109 - DNA, 350 bp, Glycine max
  Clone ID: jC-gmfl02220138a08a1
gacgcacacgagagtcggcagcacctccttctgcgacgattgctctctctctgtcgcgctttgatcaccgacttaggcggaaactaaagactaggcaaaggggtgaagccaacagctgaagagctgcgtcgcatcatgggctagtagcataatacccggaatatgtctgtcactgctcatggtgatcacggaaaaccaaccctgactgacactgtgcgtggctgctgctgggattattgctaaggaagttgcaggggacggccgaatgactgatacccgtacagatgaacctgcacgaggtattacaatcaggtgtactggtatctcactctactctgaaatgactgatg

SEQ ID NO: 12110 - DNA, 534 bp, Glycine max
  Clone ID: jC-gmfl02220138a09a1
gtcggaaactgaatggaagtgaggggtagtacattgcgcatagcaaggaagatcttcacagatttccggaattatcttcacctatgtttgactatgttcaaactgggaacaagagacctggttttgttccagtttctgattctagaatgtctgccccaattgttcttgttatagatgaatgtttagatgaaccacacctacaccatctacagagttctttgcatgcttttgttgattctctcccgccgacaacgagattaggaattatactatatggtcgtactgtatcagtgtatgatctttctgaagaggctatggcatctgctgacgtgcttcctggggacaaatcaccaagtcaagaatctttgaaagcattgattcatggtactggtatatacttgtcaccaatgcatgcttcgctggctgttgcacattccatattttcatcattgagggcatataagttgaatgtaccaaaagcttctcgtgatcggtgcctatgaactgctgttgaggctgctctcgctataattc

SEQ ID NO: 12111 - DNA, 479 bp, Glycine max
  Clone ID: jC-gmfl02220138a09d1
aagaattaagatttttctaattattaataaattatatggatatggatatatatacagatagatattctatatcttttatcttaattaatatttgacccctccttataatgtgttatagttttctttatttttaggaacttatccattccttttttaatgtgcccgacaatccgaaaaaattctgggggaggggtcatttcgtttttgatctagaataaatagagcttcaagaaatgagagaattaagaatacccacgagaaacactaatccaatccataatgatgtaccggaaaatacaacatttttgttattcgaccaaccttcaggagaagcaaatacaacaggtacactaatcaataaaataaatgaaatagcaattaatgcaaaaacagctaattggaaagcaatagtcatgtttctaatcctccaatttaccaacaaaagaactttacccatttgatcccccaaccccttgatc

SEQ ID NO: 12112 - DNA, 575 bp, Glycine max
  Clone ID: jC-gmfl02220138a10a1
cagagacgtgaaaatcccttggatgatcgtcacaaagcttctgttggttcatctactgatgtaaagccattgttatcttctctagggaaatcttcagtactaacacctaccgatgcttctagtaccaataagttacatagcacagttagcacttcgtcaatgctatcttcatcttctcctggttttgttcgtccttcccgtggaactacttctgctaggtttggatctgccttgaacattgaaactttggttgctgctgctgagaaaagagaaattcctattgaggctccggggtcagaggttcaggacaaaatattatttattattaataatgtttcggctgctaatgttgaagctaaagcaaaagagttcactgaaattttgaaagagcagtactatccttggtttgcacagtatatggttatgaaaagagcaagcattgagccaaatttccatgacttgtacttgaaattcctggataaagctaattcaaaggctttgaacaaagagattgtccaggcaacttatgaaaattgcaaggttctcctatgatcagagctcatataatcaagttc

SEQ ID NO: 12113 - DNA, 533 bp, Glycine max
  Clone ID: jC-gmfl02220138a11a1
cgtgtccaaagctttacctcaataagttattttgaggtcaagcagatgataaacaaaagatctaggcatgcctcatcttcaaaagttacaaatttaaatgaagtgcttatatctcttattagtactattgtatgtcgaattggcttggggagaaggtatgaagaggagggatctgaaggtagcagattccataagttgctcaatgagtgtgaagctatgttgggtaacttctttgtttcagattatattcctttcatgggttggatcgataaactcaggggactggatgcacgtatcgaacgcaatttcaaggagatggataagttctaccaagaagccattgatgaacacatgaattctacgagaaagactccagaagaagaggattcagtcgatgtcttacttgaactgaaagagaacaacacgtgttccatagatctcaccaatgattacatcatagcagtgctcttgaacttactctgaggagctacaggttcaactgaagtcacaacaatctgggccatgactgaact

SEQ ID NO: 12114 - DNA, 590 bp, Glycine max
  Clone ID: jC-gmfl02220138a12a1
ggcactataatatgaaccgcatcaggtccgtgtggtcaagcatctggcatgttctctctgatttctttgtaactattggctgtttggcaaacctttcaattgcaatttttgcaatggattccttgcgtcagttatcaatgaaatttctggagcgggaagagctggccaattataattttcaaaatgaatttatgaagccttttgttattgttatgcgaaagagtaatgctgttgaaattagagaactaattatcagatgtgtctctcaaatggttctgtctcgtgtcaacaatgtcaaatcaggatggaagagtatgttcatgacctgatttcaggtattcacaacagcagcttatgatgaccacaaaaacgttgtactcttggcttttgaaattatggagaagattattcgagattactttccatacatcactgagactgaaaccacaaccttcacagactgtgtgaattgcctaattgcattcaccaatagtagattcaataaagagattagcctaaatgccattgcttttcttcggctctgtgctacagaactagctgcaagagaccttggctcatcatcaagaaat

SEQ ID NO: 12115 - DNA, 507 bp, Glycine max
  Clone ID: jC-gmfl02220138b01a1
gctccaaatccacgcacttttaaggaccttgttctaatgatttgcggtttgtttttgctctcttcccttgttgcctttggagggtacagggcctccaacgcgccacatgctgacgtgtcatcgccagcatcgaacgatgaacaacctaatcccacatcggtgccttctccgaaatggtacccggtttcacggggtgtttcttctggggtgtcggagaagtcatcaagcatgttgtttgcggttaaagatggagcttcggaagcatttccttgggacaatagcatgctgtcgtggcagagaactgcttttcatttccaaccagagaaaaactggatgaacgatcctaacggtcctatgtactacaagggatggtatcacttcttctaccaatacaacccgaacggtgcagtttggggtgacatagtttggggacacgcaatgtcaagggacatgatccactggcttcaccttccactagcaatggtggctgatcaatggtatgacatg

SEQ ID NO: 12116 - DNA, 608 bp, Glycine max
  unsure (1)..(608): unsure at all n locations
  Clone ID: jC-gmfl02220138b01d1
aggtttagtntnntcnnnaggggnnnnncgggnnnncggtcaaagaaaactaanagaanncncntnnngggtagncgcgctactcgtcggcggccgcccttttttttttttttttgngggaatggtttttgatctagaacccataactttatgtgtgggtatgggaaggtaaacaattgatgagtacaaattgccaccccaagatgttttccgatcctttgggactacaagtcttttatatccaatttaattatttattttaattcttctgatcagggtggaatgggcgtataaatgcagaattcatttgccaaacattgagtgaggctgtcacagtggcctcagtagcattgttgaacaagaacaacctagcagctccatagattgcctttgttggataaacccgagatgtcacaaccgtccttccaccttgagcaaagctttcaacaatagaatggtccaccagtatccgcaaggaaaacttttcatctttaagtactggaacagcgctgccaacgatttgcttgcgaacatcatttgcctgagaagaccttgattgatcagcgcaaaaggaagtcttaagatttccattgctcccttaatgacat

SEQ ID NO: 12117 - DNA, 461 bp, Glycine max
  Clone ID: jC-gmfl02220138b02a1
gtattgttataaccctagcttttagattttcatctctcgtccattgtctgcgtctcactcatcctcaactcttcctctcttttcttccaaacccgaatctggattctcctctctcccgatttcaattctcacggtcttcaccgatcgccagatctctaagcaccgctcttgttttcatcgattaaataacaaacaaaaattggctcaattttattttaacatcctaaccaaaaacaaacttttcacccgattttaacattcgagagtaaatttagtttacttgttgatttttttttttgtttgttttgattaagtttctgtttctatttaaatcgataaacggcgaggtcgagcgttagaattcgaatttcggagaaaaaaagttacaggtattattaggggaatcgcgtggaagcgttgaggagagtgtttgatctgaggaaggaaaaaaatggtgggag

SEQ ID NO: 12118 - DNA, 411 bp, Glycine max
  unsure (1)..(411): unsure at all n locations
  Clone ID: jC-gmfl02220138b02d1
gccgcngcntgttttgctttccttgcngcngcctcttgggcgggggctcgggcngctgcntccatttctttactcgacttcttcttctttgtngaagcccctttcttggggcgctctttcccctcncccgtnggtgtntcctcctcccccttttcggggcctgtggccnnntcgggccccttgtttgggtcngacctgttgggttggtcttgngattctttcccctccttggaagctttatccttctttttcttcttctgggaagttttggattctgcagggacattttctttcttttctccatctccatcagtctcaacacctgtcttatcctgagcaccttgagactcatctggaccatctttacttggtttgggcgccaccccaaaatcagctagaagagcctcaagc

SEQ ID NO: 12119 - DNA, 509 bp, Glycine max
  unsure (1)..(509): unsure at all n locations
  Clone ID: jC-gmfl02220138b03a1
gtgaatttaattgtagnctattttttatttattattaattaatggcagtgacaaactgaagcatttgtcgtcaaagaagcaaaacgagatagcaagtttggagaaagagatagagtcactgatctgggagttggtggaggaacgcaagagggagtgctcagggacatcctcatcagagaaggatttgatgcagttgctgttggaagcagcaatgactgatcagagtctggggaaggacttctccaagcgtttcattgtggataactgcaaaaacatttactttgctggccatgaaaccacagctgttgcagcctcttggtgtctgatgcttcttgctttgcaccctgaatggcagacccgtataaggactgaggtggctgaactttgccccaatggtgtaccagatgcagattctgtccctctgttgaaaacggtggctatggtgattaaagaagtgctacgtttatacccaccagcagcctttgtttcaagggaggcatatgaagata

SEQ ID NO: 12120 - DNA, 518 bp, Glycine max
  Clone ID: jC-gmfl02220138b03d1
aaagaagatttttttttttaacctaaacaatagttttatgggtacaatacacatacaaacatatgcaaaaatctttgtgtcataagaaaaactaaatgcttgcacgttaatgaaaataaaagttgaattatttgtgtcattagctatgagccgatcaaatctcctgaatgagaatatgtacaccatgtcccggttctacaatcattctatatgccggagaatgcctataactaggagacaaagagaagctaaacttggagatgataagtgctagcacaaccttcaattgaaccattgcaaagttctttcccaagcacaagcgagtacccaatccaaatggcacataagcatgtggaaacctgcaagccttggagacaccctcgctaaacctttctggtttaaactcatttgcatctggtccccaaatttcaggatctctatgcagtgttgggatcagagtccataaacaaacgcctttaggaacattgaggtttccaatttggatatcttcatatgcc

SEQ ID NO: 12121 - DNA, 377 bp, Glycine max
  Clone ID: jC-gmfl02220138b04a1
gtaatttttggtgggcaagatgctaattggactctcttgaatgatctgcatattcttgacttggaaaccatgacatgggacgaaattgatgctgttggggtgccaccttctccaaggtccgatcatactgctgctgtacatgtggaccgatacttacttatctttggtgggggttcgcatgcaacatgctacaatgatttacatgttcttgatttgcaaactatggaatggtctcgccccacgcagctaggagaaataccatcaccacgtgctggacatgctggtgtgacagtaggggagaactggttcattgttggtggtggcgacaataagagtggggtctctgagacggctgtactgaatatgtctacactgac

SEQ ID NO: 12122 - DNA, 461 bp, Glycine max
  unsure (1)..(461): unsure at all n locations
  Clone ID: jC-gmfl02220138b04d1
tttnttttttttttttttttttttttttttttttttttttttttttttttttttttttggttttggtttttttttttttttctttttttccccctcctttttttcttcttttttctttggacaaacaaaccccccctgttcagggggggcccccccccaaaaaaaaaaaaaacattcccccccaagaggccccccccctttcccccccccaaaagggggggcccccccccctcccccccccaggccccttttttcgggggggggaaaaccctcggccccaacagacgccacattttttcccccccaaaaaaaaaaccccggttctcccccccccaatttggggaaaaaaaagggggggagggacccccaaaacagggccccccggttttctcacaaaaggggccccccctttttctttttccgggggggggggggggtcccgggaaccccccccccccccc

SEQ ID NO: 12123 - DNA, 506 bp, Glycine max
  Clone ID: jC-gmfl02220138b05a1
ctttatcgatgatgctctgaacttctcatctatatatgcctctctgatgccgatgggtgcctccaattttgcggcaagcttcaaactttcaatcgctagcgccgattttgatcacttttccggtatgaatcgtctgcaacaccccctttgttaatttagaaatgctagatctattcatcgtgtcacacgttcgatccaaaacctggttccacaagaggaaaaaaataccactcacttcgttcccataaaccctgtgatatttcccttccaatttcgtaacactcgattgtaatttgcgaattgtacagctagaatttcgtttcttttcttttttgattttttttatatttcctttattttccaattttctttgctgggtttgcaaagtttgtacagttagggttgtagatggtgatggtctgagggtgctcttgtagaaagttcaaattttaattctgggcttttttgcgcgttggagagaacaaagtttttgaaaacaggatttt

SEQ ID NO: 12124 - DNA, 624 bp, Glycine max
  unsure (1)..(624): unsure at all n locations
  Clone ID: jC-gmfl02220138b05d1
gccttcagtncttcntnnaggggnnnnnnnnngnggggcccgcaaagaaatcaaatagtaannntncnntnnnnggttagncgcgctcacccgtcggcggccgccctttttttttttttttttaatcaaaacttttattattcgcactagtgtttgtatacatacactaaagacaccttttctttcctatttttttatatatcttctggcaaaatgttctaccatgccccaagtacaaaattttatagatctgagcaatcctactagaccatgatctcaaccctggattttacaaaaaaaaaaaaaaaaagaataaacaaatgaagatatcatagctaaaagaaatcacaagaaacaaataggtaagtgttgtcgtaaccctgaaagcatgttaattccaatcttgactgcttctttaaagacactactgtacaatgaaaatcctgcaccatcaaacatgcataaaatgtggctgtttcaggaagctccagcaggtcttaactgatatgcctgatgactcccttttgcttgaagggccatagacatagatcttaacctgctagttatctctgtgaaggatggccggctttcagggtcaggtgaccaacactcttccataagctt

SEQ ID NO: 12125 - DNA, 515 bp, Glycine max
  Clone ID: jC-gmfl02220138b06a1
cgagaacaaaaaaaaaaacgtgatcttctcttctcttcgaataaaccacaaaaccaacaggcgagaagaggagtgagagaagatggggttgtcgttcacgaagctgttcagcatgttgcttgcgaagaatgaaatgaggattctgatggtaggtctcgatgctgctggtaagacatccatcttgtacaagctcatgcttggagaaatcgtcaccaccatccccaccatcggatttaatgttgagactgtggagtacaagaacatcagcttcactgtgtgggatgctggtggtcaggacaagatccgtcctctgtggaggcattatttgcagaacactcatggtctcatttttgtggttgatcgctatgattgggatcgagtggttgaggcaagggatgagttgcacatgatgctggatgatgatgaacttatagatgctgttttgcttgactttgccaactagctagatcttcctaatgcagtgaatgctgcactagttactgtcaagcttggac

SEQ ID NO: 12126 - DNA, 479 bp, Glycine max
  unsure (1)..(479): unsure at all n locations
  Clone ID: jC-gmfl02220138b06d1
tttntttttttttttttttttttttttttttttttttttttttttttttggggcgnggggcccgggggaaccctccggggttcccttttcttnnttgggccctgggggggggttctggggctgggccccggtctttnnttttcgggggggncnttncttggggggttttggtgtcccccgggggggccctgcttctctttcttcttgccgcggggcggggggggggggctttttccctggcccgggccggtttgccccccggggggggttggggggtgcgttttctgcccgggccggtgttggnggtggggtttttctggcgccccccgctggggctccccccctggggngcgccggggccccgggtttctggtggggcccccccgctcttgccctgggtgtnggnnnccttggggttccccggggccccccccccgtcggtgggggcccccttgtgggctgctttgggtggggctttg

SEQ ID NO: 12127 - DNA, 485 bp, Glycine max
  Clone ID: jC-gmfl02220138b07a1
aaaatactaaaaaaaaaaaaactacttatcacccaccaaaccaaagcaaaagggaaagaggacgatcgggaaagagagtgtctttaatttcacagtttcatagcaattatcgccgaaaaatgcaaaatttccactcatatctctttgtttatgacatctaaaacatctatctactctctacccactttctcagttccaggtcagcaagagaaacagtacttatccatattacagggttatgtgaactgaagagggagggtactggtttgtggaggcagtgacacttttgcaagcttagaatcctctatcctagttctttgtgaaaacaaatagtgtgatgctttcggaggctacttttctcaaagcttgcgtgtagcactatctgcatattggtgataagttgaagtgtgggaaaaaatctaaagctaaagagagtttgggaagctggaacaatgggttctggctgatgctgttagagttttgat

SEQ ID NO: 12128 - DNA, 505 bp, Glycine max
  Clone ID: jC-gmfl02220138b08a1
gctaccaccaccaatctattgcgcctcaaaaaacaactccctcacgattaacaaactcgtgcattccaccaatcccaaggcacaacagcaacaatgtcagcaaccttaacatgtaaactaggagacaacaacctaagcttaaacgataaaaacgaccaacccccttcacctcctcagcccctacaaaaatgccctgccaatatggtttcgatggtggtctcagagctaagaattcaacgaggaatagcccttccaatggtggccatgaatttggcttggtttgccaagacagccatcacaacagcatttttaggccgtcttggggagcttagtttatcaggtggagctctcggcttcacttttgctaatgtcactggcttctctgtcctcaatggtctatgtggtgccatggaacctatatgtggacaggctcatggtgccaaaaacttcaggctccttcacaagacccttctcatggcaatctcgttggtgctattggtatcac

SEQ ID NO: 12129 - DNA, 480 bp, Glycine max
  unsure (1)..(480): unsure at all n locations
  Clone ID: jC-gmfl02220138b08d1
tnnnnnnnnnnnnnnnnnatttcntattttatnctcnaaagaaaattatttacttttggacagtcaggatttttattttatactacaagaaagtaaaagatcttttccgtctctctaggctaaagatcagtatttcacatatttttatatatgtacatatacatgaactcactcatcaaactaagcacatgaaaaaaaacctatatactctattttaatattgtcgaatgaaattaaagacagaattagtcctcgtcgtctcacttgtgccgaggaaatcagagactaccaccctttcgcttcttctatacaaggtcaatgtcactcaaagatggtcaccgtctcttgctagctagacaaataactcaagaagtgactaactttgctgtaaggacttttcaccagtgccactaattcaggagttttcatgaaaattgagggatctagataaagctgcagggttagccatccacattggag

SEQ ID NO: 12130 - DNA, 547 bp, Glycine max
  Clone ID: jC-gmfl02220138b09a1
gaagaagataagcgatgtttgggttatcctgaagaaaggcctctttgttgggaggatcaggaagaagaagaagatggttgagcttcgcagcagcagcagcagcaacaaccactaccaatggtggggccatggaggagttgctttcacagctccaatctcatgtccagaaggctcttgctggtggaggacccgaggcagtgaagaggaacacgagtaggaacaagtttctgccccgtgaaagaatcgatcgcctccttgatcccggttcttccttcctcgagctttcacagcttgcaggacattacttgtatgaagaacctttgccttctggaggggttgttactgggataggtcctgtgcatgggagactgtgtatgtttgtggcgaatgatcccactgttaagggaggtacttattatcccattactgttaagaagcacctcaaggcacaggagattgctgctcagtgcaaattgccctgcatatatcttgtcgacagtggaggagcttttcttcccagcaagccgaaatgtttcggacagagaga

SEQ ID NO: 12131 - DNA, 437 bp, Glycine max
  Clone ID: jC-gmfl02220138b09d1
attaaaaaaggggagggtttattttactggatacgggctcctcggacgaattcaaacatgatagatgacccataagtttgacttgacatataccttattggtgaacataaaaataaaccgaccctttgaatattgggactaacttactagcctataaattcataaaaataaccaattttgctgagatcgacaaggaactttttcttttcacatacggggctgaaaaaaattaccacttctctttgcctgaagaggggggttttttcaggtggtcaaataaacttccatcgcaaacacctcggatgggttctttctgcagtaatccactcttatctttagcaagtttgtaaagaattttccattcaaccacactaccaatccttcctgagaaatctttaggctctctatttgcctttatcatccccggtaactcatca

SEQ ID NO: 12132 - DNA, 539 bp, Glycine max
  Clone ID: jC-gmfl02220138b10a1
atttcggtgccactcaaaacaatcgcttgccctatctctcacacacccaaacccaacattattaatactcttccttctctttaccttttacttttcgaagcaaaaacaccataacaaaacacccagaatttgtgggttccattcccaaaacatagaacaagaaggagagagagagagagagaatgcaacgggagaaacaaaaaacagaagtatttctgtgattgattctctgcaaccgaatcatcatcagccacttcttctcccagtttcagctctaccctctctcttcttttcctcggctctggttcggcaaggcgtagggggttgttattattcttcataatggttgcaacagctgctacggcgtcgtttctccctgtgccttcgccggacgctggaaaagggaaacccaatggtggcggtggcggcggcgtttctgtgaacctcggaggactcaaagagaagcaaggtttgtgcggttgcttgcacgtcaaggcaaacgcacaagccccttcgagaccatggagaaggttgagaat

SEQ ID NO: 12133 - DNA, 593 bp, Glycine max
  Clone ID: jC-gmfl02220138b11a1
ggctgctgggactggactcttagcagtgattctggatggagatgtgtacaagtactatgctgatggagaatggaagaaacctgcttctgggaaaagtgttgccatcatcaaccccactaccagaaagactcaatacaaagttcaagcttgttcacaagaggaggttaacactggtcatggacttggcaaaatctgcccaaaagtgatgggcaaagaccccactatggaaacgttctgaacttcttcacaaggcagctgctatccttaaagagcacaaagcaccaattgcagagtgcctggtgaaagaaatagcagagccagccaaagatgctgttacagaggctgtaagatctggggatctggtttcttatactgctgaagaaggcgtaaggattctgggagagggaaagctcttggtgtcggatagctttcctggaaatgaaaggacgaaatattgcctcacattcaagattccacttggagtgattctagccattccaccttttatctatcccgtcaatcttgctgtttccaaaattgctcctgcgctgattgctgggaactacattgtgctcaagcctcaactcagggag

SEQ ID NO: 12134 - DNA, 572 bp, Glycine max
  unsure (1)..(572): unsure at all n locations
  Clone ID: jC-gmfl02220138b12a1
gaagaagataagcgatgtttgggttatccggaagaaaggcctctttgttgggaggatcaggaagaagaagaagatggttgagcttcgcagcagcagcagcagcaacaaccactaccaatggtggggccatggaggagttgctttcacagctccaatctcatgtccagaaggctcttgctggtggaggacccgaggcagtgaagaggaacacgagtaggaacaagtttctgccccgtgaaagaatcgatcgcctccttgatcccggttcttccttcctcgagctttcacagcttgcaggacattacttgtatgaagaacctttgccttctggaggggttgttactgggataggtcctgtgcatgggagactgtgtatgtttgtggcgaatgatcccactgttaagggaggtacttattatcccattactgttaagaagcacctcatggcacaggagattgctgctcagtgcaaattgccctgcatatatcttgtcgacagtggaggagcttttcttnccagcaagccgaagtgtttccggacagagagaancttggcagaatattctacaatc

SEQ ID NO: 12135 - DNA, 488 bp, Glycine max
  Clone ID: jC-gmfl02220138c01a1
acatctggcacattccttttcttttaatatatcagaaggcacatgacgcaatgtttaaagtgctgaaccttcatggtgtaactaaagagcctaatttagaggaatggacttgcacagctgaatctagtgatttgctatatgaaccagttcgtatagcctcagaggggaaatatacgtgcctttcagattgctacctctccgttctaaaggccttactgcatgcttatgttgattgtcaaaagaaacttggtgtggactggattccagcttgcaaccttgaaagtgcaactgcgaaagagaatactgatgctcctaaggcagcatggaagttattaaagggtgcagatggcgttcttgttcctggagggtctggagatagaggagtgcatggaaaaattatcgcaaccaaatatgcccgcgaaaacaggattccataccttgtcgtttgccttggaatgcagattgctgtcatagagtttgcacgatct

SEQ ID NO: 12136 - DNA, 570 bp, Glycine max
  unsure (1)..(570): unsure at all n locations
  Clone ID: jC-gmfl02220138c01d1
ggcccagtctcntnnaaggggnnnnagggnncccggcttaaaacttanaagaanncnaatncgggtaaagcgctcaccgtcggcggccgcccttttttttttttttttaataaattatttttattttttatatcttttaagtgctttgggggtctgattaaccacaacaagtgcacaacgcctatgccaaaaacacgaatcacacgtacaagaacaccctcaattaattaattaaccctacaaatatatattatagcgtggatcatatcatatcgagatctaaaatcccgctctgcaaaggagttaaagaacagaaaggagcacgagcaagagaaagaccgtggatccaatgatggagaggaccaaagctgcagtgacgcggcgacaataggcatcaaagacgtagcacactttcatccattgcacgcgcgagccccccttctgtgctatcactcccactgcacaagctgaaccattggccgagaacaacaaagccatcatcacaagatctagcgctgctagccccaacagagtcacatcgnttttacttccattgcttcttgccatcaa

SEQ ID NO: 12137 - DNA, 488 bp, Glycine max
  Clone ID: jC-gmfl02220138c02a1
acatctggcacattcctttgtttttaatatatcagaaggcacatgaagcaatgtttaaagtgctgaaccttcatggtgtaactaaagagcctaatttagaggaatggacttgcacagctgaatctagtgatttgcttcatgaaccagttcgtatagccttagaggggaaatatacgtgcctttcagattcctacctctccgttctaaaggccttactgcatgcttatgttgattgccaaaagaaacttgttgtggactggattccagctagcaaccttgaaagtgcaactgcgaaagagaatcctgatgcttctaaggcagcatggaagttattaaagggtgcagatggcgttcttgttcctggagggtttggagatagaggagtgcaaggaaaaattattgcagacaaatatgcccgcgaaaacaggattccattccttggcgtttgtcttggaatgcagattgctgacatagagtttgcacgatct

SEQ ID NO: 12138 - DNA, 79 bp, Glycine max
  unsure (1)..(79): unsure at all n locations
  Clone ID: jC-gmfl02220138c02d1
agccttggtttcttntnaggggnnnnncgggnnnccccgcatagatacaaatnagtaanncncatnnnggggtagangc

SEQ ID NO: 12139 - DNA, 555 bp, Glycine max
  Clone ID: jC-gmfl02220138c03a1
gttcaagaatgctgatcaccaatctgtggtgatctcaaaccatagccgtttgtccatagccacttttcaaaacccagcaccaaatgcaactgtttaccctctgaagataagagaaggagagaagcctgtgatggaggaaccaatcacttttgctgaaatgtacaggaggaagatgagcaaggacattgagattgcaaggatgaagaagctggctaaggaaaagcatttgcaggaccttgagaatgaaaagcatttgcaagaacttgatcagaaggcaaaacttgaggccaagcctttgaaggagattcttgcttaattaataataattacatatgtatcatttgcatgcccccttggtgtttttagtattttttaagggccatgaattaataatagtccttacctttgtgcttttgtacgtcttatgatttatcctttgtggggatatcatgtgttgtgttcagttgcctatgtcttattagctagctggctcatctatgtataccttatatttgcctctattataaatgaaaataagtggcactgtctttattt

SEQ ID NO: 12140 - DNA, 445 bp, Glycine max
  Clone ID: jC-gmfl02220138c03d1
aaaaaaaaaaagggccccttttttttatttataaaagagggaaatataagggtttcatagaggagcccctttgttaataaaaaattggcaactgaacacaaaacatgatttccccccaaggggtaaattttaagacgtccaaaagcccaagggggggggctttttttaatttagggcccttaaaaaaaactaaaaacaccgggggggggggcgaaagaaccatatgggattttttttaattaagcaaaaatttcctttaaagggtgggcccaaaggtttgccttttgaaaaaatttttggaaaggcttttaatttttaagggcccggaaatgctttttcttaaccaggttttttatccttggaatttaaagggccctggtaaatttcccccgggacaataaaagaaaagggattgggttcttcaaaaagggtttttttttttttt

SEQ ID NO: 12141 - DNA, 455 bp, Glycine max
  Clone ID: jC-gmfl02220138c04a1
ctttcttgcttgcttgccccatcatttctctttctctctcttttgccctaaaagcacaaccggcttcctacataaagctcactcctctcccctctctcccacttcattctccaacactgtcacatgggtttttctccacaaacctgttctgttccctaagccccacccttttctgttctagcaaataaccgttcttatcaatggctcacaactcagacagtgccacctccaaccttcttcttctctgttccgagaacagcagcacctgcttcgatgatgatggtttggaatgtgatgccgcagatgggtctaactccagaatctcgcaccatgagggtggtggtggatcggagttgctgctggcgtgttctgtggcgcagagtgaggaagctgtgaaggctatggcggagagagaaaaagagcatttgccgaaggatgattacttgatgaagctg

SEQ ID NO: 12142 - DNA, 495 bp, Glycine max
  unsure (1)..(495): unsure at all n locations
  Clone ID: jC-gmfl02220138c04d1
agttctagtntntnnnnaggggnnnnnnggnnnaccggcaaagaaacgaaatagaaanctcnttnnnggtaangcgcncctcgncggcggccgcccttnnnttnnnnnnnntnnnnnnggacctttgnccttatnttatcagtatcattaatatgggantattgttggtgcatattccacatgaactttttaaacgtgatcagcacaaactttttcaaagctcctatttacacatttatgcaactaaagaactaaaatgcttggaactgccatttgacatcgtgcagctatttgcatcctccaaagcctggccatgtgctccaaaagaaaaatatcgattcatcagtttcttattgaaagagccctgcttatagctcaattgtagtgtgccatcaccatccattggtcgattggagcaagagggtcccattatatcaacacgtttttgcttattattcgaagaagagaagagatagatagttcttgaaaagatta

SEQ ID NO: 12143 - DNA, 629 bp, Glycine max
  unsure (1)..(629): unsure at all n locations
  Clone ID: jC-gmfl02220138c05a1
tgaaatactatggccagtagtcaactcgatgacaacatgacggttacgcgcccccttccttagcctggaaatcgggtcgagtgacattgcatacacgtcttcaaaaacatatgcgatggcggtgcctaccctgaagaccggacgctctgtatcggaacttgttcgcatcgacgctatgcgcataaacggatctggcatagctgcagccactcactctcgcgggctgcacgtgcacacgcttccagaactggaggacgactatggcgctctggagccagccttcaccggcgaaaccatgcagctgctgcacgagaagcaccaccagactgacagtcaccaacttcagcagggccctcgagcagatacaagacgcacgctccaggaaagattcctgcgtcatcaatgagctccagggcgccatcgagttcagcggcagaggtgacgtgagccattgtattatccggaaaagtctagctcctgttcgagaaggaggtggagaaccacccatagggtcactgggatgggccattgacacacatcacggctcttttgaagcattagcacanaaagttaacgcagaaggtgctggactacaggggtctggatgggtgttgcttgcactggacaag

SEQ ID NO: 12144 - DNA, 592 bp, Glycine max
  unsure (1)..(592): unsure at all n locations
  Clone ID: jC-gmfl02220138c05d1
agtcttagtccccnnnnaggggnnnnnnggtttncctgcacaagaaactaaagtatnnccngtnngnggtangccctnnccngncggnggncgnccttttttttttttttttttgtccccgatttgcngcttttcnnngctcgnggntcttcggggcgncggcgtgnntttgttngtgttttttctcccctcccctcncntctttttnttccccctctcttcccgggctgcnnntctgtcntctcnggagctntntccngtngccctttcngcctnngagctctctttctcatccccttcnctggcgtgtttccnntttntncctttccccgtgttcttcngatngtctggtcttccattcttgtgctgtnngtngtncgcttgctcccnnncntctntnccnngcnttggggcccaatttggtcccttagtaaccagcgggtcctggttggcagtggtttcaactacaagcctcttcaactctttgtccagaccaagccacacccatccagacccctgtagtgcagcaccttctgcattaactttttggactaatgcttcaaaagagccaaaatgtgtgtcaatggcccat

SEQ ID NO: 12145 - DNA, 504 bp, Glycine max
  Clone ID: jC-gmfl02220138c06a1
ggagtcacagtattcaagatgcggaatcatcagacaaaggggtttcctctgttggacaagtgatagctcttttcctaagatcaaacctcacgatatctgcaacaaataatggaaattctggagttgtttcggatgagcaacatgaaggggaaatagattatgttggggtgctaaatcgagtccttccaaatgacattcggattatgggctggtgtcctgctcctgttgatttccatgcaaggttcagctgtttaagcagggagtataaatatttcttttggaaagaaaacttgaacatcccggccatagaagttgctggaaacaaacttgtaggagaacatgactttagaaacttctgtacaatggatgcagcaaatgtgcacaactataggcggtgcatcacattgtttgagatttcttctacagatgtgacgcacaatgatgatcaactttgggtgattaaaataagaagtaacgcttttctatggcatcaggttcgctgca

SEQ ID NO: 12146 - DNA, 96 bp, Glycine max
  unsure (1)..(96): unsure at all n locations
  Clone ID: jC-gmfl02220138c06d1
ggtcacagttctttnttnnaggggnnnnnnnnncgggggnnnccgggcatagaaagctaanaagaannncnccctnnnnaatncccgcgaagaccc

SEQ ID NO: 12147 - DNA, 441 bp, Glycine max
  Clone ID: jC-gmfl02220138c07a1
tgcggttttcgaatctttcaagatcttgccagaacccttcaaaaccctctcttctctctttcttcgatcgcttcgcctgatattcttttcggctgagatcaagcaaaaatgagcgtggttggatccgactttggtaatgagagctgcattgttgctgtcgcaagacacagggggattgacgttgtgctcaacgatgagtcacagcgtgaaacacctgcaattgtatgctttggtgacaaacagcggctccttgggacagccggggctgcttctactatgatgaacccaaagaattccatctcacagataacgagggtacctggcctacaatctgcggatccggaattgcagcaagatatcaagacgttcccctttgtggacactgtaggacctgatggacaatccttaattcatgcacggcacttgggtgaatctaggaca

SEQ ID NO: 12148 - DNA, 448 bp, Glycine max
  Clone ID: jC-gmfl02220138c07d1
gaaataacacacacacatatatggataagggggcactagcagaagtaattgaaagcaacgaatacaaccagcattacagcatgcttaaatttcattccaaacaagaaaagagcagagaggctctgcttacgaatagcagataaagtacacacagagaactacttacttattcacggatccaaaaaaacagtagactagctcttctatttgtcaaaagcataacgggcttggaaactgcacacccttaactagtgcaatcatgcaaaaaatgcatgatgcctcatcatgattgagagcactcacggattaactggaactggacctggaactccaccaccactcccagggtttggaacctcaaaaccagggtttgggacaaacgtgtcatcaccacctggaacgtaaccacgaccagctggtcctgaccctagtcccctaccaccagtgt

SEQ ID NO: 12149 - DNA, 492 bp, Glycine max
  Clone ID: jC-gmfl02220138c08a1
cttcgtctcaaatctcttcgggctcttgaatcgttccatttcttccaaaatggccaaagacccagttcgcgttctcgtcactggagctgcagggcaaatcgggtatgcatcttgtccctatgactgctaggggagcgacgttgggtcctgaccagcccgtgatcctccacatgcttgacattactccggcagcagagtcattgaatggggttaaaatggaattggtggatgctgcattccctcttcttaaaggcgttgttgccacaactgatgtggttgaggcatgcactggggtcaatatggccgtgatggttggtggcttaccaagaaaagaaggtatggaaaggaaggaagtgatgactaagaacggttccatttacaagtaccaagctattgcccttgaaaagcatgctgctgccaactgcaaggatctggctgctgctaacccagcagacaccaatgcattgatcttgaaagaatttgctccatcta

SEQ ID NO: 12150 - DNA, 286 bp, Glycine max
  Clone ID: jC-gmfl02220138c08d1
ggaacaagagctcataatttatgaaagccctgaaaagggaaaacaacattgttcagggcccccccctgactaagtaataatacccaggaccttattttataaaaattaaggggccccttaaaggcttgatttgagagcttaatctttatccaagggattaggccgcttaaaaggcctagcccctttgttgcttcccaggagggccctcccttgggccccaacggttccaaagatttcggatccctccttttccagctttttttttttaggtggtttggattcaaaa

SEQ ID NO: 12151 - DNA, 552 bp, Glycine max
  Clone ID: jC-gmfl02220138c09a1
gaaggggaagactttgaccagagttctcgctgcaaaatatcacacaattgtattaggatctgacggagaggtatttacctggggtcatcgacttgttactccaaaacgtgtagtagttagtagaaacttaaagaaaagtggaagcactcctttaaaatttcaccgcaaggaacgacttaatgtggtttctatagctgctggaatggtacacagcatggctcttacagatgatggtgcattattttattgggtctattctgatcctgatcttagatgccaacagttgtatgctatgtgtggaaggaatatgacgatttgaagaaatattgtgaggagattgtcatgctcaaccttgattctatatttgcagtatcatcacatactgtagctagtgcctcactagatattctggctaacctcgagaggttgttcgaccagagatcatctgaaccatggagtcaccgtcggctccctactgcaactgctactttacctgccatcatcaacagtgaaaatgatgatcttgagatagagtttcagatgactcgtgac

SEQ ID NO: 12152 - DNA, 500 bp, Glycine max
  Clone ID: jC-gmfl02220138c09d1
gtgtcatatctaggctattaagagacgctggaatttatgctaatcttgaagacatgcactcactacactgatttgaatagtgtaatttccgtgtccatgtacatttctataatatatttagaagaaaacaaaaattggaagaaggataaaacataatattaataagaagcaaggagctgggggaacttcatgagactaagattccctcacatctttgttctcattattatggggttgccacattttcctttgcctgtggagcaatttcttctccatcacttccaggttcactgccaggaactcccaggcttagcagcacttcctcccacttcttagcaggccccttccaggaaagatcttgagccatgcagttctttattatttctgtaaaagctggagttccatagactgcaagggcccttttgacagtctttgctatagcatccacatcagctggatccacagcatcacattcaacactgaaggcacccatctgaaat

SEQ ID NO: 12153 - DNA, 486 bp, Glycine max
  Clone ID: jC-gmfl02220138c10a1
aaagaaagaagttctaaggaagagggttgttgcagaatacaaggtgctagttgtctattggcaattacaacatcagcgatccaaccttagtattcttcaacccagagagatttgtaatactaaattacaacaactgaaacgatggcaggaggagcttatgtagattcaggaaatgcaaagcaatttgatgggaaggtcacggcattcgtattggttacatgctttgtggcagccatgggaggcttactcttcggttatgatcttggaataaccggaggagtgacttctatggaaccatttctgatcaaattctttcccggggtttataaacaaatgcaagatgatgttggccatataagccaatattgcaaatttgacaacgagctccttacactggttacctcttacttgtatgttgctgcattagtagcttctttctttgctctcaccactacaaggatgatgggacgcaaggcctccatgttc

SEQ ID NO: 12154 - DNA, 457 bp, Glycine max
  Clone ID: jC-gmfl02220138c11a1
gtgcagtgatgagcagtgccaaaacacctagataatggcaaccatgctcacactctacattgacaaagatctaggctaaggcttggattacaaacacgagggcttgcttcgccaaagagtcatgcagatcaggcttcagcactggaaccacgctgcaacattcactggctatcatcaatcatctgtggagcctactcatgaccaaatagactatgagcacactggatcactcgcgagacagagaccttacgctatgaacacgaacgtagttcagtcaatgcaaaggcaacagataacagcagatgcatctatggataaacccgaccaaggacttgcgcacatactgcgttcaatggaatacagcaagcatgatattctctgctgacgggtccccaataagggagatcaagaatctgggaacataatgggtaccaatgccaaagagccaatccatgag

SEQ ID NO: 12155 - DNA, 558 bp, Glycine max
  unsure (1)..(558): unsure at all n locations
  Clone ID: jC-gmfl02220138c12a1
cagtattggtctgcttaactataacatccagctatacactgattactcagatttatttaatctcactatcactctcactgcaaaaacaacacacagcaacaatttaataaataaataaataaaagtggaaaagaagaaaagcccagatttataatcacaatctagagagagaaacaagcagactatgaaaccttctatctccgaatttctctctctaaaaccaccgtctcgttctcagagcaactgcactttctctccgactctcgctcggaggagcacttggatgtgagtggtttccacatcggttagatcggccatggcggaggttcncggcgaagggggagcagaggcgacagtggccacgccggtgctgccgttggcggtgtctggatcgctcaaggaagggaagagctcgtcgcggaggcgcgcgcattcgatgagggcgagcctcgacgcggacgagttcatgaacctgttgcacggttcggatccggtgaaggtggagctcaatcggttggagatgaaatgagagatatgacagagaattatcagaagcgc

SEQ ID NO: 12156 - DNA, 502 bp, Glycine max
  unsure (1)..(502): unsure at all n locations
  Clone ID: jC-gmfl02220138d01a1
gttgntgaggtgtttcatttgttaaactaacaacaacacaaggccatcatcatggcagctgcttccccaatggcaagccaactcaagtccaccttcactaggactcttgtagctcccaagggcctctctgcctcttcaccacttcacctcgtgccttctagaaggcaatttagcttcactgttaaggccatccaatcagagaagccaacctatcaagtgattcagccaatcaacggtgacccattcattggaagcctggaaaccccagttacatccagccctttgatcgcatggtacttgtccaacctgcccgcatacagaaccgcagtgagcccactactaagagggatcgaggtgggcctggcccacggataccttctggtgggcccattcgtgaaggccgggcctcttaggaacaccgagatcgcccggcaagcgggctctctggccgcccgtgggcttgtggtgatcctcagcctttgcctcacaatctatgggattt

SEQ ID NO: 12157 - DNA, 419 bp, Glycine max
  Clone ID: jC-gmfl02220138d01d1
aaaaaagggggagagtgggagagaggaatgaacattatcccatggcgggaggcacacaaaacatcatttacacccatctttatgggacaaatagtccattcatggggaaggaataagaaaaagtaaagaaagctaggaagcacatccatcattggatggagtatggaagggccaagacgtagagggggaagggggcccaaataacacccgaaatgcccccgaaaaaaaagcccccggggaactgggcccacccatcaacagtttggagctgatcgggctcctttttgcggcccgtcaagggcagcgacggagcaggggagggggctccttcgttgagggaggaaaccccataaattgggaggcaaaggctgaggatcaccacaagcccaccggcggccaaagagcccgcttgcccggcg

SEQ ID NO: 12158 - DNA, 537 bp, Glycine max
  unsure (1)..(537): unsure at all n locations
  Clone ID: jC-gmfl02220138d02a1
ttcatattttgcattgcctcattgctacctcttcctcaacttagtatttatttcaaaaatccatttgcaatccatttcaaaaatcacattctgcagtcctatttccgtgatccagtgcatggattgcagcaaaccaagcgtctcaccttcgttgacttgctgcactgaatttatcatcacaaggtaggaggaaaaggtgataaaattaacaacatggatttaagaattaatactatattttcgtacctcttttgcatttttaattttttttcttcttaaaaatactatctcttttcattaactcttttttgaaacatattttgatatttataaatatttttaaatttagtttctgaattatattaaaaatatcctggaaattatcaacgtttatttcttcttttcttttctctttttcattattacaacaattactagttactagtgtgtgcagaanaaggtagattgatgtattatgtgttaaaacttttaggaatacatttgaatgttttatgtattctgaaaaattggttttta

SEQ ID NO: 12159 - DNA, 408 bp, Glycine max
  unsure (1)..(408): unsure at all n locations
  Clone ID: jC-gmfl02220138d02d1
agccnttcggcnntccncnnaggggnnnnnnagtggnnnncccggcatatgaaccattannagtatnncncatnnnngggtagnnccgnctcccagncggcggccgccctttttttttttttttttttttttttttttttttttttttttttttttttttttttttggggttttgggttttttttttttctttttttctccttcttcccttttttctttttttttctctttttttttccctnttcctcccccccccccccccctggctttntgccttgggtgctctttctcgccccctgccccccttgggggggggccccccccttggtgtggggccctcccccccccggcccccccgcccggggccccttgtgccttctttttcctcgtcccccccccttttcccct

SEQ ID NO: 12160 - DNA, 460 bp, Glycine max
  Clone ID: jC-gmfl02220138d03a1
ctggggatgtagactttgttttttagtgttgtgggagagaccctcttttggtgtttggtgagggagagtatggtgtcactgacatgttttatgctgcagccaggggcaagaactgtgaggtctttaagctcctgcttcattctgctctttcaagaaaggagtgccttggtggcagtgaagcagaattggaagagaagttggatgaaggttctaaggttttcaagagggatgtgatgaatagggccattcatgctgctgccagaggagggaattgggaaatactgaagcagattctaggaagtgtttctgtttctcaggttttgtcttatagagatgccctaggatgtactgtcttgcatgcagcagctgcaagaggccacgttgaggtggtgagaaatctaattgaatcctatgatatcatcaactcagctaatgctcaaggcaatacagcattacatgt

SEQ ID NO: 12161 - DNA, 463 bp, Glycine max
  Clone ID: jC-gmfl02220138d03d1
gaacttatattatcagtatcattaatattaattatgattgttgcatattccacatgaactttttaaacgtgatcagcacaaactttttcaaagctcctatttaacatttatgcaactaaagaactaaaatgcttggaactgccatttgacatcgtgcagctatttgcatcctccaaagcctggccatgtgctccaaaagaaaaatatcgattcatcagtttcttattgaaagagccctgcttatagctcaattgtagtgtgccatcaccatccattggtcgattggagcaagagggtcccattatatcaacacgtttttgcttattattcgaagaatgagaagagatagatagttcttgaaaaagattagatgttgaatgaacaggtagaggcatttgtggctttaccttaatcacaccttgtactagacctgcatgaaaatgttttttggctgaaggactag

SEQ ID NO: 12162 - DNA, 533 bp, Glycine max
  Clone ID: jC-gmfl02220138d04a1
cgtgtccaaagctttacctcaataagtcattttgaggtcaagcagatgataaaaaaaatatctaggcatgcctcatcttcaaaagttacaaatttaaatgaagtgcttatatctcttattagtactattgtatgtagaattgttttggggagaaggtatgaagaggagggatctgaaggtagcagattccataagttgttcaatgagcgcgaagctatgttgggtaacttctttgtttcagattatattcctttcatgggttggattgataaactcaggggactggatgcacgtcttgaacgcaatttcaaggagatggataagttctaccaagaagccattgatgaacacatgaattctaagaaaaagactccagaggaagaggatttagttgatgtcttacttcaactgacagagaacatcacgttttccatagatctcaccaatgataacatcaaagcagtgctcttgaacttacttgtaggagctacaggtacaactgaagtcacaaccatctgggccatgactgaact

SEQ ID NO: 12163 - DNA, 669 bp, Glycine max
  unsure (1)..(669): unsure at all n locations
  Clone ID: jC-gmfl02220138d04d1
agagannggggcngggatgnnganattnccattnnnggtaagggcgctcacccgtcggcggccgccctttttttttttttttttttttttccatttaatttttttctttcaatttgtcgcccccaagggattgagaaacatttgaaatacaaagtaatacaactatctatacaaatagcatcctacaagattcagaacaaatgcttagaaggcaactgtattgctagtttgttctctcttatcagagcaatctaagcaaagcaataatgaacttaaacttccagattaagcatcgatttcacagcttcagtatattcacttgtattgcttcatctgttcctcaattccttggtttgtatttggacttgctctatcagcaaaacaaatttgcatcatcattttttggcgtcattttcccatacattgtcccaagaaccacttggagcaggctttgttccctcaatgaagttctgatttacagaggaattgtgttgcccaggtagtggaagtccatctggacctggagggttaatcttctttggtttagttctgattccaagcaaccgcaacacaaatctagctagctctccatacagtacaccagaacgatcaaaaagctgaagaagtgcagtcatgaacatatggaaagcctgcgtgttctggtctatg

SEQ ID NO: 12164 - DNA, 492 bp, Glycine max
  unsure (1)..(492): unsure at all n locations
  Clone ID: jC-gmfl02220138d05a1
gatatatctgatgcctattattcggatangcttcccatttatgacgttgcaggcacccttccgtaagcccggattccggttcagggcccttcgtagccgtccacagactcctactacatgcactcgacagccaaccccacagggaccctttttgctacaacgatgggttctccatccacatgcaatcccatatctacagtctgcacataggctgtaggcgacaattcatacatttacaacccactcaaattcaactccggctatcgcgcgaggctcactcccaccagcagggccttcgtgatactcctcgaccagcagcaccgccaagacgaacatcgcgaactccaacgtttggccctatgcgttcaaactggccgatgtctgtggagattccgccagcggcaagatcgtaaggtcgccctcgagatcaacggcggctggcacctaaaccattgcaactgctggactagtctaagggctgttgaagaagga

SEQ ID NO: 12165 - DNA, 423 bp, Glycine max
  unsure (1)..(423): unsure at all n locations
  Clone ID: jC-gmfl02220138d05d1
tttntttttttttttttagtttaagatttgcagccatacaatgctcgaggggggtcaggggaactacataaaagggttagcggcattgaccacatcagatcacatcattggagtccacatctctcacggtgctgcaagggtgtcatgtcaagagctatatcaaggagcacatgcagactaagagctctctttctcatacactacactggcatagggccaattaacaacatttccaaaggttcgtcagatagtctggtctaacattcttggactgggggaggacgcatgctcccaaacatgcaataccaagcaatggaaccaaagtcggtccctgaggaaccagcggggcctggaaggcgggggatagaactacaagcctgttcagcggtttggacaaacgaagccacaccgatccagacccct

SEQ ID NO: 12166 - DNA, 519 bp, Glycine max
  Clone ID: jC-gmfl02220138d06a1
gagcgagcgagcgagcagtatcaaatgtggatctgggattgggaaggcgagggattgcgctgcgtctcttcctcttctctttcgattcatccctcattcataatcttccaatccaacaacctcagcctcacactcacacatacacacatatgaacgcgtatcgtccctcccatgacttcaaagcgcatcctcaaggagctcaaggactcgcagaaagacccaccaacttcttgctgcgctgttccagtcgctgaggacatgtcccattggcaagcaacgattatgggtcctgctgatagtccttatgctggaggtgtattcctagtcactattcactttcctccggattatcctttcgaacctgccatggttgactttaggaccaaggcgtttcatccgaacatcaacagcaatggtagcattagtcttgctatccttaaagagcattggagccctgcactcaccatctatgacgcactgctttctataggctcattgctgactgatccaaatcctgat

SEQ ID NO: 12167 - DNA, 539 bp, Glycine max
  unsure (1)..(539): unsure at all n locations
  Clone ID: jC-gmfl02220138d06d1
tttnttttttttttttttttttatagttttaattttgatcaatcttcacatggcatctgatcaaaatttgttattgtatattaaaaattccgattaatgtaacagtgaaaattgagtcgaccatgatgaccgtggaatctagattatataataatttcttccggagaggctttaatgaggctctcatgcagccatggcttcctcgtcatcgatctcgttctcgccttcttcgctggcggcggcgtcttgatactgttgatactctgccaccaagtcattcatgttgctctcagcctcggtaaactccatctcatccattccctcggcagtgtaccaatgcaagaaggcttttctcttgaacatgacagtgaactgctcggagacgcggcgaaacatctcctgaatggaggtggagttccccatgaaggtggaggacatggagaggcccgtgggagggatgtcacagacgctggacttgacgttgttggggatccactccacgaagtaggaggagttcttgttctgcacgttgatcatct

SEQ ID NO: 12168 - DNA, 522 bp, Glycine max
  Clone ID: jC-gmfl02220138d07a1
gtcattttgatctttagctattgtgttggtccattcatttatactttaaattttaattttaatggccatcgtgtctcattctatttgttcaaacctttgggcattttcagtcttattttattattcaatattaggatgaaatttatgtacgaaatcatcagacttaatcttcccagctaaatattattccaagtctttactatttcttggagcatgaacaatttcagttcttgatgagacactaccctggcctgaatcagttctcttttctgtccttgtttttggcactatattaattcaaatttcctttaatcattaaaatccctgactaagtcctaaccatactttataaacactattgatagtatgatatttaccttccgagtaattggggctaacaagttatagaaaatgtgaatgacagtatcacttaaagcacctctgtgagatgagatacaccagaatgacagtcttggtccttctctttctgcttataacttatgtcttatagtatcctgatct

SEQ ID NO: 12169 - DNA, 494 bp, Glycine max
  Clone ID: jC-gmfl02220138d07d1
gccttacaacttttaacatatatatttcagaattcagaactgagataataatggaattatgaatattcttggtacaagcgaagaagtctttagtgcgattttcaaaccgaaattctataataccatagtaagaactaagaagcaacatgcaagttcagaggtaggaaaagtaaagaatgactgctttcttctcaaataagagtagcgaaatccaaacacaaataagttcatgtaaagagaatttcattggtacatgaactttataatattaaacggggtaagaactcattgtgaccttgaatgaaataaagaaaatgaccttatgcatatttttgcaaataagaagctatcgtcctatcactttccaatgctttttgtctgtcagaagggtagtacaaatgcctatacttcagggtttcatcaccagctccctgatataatcaagaacttcctcgagattcactgtccaagcaactgcaacaggagaataaccc

SEQ ID NO: 12170 - DNA, 441 bp, Glycine max
  Clone ID: jC-gmfl02220138d08a1
gctcaaccacgatgacgcaacaagattcaaccatgtcactaatctcacttacaactacggttactcttgtcatgcctcacactgtacaatcgtactgcggaatcaaccaccatcatcaatgtgtggcccgaactcaggaaccttacatggtccccaccataccaaaccaccctgctctgctacacattcaccatgaccatcaccaacaaccaccacagcaagcatctctccatcgccatacggctctaccagaaccacatcaaagttagagcaccaccacgcacttgtcccacatgcagtcaacatctccaacatacacctaccaccactgcagactctcaaggtcacagtggtggacactgctgaagaactcgtacacgccgaggacgacacctacactctgtgcatactgcctgtctcataggctagcctcactgaaaa

SEQ ID NO: 12171 - DNA, 413 bp, Glycine max
  unsure (1)..(413): unsure at all n locations
  Clone ID: jC-gmfl02220138d08d1
atagaagagtgttccagngaattccacattataagcaaatgaaatagccagaatatcgggcaaatccaaataatgctgcattgtcacatagtctacataacctgggaaactaacagcaatcaaatatgttcgccatttggaattggaatttgaatacaaatacagtgcatcaataatataaccctatgtacacagccaatatctgactgaaatttgatacagaatagtatcaatttgtatcataataaaatggcacagagaaatttatgtgaaggtaaaggggaagtgtatcagctggtgttataattcttcggctttcatttacttcatcattggctccttcctgcacgttcacatttcctttatctgcttaagcactgctgaccttgtttttacgcccaaaggtccaatgg

SEQ ID NO: 12172 - DNA, 555 bp, Glycine max
  unsure (1)..(555): unsure at all n locations
  Clone ID: jC-gmfl02220138d09a1
cttccaaatgatgcacttcttatttataaaaatttaggttaaatttaaaaggataaaaagaagagagggaaagagagaggaacaaggggtcttggggcagggtctagtgcttataaatactctggcattagccactagctttcacaaactgaggcacacaaaaaaatgggttcttcttcttccatatggaccgtgtgtttgattttggcatcactggcctctgcagcactctgtgccaaccctcgtagaccagtggatgtacaatttggccgaaactacgtgcccacatgggcctttgatcacatcaaatacttcaatggaggttctgacattcagcttcatcttgacaagtacactggtactggcttccagtccaaagggtcatacttgtttggtcacttcagcatgtacataaagatggttcctggagattcagctggcacagtcactgctttctatatatcttcccaaaatgcggagcacgacgagatagactctgagttcttggggaacagaacaggacaaccttacattntgcaaacaaatgttttcaca

SEQ ID NO: 12173 - DNA, 445 bp, Glycine max
  Clone ID: jC-gmfl02220138d09d1
cttaacaatatcataatatccctgaaagagggaagggatctattaagttccaaggcaaataactacaacacactaattaagaaacaacaaatgacaaatcgagcttgcccggagaaacaaaccctagcagtagcacacacataatttagatttattcatggtttacctcaggataaacacgctttatccttacgtccttaatggaaacaggcttgtatccatatatgggagccagtgtgacagaaatactatcatcgtctttgagttactcccaaggctttgaactgatacgttaatggcaatttgaaagaagctcaggagatgttgttatggttgacatgcggagagtgaggcaaagtcacaaagctttcccgaaaactctgaatcgtggggtccaatctcattattggcttggtcgttgatgaacacatcaaaccttacacca

SEQ ID NO: 12174 - DNA, 577 bp, Glycine max
  Clone ID: jC-gmfl02220138d10a1
gagagagagagagagggagagatcactgctcctgaactataagctatatagcacttggataatcttacaacaatggaggggaccagcagccaaagcacgtgtgccttcatccctagcacaatcgagacaccaagtccaagcatccctgagatatcatcatgatcttaccctggctctcttgcaagaattgcacaaagttaccctaacggcttttccagaaaggtgttagcggagattatagggacattttagttggtgtttgtgggaagtggttctgctgggctaagcaagattgatgagaggatggtgtcaaagcttggagcatcacttgcaggaggactcatagtgacggtcatgatatactcaattggacacatatcaggggcacacatgaattccgaggattctcttgctatcaccgccggcaggcatcttgcttggccacagttcccattttatatagcagctcaactcactggtgccatttctgcttcatacacattgcgagagctgctacgaccatcacatgagattggaggagcatcacctgctggatcacacattcaagctctaatca

SEQ ID NO: 12175 - DNA, 531 bp, Glycine max
  Clone ID: jC-gmfl02220138d11a1
cccaacacaagtaacgaagaagtcatttgtatctcgcaagtttcgatccccagaaggaaaataattatgcacgaaattagagaccctgcaattcggctcttcggtcagaagatcccttttcctgaagatgttgacaaagaagaagagagtgctgaggatagagaacaagagatggaagaacatgaagacgaacgatacaaggatactagagatgaaaatgttactaatgaagagctagaagctgatcctcctctagatgctgaagagactaagatttcaggcacattccatgaggctatcgtgaaccccaaaacaccttccatagaagaagagacagccaaatcaaacggtggcatatcatagaaggaacaaggcgatgcagtcaactcacaagagaaaaccctgaagaagcctgataaagtgctaccatgcccccggtggcaaagcatggacacttaattctgttactacaacaactacaatgtcaaccagccgcgttatttctgctaagcctgtctaagatactggact

SEQ ID NO: 12176 - DNA, 236 bp, Glycine max
  Clone ID: jC-gmfl02220138d12a1
gaagagagacgagcagtcaaaaaccatcacaaggggcaaccacacgacagcggacacggacaaagtctcaggccacaacagggacgccgaacacgaggacgagcagcgccaaagaggcgaacacctaggggagcagcctggcgaccacaatgctgcagccactggacagcatcaagctgatgagcacactcctcagcaccaaggaggctaagagcacaaagacgggtcgcgagaca

SEQ ID NO: 12177 - DNA, 539 bp, Glycine max
  Clone ID: jC-gmfl02220138e01a1
cttcaaaacactcataacttatagcacaatgcttagctcatccttgagttaaaaaatggcagcagcttcttccatggctctctcatccccatccttggctggcaaggccgtgaagctgggcccatcagccccagaagtgggaagggtgagcatgaggaagaccgtcaccaagcaggtctcctcaggaagcccatggtacggcccagaccgagtcaagtacttgggcccattctctggcgagcccccgtcctacctaaccggtgagttcccaggcgactacggctgggacactgctgggctttccgcagacccagaaaccttcgccaagaaccgtgaactcgaagtgatccactccaggtgggccatgctcggagccttgggctgcgtcttcccggagttgctgtcccgcaacggagtgaagttcggagaagccgtgtggttcaaggccgggtcccagatcttcagcgagggtgggctcgactacttgggcaacccaagcctgatccacgcccagagcatcctcgtcatctgggccacac

SEQ ID NO: 12178 - DNA, 540 bp, Glycine max
  unsure (1)..(540): unsure at all n locations
  Clone ID: jC-gmfl02220138e01d1
tttntttttttttttttttttttggaattagcattttacaataagtgggattcggatacgcaagagaattcacattatctgaagtactccaccaaacacaaatctaaaaactctcaaaaggcatttcggtctttgacgctcactttccggggacgaagatgggggcataggcccaggcgttgttgttgacagggtcagcaaggtgatcggcgaggttctccaatggaccctttccggggacaatggcctgaacaaagaagccaaacatagagaacatggccaatcgtccgttcttgagttccttcaccttaagctcagcaaaagcctctgggtcatcagcaaggcccaatgggtcgaagctgccacctgggtagattgggtcagtgacctcaccgagggggccaccagcaatacgggaaccttcaacggcacccattaggataacttgcgtggcccagatggcgaggatgctcggggcgtggatcaggcttgggttgcccaagtagcccagcccaccctcgctgaagatctgggacccgg

SEQ ID NO: 12179 - DNA, 488 bp, Glycine max
  Clone ID: jC-gmfl02220138e02a1
aaaaaaactagtaaaggttgttttagtattggagagaggacatagttgtcgacaaacacaaacagtgtagcttagcaaatctgtgtttgttgtgagcgacgactcttgtgcgagtgaaagcagcagcaataatgttgacgacgatgaatcttcctctgcacacttcggtttgggtaaagtcccggcggagttggtgttgctacgcctcactttcgcagcccgataggaaagagatccgtctcggtttgcccagcaaaggtcgcatgtccgctgacaccctccaacttctccagaattgtcaattgtcagtgaagcaggtcaatcctcgacagtatgttgctgaaattcctcagctatccaacctcgacgtttggtttcagaggcccaaagacatagtaagaaaattgttatctggagatcttgaccttggtattgtgggactcgatactttcagtgaacatggccagggtaatgatgatcttatcatt

SEQ ID NO: 12180 - DNA, 508 bp, Glycine max
  Clone ID: jC-gmfl02220138e02d1
caacttaaatagcaatccccgcggaaaggaccaggaacatagtcacttctctagcgattaccagtgttatgaagagaacgaaaggaaaaagatacaggctttctacaaaaatttcaatctataaagcgatgtggaaataggagttcctctatgaataatgagctaaaaatgcaatttcagttatctacgtcctccattttggtgtacttggcttttgcagctttcaccatagatttaatgctcatctacttcgacagtatctgaaaaacgaaacatcccctaatgactccattgattgatcataaatggctatagcccaagtttagataggagctgacgccatcttggagtttcttcatcaaaaatataggtcaagggtgatataagaactccactgcctccaatcgctctcagttgttgtatagacttgtatagtgccttctgaggcacacatatgactatggcataatagtctgctgttaccttcccatcacgcttgcagaaaaca

SEQ ID NO: 12181 - DNA, 488 bp, Glycine max
  Clone ID: jC-gmfl02220138e03a1
ggcattggaagaagattcttttatgcctttattgcatcattatgatgggccaaagtttcgtcttgagctgtcagttccagagactctggatctgttggacctatgtgaacaagctggttcagcagcataagcaagaatcgcacaaggaatgaatgtgcaaaataggtagtaggttttggtgtgccagctgtgtggttttggcagattttccgtgaagcgtaagcttggaaagtggatcatcatcttcttggggaagtaaagggagcgtgttgagagtgagagaccctttgttggtgaataaaaatggttgtggtatctatccccttaaaggtgctttgtagcatttgcatgaacatttaatacctttgtatgattaagtaaaagtacagacttggtatgcaatcaaagagactactgtttgtactgctaaaacatgaatctgttgaaccaagaaaaaaattgaagtcaaaagcttcatgtattactaa

SEQ ID NO: 12182 - DNA, 470 bp, Glycine max
  Clone ID: jC-gmfl02220138e03d1
ctatgtaattcatgaagcttttgacttcaattggtttcttggttcaacagattcatgttttagcagtacaaacagtagtctctttgattgcataccaagtctgtacttttacttaatcatacaaaggtattaaatgttcatgcaaatgctacaaagcacctttaaggggatagataccacaaccatttttattcaccaacaaagggtctctcactctcaacacgctccctttacttccccaagaagatgatgatccactttccaagcttacgcttcacggaaaatctgccaaaaccacacagctggcacaccaaaacctactacctattttgcacattcattccttgtgcgaatcttgcttatgctgctgaaccagcttgttcacataggtccaacagatccagagtctctggaactgacagctcaagacgaaactttggcccatcataatgatgcaatactggcctgaa

SEQ ID NO: 12183 - DNA, 505 bp, Glycine max
  Clone ID: jC-gmfl02220138e04a1
ggctgttgcgagctataagctagatcctcctgaggagaatatgaagacgtccgctcggggggatgctgcaggcgttctggcggcatggccatgccatggcgcaggctaccaaaggttccctctgcgaatgaaaactggctatggtgagcgttcttcggaggtaaaatgcgcatgtttaaggcttgctgcggaagcacacaacatccgagcctttaaaaccattcctgaagagggcgtagaaccaacccaggactacattaacggcgaacaatttagatcagactctaaaacagctaaccaacaagctatcttttatgctagtgaacgcgaagtccatcacaacgacatatgtatatgcggcatagataacaccgcactctctaatatcccatactatgaaaaacatggatatggggcggaggaatttaatgaaaccttatatgacgaatgggttaacaagggcgacgcaccggcattgccagagactcttaaaaactacaacaag

SEQ ID NO: 12184 - DNA, 631 bp, Glycine max
  unsure (1)..(631): unsure at all n locations
  Clone ID: jC-gmfl02220138e04d1
nggaggggagggttggagcttgnagtatnctnattnngggttaaanccagctaccagtcggcggccgccctttttttttttttttaaattcaaaacctatagttttattaattagcagatgttctcatcgttaaaggtcaacatcttatagactacttataccaccaatctactttcaaaatactgagacatctaaaggccacacatgcaaagagttggagaatcatggtggcttctacaaacttgcgaaagagttcgccacatcaatcacaaagcgatatttcacatcagctttgctaagcctttccatggctgtgttgatctgatccatcttaatcagctcaatatctgcagttatgttgtgctttgcgcagaaatcaagcatttcctgagtttctttgatccctccaaagttgctcccccctataagtttccgtcctgcaactaatggaaagataggaagctcaaggggcttgttaggcaaccctacagtaactagcttcccattcagcttcagcagaccaagcagtggaatcagggaatgaacagcagaaattgtgtctatgatatagtccatggttcccaaagccaccttcatttttgcagggtctgatgaaacaaggaaagaatc

SEQ ID NO: 12185 - DNA, 571 bp, Glycine max
  Clone ID: jC-gmfl02220138e05a1
gagcgagcgagcgagcagtttcaaatagaggatttgggattgggaaggcgagggattgcgctgcgtctcttcctcttctctttcgattcatccctcattcataatcttccaatccaacaacctcagcctcacactcacacatacacacatctgaacgcgtatcgtccctcccatggcttcaaagcgcatcctcaaggagctcaaggacttgcagaaagacccaccaacttcttgcagcgctggtccagtagctgaggacatgttccattggcaagcaacgattatgggtcctgctgatagtccttatgctggaggtgtattcctagtcactattcactttcctccggattatcctttcaaacctcccaaggttgcctttaggactaaagcgtttcatccgaacatcaacagcaatggtagcatttgtcttgatatccttaaggagcagtggagccctgcactcaccatctctaaggtactgctgtctatctgctcattgctgactgatccaaatcctgatgatccacttgatcctgatatcgctcacatgtaccaaactgaccgggccaag

SEQ ID NO: 12186 - DNA, 380 bp, Glycine max
  unsure (1)..(380): unsure at all n locations
  Clone ID: jC-gmfl02220138e05d1
tttntttttttttttttttttttccttttttatgttgttctttttttgctgggggttgggtttttttctttaaaaggtacacccaaatcccccatttttgaacccggggtaaaaatttgctaaaaatttggaacacccccccccttgggcccccccccatcaaaagtggggtttggcccccgccctttttatcttttattggggaaaaaacctggggggaggcttggggggcccccccccaaaaaagggggcccttattataggcggggggggggctccagaaatcccccccgctgccttggggggaaacatctacgtcccgctcgcccggaaaattgccccgggcgcccatacaagcggggggggctttggcccccaaa

SEQ ID NO: 12187 - DNA, 495 bp, Glycine max
  Clone ID: jC-gmfl02220138e06a1
cgcggcgtcacccaccgagacctcatgccggagaatctcctcttagaccaaaacgaagacctcaaagtctccgacttcggactctccacgctgccggagcatcgccgcgccgacggcatgctcgtaaccccgtgtgggacccctgcttacgttgcacccgaggtcttaaagaaaaaaggttacgacggttcaaaggccgatttatggccctgtggggtaatcctcttcgctttgctttgtggctatttacccttacaaggtgagaacgttatgagaatttaccgaagggctttcagagctgaatatgaattcccagaatggatttctccgcagggcaggaatcttatttcgaatctcctcgatgctgatcctggcaagaggtattccattcctgatataacgagggacccttggtttcaagttgggttcatgaagcccttcgcgttttctattaaggaggcttacgttgtagacaacattgatttcgacgatgtg

SEQ ID NO: 12188 - DNA, 350 bp, Glycine max
  unsure (1)..(350): unsure at all n locations
  Clone ID: jC-gmfl02220138e06d1
cccccctccccccccgggcccggttcccccccctggggggccccccccccccggttttccctctccttccttggccccccccttgtttntgggggttcngccccctccccccggggncaaagntttgtcttccggtctctttttttggccgggcccccccccccctcttttttttaaaaacccctccccccccgggggggggccccccctctataaaataaataaaagggttgggcccccctttgttccttatagacggggccccccccccccccccaggggttaaccaaaaacaccggggggattcccttggtccccaacccccccccacaaccttgaaagggcccccc

SEQ ID NO: 12189 - DNA, 549 bp, Glycine max
  Clone ID: jC-gmfl02220138e07a1
cttctcattaacacactacgcgtgctagaacctctgctctcctcttgcttttgatagagaagaatgaagcgagaagatgtcagacgcgttctgcagcgactgcaagaggcagacggaggtggtgtttgaccactctgccggcgacacggtgtgctcggagtgcggcctcgtactggagtcccactctatcgacgagacctctgagtggcgtaccttcgccaacgagtccggtgacaacgatcccaatcgtgtcggcgggccctccaaccccctcctcaccgacggcggcctctccaccgtcatcgccaagcccaacggcggcggaggtggcggcgagttcctctactccttcctcggtcgctggcagaaccgcggctccaaccctgatcgcgccctcatcatcgacttcaagaccatcgccaccatgtccgacaggttgggactcgttgcgaccatcaaggatcgggcaaatgagatatataagagggttgaagatcaaaagtctagtagaggaagaaatcaagatgctttattggctgcttgtctcta

SEQ ID NO: 12190 - DNA, 341 bp, Glycine max
  Clone ID: jC-gmfl02220138e07d1
ccccccaaaaaagggggggggggcccttgaaacaaaaaaaataaaccctccggccccggaaaatgatggaatacccccgatttttgaaaaaaaaaaacccccccctttgggttccccccccaaccttggcgggggcccgatccccctttgggccttttttgggaacccagcaccccagctttttcccccggggggggatccaaaaaaaggggtttaggggctgggaccaaaaaaaaaaggggggccaaccccgggaaacgggaccccttttcctcccaacaaccccaaaattttgcgggggggggccgaagtttccctttggggctttctttttcttggaa

SEQ ID NO: 12191 - DNA, 144 bp, Glycine max
  Clone ID: jC-gmfl02220138e08a1
ctcaagttcgacacaaagtgcagaaatggagaaaaaggaaatatgtgtcttcctttcctgggagtgatagggcttatcgccatggtgtttcaattcaaaagtctgaagtttctttgtctttgatttcatgaagatgacatataa

SEQ ID NO: 12192 - DNA, 122 bp, Glycine max
  unsure (1)..(122): unsure at all n locations
  Clone ID: jC-gmfl02220138e08d1
caaagttaaagaaactncaaacttttgaagggaaacaccatggcgataaaccctatcactcccaggaaaggaagacacatatttcctttttctccatttctgcactttggggcgaacttgag

SEQ ID NO: 12193 - DNA, 404 bp, Glycine max
  Clone ID: jC-gmfl02220138e09a1
atcgatccttaaacaataagagaatattagtctatataatatcagtgctaattaggcgtgtcaaaagggctaatcgtgctcgtttatatctaaatagccgtagctatgtcaagactttgtgcatgcgtgtagtacttgctcatgaattttgagtgcatccttttcatcaagctgagactagaagatcctggtgaacattcaagttcatgtgctaaaaacctgctcctgatgattaagcatgcaacggacatctgtacacgcatggaacatggaccttgagcatctccaagacgccttgaccatgaaagacatactacgtcgctggaaacctactgggcgccgaacatgtctacggaagctgtcacgtcaagcatgctatgtacgggcacaatttatctcctgtg
